United States Patent Application Publication US 2017/0114356 A1 - sequence listing, part 97

SEQ ID NO: 167301 - protein, 341 aa, Zea Mays
MAAATGYSDAPTDEQLLAYAELPKHGRDMAEVFAVRIPATVGGNLPPRGSIVFYGGHCCSDFIYSWSPLEEEEDTSKQICDSQGNLVLTGPSLATSAYSPIAFFLYLHDGSPQAGEATEDDEDIGRILCDCIGDDFSNYNRAIVETVQTGYGPAEVIYAVLSNGVQGRVAVKLARPPVSKAGEEDATTILGRIVARSKLFDVGCVLFYKEGDNGVNVRPGGLIQLAREALAVPLHMPLTIELDLHRCSGDEIVGGVLEFNPATNGQHTERLVGENGAELEVAISWSQYPWRPAQRLVAGLLQADARCVFLLHLPLPVCGDDCSFGLVMVSVVVMLKLGHCQ

SEQ ID NO: 167302 - protein, 291 aa, Zea Mays
MAAATGYSDAPTDEQLLAYAELPKHGRDMAEVFAVRIPATVGGNLPPRGSIVFYGGHCCSDFIYSWSPLEEEEDTSKQICDSQGNLVLTGPSLATSAYSPIAFFLYLHDGSPQAGEATEDDEDIGRILCDCIGDDFSNYNRAIVETVQTGYGPAEVIYAVLSNGVQGRVAVKLARPPVSKAGEEDATTILGRIVARSKLFDVGCVLFYKEGDNGVNVRPGGLIQLAREALAVPLHMPLTIELDLHRCSGDEIVGGVLEFNPATNGQHTERLVGENGAELEVAISWSQYPWH

SEQ ID NO: 167303 - protein, 175 aa, Zea Mays
MLLLLFFSVLAAVAAFLLFKFATVVDGDLTLVSRGPPLRERVDGKVVWITGASRGIGEVLAMHFANLGAKLILSARNKDALARVKKNILSKNPDSRVEMLPMDLSAGEESLKEVVHVAESFFSNAGVDYMVHNAAFERPKRRALEESEEGLKIGYIECQCLRNYYFNSPSSTLHA

SEQ ID NO: 167304 - protein, 322 aa, Zea Mays
MLIWIAGLPLYRNQLPTSSPITRILQVLVAAFKKRNVALPANPSELKQISQDDAGSLEILHRTDGFRCLDKAAVDTGRTGGWILCSITQQGNTMDTRLGALHISPATLFIIPTLFQMVILVVYDRFIVPFLRRITGYVGGVTHLQRIGIGFLSTIVATGVAAIVEASRKKVARDSGLVDATAGIPISVFWLTIQFFLLGIVDVTSFVGLLEFFYSEASTGMKSIGSSIFYCILGVSAWLGSLLIQVANRVTRHRDGTGGWLDGTNLNKGKLDRFYWLLAVLELVSLLVYVFFASRYVYGNDQRVVADEDNNTAPSDGTINVI

SEQ ID NO: 167305 - protein, 137 aa, Zea Mays
MKQQLPLSLPGSSSPSRCCSLPPLQADAPTKAASPTTAPCPWPSLSLQRGCYRPPHASSKQCPPLSAASGCSQPLPCSYGHFQPSPMADPNSSHGRRSLPAPVFSMVAALWNHATSAAPMVISKYLCCFTSSLLIPR

SEQ ID NO: 167306 - protein, 122 aa, Zea Mays
MKQQLPLSLPGSSSPSRCCSLPPLQADAPTKAASPTTAPCPWPSLSLQRGCYRPPHASSKQCPPLSAASGCSQPLPCSYGHFQPSPMADPNSSHGRRSLPAPVFSMVAALWNHATSAAPMVR

SEQ ID NO: 167307 - protein, 378 aa, Zea Mays
MKVAIERTGGLVVLSESFGHSVFKDSFKRIFEGGEQSLGLSFNGTIEINYSKDIKVQGIIGPCTSLEKKGAVCADTIVGQGNTTAWKMCGLDRNTSLTVFFDVSPSERSSQPGHQNPHLYIQFVTSYQHPEGQMRVRVTTICRKWVDGSTNTEEEFDATRWLDRSLIRLCSRFGDYRKDDPSSFSLHSNFSLFPQFMFNLRRSQFVQVFNNSPDETAYFRMLLNRESITNSVAMIQPSLISFSFDSPPSPVFLDVASLAADRILLLDAYFSVVIFHGMTIAQWRNMGYQNQPEHEQFAQLLQAPHEDAQMIIKGRFPVPRLVVCDQHGSQARFLLAKLNPSATYNSAHDVAPGSDIIFTDDVSFLVFCEHLQRLAVQS

SEQ ID NO: 167308 - protein, 265 aa, Zea Mays
MGDFNLIYRDEDKSSGNFNRQLMERFRRFINDLGLKELALHGRKFTWSNRQDTPTLVKLDRMFCSSDWEQLFPNSLLQSASTGSDHCPLLLGLQVLTHGRSRFHFESHWTKLPDFITTMEAAWNSVPSSPCPFETLSKKFRATVRRLQRWSQKRVGHISSQLGMAREIMHKLQSAQDNRPLSVLENWLLKQLDCHIVALSTLQRSMARSRSRITLLVEGDVNTAFFHLHAKYRKNFIGNLLSDNGLIKSRHEDKEETLSDFSTIC

SEQ ID NO: 167309 - protein, 761 aa, Zea Mays
MAALSCACSRMAGPSCRCPLAGASSGIVVDTMAALACACGRVFKGYRSHTMAPILNLLLIQIRRGIMAIILKVYKVRLSPGLPSAYTQLPIHRLLLRLSAPMNCKEYSTDIRVIYFDCLNTAYILEREERRKRLKREQQDDGSRLHSQQIRNDYAPQPKRHSRIKEAPQGWLDCPAFGEPIDKIIPSKVPLDETFNESVPPGKRYSSKQLVNKQRKAGREIGLVIDLTNTTRYYSPAEWTKQGTKYAKIACKGRDAVPDNESVNKFVYEAMMFLDRQKQSKNPKYILVHCTHGHNRTGFMIIHYLMRTHVSCVAEAISIFAQRRPPGIYKRDYIEALYSFYHEVPDNMMIACPPTPEWKRPDDLDLNGEAKQDDDDDNGDPGPLHNESEDKVITNDDVLGDEVPYDQQEALRVLCYRLLEMPLGRGHAHFPGSHPVSLNSENLQLLRQRYYYATWKADGTRYMMLIMRHGCFLIDRNFSFRRVQMRFPHRSLQGLQDMTLIDGEMIIDTVPDSGLKRRYLAYDLMALGSVSKTRLPFSERWKMLEDEIIQPRNNEKGLERGAKSNPLYKYDMELFSVRRKAFWVLLTVKKVLKVFIPSLCHDADGLIFQGWDDPYVTRTHEGLLKWKYPEMNSVDFLFELTNDNRQLVFLYERGKKKLMDGARISFTDDVDPSSVAGRIVECSWNKEEQCWACMRIRSDKSTPNDINTYRKVMRSITDNITEEKLLEETDEITLLPMYADRMNVRVHTKMAQHRRRLPPQC

SEQ ID NO: 167310 - protein, 155 aa, Zea Mays
MTFYTNMDLNASPVPDDDEQQPYDDSVEVGYAQTEHVESAVATLRREREERRKRLKREQQDDGSRLHSQQIRNDYAPQPKRHSRIKEAPQGWLDCPAFGEPIDKIIPSKVPLDETFNESVPPGKRYSSKQLVNKQRKAGREVVGGVEDWEAASSG

SEQ ID NO: 167311 - protein, 368 aa, Zea Mays
MMIACPPTPEWKRPDDLDLNGEAKQDDDDDNGDPGPLHNESEDKVITNDDVLGDEVPYDQQEALRVLCYRLLEMPLGRGHAHFPGSHPVSLNSENLQLLRQRYYYATWKADGTRYMMLIMRHGCFLIDRNFSFRRVQMRFPHRSLQGLQDMTLIDGEMIIDTVPDSGLKRRYLAYDLMALGSVSKTRLPFSERWKMLEDEIIQPRNNEKGLERGAKSNPLYKYDMELFSVRRKAFWVLLTVKKVLKVFIPSLCHDADGLIFQGWDDPYVTRTHEGLLKWKYPEMNSVDFLFELTNDNRQLVFLYERGKKKLMDGARISFTDDVDPSSVAGRIVECSWNKEEQCWACMRIRSDKSTPNDINTYRKDHAL

SEQ ID NO: 167312 - protein, 636 aa, Zea Mays
MTFYTNMDLNASPVPDDDEQQPYDDSVEVGYAQTEHVESAVATLRREREERRKRLKREQQDDGSRLHSQQIRNDYAPQPKRHSRIKEAPQGWLDCPAFGEPIDKIIPSKVPLDETFNESVPPGKRYSSKQLVNKQRKAGREIGLVIDLTNTTRYYSPAEWTKQGTKYAKIACKGRDAVPDNESVNKFVYEAMMFLDRQKQSKNPKYILVHCTHGHNRTGFMIIHYLMRTHVSCVAEAISIFAQRRPPGIYKRDYIEALYSFYHEVPDNMMIACPPTPEWKRPDDLDLNGEAKQDDDDDNGDPGPLHNESEDKVITNDDVLGDEVPYDQQEALRVLCYRLLEMPLGRGHAHFPGSHPVSLNSENLQLLRQRYYYATWKADGTRYMMLIMRHGCFLIDRNFSFRRVQMRFPHRSLQGLQDMTLIDGEMIIDTVPDSGLKRRYLAYDLMALGSVSKTRLPFSERWKMLEDEIIQPRNNEKGLERGAKSNPLYKYDMELFSVRRKAFWVLLTVKKVLKVFIPSLCHDADGLIFQGWDDPYVTRTHEGLLKWKYPEMNSVDFLFELTNDNRQLVFLYERGKKKLMDGARISFTDDVDPSSVAGRIVECSWNKEEQCWACMRIRSDKSTPNDINTYRKDHAL

SEQ ID NO: 167313 - protein, 414 aa, Zea Mays
MMIACPPTPEWKRPDDLDLNGEAKQDDDDDNGDPGPLHNESEDKVITNDDVLGDEVPYDQQEALRVLCYRLLEMPLGRGHAHFPGSHPVSLNSENLQLLRQRYYYATWKADGTRYMMLIMRHGCFLIDRNFSFRRVQMRFPHRSLQGLQDMTLIDGEMIIDTVPDSGLKRRYLAYDLMALGSVSKTRLPFSERWKMLEDEIIQPRNNEKGLERGAKSNPLYKYDMELFSVRRKAFWVLLTVKKVLKVFIPSLCHDADGLIFQGWDDPYVTRTHEGLLKWKYPEMNSVDFLFELTNDNRQLVFLYERGKKKLMDGARISFTDDVDPSSVAGRIVECSWNKEEQCWACMRIRSDKSTPNDINTYRKVMRSITDNITEEKLLEETDEITLLPMYADRMNVRVHTKMAQHRRRLPPQC

SEQ ID NO: 167314 - protein, 68 aa, Zea Mays
MRIRSDKSTPNDINTYRKVMRSITDNITEEKLLEETDEITLLPMYADRMNVRVHTKMAQHRRRLPPQC

SEQ ID NO: 167315 - protein, 55 aa, Zea Mays
MYPTTTSDLTGCGHGGLCCKATRSRMKKYHKMKRNSMVAVIKVLCSLGCISPSTT

SEQ ID NO: 167316 - protein, 90 aa, Zea Mays
MYLKIKVKVSDEKERIPLDDQPMVDKIVESRSGKKEGKKKKHIKKNIYYESDTSSSLQKDSSSKKNTIKKNYTKMYFNYSDISYNFNAHF

SEQ ID NO: 167317 - protein, 221 aa, Zea Mays
MDIGELTLGSTGTDPALLSLISATRRLLCSSTYSSPHLPGVELVLHLAHGARPPQVRALDLPVELPSSRPSLLLLWSPSPSPTPSRRSSSHGFQCSFWPPPLPPIRGAVVGSPQPYSRQSSSPCPSARQRPLPQLTPSAVASSRKTPPVPAPSFASLSCAIRHQPCLFGSLWLPGRQFLCRRGAISIVIGPTTLSRLAFALEDEREKLEQHSSNIGGMREP

SEQ ID NO: 167318 - protein, 365 aa, Zea Mays
MLNLAPFETPPLGRQETSANNPTVAAVRGNEESSSNTCLHGHLDLSLGISLSHGGCACACDASSCGGNKQESYGGREGSSRDDKAAVGRCMTSGTTTTASVGHDAHAGDLTAGGGGWTAPFVLSPTAAFFMHPWSLAARQQKAAAEQDRTPPPPTTYMSSDGDRAVTSPSAVGWPPVHTSRRNIIVTAMHVSRTAAGATAVAAHDGPDDSTTTTTHAGREKDAVAPPPPTGSSVVIAARRPPPANMFAKVHMDGYAIGRKINLRAQGGYASLSRVLTNMTTNFYSPADCSTGATGTGEKDLPTNNDKFIFLYEDFEGDRMLVGDVPWELFLASAKRLYIVRNPTSSDKGQGEDDRKYTTEQPTDD

SEQ ID NO: 167319 - protein, 260 aa, Zea Mays
MLYILRQYSMTERSPWILEEENKRGVKVESVSLPVAEELGLEGNLGLVSGAPPPFVDNVLELDDEGAKKPQQGHVVHLVPRREQVGSVFNKNVVAPGGVVWGCEVEDDENKRGGLHVLDTHRLNLEVSNDYGLILRGKGNHRRGGRRGQCDRAADASPRRVAWREYQPQCTRAPMSEQQATMALAIKIATTRVDWATATSEEDTIGDGDMKRVLWALKGYEQRPVVAPRLANPLARTQWRSPVAVELGAAVRSEARQQGG

SEQ ID NO: 167320 - protein, 88 aa, Zea Mays
MKPGMPPTPNPSRHYPAPSPKPPPLLLPPPFSLFSLYRPPLSTSSPQAAPPGVQQPLEAAIRPPGVQSISCLLRAAARRVPLAARSLP

SEQ ID NO: 167321 - protein, 66 aa, Zea Mays
MIDAWAVSFMWSRGRKDTLETMQLKTQDLNDTIVTPKVCSMKCLQHPEVSICESLQAKTNDSYSRS

SEQ ID NO: 167322 - protein, 660 aa, Zea Mays
MELPMQSVSSLLLAGPSPSSPEAAETTPPPMQPLQCQHERLVGNMCPSLYLAVYRGRIADVTALLLEQPAVAIDCQATTTPGTAIMHGQCDILELTAERNTALHVAAEQGHHELIRELYFRFSDQGLLNRLNSALDTPLHSAARAGHVRAVAVLFELARDRGVNILGCKNEAGDTALHLAARHGHGAAVEVLISAAAEPAAELNNAGVSPLYLAVISGSVQAVRAITTCKDASSLGPGAQNALHAAVFQSSEMVHLLLEWRPALADQVDSGGSSPLHFASSDGDRTIVKAILRASPPSTVYKKDSDGLSALHVAARMGHRRVVKDMLRSYPDAAELRDGNGGTFVHAAARERRSSVVSLAISNSMLRGVLDAQDRDGNTPLHLAVAVGSTGDVEALLREGKVRADVLNNDGHTALDLAARSNAGFFATINLVVALVAFGARLRPQRQDRLEQWGGRDMVRKGIQNTSDSLAVVAGLIVAAAFAAGFNLPGGYGDDGKANLKHEIVFKTFLFLNTGAVATSMLAVALLVYGKASSHSDGSWKTFAAALHLLWVSLVCMMLAFQAALFSVATTRALTYGFLVVYMCIFILQVRIAKWLGPDTRLRTIWRFHWKGRHVDIKRQYPFANAFVVNVYLFTALSLLVPIGFEVMFLLGGRSIDTSS

SEQ ID NO: 167323 - protein, 410 aa, Zea Mays
MHQQWRRAAVGVRRGSPVPKRRRGVGVATGFGFTAQSLNDDILRSVFSRLDDHFDLARCSAVCGSWNRIIETAHLMRDMYYKRNPPARGSSSNISVKSYFEMLAMDEHASAFSRGPAEAFQWIGHPMRATLCRMKSGLILTGVGDKIVGLTSSQICIWRRSEPRSIFQSGGASFNHGLCMSFADPEVVIGCEDGRAFVYDMYSRSCSRIYRLHSSPVTCLMITDDQLIVGGSTFGNVAIADQTSGQKLGVLKSDHGPLAIRSLSSCTNSHMIFAGSSAGYAHCWDLRTLRPLWEKRVSPNVIYSTRHLPGDTATLAVGGIDGVLRVICQRTGDIIRSLVVDADLPAEATSRSRQQIEKKRVRRIDPDAQLDGIPRRLRPQITSLSVGMKKIVTTHGENYIRVWKFRMKSS

SEQ ID NO: 167324 - protein, 231 aa, Zea Mays
MSFADPEVVIGCEDGRAFVYDMYSRSCSRIYRLHSSPVTCLMITDDQLIVGGSTFGNVAIADQTSGQKLGVLKSDHGPLAIRSLSSCTNSHMIFAGSSAGYAHCWDLRTLRPLWEKRVSPNVIYSTRHLPGDTATLAVGGIDGVLRVICQRTGDIIRSLVVDADLPAEATSRSRQQIEKKRVRRIDPDAQLDGIPRRLRPQITSLSVGMKKIVTTHGENYIRVWKFRMKSS

SEQ ID NO: 167325 - protein, 102 aa, Zea Mays
MQRLTWENKYRERVQSAIQKCNASEKRRLGLLESEKRRVQSRLLQIQLAVKTASNQRKSERSKLNEQLEEKLQKHLARLCFTPLVIFMSSKQQENSEKVEFT

SEQ ID NO: 167326 - protein, 120 aa, Zea Mays
MQRLTWENKYRERVQSAIQKCNASEKRRLGLLESEKRRVQSRLLQIQLAVKTASNQRKSERSKLNEQLEEKLQKLFNLSQTKISAFGEAMLHTIGYIYVQQAARELGKSRVYIGVPFIAE

SEQ ID NO: 167327 - protein, 94 aa, Zea Mays
MQRLTWENKYRERVQSAIQKCNASEKRRLGLLESEKRRVQSRLLQIQLAVKTASNQRKSERSKLNEQLEEKLQKQAARELGKSRVYIGVPFIAE

SEQ ID NO: 167328 - protein, 138 aa, Zea Mays
MFECIRVQKAENNRMQLMHDRLQRQAALEERTKRYFMQRLTWENKYRERVQSAIQKCNASEKRRLGLLESEKRRVQSRLLQIQLAVKTASNQRKSERSKLNEQLEEKLQKHLARLCFTPLVIFMSSKQQENSEKVEFT

SEQ ID NO: 167329 - protein, 406 aa, Zea Mays
MTLMVGLGPPLLAVSNPVSGFTFPLRVSSRLSPRRVAVESAIPFTPVPLPCNREQKPPFQNEDEPAAGAVPSRAPPAPGHLLRVGSRASERHPRLSSPSASPTRRLLASEVKSSTPYHHREFQPIHFRGLLPSALFKPSATATPTTPPAASPASSPSPPTIHASKRRRRETEATGNTPLRGGRGPAPRRRSSTPPPLSLPAAEFDPLDPDADPPPKLLTADEVRLCKQALKALDKKVGKPATLTKEFRSLPDIRTELQSVQKFSVARKQENRGRNRYTDVLPFDQSRVQLESSTGNDYINASHIEIAGRNLTKFISTQGPLANTIEDFWQMVYENHCPVIVMLTKFDGLKCDEYLPLSKGQAVFGKFTIKITKFRKDGQLLLRGVEIRQDEVNIYKSDEVRSLLHI

SEQ ID NO: 167330 - protein, 400 aa, Zea Mays
MTLMVGLGPPLLAVSNPVSGFTFPLRVSSRLSPRRVAVESAIPFTPVPLPCNREQKPPFQNEDEPAAGAVPSRAPPAPGHLLRVGSRASERHPRLSSPSASPTRRLLASEVKSSTPYHHREFQPIHFRGLLPSALFKPSATATPTTPPAASPASSPSPPTIHASKRRRRETEATGNTPLRGGRGPAPRRRSSTPPPLSLPAAEFDPLDPDADPPPKLLTADEVRLCKQALKALDKKVGKPATLTKEFRSLPDIRTELQSVQKFSVARKQENRGRNRYTDVLPFDQSRVQLESSTGNDYINASHIEIAGRNLTKFISTQGPLANTIEDFWQMVYENHCPVIVMLTKFDGLKCDEYLPLSKGQAVFGKFTIKITKFRKDGQLLLRGVEIRQDEMKCDLFSTL

SEQ ID NO: 167331 - protein, 401 aa, Zea Mays
MTLMVGLGPPLLAVSNPVSGFTFPLRVSSRLSPRRVAVESAIPFTPVPLPCNREQKPPFQNEDEPAAGAVPSRAPPAPGHLLRVGSRASERHPRLSSPSASPTRRLLASEVKSSTPYHHREFQPIHFRGLLPSALFKPSATATPTTPPAASPASSPSPPTIHASKRRRRETEATGNTPLRGGRGPAPRRRSSTPPPLSLPAAEFDPLDPDADPPPKLLTADEVRLCKQALKALDKKVGKPATLTKEFRSLPDIRTELQSVQKFSVARKQENRGRNRYTDVLPFDQSRVQLESSTGNDYINASHIEIAGRNLTKFISTQGPLANTIEDFWQMVYENHCPVIVMLTKFDGLKCDEYLPLSKGQAVFGKFTIKITKFRKDGQLLLRGVEIRQDESDEVRSLLHI

SEQ ID NO: 167332 - protein, 77 aa, Zea Mays
MLSARTGGENEICDHGRRRGLQGGNSDTKHGPTNALNSWRTTTDQAKECRCNHEIRPRGDHQIAASTRLSDHGEKSE

SEQ ID NO: 167333 - protein, 835 aa, Zea Mays
MADGAIVVAICQYGGEFTSGPSGNLIYRGGEAHAVDVTHDSSLESFKDELSKVFHVDVTDMSLKYFLPNNMKTLITISCDRDLQRMVGFTANAAHVDVFLISRQENRSTITHSGATSGSVASGDKRKRPTPKNKVIRSSKPATSAACNALQAITDNVRQPISVITENEDNRVFQLEFGNDITFTTTAGGASFTSDILDQQKLVLVDNIPKEAVSLFDDAFNPYVSSEIMHEPPQEPNNPIVLWDDIIKGVGQEFDNVKDFRAQLCKYAIGKGFVYRFIKNETTRVTVKCGAEGGCTWRLHASESSRNKKFIIKRLTDEHTCGGGSGEGQRRATRQWLTTIIKEKLHDNPKFKPKELVKELFEEYGVTLTYSQVWRGKEVAEKELYHAVRETRDQLPWYCQRLEETNPGSISVLSPVLDMKTRRFFVALHACLHGFINGCRPLLFLDKVPLKATNEYKLLVAAAVDADDGVFPLAFNVVEDENYDSWGWFLMHLKIALQTHNYPCNGMTFLSNGQMGLDAAVSHVFEDGEHAFCLHHIIEEFKGELRKGPWSQQIREGMVEDFTRAAQACSIEDFNASIESIRNISSEAADWIIASKPEHWSDAIFRGFRYDHFSLNIVDAFDNWIPAKKESSIVLMVDSLRIKIKEVIESRLEACKVWQGPLTPTMEYKVQDEMLKAGKMTVLCSSDTVFEVRGNAVFVVNIGNWECTCRRWQLSGLPCMHAIAVFNRLGRCFYDYCPKFFRIESYHLTYSGIIFPIPDLDSVDFSAGANLLPLPPKRRTSDKPRRKRSNPNKISTLTRLCSSVKGLKFRILVTTGRSHGTNHRKQLPQLLCQFN

SEQ ID NO: 167334 - protein, 673 aa, Zea Mays
MADGAIVVAICQYGGEFTSGPSGNLIYRGGEAHAVDVTHDSSLESFKDELSKVFHVDVTDMSLKYFLPNNMKTLITISCDRDLQRMVGFTANAAHVDVFLISRQENRSTITHSGATSGSVASGDKRKRPTPKNKVIRSSKPATSAACNALQAITDNVRQPISVITENEDNRVFQLEFGNDITFTTTAGGASFTSDILDQQKLVLVDNIPKEAVSLFDDAFNPYVSSEIMHEPPQEPNNPIVLWDDIIKGVGQEFDNVKDFRAQLCKYAIGKGFVYRFIKNETTRVTVKCGAEGGCTWRLHASESSRNKKFIIKRLTDEHTCGGGSGEGQRRATRQWLTTIIKEKLHDNPKFKPKELVKELFEEYGVTLTYSQVWRGKEVAEKELYHAVRETRDQLPWYCQRLEETNPGSISVLSPVLDMKTRRFFVALHACLHGFINGCRPLLFLDKVPLKATNEYKLLVAAAVDADDGVFPLAFNVVEDENYDSWGWFLMHLKIALQTHNYPCNGMTFLSNGQMGLDAAVSHVFEDGEHAFCLHHIIEEFKGELRKGPWSQQIREGMVEDFTRAAQACSIEDFNASIESIRNISSEAADWIIASKPEHWSDAIFRGFRAGANLLPLPPKRRTSDKPRRKRSNPNKISTLTRLCSSVKGLKFRYIAENMVSFLREQDLKFFLG

SEQ ID NO: 167335 - protein, 705 aa, Zea Mays
MADGAIVVAICQYGGEFTSGPSGNLIYRGGEAHAVDVTHDSSLESFKDELSKVFHVDVTDMSLKYFLPNNMKTLITISCDRDLQRMVGFTANAAHVDVFLISRQENRSTITHSGATSGSVASGDKRKRPTPKNKVIRSSKPATSAACNALQAITDNVRQPISVITENEDNRVFQLEFGNDITFTTTAGGASFTSDILDQQKLVLVDNIPKEAVSLFDDAFNPYVSSEIMHEPPQEPNNPIVLWDDIIKGVGQEFDNVKDFRAQLCKYAIGKGFVYRFIKNETTRVTVKCGAEGGCTWRLHASESSRNKKFIIKRLTDEHTCGGGSGEGQRRATRQWLTTIIKEKLHDNPKFKPKELVKELFEEYGVTLTYSQVWRGKEVAEKELYHAVRETRDQLPWYCQRLEETNPGSISVLSPVLDMKTRRFFVALHACLHGFINGCRPLLFLDKVPLKATNEYKLLVAAAVDADDGVFPLAFNVVEDENYDSWGWFLMHLKIALQTHNYPCNGMTFLSNGQMGLDAAVSHVFEDGEHAFCLHHIIEEFKGELRKGPWSQQIREGMVEDFTRAAQACSIEDFNASIESIRNISSEAADWIIASKPEHWSDAIFRGFRYDHFSLNIVDAFDNWIPAKKESSIVLMVDSLRIKIKEVIESRLEACKVWQGPLTPTMEYKVQDEMLKAVLGQIYSHCLPSGARQINRGGSGLTPTR

SEQ ID NO: 167336 - protein, 636 aa, Zea Mays
MKTTAGGASFTSDILDQQKLVLVDNIPKEAVSLFDDAFNPYVSSEIMHEPPQEPNNPIVLWDDIIKGVGQEFDNVKDFRAQLCKYAIGKGFVYRFIKNETTRVTVKCGAEGGCTWRLHASESSRNKKFIIKRLTDEHTCGGGSGEGQRRATRQWLTTIIKEKLHDNPKFKPKELVKELFEEYGVTLTYSQVWRGKEVAEKELYHAVRETRDQLPWYCQRLEETNPGSISVLSPVLDMKTRRFFVALHACLHGFINGCRPLLFLDKVPLKATNEYKLLVAAAVDADDGVFPLAFNVVEDENYDSWGWFLMHLKIALQTHNYPCNGMTFLSNGQMGLDAAVSHVFEDGEHAFCLHHIIEEFKGELRKGPWSQQIREGMVEDFTRAAQACSIEDFNASIESIRNISSEAADWIIASKPEHWSDAIFRGFRYDHFSLNIVDAFDNWIPAKKESSIVLMVDSLRIKIKEVIESRLEACKVWQGPLTPTMEYKVQDEMLKAGKMTVLCSSDTVFEVRGNAVFVVNIGNWECTCRRWQLSGLPCMHAIAVFNRLGRCFYDYCPKFFRIESYHLTYSGIIFPIPDLDSVDFSAGANLLPLPPKRRTSDKPRRKRSNPNKISTLTRLCSRCKQTGHNKATCEVQF

SEQ ID NO: 167337 - protein, 649 aa, Zea Mays
MKTTGFFSWNLGMTSHLPPQLEVLPSHQIFSISKSLFLLIISPISLFDDAFNPYVSSEIMHEPPQEPNNPIVLWDDIIKGVGQEFDNVKDFRAQLCKYAIGKGFVYRFIKNETTRVTVKCGAEGGCTWRLHASESSRNKKFIIKRLTDEHTCGGGSGEGQRRATRQWLTTIIKEKLHDNPKFKPKELVKELFEEYGVTLTYSQVWRGKEVAEKELYHAVRETRDQLPWYCQRLEETNPGSISVLSPVLDMKTRRFFVALHACLHGFINGCRPLLFLDKVPLKATNEYKLLVAAAVDADDGVFPLAFNVVEDENYDSWGWFLMHLKIALQTHNYPCNGMTFLSNGQMGLDAAVSHVFEDGEHAFCLHHIIEEFKGELRKGPWSQQIREGMVEDFTRAAQACSIEDFNASIESIRNISSEAADWIIASKPEHWSDAIFRGFRYDHFSLNIVDAFDNWIPAKKESSIVLMVDSLRIKIKEVIESRLEACKVWQGPLTPTMEYKVQDEMLKAGKMTVLCSSDTVFEVRGNAVFVVNIGNWECTCRRWQLSGLPCMHAIAVFNRLGRCFYDYCPKFFRIESYHLTYSGIIFPIPDLDSVDFSAGANLLPLPPKRRTSDKPRRKRSNPNKISTLTRLCSRCKQTGHNKATCEVQF

SEQ ID NO: 167338 - protein, 232 aa, Zea Mays
MYVSAHLPFLVTLSSPAFPSSPPFRTSSTPANNFTSHDLAGALEDMQVAAAAASMRGTETVGAKSAARRLSRVLVGRRRRAAVLLLALAYAAAMLMLTIGGSEGSGSSGVVAGVLRRGAQSAPPGSVYRSHLVFERLLPEMRAFASRPNPLVTSQYKKFGKQWEPCISKGLIHSELPPSNGFLIVEANGGLNQQRISICDAIAVAKILNATLVTPAFHLNSVWRDSSFQQIW

SEQ ID NO: 167339 - protein, 429 aa, Zea Mays
MYVSAHLPFLVTLSSPAFPSSPPFRTSSTPANNFTSHDLAGALEDMQVAAAAASMRGTETVGAKSAARRLSRVLVGRRRRAAVLLLALAYAAAMLMLTIGGSEGSGSSGVVAGVLRRGAQSAPPGSVYRSHLVFERLLPEMRAFASRPNPLVTSQYKKFGKQWEPCISKGLIHSELPPSNGFLIVEANGGLNQQRISICDAIAVAKILNATLVTPAFHLNSVWRDSSKFGDIFDEDHFIESLRKYVRVVKDLPEDVFLRFNHNISIIPNMRTKAFSPPSYYLQHVLPKLLELGAVRIAPFSNRLAHSVPMNIQALRCLTNYKALRFSEPIRILADNMVDRMIKRSFLSGGKYVSVHLRFEEDMVAFSCCNYDGGSTENNAMENARERSWRGKFHRPGRVINPEANRRNGRCPLTPLEVAIFVPCNLAFS

SEQ ID NO: 167340 - protein, 227 aa, Zea Mays
MYVSAHLPFLVTLSSPAFPSSPPFRTSSTPANNFTSHDLAGALEDMQVAAAAASMRGTETVGAKSAARRLSRVLVGRRRRAAVLLLALAYAAAMLMLTIGGSEGSGSSGVVAGVLRRGAQSAPPGSVYRSHLVFERLLPEMRAFASRPNPLVTSQYKKFGKQWEPCISKGLIHSELPPSNGFLIVEANGGLNQQRISICDAIAVAKILNATLVTPAFHLNSVWRDSR

SEQ ID NO: 167341 - protein, 227 aa, Zea Mays
MVAFSCCNYDGGSTENNAMENARERSWRGKFHRPGRVINPEANRRNGRCPLTPLEVGMMLRGMGFDNTTSLYVASGKIYNAEKYMTPLRRLFPFLQTKHALVTPEELAQFKGHSSRLAALDYTICLHSEVFVMTQGSNFPHFLMGHRRYMYGGHAKTIKPDKRKLVQLFDNPNIRWDRFKHHMQDMRRHSEMKGFALRKPQESIYTLPMPDCMCQQAEARSRDTARS

SEQ ID NO: 167342 - protein, 54 aa, Zea Mays
MLQSKSANTHGPLTTVHTVTPAARPAQAHQRTPPQTLGVTVSDHHTQTQTPPSS

SEQ ID NO: 167343 - protein, 800 aa, Zea Mays
MMDLLIAQITTDLRSSDALRQSSALLQALQQCAAGRDVSALARTAATEILSAPSSAVCKRLALDLLRALPLPPDLLDPLLLSSLRSDLSFPDPDVAASSIASFPSLPSHLLPSLLSSAHAEIANALSSPAESLRLAAVTSLSSLLPRDDLTLMCSTNPSLMAHATTWWGRLAELALDSADAVSAGAFEALARLFQELEGRRMSRLAGDKLVDGEGALAVRAQWAADAIDFIWSRRNMLIARSMVMPVESFRVTVYPLVHAAKMVASGVVNTLRRVAKPGDTTIADSVESSAEKLVGVSDIVSHLLPFLSSLDPPLVFEVGINMLALADVPGGKPEWASAAIIAILTLWDRQEFSSMRETIVRAVVTNLHLLDLGMQVHTPRISSRLIWAISEHFDLEGLDPLLADDPEDPLNIVISNMHKILFNTDSSATTSNRIQDVQAVLICAQRLGARNARAGQLLTKELEEFRASTSADSMTKHQSRYVLQVIKYVTNHPDNRWVGVGDATGDYPFSHHKLTVQFSEASAAQDRKLEGLVHKAIRELWRPNPSQLILLQTRGIGALHKELPKACALTGSSDPCYIEAYHLADPTDGRITLHLKILNLTELELNRVDIRVGLSGALYYMDGFSRTVRHLRNLVSQDPVQSSVTVGVSHFERCSLWVQVLYYPFYGSSGSTDYEGDYAEEDSQMMRQKRSHRPELGEPVVLRCQPYKFPLAELLLPLECSPVEYFRLWPSLPAMVECTGTYTYEGSGFKATAAQQYDSSPFLSGLKSISSKPFHQVCSHFIRTVAGFQQRHGLVDLWA

SEQ ID NO: 167344 - protein, 1155 aa, Zea Mays
MMDLLIAQITTDLRSSDALRQSSALLQALQQCAAGRDVSALARTAATEILSAPSSAVCKRLALDLLRALPLPPDLLDPLLLSSLRSDLSFPDPDVAASSIASFPSLPSHLLPSLLSSAHAEIANALSSPAESLRLAAVTSLSSLLPRDDLTLMCSTNPSLMAHATTWWGRLAELALDSADAVSAGAFEALARLFQELEGRRMSRLAGDKLVDGEGALAVRAQWAADAIDFIWSRRNMLIARSMVMPVESFRVTVYPLVHAAKMVASGVVNTLRRVAKPGDTTIADSVESSAEKLVGVSDIVSHLLPFLSSLDPPLVFEVGINMLALADVPGGKPEWASAAIIAILTLWDRQEFSSMRETIVRAVVTNLHLLDLGMQVSLFKRLLQMVRNLRAESDRMHALACICRTALCVDLFAKESVRRGQKPVPGTDVISLFEDVRVKEDLNSVTSKNLFREELVASLVESCFQLSLPLPELKNSGTESRVIGALAYGTGYGALNWTEPALDVVEVCRPCVLWDCDGRTYAIDCYLKLLVRLCHIYDTRGGVKTIKAGASQDQILNETRLRNLQLQLIRDLREVHTPRISSRLIWAISEHFDLEGLDPLLADDPEDPLNIVISNMHKILFNTDSSATTSNRIQDVQAVLICAQRLGARNARAGQLLTKELEEFRASTSADSMTKHQSRYVLQVIKYVTNHPDNRWVGVGDATGDYPFSHHKLTVQFSEASAAQDRKLEGLVHKAIRELWRPNPSQLILLQTRGIGALHKELPKACALTGSSDPCYIEAYHLADPTDGRITLHLKILNLTELELNRVDIRVGLSGALYYMDGFSRTVRHLRNLVSQDPVQSSVTVGVSHFERCSLWVQVLYYPFYGSSGSTDYEGDYAEEDSQMMRQKRSHRPELGEPVVLRCQPYKFPLAELLLPLECSPVEYFRLWPSLPAMVECTGTYTYEGSGFKATAAQQYDSSPFLSGLKSISSKPFHQVCSHFIRTVAGFQLCYAAKTWFGGFVGMMIFGASEVSRNVDLGDETTTMICKFVMRASDESITREIKSDLQGWLDDITDGAVEYMPEDEVKSVAAEQLKISMERIALLKAARPKVPPAKTDQEEEEERKQSEELDGFGNPKGPSTLSKLTAEEAEHRALQAAVLQEWHQLCKERAMKAQ

SEQ ID NO: 167345 - protein, 402 aa, Zea Mays
MAQACKKRRGVYISSESGDSDTDSDVEGSKHSQKSGVTSISTCEHQSSYNLKAASMKSSRMIRLCGNIVRKLIDHKCGWLFKEPVDPDLYGIPDYFDVIRSPMDLGTIKNKLTKKKYVSIEEFAADVRLTFSNAMKYNPPGNDVHIFAKELNEMFDSEWESVERKFRGRNLGQDQQTMKAIKVRAMMDSKSTVARGPVACSNPKTLVARGPVACSNSIAKKTLTDALSSKVKIKFSVRSSAHTSSKDILVQAAGSKEGSLNHSVPTGNKEASSNCTIPIAKEAKISRAREIERCSGSIGEESYLHDEPLSPSRALRAAMLRSRFAGTIVKAQQKALLDHGKNIDPVKLQLEKERLEKRQQEEKARIEAQVKAAEAAAQQKFEEEMRMKRKQEREAARLALRM

SEQ ID NO: 167346 - protein, 362 aa, Zea Mays
MAQACKKRRGVYISSESGDSDTDSDVEGSKHSQKSGVTSISTCEHQSSYNLKAASMKSSRMIRLCGNIVRKLIDHKCGWLFKEPVDPDLYGIPDYFDVIRSPMDLGTIKNKLTKKKYVSIEEFAADVRLTFSNAMKYNPPGNDVHIFAKELNEMFDSEWESVERKFRGRNLGQDQQTMKAIKVRAMMDSKSTVARGPVACSNPKTLVARGPVACSNSIAKKTLTDALSSKVKIKFSVRSSAHTSSKDILVQAAGSKEGSLNHSVPTGNKEASSNCTIPIAKEAKISRAREIERCSGSIGKQSWSCNDTSTSPLASSVQGEESYLHDEPLSPSRALRAAMLRSRFAGTIVKAQQKALLDHGRI

SEQ ID NO: 167347 - protein, 239 aa, Zea Mays
MLRSRFAGTIVKAQQKALLDHGKNIDPVKLQLEKERLEKRQQEEKARIEAQVKAAEAAAQQKFEEEMRMKRKQEREAARLALRMMKKTVDIDNSDFLKELENFSKTWQANPPGKLIVDFISGDLPPGLGSPLERLGLFMKEDFEDEVEQEMEDRVSPSMDVDIRKDFQEDLGHEMQDSASPVTVIGTKNDVQGVAGHEMEDSGSPATVIDTKKEETEHEMVDSVSPLMDVDTEEGEISC

SEQ ID NO: 167348 - protein, 557 aa, Zea Mays
MAQACKKRRGVYISSESGDSDTDSDVEGSKHSQKSGVTSISTCEHQSSYNLKAASMKSSRMIRLCGNIVRKLIDHKCGWLFKEPVDPDLYGIPDYFDVIRSPMDLGTIKNKLTKKKYVSIEEFAADVRLTFSNAMKYNPPGNDVHIFAKELNEMFDSEWESVERKFRGRNLGQDQQTMKAIKVRAMMDSKSTVARGPVACSNPKTLVARGPVACSNSIAKKTLTDALSSKVKIKFSVRSSAHTSSKDILVQAAGSKEGSLNHSVPTGNKEASSNCTIPIAKEAKISRAREIERCSGSIGEESYLHDEPLSPSRALRAAMLRSRFAGTIVKAQQKALLDHGKNIDPVKLQLEKERLEKRQQEEKARIEAQVKAAEAAAQQKFEEEMRMKRKQEREAARLALRMMKKTVDIDNSDFLKELENFSKTWQANPPGKLIVDFISGDLPPGLGSPLERLGLFMKEDFEDEVEQEMEDRVSPSMDVDIRKDFQEDLGHEMQDSASPVTVIGTKNDVQGVAGHEMEDSGSPATVIDTKKEETEHEMVDSVSPLMDVDTEEGEISC

SEQ ID NO: 167349 - protein, 290 aa, Zea Mays
MPEVHEGIYGYPIEIQALFYMALRCALQMLKPEGEGKDFIEKIGQRLHALTYHMRNYFWLDFHQLNNIYRYKTEEYSHTAVNKFNVIPDSIPDWVFDFMPCRGGYFLGNVSPAMMDFRWFALGNCIAIVSSLATPEQSVAIMDLIEEKWDELVGEMPLKICYPALENHEWRIITGCDPKNTRWSYHNGGSWPVLLWLLTAACIKTGRPQMAKRAIELAESRLLKDGWPEYYDGKLGRFVGKQARKFQTWSIAGYLVARMMLEDPSTLMMISMEEDRPVKPTMRRSASWNA

SEQ ID NO: 167350 - protein, 795 aa, Zea Mays
MAAADGDALIAAFAVSKGGIVLKHIFLNAPPPEAMCGSGGREVESDEEDPPVMVGRHPDCHVLVDHPSVSRFHLELRCRRRQSLITVTDLHSVHGTWVSGRRIPPNTPVDLATGDTLRLGASKREYKLLWLSLREAFEMDDLMYMPSLPEEDKEEPYVKEPSSKLLPGHRDSVNMETHQDTSEQIVSEDIAFPAKVAPSAPPLSEFLQPFFVEEHSLSQFHEKRNGVTEEKLVDKNQISESFGSLIIQEMPGTLTNAGKSIQSGEQEDASNKVSKRSKLKSVKSLRVDTGRSSERSSTLSHSFQKGDQNDIVVCSQSCGTECAVCIALFGISEIEKAEEKEELIAEDNVDMNPPASMIMEGNMNERKPDNYIPQDPIGAKLQKKLGLLDSALPLHFKDDVFADKEIPQWNVASVHTESELLSEYLIIPEVKHDDLNHLNLEEGLSKSENINPNKITEGPGNCQLEGTIRGNLFDNLDTDGIEEGEEICPLDKDEITPNGSDHGDFSENENSMLNTGDQMKLNEPVSENLNPLIPTDEKYLKSQTEECMPISYLEFKDDILLDRENSVLAPRKYEAMSPVRQENLFSDKENVTPASKVKTVVRGVLGTRMDNSVSAANASNKNKVLGSRVDNSVSTENSSNKKQCELSSKSKKVHTVDFDVFYSDKENLTPISSGGMKARKCFPKDLSVDLDQDQEAFCSDKENLTPLSSAARKTRDMSGNLTRVESAVTKKRVVGRLPFQTLVSNSPLRPASSHDCTCAVARPAGVAAGDLAIKLEDKLNDLSVMATNQVVLEKA

SEQ ID NO: 167351 - protein, 1099 aa, Zea Mays
MAAADGDALIAAFAVSKGGIVLKHIFLNAPPPEAMCGSGGREVESDEEDPPVMVGRHPDCHVLVDHPSVSRFHLELRCRRRQSLITVTDLHSVHGTWVSGRRIPPNTPVDLATGDTLRLGASKREYKLLWLSLREAFEMDDLMYMPSLPEEDKEEPYVKEPSSKLLPGHRDSVNMETHQDTSEQIVSEDIAFPAKVAPSAPPLSEFLQPFFVEEHSLSQFHEKRNGVTEEKLVDKNQISESFGSLIIQEMPGTLTNAGKSIQSGEQEDASNKVSKRSKLKSVKSLRVDTGRSSERSSTLSHSFQKGDQNDIVVCSQSCGTECAVCIALFGISEIEKAEEKEELIAEDNVDMNPPASMIMEGNMNERKPDNYIPQDPIGAKLQKKLGLLDSALPLHFKDDVFADKEIPQWNVASVHTESELLSEYLIIPEVKHDDLNHLNLEEGLSKSENINPNKITEGPGNCQLEGTIRGNLFDNLDTDGIEEGEEICPLDKDEITPNGSGNIIMERSNIVLKPTISQQLMDSISPLNLDHGDFSENENSMLNTGDQMKLNEPVSENLNPLIPTDEKYLKSQTEECMPISYLEFKDDILLDRENSVLAPRKYEAMSPVRQENLFSDKENVTPASKVKTVVRGVLGTRMDNSVSAANASNKNKVLGSRVDNSVSTENSSNKKQCELSSKSKKVHTVDFDVFYSDKENLTPISSGGMKARKCFPKDLSVDLDQDQEAFCSDKENLTPLSSAARKTRDMSGNLTRVESAVTKKRVVGRLPFQTLVSNSPLRPASSHDCTCAVARPAGVAAGDLAIKLEDKLNDLSCNGHESGSAGEGMKTWTMVANTDSLLDDESRKAIMLLKGLKGTRLFIPRIVIRELDSMKQREGLFRRSTKATSILQWIEECMARESWWIHVQSSADMFPVAPTPPATPSAQRIDEEIEISSGSFNPMMALFGPRSSAALADMISPRPEDRVLDCALLVSRVRSNEKVVVLSNSVTLKIKAMAEVSTGLPCEGAKEFRESLVDPSSRRFMWAASAPRGSAWSCLDASALAENYYNSRHHAMKRRVLVAARPSESEAAKGLKLILRHNSLYAQATDAVNKTPLVSLAAV

SEQ ID NO: 167352 - protein, 872 aa, Zea Mays
MAAADGDALIAAFAVSKGGIVLKHIFLNAPPPEAMCGSGGREVESDEEDPPVMVGRHPDCHVLVDHPSVSRFHLELRCRRRQSLITVTDLHSVHGTWVSGRRIPPNTPVDLATGDTLRLGASKREYKLLWLSLREAFEMDDLMYMPSLPEEDKEEPYVKEPSSKLLPGHRDSVNMETHQDTSEQIVSEDIAFPAKVAPSAPPLSEFLQPFFVEEHSLSQFHEKRNGVTEEKLVDKNQISESFGSLIIQEMPGTLTNAGKSIQSGEQEDASNKVSKRSKLKSVKSLRVDTGRSSERSSTLSHSFQKGDQNDIVVCSQSCGTECAVCIALFGISEIEKAEEKEELIAEDNVDMNPPASMIMEGNMNERKPDNYIPQDPIGAKLQKKLGLLDSALPLHFKDDVFADKEIPQWNVASVHTESELLSEYLIIPEVKHDDLNHLNLEEGLSKSENINPNKITEGPGNCQLEGTIRGNLFDNLDTDGIEEGEEICPLDKDEITPNGSGNIIMERSNIVLKPTISQQLMDSISPLNLDHGDFSENENSMLNTGDQMKLNEPVSENLNPLIPTDEKYLKSQTEECMPISYLEFKDDILLDRENSVLAPRKYEAMSPVRQENLFSDKENVTPASKVKTVVRGVLGTRMDNSVSAANASNKNKVLGSRVDNSVSTENSSNKKQCELSSKSKKVHTVDFDVFYSDKENLTPISSGGMKARKCFPKDLSVDLDQDQEAFCSDKENLTPLSSAARKTRDMSGNLTRVESAVTKKRVVGRLPFQTLVSNSPLRPASSHDCTCAVARPAGVAAGDLAIKLEDKLNDLSCNGHESGSAGEGMKTWTMVANTDSLLDDESRKAIMLLKGLKGTRLFIPRIGKLRANAAVV

SEQ ID NO: 167353 - protein, 77 aa, Zea Mays
MTYTLTPKSTSISLRVFSLVGSVLLSNCVLGVLFPMLLHERLLTPLSSVKLTLEAFYLSLLYVYLWEDNLFPSDVIS

SEQ ID NO: 167354 - protein, 88 aa, Zea Mays
MRRPPSSASSAPPPPSSSHGKCATAKAFRWHDPHPHFRRSACSLWSNCWNYPFVSRWSIPGGLSAPPFCDYRTVYYAILRGLELYSLV

SEQ ID NO: 167355 - protein, 151 aa, Zea Mays
MASPRSGRAPASGMGAAYGTAKSGVGVASMGVMRPELVMKSIVPVVMAGVLGIYGLIIAVIISTGINPKAKPYYLFDGYAHLSSGLACGLAGLAAGMAIGIVGDAGVRANAQQPKLFVGMILILIFAEALALYGLIVGIILSSRAGQSRAD

SEQ ID NO: 167356 - protein, 56 aa, Zea Mays
MDWGRTEQALKEEPSSGGIARPCGDTAVVSRIAGETSSSTNPRTDKQAIEDPRVQQ

SEQ ID NO: 167357 - protein, 87 aa, Zea Mays
MARLLPGSPARASAPLCSSRACSIHGRLLASVSPANSLARISLARLARPSALHLVNGRQLNLSVPARMAHAPPSRLLPLTSHGHLPR

SEQ ID NO: 167358 - protein, 190 aa, Zea Mays
MPRPQPPSCSSASAASTSCRSSGNNALLCVVLTRSGHASSICAIPIRLSVSPVVDFLFAMVIPSAVPIRASPARQPSRPLYPLSRVLPRSPHCVVVDLSAYCCGTWIMLASTRTSRTAIIFVKWKSLRWHVDIVDRHPRLRQLPSREDALLLATRHQLNKRNPMDIGSRIEIVCFIKDVNRKPSSCFRLS

SEQ ID NO: 167359 - protein, 649 aa, Zea Mays
MNTMECLDLSMGKDGCSFSQNCVEGFTQGTKSDFFSSINDVETSYPFVKGSSCPTLPNMEQKDGVLENAEQPHLLEMVNLDGTSHSLVDPPLEIKEQGAEDGLFASVEYVEQTHPNFTEEKVDGSIPTPASSEQPDQLEVVRPWDDAPNSTLRSKPPSNYSQPMQGSDLDVRNMDALDPSKEWLDSRLLSNTVEPSSSSNGGGTSVEKDNIEKTERLSGIDTVTPGLDNVQGSNPSAEPSSSSTGEGNSAVEKHSAEMTECLLGMGILNPALHNVQVLSPSTPKECLVSSADKSDVANRSDEINHSLDDFNQSNPKPVLKGRVSKMMCPRLAFQLPKVLPVCEHHKREMSLPSKHVSPRKATKSSFRKQYEGPNRHVSRHTEHQKTKLVMKDRNTGPAHMRSCRPTKQIDCTCSSASLDSSTKTKEVNDAEPRCSKSVKTFENVMAKKRKRPILSYDEDAKAMQMEVRMRRRHRESGVMKLRRSTENSDEAMCPGNSNNQLTNDHTKARKQRRANKDNKTPPVNASVPCTQIDAARLASDQQSFICTRPIDRPYWTGIMKIGQEYISLVAHLSNQACKKVQELSMSLPPLMKVTKHSKLKAWPGRWKASEPTAECVGLYFFSDNMRELDQLVHYLNDHSLVLKYVVGFA

SEQ ID NO: 167360 - protein, 843 aa, Zea Mays
MKGTRNGYCLDPVIYDASAIEWLCDDCPPKHNEETQKAVGAVGPTMNTMECLDLSMGKDGCSFSQNCVEGFTQGTKSDFFSSINDVETSYPFVKGSSCPTLPNMEQKDGVLENAEQPHLLEMVNLDGTSHSLVDPPLEIKEQGAEAGLFASVEDVEQTHPILTDETSPIWSSEEQVDGSCPASESREQPVPFKVVILGPWHDVPNSILRSRPPSNYSQSMQGSDLYVGNVDVLDLSKEQLDSRLKPEEQGAEDGLFASVEYVEQTHPNFTEEKVDGSIPTPASSEQPDQLEVVRPWDDAPNSTLRSKPPSNYSQPMQGSDLDVRNMDALDPSKEWLDSRLLSNTVEPSSSSNGGGTSVEKDNIEKTERLSGIDTVTPGLDNVQGSNPSAEPSSSSTGEGNSAVEKHSAEMTECLLGMGILNPALHNVQVLSPSTPKECLVSSADKSDVANRSDEINHSLDDFNQSNPKPVLKGRVSKMMCPRLAFQLPKVLPVCEHHKREMSLPSKHVSPRKATKSSFRKQYEGPNRHVSRHTEHQKTKLVMKDRNTGPAHMRSCRPTKQIDCTCSSASLDSSTKTKEVNDAEPRCSKSVKTFENVMAKKRKRPILSYDEDAKAMQMEVRMRRRHRESGVMKLRRSTENSDEAMCPGNSNNQLTNDHTKARKQRRANKDNKTPPVNASVPCTQIDAARLASDQQSFICTRPIDRPYWTGIMKIGQEYISLVAHLSNQACKKVQELSMSLPPLMKVTKHSKLKAWPGRWKASEPTAECVGLYFFSDNMRELDQLVHYLNDHSLVLKYVVGFAKLLISPSVFLPEQCQTFQGKRYLWGVFKRRMNTGRIHHVNAK

SEQ ID NO: 167361 - protein, 70 aa, Zea Mays
MKRTVYYNGNMTNTFRPKNLRKILGGGMRQVGFLCAGAHTIWESLLVRIERLKLWQKGQIELNSSQWIQL

SEQ ID NO: 167362 - protein, 70 aa, Zea Mays
MKRTVYYNGNMTNTFRPKNLRKILGGGMRQVGFLCAGAHTIWESLLVRIERLKLWQCEACPSLPNFRYRC

SEQ ID NO: 167363 - protein, 241 aa, Zea Mays
MSDDSDGQRQCRRGVTVDVELGAAMALADMAGVAGPGGEQPPPVRRATPAPSAHQEDEASTRLSLELGEVSIQASPCSSSSSFGGHPPPPPSHQAAYQQPAVPEPATTGYGPRPRHAVTEAEKEAKRLRRVLANRESARQTILRRQAIRDELARKVADLSSQNESMKKVGTTAPCSAAAASGVMSSSRTPLFRSSCTDEPTATVQEKDVVMEEYLSLKEANKQLKEEAHRFPTFHARSILE

SEQ ID NO: 167364 - protein, 247 aa, Zea Mays
MSDDSDGQRQCRRGVTVDVELGAAMALADMAGVAGPGGEQPPPVRRATPAPSAHQEDEASTRLSLELGEVSIQASPCSSSSSFGGHPPPPPSHQAAYQQPAVPEPATTGYGPRPRHAVTEAEKEAKRLRRVLANRESARQTILRRQAIRDELARKVADLSSQNESMKKEKDVVMEEYLSLKEANKQLKEEVAKTSRKPAMPAQQQAAESLVPAPPRPGFLYSAAPPAPVPVPYVWGSWPPSAAAGSE

SEQ ID NO: 167365 - protein, 204 aa, Zea Mays
MSDDSDGQRQCRRGVTVDVELGAAMALADMAGVAGPGGEQPPPVRRATPAPSAHQEDEASTRLSLELGEVSIQASPCSSSSSFGGHPPPPPSHQAAYQQPAVPEPATTGYGPRPRHAVTEVCREGGEAAAARAGQPRVRPPDHPPPPGHPGRARQEGRRPVVAEREHEEGEGRGHGGVPVAQGGEQAAQRRGTSLSYLSCSIYT

SEQ ID NO: 167366 - protein, 168 aa, Zea Mays
MSDDSDGQRQCRRGVTVDVELGAAMALADMAGVAGPGGEQPPPVRRATPAPSAHQEDEASTRLSLELGEVSIQASPCSSSSSFGGHPPPPPSHQAAYQQPAVPEPATTGYGPRPRHAVTEVCKPRRRRSGCGACWPTASPPARPSSAARPSGTSSPGRSPTCRRRTRA

SEQ ID NO: 167367 - protein, 605 aa, Zea Mays
MGLEPLDRQFPCLLQAQAKQHRTAAPPLPFLFLRILLPFRRPSLFSLVATKTTDADADALRQVPGSVGSFAGEEHPPGDPVLFWCGFIAEVLLWDFPVAKMIRLPMYAAFSLLATASAAYYAFSSREQFYPAMVYLSTSKICFVLLLNTGLVAMCVAWQLARRLFLGSLREAEVERLNEQSWREVIEILFAVTIFRQDFSVSFLAMVAALLLVKALHWLAQKRVEYIETTPSVPLLSHIRIVSFMVFLLTVDCLFLSNSLRSLIQKREASVAIFFSFEYTILATSTLSTFVKYIFYVSDMLMEGQWERKAVYTFYLELISDLVHLSLYMLFFIAIFLNYGVPLHLIRELYETFRSFRIRIADYIRYRKITSNMNERFPEATSEELDASDATCIICREEMTTAKKLLCGHLFHVHCLRSWLERQHTCPTCRAPIVPADNGRAASSRQHGAQAGVQPAAGTATPSSEGAPGENMSRRQAKLEAAAAAASLYGRSFVYPPANTLNSRSGSPQPTSSAPQSEASSSNHQSQKDQETQLQNSSDGLVPLPFSADGVVGSGTSTRDLENSLQKAQENFIKSQIEMLQIQLQMVQRGAAGLSSSENTEHTED

SEQ ID NO: 167368 - protein, 478 aa, Zea Mays
MGLEPLDRQFPCLLQAQAKQHRTAAPPLPFLFLRILLPFRRPSLFSLVATKTTDADADALRQVPGSVGSFAGEEHPPGDPVLFWCGFIAEVLLWDFPVAKMIRLPMYAAFSLLATASAAYYAFSSREQFYPAMVSLIQKREASVAIFFSFEYTILATSTLSTFVKYIFYVSDMLMEGQWERKAVYTFYLELISDLVHLSLYMLFFIAIFLNYGVPLHLIRELYETFRSFRIRIADYIRYRKITSNMNERFPEATSEELDASDATCIICREEMTTAKKLLCGHLFHVHCLRSWLERQHTCPTCRAPIVPADNGRAASSRQHGAQAGVQPAAGTATPSSEGAPGENMSRRQAKLEAAAAAASLYGRSFVYPPANTLNSRSGSPQPTSSAPQSEASSSNHQSQKDQETQLQNSSDGLVPLPFSADGVVGSGTSTRDLENSLQKAQENFIKSQIEMLQIQLQMVQRGAAGLSSSENTEHTED

SEQ ID NO: 167369 - protein, 205 aa, Zea Mays
MTTAKKLLCGHLFHVHCLRSWLERQHTCPTCRAPIVPADNGRAASSRQHGAQAGVQPGTATPSSEGAPGENMSRRQAKLEAAAAAASLYGRSFVYPPANTLNSRSGSPQPTSSAPQSEASSSNHQSQKDQETQLQNSSDGLVPLPFSADGVVGSGTSTRDLENSLQKAQENFIKSQIEMLQIQLQMVQRGAAGLSSSENTEHTED

SEQ ID NO: 167370 - protein, 503 aa, Zea Mays
MIRLPMYAAFSLLATASAAYYAFSSREQFYPAMVYLSTSKICFVLLLNTGLVAMCVAWQLARRLFLGSLREAEVERLNEQSWREVIEILFAVTIFRQDFSVSFLAMVAALLLVKALHWLAQKRVEYIETTPSVPLLSHIRIVSFMVFLLTVDCLFLSNSLRSLIQKREASVAIFFSFEYTILATSTLSTFVKYIFYVSDMLMEGQWERKAVYTFYLELISDLVHLSLYMLFFIAIFLNYGVPLHLIRELYETFRSFRIRIADYIRYRKITSNMNERFPEATSEELDASDATCIICREEMTTAKKLLCGHLFHVHCLRSWLERQHTCPTCRAPIVPADNGRAASSRQHGAQAGVQPGTATPSSEGAPGENMSRRQAKLEAAAAAASLYGRSFVYPPANTLNSRSGSPQPTSSAPQSEASSSNHQSQKDQETQLQNSSDGLVPLPFSADGVVGSGTSTRDLENSLQKAQENFIKSQIEMLQIQLQMVQRGAAGLSSSENTEHTED

SEQ ID NO: 167371 - protein, 303 aa, Zea Mays
MLMEGQWERKAVYTFYLELISDLVHLSLYMLFFIAIFLNYGVPLHLIRELYETFRSFRIRIADYIRYRKITSNMNERFPEATSEELDASDATCIICREEMTTAKKLLCGHLFHVHCLRSWLERQHTCPTCRAPIVPADNGRAASSRQHGAQAGVQPGTATPSSEGAPGENMSRRQAKLEAAAAAASLYGRSFVYPPANTLNRSGSPQPTSSAPQSEASSSNHQSQKDQETQLQNSSDGLVPLPFSADGVVGSGTSTRDLENSLQKAQENFIKSQIEMLQIQLQMVQRGAAGLSSSENTEHTED

SEQ ID NO: 167372 - protein, 58 aa, Zea Mays
MLVLLDDGHLTINFYSDTRLVHLASGSSADIVLWVVLIHTPRFARFSASVPARRTCLV

SEQ ID NO: 167373 - protein, 207 aa, Zea Mays
MSKSFTEDAMYQQEREHYEYIIKEGKVIHKQSGEPLDTRGPKGTKWIFVMSTAKKIYAGQKQRGVFQHSSFLAGGATIAAGRFTAENGVIKSIWAYSGHYKPSAENLLNFMNFLEGNGVDLKEVEVRSSTREDYNEDPVPNDSQKFASATMEPTNLPQLVPPLNTTQGNEGDNAPKIKLGQPTKGPCRAVCRAPEPPKSPRRRFLRG

SEQ ID NO: 167374 - protein, 130 aa, Zea Mays
MACIHVWLEQNSTCPVCRISLLDNPNSEHNAPPPPPPPLPGVAVTMSSPGSPEPPGSDPCRCLFAGAGHSSRASSEAPPRHEPDQENQVASGPSVDGGANSNGMPLSEVNPTPPESNSQTVRKQQPGPCK

SEQ ID NO: 167375 - protein, 1191 aa, Zea Mays
MDTAAGPGPRDGPDRTPQGPGASPEEAAADGVKTDIAGGAEALAAAGAAGEADPGGGAAAAGRGGDAEASASEPTAEEVNEGCGGAAAAAGGDRPAAPEADADGGAGKGRSAVHAVSEVEQGQGIAGAAQDVDPAVFEVKKMDVSEGGDASKQNQHSPSCTASEVDVGIVPVAVRDLDPVGSEVMMEVDDGHVREQERAGVAVAGSEFKMEEADGRVVHQGSAATSAGGLQARAEEVGECLVGRYIGRNAPMQAGILIGKVASYDSTAGIYSVVFEDGHNEDLELPELHEFLMPDKNGTLGMSVNCRKRKLGLLVLSGSVSEVKEPASTRQRVDGCEMPANTDALRYSGSGSDMSEDIESSSNSSDFTKEEPSEPCPPVQAVELPPSSGDIHVPEDSISYLFSVYNFLRSFSVQLFLSPFGLDDFVAAINCTVQNNLLDAVHVSLLRALRRYLESKSAQGSQMASNCLKYLDWTLLDALTWPTFLLEYLYVMGCIKNLGGQSFARSLLAAEYYKLSVATKLRVLQILCDHVLESQEYKTILEDRVGYNEEMEYEIDSSTFLEAGSRAVLTRASKASAYKMLNDLQNFESGPNVTNSDVAVADVSQDGNSDDCRICGMDGTLVCCDGCPWAYHSRCIGQNKAFLPQGDWFCPECVVNKLGPTSSRIERGARGAQMFGIDMHGRLFLGTCNYLLVIEISSDVESYARYYNHYDVVKVLQRLALSDAYVDICRQIMEYWKHLLGRVQSERSTILKEVGTRHTPQSSMLSFTPTMSGDGSGWTTLKDGGDSKTVALPQTNVQQKIFANQYTVCSAEQTEKNVDVCKQALSAQNNIHNAPRNGASGPFVASPVSHQNGSIGTGMSNIAQAQPAHSIYRPDLSTVSAKSESFRSSLQGKLHLQMCTERPGNMSCGKAAKLSSFKPQAYMNLYNHGNIAASAAANLAIIASSEGKVSTSQLSAKPKKKVAADNALQLKAFSSAVAQFVWPSTEKKLMEVPRDRCGWCLACRSSASGNKKACFLNMTTSNAAKSSARVLSTMRVIKISDSHFPSIAAYLANMEESLRGLLVGSLQDMQQRERWREQLEEASNCRTVIPLLLELESNIRGVAFSASWFKPIDDWPAESPCPSTGASRPAQHQKRGAGGRRGRRRLLVSEPGTVTDDDNSWTWWTGGNIIKRTLQRGALLHSTIRKAARQG

SEQ ID NO: 167376 - protein, 1245 aa, Zea Mays
MDTAAGPGPRDGPDRTPQGPGASPEEAAADGVKTDIAGGAEALAAAGAAGEADPGGGAAAAGRGGDAEASASEPTAEEVNEGCGGAAAAAGGDRPAAPEADADGGAGKGRSAVHAVSEVEQGQGIAGAAQDVDPAVFEVKKMDVSEGGDASKQNQHSPSCTASEVDVGIVPVAVRDLDPVGSEVMMEVDDGHVREQERAGVAVAGSEFKMEEADGRVVHQGSAATSAGGLQARAEEVGECLVGRYIGRNAPMQAGILIGKVASYDSTAGIYSVVFEDGHNEDLELPELHEFLMPDKNGTLGMSVNCRKRKLGLLVLSGSVSEVKEPASTRQRVDGCEMPANTDALRYSGSGSDMSEDIESSSNSSDFTKEEPSEPCPPVQAVELPPSSGDIHVPEDSISYLFSVYNFLRSFSVQLFLSPFGLDDFVAAINCTVQNNLLDAVHVSLLRALRRYLESKSAQGSQMASNCLKYLDWTLLDALTWPTFLLEYLYVMGCIKNLGGQSFARSLLAAEYYKLSVATKLRVLQILCDHVLESQEYKTILEDRVGYNEEMEYEIDSSTFLEAGSRAVLTRASKASAYKMLNDLQNFESGPNVTNSDVAVADVSQDGNSDDCRICGMDGTLVCCDGCPWAYHSRCIGQNKAFLPQGDWFCPECVVNKLGPTSSRIERGARGAQMFGIDMHGRLFLGTCNYLLVIEISSDVESYARYYNHYDVVKVLQRLALSDAYVDICRQIMEYWKHLLGRVQSERSTILKEVGTRHTPQSSMLSFTPTMSGDGSGWTTLKDGGDSKTVALPQTNVQQKIFANQYTVCSAEQTEKNVDVCKQALSAQNNIHNAPRNGASGPFVASPVSHQNGSIGTGMSNIAQAQPAHSIYRPDLSTVSAKSESFRSSLQGKLHLQMCTERPGNMSCGKAAKLSSFKPQAYMNLYNHGNIAASAAANLAIIASSEGKVSTSQLSAKPKKKVAADNALQLKAFSSAVAQFVWPSTEKKLMEVPRDRCGWCLACRSSASGNKKACFLNMTTSNAAKSSARVLSTMRVIKISDSHFPSIAAYLANMEESLRGLLVGSLQDMQQRERWREQLEEASNCRTVIPLLLELESNIRGVAFSASWFKPIDDWPAESPCPSTGASRPAQHQKRGAGGRRGRRRLLVSEPGTVTDDDNSWTWWTGGNIIKRTLQRGALLHSTIRKAARQGGKKRLAGLSYHEGSNFPRRSRQLFWRACVGLSQTSSQLALQEFRNVLPIYTQGE

SEQ ID NO: 167377 - protein, 1438 aa, Zea Mays
MASNCLKYLDWTLLDALTWPTFLLEYLYVMGCIKNLGGQSFARSLLAAEYYKLSVATKLRVLQILCDHVLESQEYKTILEDRVGYNEEMEYEIDSSTFLEAGSRAVLTRASKASAYKMLNDLQNFESGPNVTNSDVAVADVSQDGNSDDCRICGMDGTLVCCDGCPWAYHSRCIGQNKAFLPQGDWFCPECVVNKLGPTSSRIERGARGAQMFGIDMHGRLFLGTCNYLLVIEISSDVESYARYYNHYDVVKVLQRLALSDAYVDICRQIMEYWKHLLGRVQSERSTILKEVGTRHTPQSSMLSFTPTMSGDGSGWTTLKDGGDSKTVALPQTNVQQKIFANQYTVCSAEQTEKNVDVCKQALSAQNNIHNAPRNGASGPFVASPVSHQNGSIGTGMSNIAQAQPAHSIYRPDLSTVSAKSESFRSSLQGKLHLQMCTERPGNMSCGKAAKLSSFKPQAYMNLYNHGNIAASAAANLAIIASSEGKVSTSQLSAKPKKKVAADNALQLKAFSSAVAQFVWPSTEKKLMEVPRDRCGWCLACRSSASGNKKACFLNMTTSNAAKSSARVLSTMRVIKISDSHFPSIAAYLANMEESLRGLLVGSLQDMQQRERWREQLEEASNCRTVIPLLLELESNIRGVAFSASWFKPIDDWPAESPCPSTGASRPAQHQKRGAGGRRGRRRLLVSEPGTVTDDDNSWTWWTGGNIIKRTLQRGALLHSTIRKAARQGGKKRLAGLSYHEGSNFPRRSRQLFWRACVGLSQTSSQLALQVRYLDAHIRWKEFISPDQIPSDGKSSDADFSALRNAVLCDKKIIDNKIRYALKFPNQKHLPVRLTKNILEAESDQDEIRKMWFSENHVPLYMLREFEQHAEASSLPTPGIPECFTNLYPRRVKAPDRDVFSYLFHKGEVYPCASCKKGVLYRDIVKCSSCQGNCHKECTSRSVVSKGGSTTSSLICKLCLQKRNLMLTSYNTNASYIQHLQKNNGQQPVTAPRNVSKVSSSHSAEPAPKVEAEPVTKVKAQRVGNVEATTQPVLNVKAQPPAKVVTQNITSVQKTKAKKSKSEKPTKAKKVQAITYFGLIWKKNKNDKDDGSEFRANDVILKSKDGIGSSIKPKCCLCDKAYSPEFLYVRCERCKNWFHGDSLQLEEDRIGELVGYRCCRCRRRAIPPCPHSDNYVKPEPEFSEQTVATSSVSTMLSSGKTSASADQDPLLASYGIVEPIGEETGDVDLSANTASIAPGSSQKLSIRRALAKTSGYLDQAGKSVNEYYVQNQNTPPGNGNINFSHTNEISFSEADSVGASGLLGWDFSRGTAYAAPPGFTSNRQQNRTSRGSFVPDECEREPQTYFSFTELLEADDAQLDDNAFGIATGLQGDANGSGSFVQRGVGFGGTSFMAEDGASNMNVPTNGPTPEEVACHNGTNTQPPPDPRCSVRDLRTHR

SEQ ID NO: 167378 - protein, 706 aa, Zea Mays
MASNCLKYLDWTLLDALTWPTFLLEYLYVMGCIKNLGGQSFARSLLAAEYYKLSVATKLRVLQILCDHVLESQEYKTILEDRVGYNEEMEYEIDSSTFLEAGSRAVLTRASKASAYKMLNDLQNFESGPNVTNSDVAVADVSQDGNSDDCRICGMDGTLVCCDGCPWAYHSRCIGQNKAFLPQGDWFCPECVVNKLGPTSSRIERGARGAQMFGIDMHGRLFLGTCNYLLVIEISSDVESYARYYNHYDVVKVLQRLALSDAYVDICRQIMEYWKHLLGRVQSERSTILKEVGTRHTPQSSMLSFTPTMSGDGSGWTTLKDGGDSKTVALPQTNVQQKIFANQYTVCSAEQTEKNVDVCKQALSAQNNIHNAPRNGASGPFVASPVSHQNGSIGTGMSNIAQAQPAHSIYRPDLSTVSAKSESFRSSLQGKLHLQMCTERPGNMSCGKAAKLSSFKPQAYMNLYNHGNIAASAAANLAIIASSEGKVSTSQLSAKPKKKVAADNALQLKAFSSAVAQFVWPSTEKKLMEVPRDRCGWCLACRSSASGNKKACFLNMTTSNAAKSSARVLSTMRVIKISDSHFPSIAAYLANMEESLRGLLVGSLQDMQQRERWREQLEEASNCRTVIPLLLELESNIRGVAFSASWFKPIDDWPAESPCPSTGASRPAQHQKRGAGGRRGRRRLLVSEPEGGSSTFNHKKSCSPRW

SEQ ID NO: 167379 - protein, 1895 aa, Zea Mays
MDTAAGPGPRDGPDRTPQGPGASPEEAAADGVKTDIAGGAEALAAAGAAGEADPGGGAAAAGRGGDAEASASEPTAEEVNEGCGGAAAAAGGDRPAAPEADADGGAGKGRSAVHAVSEVEQGQGIAGAAQDVDPAVFEVKKMDVSEGGDASKQNQHSPSCTASEVDVGIVPVAVRDLDPVGSEVMMEVDDGHVREQERAGVAVAGSEFKMEEADGRVVHQGSAATSAGGLQARAEEVGECLVGRYIGRNAPMQAGILIGKVASYDSTAGIYSVVFEDGHNEDLELPELHEFLMPDKNGTLGMSVNCRKRKLGLLVLSGSVSEVKEPASTRQRVDGCEMPANTDALRYSGSGSDMSEDIESSSNSSDFTKEEPSEPCPPVQAVELPPSSGDIHVPEDSISYLFSVYNFLRSFSVQLFLSPFGLDDFVAAINCTVQNNLLDAVHVSLLRALRRYLESKSAQGSQMASNCLKYLDWTLLDALTWPTFLLEYLYVMGCIKNLGGQSFARSLLAAEYYKLSVATKLRVLQILCDHVLESQEYKTILEDRVGYNEEMEYEIDSSTFLEAGSRAVLTRASKASAYKMLNDLQNFESGPNVTNSDVAVADVSQDGNSDDCRICGMDGTLVCCDGCPWAYHSRCIGQNKAFLPQGDWFCPECVVNKLGPTSSRIERGARGAQMFGIDMHGRLFLGTCNYLLVIEISSDVESYARYYNHYDVVKVLQRLALSDAYVDICRQIMEYWKHLLGRVQSERSTILKEVGTRHTPQSSMLSFTPTMSGDGSGWTTLKDGGDSKTVALPQTNVQQKIFANQYTVCSAEQTEKNVDVCKQALSAQNNIHNAPRNGASGPFVASPVSHQNGSIGTGMSNIAQAQPAHSIYRPDLSTVSAKSESFRSSLQGKLHLQMCTERPGNMSCGKAAKLSSFKPQAYMNLYNHGNIAASAAANLAIIASSEGKVSTSQLSAKPKKKVAADNALQLKAFSSAVAQFVWPSTEKKLMEVPRDRCGWCLACRSSASGNKKACFLNMTTSNAAKSSARVLSTMRVIKISDSHFPSIAAYLANMEESLRGLLVGSLQDMQQRERWREQLEEASNCRTVIPLLLELESNIRGVAFSASWFKPIDDWPAESPCPSTGASRPAQHQKRGAGGRRGRRRLLVSEPGTVTDDDNSWTWWTGGNIIKRTLQRGALLHSTIRKAARQGGKKRLAGLSYHEGSNFPRRSRQLFWRACVGLSQTSSQLALQVRYLDAHIRWKEFISPDQIPSDGKSSDADFSALRNAVLCDKKIIDNKIRYALKFPNQKHLPVRLTKNILEAESDQDEIRKMWFSENHVPLYMLREFEQHAEASSLPTPGIPECFTNLYPRRVKAPDRDVFSYLFHKGEVYPCASCKKGVLYRDIVKCSSCQECTSRSVVSKGGSTTSSLICKLCLQKRNLMLTSYNTNASYIQHLQKNNGQQPVTAPRNVSKVSSSHSAEPAPKVEAEPVTKVKAQRVGNVEATTQPVLNVKAQPPAKVVTQNITSVQKTKAKKSKSEKPTKAKKVQAITYFGLIWKKNKNDKDDGSEFRANDVILKSKDGIGSSIKPKCCLCDKAYSPEFLYVRCERCKNWFHGDSLQLEEDRIGELVGYRCCRCRRRAIPPCPHSDNYVKPEPEFSEQTVATSSVSTMLSSGKTSASADQDPLLASYGIVEPIGEETGDVDLSANTASIAPGSSQKLSIRRALAKTSGYLDQAGKSVNEYYVQNQNTPPGNGNINFSHTNEISFSEADSVGASGLLGWDFSRGTAYAAPPGFTSNRQQNRTSRGSFVPDECEREPQTYFSFTELLEADDAQLDDNAFGIATGLQGDANGSGSFVQRGVGFGGTSFMAEDGASNMNVPTNGPTPEEVACHNGTNTQPPPDPRCSVRDLRTHR

SEQ ID NO: 167380 - protein, 588 aa, Zea Mays
MWFSENHVPLYMLREFEQHAEASSLPTPGIPECFTNLYPRRVKAPDRDVFSYLFHKGEVYPCASCKKGVLYRDIVKCSSCQGNCHKECTSRSVVSKGGSTTSSLICKLCLQKRNLMLTSYNTNASYIQHLQKNNGQQPVTAPRNVSKVSSSHSAEPAPKVEAEPVTKVKAQRVGNVEATTQPVLNVKAQPPAKVVTQNITSVQKTKAKKSKSEKPTKAKKVQAITYFGLIWKKNKNDKDDGSEFRANDVILKSKDGIGSSIKPKCCLCDKAYSPEFLYVRCERCKNWFHGDSLQLEEDRIGELVGYRCCRCRRRAIPPCPHSDNYVKPEPEFSEQTVATSSVSTMLSSGKTSASADQDPLLASYGIVEPIGEETGDVDLSANTASIAPGSSQKLSIRRALAKTSGYLDQAGKSVNEYYVQNQNTPPGNGNINFSHTNEISFSEADSVGASGLLGWDFSRGTAYAAPPGFTSNRQQNRTSRGSFVPDECEREPQTYFSFTELLEADDAQLDDNAFGIATGLQGDANGSGSFVQRGVGFGGTSFMAEDGASNMNVPTNGPTPEEVACHNGTNTQPPPDPRCSVRDLRTHR

SEQ ID NO: 167381 - protein, 337 aa, Zea Mays
MAMPAALLLFLLVLSAFEAGELPRCSAAAAVLVHDDLSPVQDTSPIATVPSTNPSPAIITVPSTNPTITIPSLNPLPTPITAPSTNIPSPSTMLPPVPVIYPLPTPSTSSPPAVPVTNPAVTTPSTSPPSTPTPFNNPPLLNPTPTPAPTVTAPAASGREVWCVAKAAGSSEAALQNALDYACGIGGVDCSAIQPSGSCYYPNTIQAHASYAFNTYYQRNPVSSSCDFGGTAMLVTANPSSGSCVFASSLPSSSSSTVGYDPASTATPSSPSSGSDSGAPVLNASGAGSSESSDFGFDIPGAVNLGSGWRSVSPPNWPWAALVWILVALCVHKEGMV

SEQ ID NO: 167382 - protein, 323 aa, Zea Mays
MGCHDKGTCYISGKPAVLVHDDLSPVQDTSPIATVPSTNPSPAIITVPSTNPTITIPSLNPLPTPITAPSTNIPSPSTMLPPVPVIYPLPTPSTSSPPAVPVTNPAVTTPSTSPPSTPTPFNNPPLLNPTPTPAPTVTAPAASGREVWCVAKAAGSSEAALQNALDYACGIGGVDCSAIQPSGSCYYPNTIQAHASYAFNTYYQRNPVSSSCDFGGTAMLVTANPSSGSCVFASSLPSSSSSTVGYDPASTATPSSPSSGSDSGAPVLNASGAGSSESSDFGFDIPGAVNLGSGWRSVSPPNWPWAALVWILVALCVHKEGMV

SEQ ID NO: 167383 - protein, 363 aa, Zea Mays
MRHLLLSRFLRRGGGSGIPNGHYHHLPLLRALSSSPSPVSSDAELRKYAGYALLLLGCGAATYYSFPFPADALHKKAVPFRYAPLPEDLHAVSNWSGTHEVHARVLLQPDSLPALEGALAAAHKERRKLRPLGSGLSPNGIALSRAGMVNLALMDKVLDVDAKKKTVTVQAGIRVAELVDALREHGLTLQNFASIREQQVGGFTQVGAHGTGATLPPVDEQVISMKLVTPAKGTIELSREKDPELFYLARCGLGGLGVVAEVTLQCVERHQLVEHTFVSNADEVKKNHKKWLSENKHIKYLWIPYTDTVVVVQCNPPSKWITPKLASKYGKDEALQHVRDLYRESLKKYRCFSELKQKVKTQK

SEQ ID NO: 167384 - protein, 185 aa, Zea Mays
MGWSDEILGFDCGGQQWVSENCFPTGTLAKPSMKDLDYIDKLLQLIEKEEIPAPGPIEQRWTARSKSPMSPASSSEEDDVFSWVGIIMYLPTSDARQRKEITEEFFSYRSLARSLWDDYSAYEHWAKIEVPKDKDELAELQARLRKRFPVDAYNKARMELDPNKVLSNAKLEKMFPVLEPPHQTK

SEQ ID NO: 167385 - protein, 350 aa, Zea Mays
MDAGGTPPLPLLLLAAAAALLGAALGWLLLAWRSAARPGRLPPAARGCRSSGRRCASSRRTRRRTRSRSSTSAWRHGSGVFTTHVFGERTVFSADPAFNRLLLAAEGRAVSCSYPSSIATLLGPRSLLLTAGPAHKRLHSLTLARLGRPASPPLLAHIDRLVLATVRDWGRPGAGAGPAAVVRLLDEAKKITFNLTVWQLVSIEPGPWTESLRREYVKLVDGFFSIPFPFAYLLPFTAYGQALKARKNVAGALREVIRKRMGEEAGTGPGAGRNGEKKDMVEELLEAEGGSFSVEEMVDFCLSLLVAGYETTSVLMTLAVKFLTETPTALAQLKVLWLRIMGDLIGNLPG

SEQ ID NO: 167386 - protein, 364 aa, Zea Mays
MDAGGTPPLPLLLLAAAAALLGAALGWLLLAWRSAARPGRLPPAARGCRSSGRRCASSRRTRRRTRSRSSTSAWRHGSGVFTTHVFGERTVFSADPAFNRLLLAAEGRAVSCSYPSSIATLLGPRSLLLTAGPAHKRLHSLTLARLGRPASPPLLAHIDRLVLATVRDWGRPGAGAGPAAVVRLLDEAKKITFNLTVWQLVSIEPGPWTESLRREYVKLVDGFFSIPFPFAYLLPFTAYGQALKARKNVAGALREVIRKRMGEEAGTGPGAGRNGEKKDMVEELLEAEGGSFSVEEMVDFCLSLLVAGYETTSVLMTLAVKFLTETPTALAQLKEEHDSIRHRKGKDEQPLQWSDYKSMPFTQC

SEQ ID NO: 167387 - protein, 446 aa, Zea Mays
MDGSLPPPAPLSDSSLLGRVLSRPCSCLVSPSFFPSPSHPLHARAAFHSVAIAMAVYGLLGFLGDRSDRSRSSPSKGKARHRPSQPQFPTTSKRTQQPRGASFPKHTSLCCLTAVQAVQHSAAMAMNKQLEAMAKEASVDDVMKVLMASRKFEMQELWATCSHLVARSGLSADLLAKHLPIDVVAKIEEIRAAANKSPVCAVSGGGGPRSPFLLTHHYLPVNGASASASASEAERDHRVRRMRRALDAADIELVKLMVMGEGLDLDAALAVHYAVQHCGRDVVKALLELGAADVNSRAGPAGKTALHLAAEMVSPDMVSVLLDHHADPSARTLDGVTPLDVLRGLTSEFLFRGAVPGLTHIEPNKLRLCLELVQSAVMVTTRDDDAGAGGGGSDAADDSLVSLTMNSTLMYQGQEMAAAVAGEARKGSSGGGRGSPSNLYFPTAFP

SEQ ID NO: 167388 - protein, 429 aa, Zea Mays
MGAMGIVVRACAPPAPAAAAAPAPSGSRDAGQAQRRSKPSRTGRVRVLGGTGRVGGSTATALSKLCPKLGILVGGRNREKGESIAAKLGGQPEFVQVDTRNAGMLEEALQGQYHTSSHVVAVRGVAKPEAAATPARRSRPIPLASVAVWSLVATGAANAAELWDPLALHGSSGLVLADLGIGDWFGGLLFSAGQQANEAVQDQLSALSFSSLAVIFGAGLVTSLSPCTLSVLPLTLGYIGAFGSGKGRSEVVGNSIAFSLGLATTLAILGVAASFAGKAYGQVGQGLPVAASGLAIIMGLNLLEVLELQLPSFFSDFDPRAAAANLPSGVQAYLAGLTFALAASPCSTPVLATLLGYVATSRDPIIGGSLLLTYTTGYVAPLLIAASFAGALQSLLSFRRYSAWINPIRSWTLGTLLWIVMGLGNWRGG

SEQ ID NO: 167389 - protein, 235 aa, Zea Mays
MGAMGIVVRACAPPAPAAAAAPAPSGSRDAGQAQRRSKPSRTGRVRVLGGTGRVGGSTATALSKLCPKLGILVGGRNREKGESIAAKLGGQPEFVQVDTRNAGMLEEALQVVAVRGVAKPEAAATPARRSRPIPLASVAVWSLVATGAANAAELWDPLALHGSSGLVLADLGIGDWFGGLLFSAGQQANEAVQDQLSALSFSSLAVIFGAGLVTSLSPCTLSVLPLTLGYIVLSS

SEQ ID NO: 167390 - protein, 417 aa, Zea Mays
MGAMGIVVRACAPPAPAAAAAPAPSGSRDAGQAQRRSKPSRTGRVRVLGGTGRVGGSTATALSKLCPKLGILVGGRNREKGESIAAKLGGQPEFVQVDTRNAGMLEEALQGQYHTSSHVVAVRGVAKPEAAATPARRSRPIPLASVAVWSLVATGAANAAELWDPLALHGSSGLVLADLGIGDWFGGLLFSAGQQANEAVQDQLSALSFSSLAVIFGAGLVTSLSPCTLSVLPLTLGYIGAFGSGKGRSEVVGNSIAFSLGLATTLAILGVAASFAGKAYGQVGQGLPVAASGLAIIMGLNLLEVLELQLPSFFSDFDPRAAAANLPSGVQAYLAGLTFALAASPCSTPVLATLLGYVATSRDPIIGGSLLLTYTTGYVAPLLIAASFAGALQSLLSFRRYSAWINPISNNVNNVSL

SEQ ID NO: 167391 - protein, 436 aa, Zea Mays
MGIVVRACAPPAPAAAAAPAPSGSRDAGQAQRRSKPSRTGRVRVLGGTGRVGGSTATALSKLCPKLGILVGGRNREKGESIAAKLGGQPEFVQVDTRNAGMLEEALQGQYHTSSHVVAVRGVAKPEAAATPARRSRPIPLASVAVWSLVATGAANAAELWDPLALHGSSGLVLADLGIGDWFGGLLFSAGQQANEAVQDQLSALSFSSLAVIFGAGLVTSLSPCTLSVLPLTLGYIGAFGSGKGRSEVVGNSIAFSLGLATTLAILGVAASFAGKAYGQVGQGLPVAASGLAIIMGLNLLEVLELQLPSFFSDFDPRAAAANLPSGVQAYLAGLTFALAASPCSTPVLATLLGYVATSRDPIIGGSLLLTYTTGYVAPLLIAASFAGALQWCIFTWWRCLYPTGQGVSSNINGHVDHGWTRIARHQSVWRANDIWM

SEQ ID NO: 167392 - protein, 318 aa, Zea Mays
MLEEALQVVAVRGVAKPEAAATPARRSRPIPLASVAVWSLVATGAANAAELWDPLALHGSSGLVLADLGIGDWFGGLLFSAGQQANEAVQDQLSALSFSSLAVIFGAGLVTSLSPCTLSVLPLTLGYIGAFGSGKGRSEVVGNSIAFSLGLATTLAILGVAASFAGKAYGQVGQGLPVAASGLAIIMGLNLLEVLELQLPSFFSDFDPRAAAANLPSGVQAYLAGLTFALAASPCSTPVLATLLGYVATSRDPIIGGSLLLTYTTGYVAPLLIAASFAGALQSLLSFRRYSAWINPIRSWTLGTLLWIVMGLGNWRGG

SEQ ID NO: 167393 - protein, 328 aa, Zea Mays
MLEEALQGQYHTSSHAVRGVAKPEAAATPARRSRPIPLASVAVWSLVATGAANAAELWDPLALHGSSGLVLADLGIGDWFGGLLFSAGQQANEAVQDQLSALSFSSLAVIFGAGLVTSLSPCTLSVLPLTLGYIGAFGSGKGRSEVVGNSIAFSLGLATTLAILGVAASFAGKAYGQVGQGLPVAASGLAIIMGLNLLEVLELQLPSFFSDFDPRAAAANLPSGVQAYLAGLTFALAASPCSTPVLATLLGYVATSRDPIIGGSLLLTYTTGYVAPLLIAASFAGALQSLLSFRRYSAWINPISGAFLLGGGVYTLLDRVFPATSMVM

SEQ ID NO: 167394 - protein, 337 aa, Zea Mays
MVMQFKHHAYYAVTSSDPSSSPVVAVRGVAKPEAAATPARRSRPIPLASVAVWSLVATGAANAAELWDPLALHGSSGLVLADLGIGDWFGGLLFSAGQQANEAVQDQLSALSFSSLAVIFGAGLVTSLSPCTLSVLPLTLGYIGAFGSGKGRSEVVGNSIAFSLGLATTLAILGVAASFAGKAYGQVGQGLPVAASGLAIIMGLNLLEVLELQLPSFFSDFDPRAAAANLPSGVQAYLAGLTFALAASPCSTPVLATLLGYVATSRDPIIGGSLLLTYTTGYVAPLLIAASFAGALQSLLSFRRYSAWINPISGAFLLGGGVYTLLDRVFPATSMVM

SEQ ID NO: 167395 - protein, 300 aa, Zea Mays
MLEEALQVVAVRGVAKPEAAATPARRSRPIPLASVAVWSLVATGAANAAELWDPLALHGSSGLVLADLGIGDWFGGLLFSAGQQANEAVQDQLSALSFSSLAVIFGAGLVTSLSPCTLSVLPLTLGYIGAFGSGKGRSEVVGNSIAFSLGLATTLAILGVAASFAGKAYGQVLELQLPSFFSDFDPRAAAANLPSGVQAYLAGLTFALAASPCSTPVLATLLGYVATSRDPIIGGSLLLTYTTGYVAPLLIAASFAGALQSLLSFRRYSAWINPISGAFLLGGGVYTLLDRVFPATSMVM

SEQ ID NO: 167396 - protein, 629 aa, Zea Mays
MAKKLGKKARKFARKNLQSAAKRNRKIRNQFKHRRGPRGGGSAGREDGDEHVLQRVLDPTMVTDDAAATLIHGLEFPEDDAELDADLSDSDGYLSEDPGCPYYSDSEDEKAAKDCIMEEGLDRQNDDMNRDIKKQKKKLKKLLDKDPEFANFLEKWQSELESSRSKGDSDEEGMDSMDDDDDSNDGNLPNAKRFQSARVFYQIIMFVLSESDNIFRALLEIQDDVNKGKIMNLRNSKKWLTVDSLIKSYLSSSLDLLSQLTDNKILAFVLTRLRVSVVLFSAYPSTSSRLVKILFRLWASGDRSLSLSAFLMIREVASLLPDCLDHCLTKSYNTYLASTNLVNDRNTKHIYFLMDCLVELYSLDVQKSYERAIISVEQLNAILRQASKTKEKEDLRKIDNWQYISCVNLWVRFLCCHYKDYNLHPLFSQVLQVIRGVAHLFPGTRYLPLRLKLVQMLNELSTCSQMFYPIPSLLFDCLELREVSQKEQTQRTKINFSSLLKVPKNLLKSRDFQEECILSAIQILSAHFAQWSYHVSFPEVATIPLVLLKRLHEQTTVESLRRPIKRLIDQVTENKDFIERKREVVSFSPNDKASVDSFLQEEKVSRTASFTRFYASVAENRQPKWRKTL

SEQ ID NO: 167397 - protein, 174 aa, Zea Mays
MLNELSTCSQMFYPIPSLLFDCLELREVSQKEQTQRTKINFSSLLKVPKNLLKSRDFQEECILSAIQILSAHFAQWSYHVSFPEVATIPLVLLKRLHEQTTVESLRRPIKRLIDQVTENKDFIERKREVVSFSPNDKASVDSFLQEEKVSRTASFTRFYASVAENRQPKWRKTL

SEQ ID NO: 167398 - protein, 228 aa, Zea Mays
MHPMLLDDVTLLIASIIVAYLMRAEQKSLEEALEALKEISESACPNDGFLDQLKLFEEMGFKVDTSSPLYKRFRLKLLGQSYISGEKISSYMFEDDPGLSLESGSCQDSSKVEQRKTAYRCRKCRRVIAVEGNVISHVPGEGESCFDWNRRKSGHPYNNKEHGCSSLFVEPLKWMTPVEDGALEGKLSCIHCGARLGYFNWSGIQCNCGSWVTPAFQIVKSKVDISTI

SEQ ID NO: 167399 - protein, 351 aa, Zea Mays
MPYLVRERLYFGGIKDAIAALTESSSTPDFTHVLSVVSSASISFITDCRPGLEIPTEEVLRVVAGEEGAAPTAAVPPGTLMRVVERAGHGLRVTRMAVPLRDTEEADLLDRLEPCLEFIDEGRKVGNVLVHCFAGVSRSASIIVAYLMRAEQKSLEEALKEISESACPNDGFLDQLKLFEEMGFKVDTSSPLYKRFRLKLLGQSYISGEKISSYMFEDDPGLSLESGSCQDSSKVEQRKTAYRCRKCRRVIAVEGNVISHVPGEGESCFDWNRRKSGHPYNNKEHGCSSLFVEPLKWMTPVEDGALEGKLSCIHCGARLGYFNWSGIQCNCGSWVTPAFQIVKSKVDISTI

SEQ ID NO: 167400 - protein, 137 aa, Zea Mays
MFEDDPGLSLESGSCQDSSKVEQRKTAYRCRKCRRVIAVEGNVISHVPGEGESCFDWNRRKSGHPYNNKEHGCSSLFVEPLKWMTPVEDGALEGKLSCIHCGARLGYFNWSGIQCNCGSWVTPAFQIVKSKVDISTI

SEQ ID NO: 167401 - protein, 541 aa, Zea Mays
MSGPFAETRRPPARRPLSSCRSAPLSDHPPPHSSPATGAHFHELASPFFAQYPPASSPPPPSLSAWVPMETSGAAAAATEVGWYVLGPNQESVGPYALAELREHFANGYLNESTMLWAEGRKAWMALSSIPDLHSAVTAKDRFEQDVDGDFEKFQKEVTEAEAEVKALKGSDVDQQDDERPATPPDGESEFTDDDGTIYKWDRTLRAWVPQNDASGSKEGYAVEEMTFALEEEVFQAPDILGPSALEEIDTLSESKNKGSDKAETRGDKKRKSSEKPSEKKEANKPPDSWFDLKVNTHVYITGLPDDVTVEEIVETFSKCGIIKEDPETKKPRVKIYTDKETGRKKGDALVTYFKEPSVALAVQLLDGTSFRSGGKTPMSVSPAKFEQKGDVFISKKSDKQKKRKIKKVEDKMLGWGGHDDKKLMIPTTVILRHMFTPAELRADEELLSELETDVREECIKFGPVDNVKVCENHPQGVILVKFKDRKDGAKCIEKMNGRWFAGQQIHASEDDGSVNHTLIRDYDAEVSRLDRFGEELEEST

SEQ ID NO: 167402 - protein, 302 aa, Zea Mays
MSGPFAETRRPPARRPLSSCRSAPLSDHPPPHSSPATGAHFHELASPFFAQYPPASSPPPPSLSAWVPMETSGAAAAATEVGWYVLGPNQESVGPYALAELREHFANGYLNESTMLWAEGRKAWMALSSIPDLHSAVTAKDRFEQDAPDVDGDFEKFQKEVTEAEAEVKALKGSDVDQQDDERPATPPDGESEFTDDDGTIYKWDRTLRAWVPQNDASGSKEGYAVEEMTFALEEEVFQAPDILGPSALEEIDTLSESKNKGSDKAETRGDKKRKSSEKPSEKKLTNLQTVGLISKLTHMST

SEQ ID NO: 167403 - protein, 190 aa, Zea Mays
MIRDLNVAERTEDIGFYAGFVGASFMFGRCLTSTAWGIAADRIGRKPVVVFGISSVVVFNTLFGLSVNYWMAIATRFLLGALNGLLGPIKAYAIEVCRPEHEALALSLVSTAWGIGLIIGPALGGYLALPAENFPAIFSPDSVFGRICQVPVFPTMPLHVGLRCCCSSELHMDAGDSAQAQSSREYEPGR

SEQ ID NO: 167404 - protein, 392 aa, Zea Mays
MLDFNRLGNSGGPYREETCRRVRHLLCGERFMCPRVVFNTLFGLSVNYWMAIATRFLLGALNGLLGPIKAYAIEVCRPEHEALALSLVSTAWGIGLIIGPALGGYLALPAENFPAIFSPDSVFGRFPYFLPCLCTSVFAAAVLVSCIWMPETLHRHKVHESTSQDVEKVQESGIRKKKSLFRNWPLMSSIIVYCIFSFHDMAYTEVFSLWAESDKKYGGLSLSSEDVGQVLAVTGASLLVYQLFLYPRINKVLGPIKSSRIAAILCIPILFAYPYMTYISEPGLSIILNIASAIKNNLAVTIITGTFILQNNAVPQDQRGAANGLSMTGMSFFKALAPAGAGIVFSWAQKRQHAFFFPGDQMVFFLLNVVELVGLILTFKPFLAVPERCDSR

SEQ ID NO: 167405 - protein, 180 aa, Zea Mays
MEEVEQQLTKKQIEEFREAFSLFDKDGDGTITTKELGTVMRSLGQSPTEEELQEMVDEVDADGSGAIDLQEFLTLLARQMREASGADEDELREAFHVFDQDQNGFISRDELRHVLQNLGERLSEEELAEMLREADADGDGQINYSEFAKVMLAKRRNQELEEHGSESSHSKGLCPSCIIL

SEQ ID NO: 167406 - protein, 300 aa, Zea Mays
MSLITFSSFFSATTLTGLHFVTTTLMTILFRWLGLSQPSHLPLADLVKFVIFSNLSIVGMNVSLMWNSVGFYQIAKLCMIPASCLLEVVFDHVHYSRDTKLSIMVVLIGVAVCTVTDVSVNARGLIAAVIAVWSTALQQYYVHFLQRKYSLNSFNLLGHTAPAQAGSLLLVGPFADYLLTGKRVDQFSLSSLALFFLALSCFIAIGVNLSQFICIGRFSAVSFQVLGHMKTVLVLSLGFLFFGKEGLNLQVVLGMVLAVLGMIWYGNASAKPGGKERRSILPVRSASLKGSSEEKAGAEK

SEQ ID NO: 167407 - protein, 275 aa, Zea Mays
MTILFRWLGLSQPSHLPLADLVKFVIFSNLSIVGMNVSLMWNSVGFYQIAKLCMIPASCLLEVVFDHVHYSRDTKLSIMVVLIGVAVCTVTDVSVNARGLIAAVIAVWSTALQQYYVHFLQRKYSLNSFNLLGHTAPAQAGSLLLVGPFADYLLTGKRVDQFSLSSLALFFLALSCFIAIGVNLSQFICIGRFSAVSFQVLGHMKTVLVLSLGFLFFGKEGLNLQVVLGMVLAVLGMIWYGNASAKPGGKERRSILPVRSASLKGSSEEKAGAEK

SEQ ID NO: 167408 - protein, 306 aa, Zea Mays
MAGAKADVDAETGDGSGVGSGGGGLFSEQMLIDKLNRLNNSATSIETLSQWCIFHRKRAKRVVDTWEKQFTSSREEKKIPFLYLSNDILQNSKRKGADYVDEFWRVLPRSLKHVYENGGEEGRKQVARLILIWDQRKVFGTRIGSMKNSILGDNPPILDNNVNSLNPSSNPTSNSKAARKDSGTVVKKLTVGGMPEKIVSAYQSVFDQHFDEDTALNKCKSTVGLLERINKDINDASINGNQPASSLISDLQEQEMTLKQCIEQLESAGRVRISLINQLKEALSEQESKSIILRDQLQLVNVRRHK

SEQ ID NO: 167409 - protein, 733 aa, Zea Mays
MAGAKADVDAETGDGSGVGSGGGGLFSEQMLIDKLNRLNNSATSIETLSQWCIFHRKRAKRVVDTWEKQFTSSREEKKIPFLYLSNDILQNSKRKGADYVDEFWRVLPRSLKHVYENGGEEGRKQVARLILIWDQRKVFGTRIGSMKNSILGDNPPILDNNVNSLNPSSNPTSNSKAARKDSGTVVKKLTVGGMPEKIVSAYQSVFDQHFDEDTALNKCKSTVGLLERINKDINDASINGNQPASSLISDLQEQEMTLKQCIEQLESAGRVRISLINQLKEALSEQESKSIILRDQLQTDAEARGVARKLQSWRSQHSVPEGKRKGTDASCSSQGSTTGAGCRQMDETTQSESSTVVSSPGHLEHQDHSTVPVDPVLEIPPEFDPDSAEFISDISDYVTEYGKKNVVEISLESRNSAAKQHWEQMEISLEFDTDASELVSDTWHHGANQQRGELEASLEFDPDTSELAPDITEYTLKLKQSHERARKLRADLAVEEQREQELSRMLKGIVTDPNFTETHKKRPRRKSSIERLKVSRRLAEEAMNYFEECVSISTMDSTDFSSPEDPQPNSVVNVPPKSNSRFFHKGRSIFQEPHTLADQHGYHVESDKQTQCSISATGSDVSDSVIFSHTNGAGLKIRSVSSDDPDGFDTPRSRSSCFSFTHEPVKKLENCDVRQYLGNFGRGNNTELKETRSSYFADDYASQKVDPDLLKDMVTFQNRIEYGGLVICNIRTF

SEQ ID NO: 167410 - protein, 259 aa, Zea Mays
MITPPDQTAAMMHGSGVRSTPPHSQPLNPAVSLPPTVSAVGDESKRTAAAMADKLASLSAPVQVLTSILSSFAAEQAASINGGSPSGELSGVPPGFHIDKRPRLEKTGQAEAGAPPFFGQASQVQQQVGAVPTSFGGTHPPTPGPFPPPPPPLPPLLPPLMQQFGQNTGGMMGMRGPFGMMAGSMPPPPPLSNILPAGFPGLSGPPPPPPLPPAQSQPQQQQTSQAPQQSPTSAGFFQSSGMGFFPPVQVQQSQPAQRQ

SEQ ID NO: 167411 - protein, 250 aa, Zea Mays
MASAAFKSTTRRALHATTTSRSDPPPCPRRTRSRSVSAAPRAAHEDYANTRTNPLFDSAASPSASPSPPPGAAAATGATSGRGDAAGRERGREPRLKSGGRGGGGGRARSASVAPPQRRHTASVADSAADVGGRKASRARSVADVARTYRGSETDAEARGVARKLQSWRSQHSVPEGKRKGTDASCSSQGSTTGAGCRQMDETTQSESSTVVSSPGHLEHTHGTMEQTSNGGNWKLLLSLILTPLSSLLT

SEQ ID NO: 167412 - protein, 249 aa, Zea Mays
MSTTGGPGQTDGTGSSTRHATTMAVGTEAQRKNPPPPPLYKNPVLLLLLLLPRLAAKAAKAYDLAAIEYRGVNAVTNFDISCYLDHPLFLAQLQQEPQVVPALNQEPQPDQSETGTTEQEPESSEAKTPDGSAEPDENAVPDDTAEPLTTVDDSIEEGLWSPCMDYELDTMSRPNFGSSINLSEWFADADFDCNIGCLFDGCSAADEGSKDGVGLADFSLFEAGDVQLKDVLSDMEEGIQPPAMISVCN

SEQ ID NO: 167413 - protein, 430 aa, Zea Mays
MEEEQSSGGWGEEATNKAPLLEPRAASDHQHRNGTSAGDGAGAGKAEAEWSALPLRRRVWEENKRLWVVAGPSIFTRFSSFGVTVISQAFIGHIGATELAAYALVSTVLMRFSNGILAQSKNAVITYLAMLNLGLHLLLSWLATARLRLGLAGVMGSMVVAMWIPVLGQLAFVFFGGCPRTWTGFSSAAFADLAAIVRLSLSSGVMLCLELWYNTILVLLTGYMKNAEVALDALSICLNINGWEMMISIGFLAATGVRVANELGAGSARRAKFAIYNVVATSSIIGSVLFVLFLLFRGGLAYIFTDSQAVADAVAGLSPLLAFSILLNSVQPVLSGVAVGAGWQSVVAYVNITSYYLIGIPLGAVLGYALGLHVKGIWIGMLLGTLVQTVVLLFITLKTDWEKQVEVAQERLKRWYMEENRRLQGSRRNP

SEQ ID NO: 167414 - protein, 434 aa, Zea Mays
MEEEQSSGGWGEEATNKAPLLEPRAASDHQHRNGTSAGDGAGAGKAEAEWSALPLRRRVWEENKRLWVVAGPSIFTRFSSFGVTVISQAFIGHIGATELAAYALVSTVLMRFSNGILMYLQAQSKNAVITYLAMLNLGLHLLLSWLATARLRLGLAGVMGSMVVAMWIPVLGQLAFVFFGGCPRTWTGFSSAAFADLAAIVRLSLSSGVMLCLELWYNTILVLLTGYMKNAEVALDALSICLNINGWEMMISIGFLAATGVRVANELGAGSARRAKFAIYNVVATSSIIGSVLFVLFLLFRGGLAYIFTDSQAVADAVAGLSPLLAFSILLNSVQPVLSGVAVGAGWQSVVAYVNITSYYLIGIPLGAVLGYALGLHVKGIWIGMLLGTLVQTVVLLFITLKTDWEKQVEVAQERLKRWYMEENRRLQGSRRNP

SEQ ID NO: 167415 - protein, 338 aa, Zea Mays
MGRGGDEQGAAAGATGGVGPPAPQRNISRRRGWRRQGGGGVVGAAAAAARVGGEQEAVGGGGAVHLHALLLLRRHRHQPGLHRPHRRHGAGRLRARLHRAHEVQQRHPDSIALLYSLELWYNTILVLLTGYMKNAEVALDALSICLNINGWEMMISIGFLAATGVRVANELGAGSARRAKFAIYNVVATSSIIGSVLFVLFLLFRGGLAYIFTDSQAVADAVAGLSPLLAFSILLNSVQPVLSGVAVGAGWQSVVAYVNITSYYLIGIPLGAVLGYALGLHVKGIWIGMLLGTLVQTVVLLFITLKTDWEKQVEVAQERLKRWYMEENRRLQGSRRNP

SEQ ID NO: 167416 - protein, 58 aa, Zea Mays
MDYALFEGTPFISSHSSIIRDVLPCFSLAVTSRCSLERRENLAALRFSLELGSTLLCA

SEQ ID NO: 167417 - protein, 459 aa, Zea Mays
MPVYLGGVCVLLPTTPQSPSRQGKGIQACSALPPLSSSSLPAPNTTPASIQAAAARRCPGRRPSRPPAVDSFSPSSEIERQMYISSEKLENAAELLGTAPSRVQVPGLITKQAATARMELPVAEPGTERGEGPLIQCPYCDSEAMHKLAQILLPGLAAVCVDGTTGDPFHSPSVVAVDLRREMVDYITQRSESFIADALIESEANQEGPDAAVPDDPFEAVSVFMDDFGSTKRNIIGHVSGWLLSDSRDDKIDDLVQEMEATRFWPLERREAVAETLLKNVDLRTRFHCPEKYESEARLADHKQQCSFRPVACPNDGCRARVSVRCARDHDAACPYKPLQCEQGCEKRLLRRDMDRHCVTVCPMRPMKCPFGCDSSFPDRDLEKHCAQFLRPHLIKVLKAIHKKARSEDELKDLALKLEKYDGDGKLAKALDARPLTNAVKDLEAKMKAEHSSRRAVLH

SEQ ID NO: 167418 - protein, 246 aa, Zea Mays
MCSREDTEKHVDVAIVFIGSKLQSSDISKDKQVDPALADTLKLSFTESEFSMAFPYVSTSDDEKLEESLLSGFTENCKSGFGRNRITYTDTCAVSGQDLKTYHNMDAINDLVVSGRTNPSGQTDVIVFCSGGFEKLGTTESEGELLSQLVDLLKLSGARHTILYASQPSGYLLENPSGSPVARHLAERTNGTKTGLLSKCDGECLVKSTLLEGTFVGIVLLIILISGLMCMMGIDTPSKFEAPQES

SEQ ID NO: 167419 - protein, 195 aa, Zea Mays
MAFPYVSTSDDEKLEESLLSGFTENCKSGFGRNRITYTDTCAVSGQDLKTYHNMDAINDLVVSGRTNPSGQTDVIVFCSGGFEKLGTTESEGELLSQLVDLLKLSGARHTILYASQPSGYLLENPSGSPVARHLAERTNGTKTGLLSKCDGECLVKSTLLEGTFVGIVLLIILISGLMCMMGIDTPSKFEAPQES

SEQ ID NO: 167420 - protein, 212 aa, Zea Mays
METILVCYQTVLMHMLLPKRLVDTSRLREPRECQQQTLLGPGPDSRIVYMDGAFDLFHAGHVEILRLARELGDFLLVGIHTDQTISATRGRHRPIMNLHERSLSVLACRYVDEVIIGAPWDVSKDMITTFNISLVVHGTIAENMDFTEDDLHPYAVPMAMGIYRRLESPLDITTSTIIRRIVANHEAYQKRNEKKEASEKKYYESKSFVNGE

SEQ ID NO: 167421 - protein, 242 aa, Zea Mays
MPMDAGNGCSARALVACVIGSIVLGASVLALHLAGGPAAIPHLPLPPLFGTLRRRRRRPVRVYMDGCFDMMHYGHCNALRQARALGDELVVGVISDDEIKANKGPPVTPLHERMIMVRAVKWVDDIIPDAPYAITEEFMNKLFNEYNIDYIIHGDDPCLLPDGTDAYALAKKAGRYKQIKRTEGVSTTDIDGCFFVLERDHLMHIIILHYKGSSVADMVRKSMILDLELVQEYLISFPHLGE

SEQ ID NO: 167422 - protein, 89 aa, Zea Mays
MELLLKTWTLRRMIYTHMLFQWLWAFTADWRVPWISLQVLSSGGLLLTTKPTRSGTRRRKQARRSTTRVKASSTGSEVTSSRTWMKIAA

SEQ ID NO: 167423 - protein, 283 aa, Zea Mays
MTEVNCLGQLRHPNLVKLIGYCCEDDHRLLVYEFMFRGSLENHLFRKTATPLPWGTRMSIALGAAKGLACLHNAQRPVIYRDFKTSNILLDSDYTAKLSDFGLAKAGPEGDQTHVSTRVMGTYGYAAPEYVMTGHLTARSDVYSFGVVLLELLTGRKSIDKSRPSREQSLVDWALPKLNDKRRLLQIIDPRLEGQYSARAAHKACSLAFYCLSQNPKARPLMSDVVETLEPLQGSGGGDGRGQPSGLPDYRGRRRITGNSVHFRAIPNPKCSPAVPATACRVR

SEQ ID NO: 167424 - protein, 271 aa, Zea Mays
MGNCGTREENAVVAAHAQVQQLHLLQNPAKNAIGDRKHNRTSSDISDPSTPRKAEDAKNISIYNDVIVFTLFELETITKSFRADYVLGEGGFGTVYKGYIDENVRVGLKSLPVAVKVLNKDGHQGHREWLTEVNCLGQLRHPNLVKLIGYCCEDDHRLLVYEFMFRGSLENHLFRKTATPLPWGTRMSIALGAAKGLACLHNAQRPVIYRDFKTSNILLDSDYTAKLSDFGLAKAGPEGDQTHVSTRVMGTYGYAAPEYVMTASVWSFWSS

SEQ ID NO: 167425 - protein, 311 aa, Zea Mays
MPTWQPRCSRPPTSSASRAAPRTPSRSGSATRRCSRRRGRRPGGGRPSWRRCRRRRSGGWSRRCGAAGPGPRWWPPRPPRTRSASWPGSSRRPAAGTRTSARCWRPSWTRCLPPPTRPSRPPSSAASSAPRSPPRRPPRRAATWSSASRPCWTRPPRGTCWASRSTAPGSASSTRTPSAASSPRASSASRRSRAGGRPWPEVRQVSSARWRRWRRRWMRWRRRWRRTSRCLSPSSWAWRARCPGTRARRTTACTAPWTSTSRHTRGWTRSSGRRCAASWTRSGCRTRRGCTRRRTSGCRCRPCSACSTTTS

SEQ ID NO: 167426 - protein, 103 aa, Zea Mays
MAERRCSPCAQPRSLPSPSMVVPLFSLALVSLSSVRGHPDPARILVVAPSPDSSAPSCSGFLSLRRCSSASVLASVGPVSPLRDIGCELSLISPGTRIKSDRC

SEQ ID NO: 167427 - protein, 121 aa, Zea Mays
MVSSLPAAHRAPSHGRCPSLELAPALCPAPSLLAVPIPLQWSSSSVRARPSSARFQLGRACRPLPLLLQQVSAPLFFFSIVAHLSVAAPRCRTSSGSPAPSAPVWCLIKCSSGVLCHGQLY

SEQ ID NO: 167428 - protein, 132 aa, Zea Mays
MVSSLPAAHRAPSHGRCPSLELAPALCPAPSLLAVPIPLQWSSSSVRARPSSARFQLGRACRPLPLLLQQCCVMDNSISGVGCLVFSQPICDTVDPRSEVRAMFAKCLMEGPNREPRLSRASSGRFVNWYAR

SEQ ID NO: 167429 - protein, 104 aa, Zea Mays
MVSSLPAAHRAPSHGRCPSLELAPALCPAPSLLAVPIPLQWSSSSVRARPSSARFQLGRACRPLPLLLQQKRGPCDVCQVFDGRSEPGTSPFSRIFWSVCELVR

SEQ ID NO: 167430 - protein, 85 aa, Zea Mays
MVSSLPAAHRAPSHGRCPSLELAPALCPAPSLLAVPIPLQWSSSSVRARPSSARFQLGRACRPLPLLLQQLTDKEARSVRCLPSV

SEQ ID NO: 167431 - protein, 75 aa, Zea Mays
MVSSLPAAHRAPSHGRCPSLELAPALCPAPSLLAVPIPLQWSSSSVRARPSSARFQLGRACRPLPLLLQQVVILF

SEQ ID NO: 167432 - protein, 1873 aa, Zea Mays
MALGDLMASRFGHSSSSPSPSLAPVPPLPHHHHNHHQNHVADDLPVASGPEPKNGLEVPEVEKPASEAYLPQVVVLCDYRHEGIDEATTAALSTSGLVSNWRPKDRTKTGCGALVLCLNISVDPPDVIKISPCARMECWIDPFSMAPPKALESIGKTLHSQYERLQPKARYKLQLDPTVEEVKKLSNTCRKYAREERVLFHYNGHGVPKPTSNGEIWVFNKSYTQYIPLSITDLDSWLKTPSIYVFDCSAAGIIVKAFLERLDWSSTSSASSQKDFILLAACEAHQTLPQSAEFPADVFTACLTTPIKMALHWFCKRTSLHGPLDRSLIDQIPGRQNDRKTLLGELNWIFTAITDTIAWNVLPRDLFQRLFRQDLLVAGLFRNFLLAERIMRSANCSPVSYPLLPPTHQHHMWDAWDMAAEICLSKLPQLIADPNTEFQPSPFFMEQLMAFEVWLDHGSKDKKPPELLPIVLQVLLSQPHRSRVLVLLGRFLDMGPWAVDLALSVGIFPCVLKLLQSSAMDIRQNLVFIWTKILSLDKSCQVELVKDGGHAYFIKFLDSLDAFPEQRAMAAFVIAVIVDGYRMGQEACMNAGLMDVCLRHLQPENSHAQTEPLLLQWLCLCLGKLWEDFPEAQLLGLQTNGPEIVICLLSEPQPEVRAAAVFALGNLLDTTSNSHDDGSDDDEKVKAEINVVRSLLQISSDGSPLVRSEVAIALTRFALGHNKHLKSVASEYWKPQPNSLLKSLPSLANISNPSNVYSPNNILQGRIGPVLRVASDSGAAGRDGRISTSNPIATSSIMHGSPESDDSSQHSDSGILLRGNASNGGFSYTRSRPVDNVIYSQFISTMYSVSKDPDPTIATIGRRALSLIGVEQVVMKNTRFNSGGSHRGETSASNFGMARSSSWRDMKSGSILMKFMTPPVSPPQHDYLPGLRRVCSMEFGQHPINPPNGLADRLLSSAAGPSNAEPLPQSTIYNWSCVQFSRPVLTVSDDNEETNARREEREQIALDYITKCQRSSCKMTSQIASWDTKFELGTKAALLLPFSPIVVAADENEQIRVWNYDDALPVNSFQNHKLSGRGLSKLLLINELDESLLLAASSDGNVRIWKNFAQKGGEKLVTALSSVQGHRAAGRSIVIDWQQQSGYLYASGDMSSILVWDLDKEQLLSTIQSTADTAISSLSTSQVRSGHFAAGFADGSVRIYDVRSPDRFVYVARPHAPRTEKVVSIGFQPGFDPYKIVSASQAGDIQFLDVRRAAEPYLTIEAHRGSLTALVVHRYAPVVASGSAKQMIKVFSLGGEQLTIIGYLPSFMGQRIGSVNCLSFHPYKSLLAAGAGDNALVSIYAEENYKHAVAGLVHYFTATVSRVRNFLWEIKDQVHIVISSPCERPSPAAASHRLLRKKPLSDTGEGVRIPQPQPQPQPPKKHRTEPSAPLTLTLQGGGAMHGGGAASPDAAICISPEAGPIVGVAPAGIRVENCYVFKSRLQEYAQRVGIPTPEYHTLKEGPSHEPVFKSTVFVNNTKYESLPGFFSRKAAEQSAAEVALMEIAMSAPVTEIRNMPAVQETGLCKNLLQEYAQKMNYAIPSYICTKQASGVAPFVCSVEIGGILYIGAAARTKKEAEIKAARTALLAIQSQSEGGANGAKKYIVVPGQRPDKETNKNPTETPIPLRVKKRGSRKKWNKRKFRRMADRIVDAGKDAEGLGTLLHDDYEEARRIGYELPTDTAMVQFNKEVVMTQPGEGDRIVQLEPPRDPAEVQYNKEARSVEQDPPRDPAEVQHNKEARSVEQDPPRDPAEVQHNKEARTVEQDPPSNTEVWKPDNKATTTEQESVSAFIALRSNGDSTDVEAAPGDTLMMQGQESEATMQEASHAGEQAQPN

SEQ ID NO: 167433 - protein, 1704 aa, Zea Mays
MSACNLRLDTSFSWIQQWRKLRSFLILAANMPEKRESFSIIMAMVYQSLHQMSYTQYIPLSITDLDSWLKTPSIYVFDCSAAGIIVKAFLERLDWSSTSSASSQKDFILLAACEAHQTLPQSAEFPADVFTACLTTPIKMALHWFCKRTSLHGPLDRSLIDQIPGRQNDRKTLLGELNWIFTAITDTIAWNVLPRDLFQRLFRQDLLVAGLFRNFLLAERIMRSANCSPVSYPLLPPTHQHHMWDAWDMAAEICLSKLPQLIADPNTEFQPSPFFMEQLMAFEVWLDHGSKDKKPPELLPIVLQVLLSQPHRSRVLVLLGRFLDMGPWAVDLALSVGIFPCVLKLLQSSAMDIRQNLVFIWTKILSLDKSCQVELVKDGGHAYFIKFLDSLDAFPEQRAMAAFVIAVIVDGYRMGQEACMNAGLMDVCLRHLQPENSHAQTEPLLLQWLCLCLGKLWEDFPEAQLLGLQTNGPEIVICLLSEPQPEVRAAAVFALGNLLDTTSNSHDDGSDDDEKVKAEINVVRSLLQISSDGSPLVRSEVAIALTRFALGHNKHLKSVASEYWKPQPNSLLKSLPSLANISNPSNVYSPNNILQGRIGPVLRVASDSGAAGRDGRISTSNPIATSSIMHGSPESDDSSQHSDSGILLRGNASNGGFSYTRSRPVDNVIYSQFISTMYSVSKDPDPTIATIGRRALSLIGVEQVVMKNTRFNSGGSHRGETSASNFGMARSSSWRDMKSGSILMKFMTPPVSPPQHDYLPGLRRVCSMEFGQHPINPPNGLADRLLSSAAGPSNAEPLPQSTIYNWSCVQFSRPVLTVSDDNEETNARREEREQIALDYITKCQRSSCKMTSQIASWDTKFELGTKAALLLPFSPIVVAADENEQIRVWNYDDALPVNSFQNHKLSGRGLSKLLLINELDESLLLAASSDGNVRIWKNFAQKGGEKLVTALSSVQGHRAAGRSIVIDWQQQSGYLYASGDMSSILVWDLDKEQLLSTIQSTADTAISSLSTSQVRSGHFAAGFADGSVRIYDVRSPDRFVYVARPHAPRTEKVVSIGFQPGFDPYKIVSASQAGDIQFLDVRRAAEPYLTIEAHRGSLTALVVHRYAPVVASGSAKQMIKVFSLGGEQLTIIGYLPSFMGQRIGSVNCLSFHPYKSLLAAGAGDNALVSIYAEENYKHAVAGLVHYFTATVSRVRNFLWEIKDQVHIVISSPCERPSPAAASHRLLRKKPLSDTGEGVRIPQPQPQPQPPKKHRTEPSAPLTLTLQGGGAMHGGGAASPDAAICISPEAGPIVGVAPAGIRVENCYVFKSRLQEYAQRVGIPTPEYHTLKEGPSHEPVFKSTVFVNNTKYESLPGFFSRKAAEQSAAEVALMEIAMSAPVTEIRNMPAVQETGLCKNLLQEYAQKMNYAIPSYICTKQASGVAPFVCSVEIGGILYIGAAARTKKEAEIKAARTALLAIQSQSEGGANGAKKYIVVPGQRPDKETNKNPTETPIPLRVKKRGSRKKWNKRKFRRMADRIVDAGKDAEGLGTLLHDDYEEARRIGYELPTDTAMVQFNKEVVMTQPGEGDRIVQLEPPRDPAEVQYNKEARSVEQDPPRDPAEVQHNKEARSVEQDPPRDPAEVQHNKEARTVEQDPPSNTEVWKPDNKATTTEQESVSAFIALRSNGDSTDVEAAPGDTLMMQGQESEATMQEASHAGEQAQPN

SEQ ID NO: 167434 - protein, 1346 aa, Zea Mays
MALGDLMASRFGHSSSSPSPSLAPVPPLPHHHHNHHQNHVADDLPVASGPEPKNGLEVPEVEKPASEAYLPQVVVLCDYRHEGIDEATTAALSTSGLVSNWRPKDRTKTGCGALVLCLNISVDPPDVIKISPCARMECWIDPFSMAPPKALESIGKTLHSQYERLQPKARYKLQLDPTVEEVKKLSNTCRKYAREERVLFHYNGHGVPKPTSNGEIWVFNKSYTQYIPLSITDLDSWLKTPSIYVFDCSAAGIIVKAFLERLDWSSTSSASSQKDFILLAACEAHQTLPQSAEFPADVFTACLTTPIKMALHWFCKRTSLHGPLDRSLIDQIPGRQNDRKTLLGELNWIFTAITDTIAWNVLPRDLFQRLFRQDLLVAGLFRNFLLAERIMRSANCSPVSYPLLPPTHQHHMWDAWDMAAEICLSKLPQLIADPNTEFQPSPFFMEQLMAFEVWLDHGSKDKKPPELLPIVLQVLLSQPHRSRVLVLLGRFLDMGPWAVDLALSVGIFPCVLKLLQSSAMDIRQNLVFIWTKILSLDKSCQVELVKDGGHAYFIKFLDSLDAFPEQRAMAAFVIAVIVDGYRMGQEACMNAGLMDVCLRHLQPENSHAQTEPLLLQWLCLCLGKLWEDFPEAQLLGLQTNGPEIVICLLSEPQPEVRAAAVFALGNLLDTTSNSHDDGSDDDEKVKAEINVVRSLLQISSDGSPLVRSEVAIALTRFALGHNKHLKSVASEYWKPQPNSLLKSLPSLANISNPSNVYSPNNILQGRIGPVLRVASDSGAAGRDGRISTSNPIATSSIMHGSPESDDSSQHSDSGILLRGNASNGGFSYTRSRPVDNVIYSQFISTMYSVSKDPDPTIATIGRRALSLIGVEQVVMKNTRFNSGGSHRGETSASNFGMARSSSWRDMKSGSILMKFMTPPVSPPQHDYLPGLRRVCSMEFGQHPINPPNGLADRLLSSAAGPSNAEPLPQSTIYNWSCVQFSRPVLTVSDDNEETNARREEREQIALDYITKCQRSSCKMTSQIASWDTKFELGTKAALLLPFSPIVVAADENEQIRVWNYDDALPVNSFQNHKLSGRGLSKLLLINELDESLLLAASSDGNVRIWKNFAQKGGEKLVTALSSVQGHRAAGRSIVIDWQQQSGYLYASGDMSSILVWDLDKEQLLSTIQSTADTAISSLSTSQVRSGHFAAGFADGSVRIYDVRSPDRFVYVARPHAPRTEKVVSIGFQPGFDPYKIVSASQAGDIQFLDVRRAAEPYLTIEAHRGSLTALVVHRYAPVVASGSAKQMIKVFSLGGEQLTIIGYLPSFMGQRIGSVNCLSFHPYKSLLAAGAGDNALVSIYAEENYK

SEQ ID NO: 167435 - protein, 107 aa, Zea Mays
MALGDLMASRFGHSSSSPSPSLAPVPPLPHHHHNHHQNHVADDLPVASGPEPKNGLEVPEVEKPASEAYLPQVVVLCDYRHEGIDEATTAALSTSGLVSNWRPKDRA

SEQ ID NO: 167436 - protein, 587 aa, Zea Mays
MIKVFSLGGEQLTIIGYLPSFMGQRIGSVNCLSFHPYKSLLAAGAGDNALVSIYAEENYKHAVAGLVHYFTATVSRVRNFLWEIKDQVHIVISSPCERPSPAAASHRLLRKKPLSDTGEGVRIPQPQPQPQPPKKHRTEPSAPLTLTLQGGGAMHGGGAASPDAAICISPEAGPIVGVAPAGIRVENCYVFKSRLQEYAQRVGIPTPEYHTLKEGPSHEPVFKSTVFVNNTKYESLPGFFSRKAAEQSAAEVALMEIAMSAPVTEIRNMPAVQETGLCKNLLQEYAQKMNYAIPSYICTKQASGVAPFVCSVEIGGILYIGAAARTKKEAEIKAARTALLAIQSQSEGGANGAKKYIVVPGQRPDKETNKNPTETPIPLRVKKRGSRKKWNKRKFRRMADRIVDAGKDAEGLGTLLHDDYEEARRIGYELPTDTAMVQFNKEVVMTQPGEGDRIVQLEPPRDPAEVQYNKEARSVEQDPPRDPAEVQHNKEARSVEQDPPRDPAEVQHNKEARTVEQDPPSNTEVWKPDNKATTTEQESVSAFIALRSNGDSTDVEAAPGDTLMMQGQESEATMQEASHAGEQAQPN

SEQ ID NO: 167437 - protein, 631 aa, Zea Mays
MEWDSESDGAGSVGVDEQEEEQEEERGGEGGGVDAGGMFTLAIEGMLRASGPCGLVVTNALEPDCPIIYANRGFEEATGYRVEEFLGRNCNELRLVFSRRVGIATSSRALCSQFVTHQLDLAARWVGRSKFQRWDDNASGSSSGGTVHSYKEALLSSSGATSQELDVNTSTVARPKLCDKERRLRRREVLVPVDKEDGWQAGPQKLKTPGRLRDLLDIVSSYPRGTGSAAPPKKRSVWVRISPAPHTFDRKTDQPSPMLNNCAPAVDQRSFRNKRKRRSKSKRGKGPAEAAGTGACVDSPPSSSEAHYTQSRMECHNTSPPTVVGSRVLTFTDEMAREEINLRKAMFVTIAGTRPVVQGSEVLDEVARSFGVCIDKMSIHHSSPEDFLLFLPDEETASRIFNGGRLFTGPRFCLLFKRWSRFSHVSLSRMSHLVDVQTSGIPEHAWSCSTVEAILEDSCHIVESTSQVRSGHFAAGFADGSVRIYDVRSPDRFVYVARPHAPRTEKVVSIGFQPGFDPYKIVSASQAGDIQFLDVRRAAEPYLTIEAHRGSLTALVVHRYAPVVASGSAKQMIKVFSLGGEQLTIIGYLPSFMGQRIGSVNCLSFHPYKSLLAAGAGDNALVSIYAEENYK

SEQ ID NO: 167438 - protein, 333 aa, Zea Mays
MEIAMSAPVTEIRNMPAVQETGLCKNLLQEYAQKMNYAIPSYICTKQASGVAPFVCSVEIGGILYIGAAARTKKEAEIKAARTALLAIQSQSEGGANGAKKYIVVPGQRPDKETNKNPTETPIPLRVKKRGSRKKWNKRKFRRMADRIVDAGKDAEGLGTLLHDDYEEARRIGYELPTDTAMVQFNKEVVMTQPGEGDRIVQLEPPRDPAEVQYNKEARSVEQDPPRDPAEVQHNKEARSVEQDPPRDPAEVQHNKEARTVEQDPPSNTEVWKPDNKATTTEQESVSAFIALRSNGDSTDVEAAPGDTLMMQGQESEATMQEASHAGEQAQPN

SEQ ID NO: 167439 - protein, 335 aa, Zea Mays
MEGRHSRDFPTFHPRQPPPSSPPPSTSPNIWATVVEAAMEGSTSMSVGPTITFMVVSVTHPSTQTGISLLPGSKGYTSHHTLPTAQNGWSPYAWNKIVTEFNKKHEYITFNKIQIQEKERELKRDYKMFKEVRKQSGVSWNEKRCMIVVDPPIWENIIKIITSTHLPQEWNTISNEEEQVNTTRMDEEGIIQQQPQEEDSRLEQDEHPIFEMIEQRRVHVTTRRSTASTFNQDKEAERMKKDSLEGLGGRYLNLKSKQVENEVTQMAKGKESAQGNEFSILRCISILRAMDVTTDEKIKAAEVFDIPNNRETFINFSIDEPETALLWLRRKMDKI

SEQ ID NO: 167440 - protein, 631 aa, Zea Mays
MFREIPSTVPVEPLEPSDLKPENSRYDAQISVFGAKLQKKLEQSKIFMVGSGALGCEFLKNLALMGISCSQNGKLTVTDDDVIEKSNLSRQFLFRDWNIGQPKSTVAATAAMAINPKLHVEALQNRASPETENVFNDAFWESLDAVVNALDNVTARMYIDSRCVYFQKPLLESGTLGAKCNTQMVIPHLTENYGASRDPPEKQAPMCTVHSFPHNIDHCLTWARSEFEGLLEKTPTEVNAFLSNPGGYATAARTAGDAQARDQLERVIECLETDKCETFQDCITWARLKFEDYFSNRVKQLTFTFPEDAMTSSGAPFWSAPKRFPRPLEFSSSDSSHLNFLLAASVLRAETFGIHIPDWAKNPKKLAEAVDKVIVPDFQPKQGVKIETDEKATSLSSASVDDAAVIEELIAKLEEIFKTLPPRFHMNPIQFEKDDDTNFHMDLIAGFANMRARNYSIPEVDKLKAKFIAGRIIPAIATSTAMATGLVCLELYKVLAGGHKVEDYRNTFANLAIPLFSMAEPVPPKTIKHQDMSWTVWDRWTITGNITLRGLLGWLKEKGLNAYSISCGTSLLYNSMFPRHKDRLDKKVVDVAREVAKVEVPSYRRHLDVVVACEDDDDNDVDVPLVSIYFR

SEQ ID NO: 167441 - protein, 916 aa, Zea Mays
MWNMPYKNGPRVYSKGFVMAVVFTDMSIEKAVEFDDYCHSHQPPIAFIKSEVCGLFGSVFCDFGPEFTVLDVDGEEPHTGIVASISNDNPALVSCVDDERLEFQDGDLVVFSEVHGMTELNDGKPRKIKNARPYSFTLEEDTTSYGTYIRGGIVTQVKPPKVLNFKTLKEAIKEPGEFLMSDFSKFDRPPLVHLAFQALDKFRTELTRFPIAGSADDVQKLIDLAISINETLGDSKLEEIDKKVLQHFASGSRAVLNPMAAMFGGIVGQEVVKACSGKFHPLYQFFYFDSVESLPVEPLEPSDLKPENSRYDAQISVFGAKLQKKLEQSKIFMVGSGALGCEFLKNLALMGISCSQNGKLTVTDDDVIEKSNLSRQFLFRDWNIGQPKSTVAATAAMAINPKLHVEALQNRASPETENVFNDAFWESLDAVVNALDNVTARMYIDSRCVYFQKPLLESGTLGAKCNTQMVIPHLTENYGASRDPPEKQAPMCTVHSFPHNIDHCLTWARSEFEGLLEKTPTEVNAFLSNPGGYATAARTAGDAQARDQLERVIECLETDKCETFQDCITWARLKFEDYFSNRVKQLTFTFPEDAMTSSGAPFWSAPKRFPRPLEFSSSDSSHLNFLLAASVLRAETFGIHIPDWAKNPKKLAEAVDKVIVPDFQPKQGVKIETDEKATSLSSASVDDAAVIEELIAKLEEIFKTLPPRFHMNPIQFEKDDDTNFHMDLIAGFANMRARNYSIPEVDKLKAKFIAGRIIPAIATSTAMATGLVCLELYKVLAGGHKVEDYRNTFANLAIPLFSMAEPVPPKTIKHQDMSWTVWDRWTITGNITLRGLLGWLKEKGLNAYSISCGTSLLYNSMFPRHKDRLDKKVVDVAREVAKVEVPSYRRHLDVVVACEDDDDNDVDVPLVSIYFR

SEQ ID NO: 167442 - protein, 229 aa, Zea Mays
MALLPVCMTLSKTKKKPGLERKGKVVAEIKDAVDKYSSAYVFTYDNMRNQKLKDLREQLKSSSRIFLAGKKVMQIALGRSAADEAKTGLHKLSKFLQGNSGLLFTNLPRDDVERMFREFEEHDFARTGSTAADTVELKEGPLEQFTHEMEPFLRKQGLPVRLNKGVVELVADHVVCEEGKPLSPEAAQILRLLGIQMATFRLYLVCRWSSDEFEAYKEGLMHLGADDSS

SEQ ID NO: 167443 - protein, 148 aa, Zea Mays
MQEHIAATGKAPPGNVAGNNTWVGGPQRPPDLRLTPGRHVQLTVPLEQLIHRLVKENRVVAFIKGSRSAPQCGFSQRVVGILEGHGVDFVTVDVLDEEHNHGLRETLKAYSSWPTFPQVFVGGELVGGCDIVSSMAEKGELAALLIQK

SEQ ID NO: 167444 - protein, 326 aa, Zea Mays
MSMAPDHPFDAFVAAARGAITHLHLPVIHIPGSNSSPNPDSKQHHEPEVDCLLHLHVVVTNFFHKPLRSFARCFRPKRRAGKHSPPLYQEPSNGATPQQQLELLLCIAFDAFAHNLHALEDACKHKGEEFAVATRQLEQFVVFRKVIDGKRADFDGFLSNLGFAKVGPPPPPASIMGGASPVPAPAPVSNQEDGAVIGNGERVDIASGTQQQAQKLPARLLNIPLSNVERLRSTLSAVSLTELIELVPQLVSRSSTSADAHPDKKKLFSVQDFFRYAEIEGKRFFEELDRDGDGQVTLEDLEIATRKRRLPRRRKQPFSEHIPRCV

SEQ ID NO: 167445 - protein, 390 aa, Zea Mays
MLNSSPDARPDITQVWFRINELLPLELQKDLPDGSPSGSAFESHTATDEVSMRPQQMSGSSSRENIKNTSLSDSSNIMEPAFDKEPIDQVRSKQSQAKNQNTAARNSSRKSLSASVDSSPGDFEIRFSANGSESRLEETKTVITENKTKIQTTAFNSCASDFDNIKMNSRNTTDSINITSKLKELQLEAEVTLLKEQLKIANLEKEEISLKFDKLSAICSSQRREIQELKQALAAAYVTPPAKQFRENSSVEVTPPSKSLDTPPREKIEGTPPELRQGLFTSSPGTPSPDLKTWSAFLEEPKSQAAVKSVHPRSVRTLRASNSNKASSLGQSNISSSTDPFAFGQDSFKAAPSGTVLPLLSNMGNTSQLSNLNIEEKKDGSYQPDGWTGF

SEQ ID NO: 167446 - protein, 553 aa, Zea Mays
MLAMSRCTSERPLLRDEESLNLVQKEITVMRSLKGHPNVVTLVAHAILDMGRMREALLLMEFCGKSLVSVLEGRGAGYFDEEKVALIFRDVCNAVFAMHCQTPPLAHRLLGVSCIEFATSNQHLMENQSSKYLTGTIASQNCRSTVWFRINELLPLELQKDLPDGSPSGSAFESHTATDEVSMRPQQMSGSSSRENIKNTSLSDSSNIMVQSPLKAIGNMGSMGAFWSTQHAQELSFADDKEPAFDKEPIDQVRSKQSQAKNQNTAARNSSRKSLSASVDSSPGDFEIRFSANGSESRLEETKTVITENKTKIQTTAFNSCASDFDNIKMNSRNTTDSINITSKLKELQLEAEVTLLKEQLKIANLEKEEISLKFDKLSAICSSQRREIQELKQALAAAYVTPPAKQFRENSSVEVTPPSKSLDTPPREKIEGTPPELRQGLFTSSPGTPSPDLKTWSAFLEEPKSQAAVKSVHPRSVRTLRASNSNKASSLGQSNISSSTDPFAFGQDSFKAAPSGTVLPLLSNMGNTSQLSNLNIEEKKDGSYQPDGWTGF

SEQ ID NO: 167447 - protein, 571 aa, Zea Mays
MWRLKQFIPKEQPSPSGLEGRTVDVGNVKVHVREAIAEGGFSSVYAARDLVNPAKQYALKRVIVQDEESLNLVQKEITVMRSLKGHPNVVTLVAHAILDMGRMREALLLMEFCGKSLVSVLEGRGAGYFDEEKVALIFRDVCNAVFAMHCQTPPLAHRLLGVSCIEFATSNQHLMENQSSKYLTGTIASQNCRSTVWFRINELLPLELQKDLPDGSPSGSAFESHTATDEVSMRPQQMSGSSSRENIKNTSLSDSSNIMEPAFDKEPIDQVRSKQSQAKNQNTAARNSSRKSLSASVDSSPGDFEIRFSANGSESRLEETKTVITENKTKIQTTAFNSCASDFDNIKMNSRNTTDSINITSKLKELQLEAEVTLLKEQLKIANLEKEEISLKFDKLSAICSSQRREIQELKQALAAAYVTPPAKQFRENSSVEVTPPSKSLDTPPREKIEGTPPELRQGLFTSSPGTPSPDLKTWSAFLEEPKSQAAVKSVHPRSVRTLRASNSNKASSLGQSNISSSTDPFAFGQDSFKAAPSGTVLPLLSNMGNTSQLSNLNIEEKKDGSYQPDGWTGF

SEQ ID NO: 167448 - protein, 392 aa, Zea Mays
MMIFHNFHIRVSEAADVSVEKEGLMTELRKELRVSDKAHRELLNRVNNDNIICSIREWRSTGGLQASLSNNPQLIHDSVPSPTTSGRKRQKTSQSVPALPAPPPAMHSQQLATPTQPSSSTARKAVPPGHKGKKMKPGQKVPGGSAAKPIPSSAGPSGRGPHMNRGGSAPEAQAQNVDPLIGRKVMSRWPEDNSFYEAVIYEYDAETGLHALVYDIDTADETWEWVDLKEMGPEDIRWQEDDSGIDPVTYLRSRGGPTSGVRKPAGRGGPMPGSVRGRGLQKNMPKKDFPPPQNGVGKRSSDDIDILHTESLIKEVGKVFSVSNPDPQEVEKAKKALKEQEQSLIDAIARLAEASDGESDGHNRGRRNLYAANQHQASYVGAMPVGDRAGAM

SEQ ID NO: 167449 - protein, 416 aa, Zea Mays
MSDMESVAALMNSTSSKIQQLQEAFAELESQSTVSMNLKWKQLEDHFRGLEQSLKKKFDELKEQEKEFQETVAKSEQILEQREAAVVAKELTSLEKLQEKREAALAMIFSKSRLSLPVPTINPMNKALNNLGVKWPKPASEESVHLQVDNAVVTPRSELVALCEEMNVKGLHKFISDNRKNLAAIREEIPSALKKTSHPYGLVLDSLEDFYSGDNLVLDGKKDGDLLGVRRTCLMLLESLGQLHTAGITCFSLEGHMLTTNIIERAKKIAFEWKSKLDNLEIDASNGNCLEAHAFLQLLATFGISAEYNEDDLCKLLPYVSRRRQTPELCRLLGLSQKMPGVIEVLVKSGRTIDAINLAYVFELTEQFEPVQLLKAYLRDVKKLSHARNVKISPGAQIINLRSSTLWTHFRKGFCS

SEQ ID NO: 167450 - protein, 406 aa, Zea Mays
MSDMESVAALMNSTSSKIQQLQEAFAELESQSTVSMNLKWKQLEDHFRGLEQSLKKKFDELKEQEKEFQETVAKSEQILEQREAAVVAKELTSLEKLQEKREAALAMIFSKSRLSLPVPTINPMNKALNNLGVKWPKPASEESVHLQVDNAVVTPRSELVALCEEMNVKGLHKFISDNRKNLAAIREEIPSALKKTSHPYGLVLDSLEDFYSGDNLVLDGKKDGDLLGVRRTCLMLLESLGQLHTAGITCFSLEGHMLTTNIIERAKKIAFEWKSKLDNLEIDASNGNCLEAHAFLQLLATFGISAEYNEDDLCKLLPYVSRRRQTPELCRLLGLSQKMPGVIEVLVKSGRTIDAINLAYVFELTEQFEPVQLLKAYLRDVKKLSHARNVKISPGAQFVSHRTYLL

SEQ ID NO: 167451 - protein, 426 aa, Zea Mays
MSDMESVAALMNSTSSKIQQLQEAFAELESQSTVSMNLKWKQLEDHFRGLEQSLKKKFDELKEQEKEFQETVAKSEQILEQREAAVVAKELTSLEKLQEKREAALAMIFSKSRLSLPVPTINPMNKALNNLGVKWPKPASEESVHLQVDNAVVTPRSELVALCEEMNVKGLHKFISDNRKNLAAIREEIPSALKKTSHPYGLVLDSLEDFYSGDNLVLDGKKDGDLLGVRRTCLMLLESLGQLHTAGITCFSLEGHMLTTNIIERAKKIAFEWKSKLDNLEIDASNGNCLEAHAFLQLLATFGISAEYNEDDLCKLLPYVSRRRQTPELCRLLGLSQKMPGVIEVLVKSGRTIDAINLAYVFELTEQFEPVQLLKAYLRDVKKLSHARNVKISPGAQPSSHAECQKRALVPSPSPSVIFVASVKSC

SEQ ID NO: 167452 - protein, 519 aa, Zea Mays
MLRNCHMPGMSKFLLEHRQRMEGAGKDGNPLRNYRIGKTLGIGSFGKVKIAEHISTGHKVAIKILNRRKIRGMEMEEKVKREIKILRLFMHPHIIRLYEVIDTPADIYVVMEYVKCGELFDYIVEKGRLQEEEARRFFQQIISGVEYCHRNMVVHRDLKPENLLLDSKCNVKIADFGLSNVMRDGHFLKTSCGSPNYAAPEVISGKLYAGPEVDVWSCGVILYALLCGTLPFDDENIPNLFKKIKGGIYTLPSHLSGAARDLIPRMLVVDPMKRITIREIREHDWFKILLPRYLTVPPPDSAQQVKKVDEETLREVLGMGYDKNLLVESIQKRLQNEATVAYYLLLDNRLRTTSGYLGAECQEAMDSSFSNIASYETPSSARGNRQQIFMESPVGLRPHLPAERKWALGLQSRAHPKEIMSEVLKALQELNVYWKKIGHYNMKCRWSPGFPAQIHNNHNFSAGSIETDSLSERLSLIKFEIQLYKTRDEKYLLDLQRVSGPQLLFLDLCAAFLTQLRVL

SEQ ID NO: 167453 - protein, 482 aa, Zea Mays
MEGAGKDGNPLRNYRIGKTLGIGSFGKVKIAEHISTGHKVAIKILNRRKIRGMEMEEKVKREIKILRLFMHPHIIRLYEVIDTPADIYVVMEYVKCGELFDYIVEKGRLQEEEARRFFQQIISGVEYCHRNMVVHRDLKPENLLLDSKCNVKIADFGLSNVMRDGHFLKTSCGSPNYAAPEVISGKLYAGPEVDVWSCGVILYALLCGTLPFDDENIPNLFKKIKGGIYTLPSHLSGAARDLIPRMLVVDPMKRITIREIREHDWFKILLPRYLTVPPPDSAQQVKKVDEETLREVLGMGYDKNLLVESIQKRLQNEATVAYYLLLDNRLRTTSGYLGAECQEAMDSSFSNIASYETPSSARGNRQQIFMESPVGLRPHLPAERKWALGLQSRAHPKEIMSEVLKALQELNVYWKKIGHYNMKCRWSPGFPAQIHNNHNFSAGSIETDSLSERLSLIKFEIQRLNVCSYAMNSAFLMFRANK

SEQ ID NO: 167454 - protein, 428 aa, Zea Mays
MEGAGKDGNPLRNYRIGKTLGIGSFGKVKIAEHISTGHKVAIKILNRRKIRGMEMEEKVKREIKILRLFMHPHIIRLYEVIDTPADIYVVMEYVKCGELFDYIVEKGRLQEEEARRFFQQIISGVEYCHRNMVVHRDLKPENLLLDSKCNVKIADFGLSNVMRDGHFLKTSCGSPNYAAPEVISGKLYAGPEVDVWSCGVILYALLCGTLPFDDENIPNLFKKIKGGIYTLPSHLSGAARDLIPRMLVVDPMKRITIREIREHDWFKILLPRYLTVPPPDSAQQVKKVDEETLREVLGMGYDKNLLVESIQKRLQNEATVAYYLLLDNRLRTTSGYLGAECQEAMDSSFSNIASYETPSSARGNRQQIFMESPVGLRPHLPAERKWALGLQLYKTRDEKYLLDLQRVSGPQLLFLDLCAAFLTQLRVL

SEQ ID NO: 167455 - protein, 464 aa, Zea Mays
MEGAGKDGNPLRNYRIGKTLGIGSFGKVKIAEHISTGHKVAIKILNRRKIRGMEMEEKVKREIKILRLFMHPHIIRLYEVIDTPADIYVVMEYVKCGELFDYIVEKGRLQEEEARRFFQQIISGVEYCHRNMVVHRDLKPENLLLDSKCNVKIADFGLSNVMRDGHFLKTSCGSPNYAAPEVISGKLYAGPEVDVWSCGVILYALLCGTLPFDDENIPNLFKKIKGGIYTLPSHLSGAARDLIPRMLVVDPMKRITIREIREHDWFKILLPRYLTVPPPDSAQQVKKVDEETLREVLGMGYDKNLLVESIQKRLQNEATVAYYLLLDNRLRTTSGYLGAECQEAMDSSFSNIASYETPSSARGNRQQIFMESPVGLRPHLPAERKWALGLQSRAHPKEIMSEVLKALQELNVYWKKIGHYNMKCRWSPGFPAQIHNNHNFSAGSIETDSLSERLSLIKFEIQKH

SEQ ID NO: 167456 - protein, 240 aa, Zea Mays
MAATSEEAIKQFSALMEQLEEPLKSTFQNVHQGNLRGTLMRFLKAREWSVPKAYKMLMDCLNWRVQNEIDIVLAKPILPSDIYRVIRDTLLVGLTGYSKQGQPVYAFGVGLSTFDKASVNYYVQSHIQMNEYRDRVVLPAASKKFGRQINTCLKVMDMTGLKLSALSQIKMLTMITTVDDLNYPEKTETYYIVNAPYVFSACWKVVKPLLQERTKKKIQVLYGSGRDELLKIPVRNVLSF

SEQ ID NO: 167457 - protein, 331 aa, Zea Mays
MAATSEEAIKQFSALMEQLEEPLKSTFQNVHQGNLRGTLMRFLKAREWSVPKAYKMLMDCLNWRVQNEIDIVLAKPILPSDIYRVIRDTLLVGLTGYSKQGQPVYAFGVGLSTFDKASVNYYVQSHIQMNEYRDRVVLKFGRQINTCLKVMDMTGLKLSALSQIKMLTMITTVDDLNYPEKTETYYIVNAPYVFSACWKVVKPLLQERTKKKIQVLYGSGRDELLKVMDYESLPHFCKREGSGSSSDSLDGVDCYSYDHPFHQQLYNYMKQQQSLNQDSVGPRKQGSVHVDVPSPGLEEAKIAETIKAELQNLRGSGGLAHSFSSIQIEGP

SEQ ID NO: 167458 - protein, 279 aa, Zea Mays
MARGMRKCIIQSQEEYLVEEPIGETSHRPRDAAYDHHPSARERQKESDNGNEFNDLDHHKKDTTSFETTSGVYPSPDDADIEDSVEGQTNEAISRGPNKLKHVWNLQKGKRIVVNCNELGQPIGEEAGVLGKFLGMVARNGCLCSLSFKGWRLLIGKKDRNNEQKNKQDVLKQVKMRFLYPARMEKWILRTIGERWRQHKSNLKSLHFDAHRSKENNLKNVPKGVLDDQWVALVNNWFTTQSQDISEANRINCAKRKATHTSGTKSFAQNREDMVFLQT

SEQ ID NO: 167459 - protein, 3714 aa, Zea Mays
MKLKRRRAVEVPPSIKSFINSVTTVPLEDVELPLKDFAWEFDKGDFHHWLDLFNHFDSFFESYIKSRKDLHLEDNFLDVDPPFPREALLQILRVSKLILENCTNRHFSSFFEHLSALLASTDADIVEASLQTLMAFVDKSVGKSSIRSASLASKLFALSQGWGGKEGGLGLVACSLPSVSDPVSTEVGSTLHFEFYRAADKSEKSQCLEKENKLEVIHLSNVNSCKEADLEILDRLVKDYSVPQALRFLLLTRLRFARAFDSLTCRHQYICIRLYAFIVLVQAGHDLEVVSTFLNNEPEFIDELLSLLSYEDEIPEKIRILGVLSLVALCQDRPHQPTVLSSVTSGGHRGILPILMQNTVDSIINGSMKWSIIFAEALLSLVSMLVSSTPGSLALQEAGFIPTILPLLKDTNTQHLHLVSKAVHVIESFLDYHNPSSAVFRDLGGLDDTIARLKLEVSQVEVDSKLIDHSTNEGNEVESYPPVQDIQPSCSESLILYHRKNLIKVLLRTISLATYVPGSSARVDGSEENVLPPCLCAIFKRGKDFGGGVFSLAANVMSDLIHKDPTCYTVLDSAGLPQAFLDAIMCGGLYNSDAVSCIPQCLDALCLNNNGLQLVKDRNALRCFVKIFTSRSYMKALSGDTAGALSSGLDELMRHAPSLRSSGVSMFIEILNTIFKVWCGVDSIPYKESDNYSAVIPMDTDVVVATSQSEGVPPEVGCSGETVDAPLDAVTSSSIELFLPECICNVARLLETVLQNADICRLFIEKKGIEAVLQLFKLPSIPVSVSIGQSISVAFKNFSPQHSVSLARAVCSFFRDHLKITNELLGSISGTMLVGSEPAKQSALLKPLSTLEGLLSIANFLLKGTTIMVSELAFADAEILKELGKVYIEVTWQISLLSDSKVDTQDADQDDLAEEASISERDSDDDTNTAPLSRYMNPVSARASISPWSMEQDFVSTVRSVSHMHHHGRHSLSRISGRLNGVLNATSTDLDGPCFPAETSRRHDALKRIPDDVVSELLKKFCCTMRSFLSTLVKGLPAHRRPDSNLNPNSRSLVTALAQFFLSALGFSGHSTAGFEMSLSVKCRYLGKVVEDMAVLTFDSRRRLCNSALVNSFYVNGTFKDVLTTFEATSQLLWTLPFSVLAAATDQGSSINEKVSHNSWLLDTLQSYCKFLEYYVNSTFLLSPSSSHNRLLVQPIVTELSINLFPVPSDPESFARMLQSQVLDAVLPVWNHTMFPVCNPAFVTSLVSIMNNICSVVGDMKQSRSSVGVANQRVTGPPLDESAIATIVEMGFSRARAEESLRSVRTNSVEMATDWLFNHPEDSVQEDVQLAQALALSLGSSIETPKEDGSNKNDTVIAEEKGVFVLPLDDILTVSTKLFQSSDSTLAFPLTDLLATLCNRNKSEYCKRVVLYLFEQLRHFSSDATDMGALYSVAHVLALLLSEDSGIRETSAENGVISQVLNILGSLKSRTDQTDHTWNSISALLLILYNMLQFNPKLSMETMDGISKSISDASSADSEENPLPTAEHRTEIIDSADDASANVFKKILGKSTGYLNDQESQKALVFCCEFIKLCVPATVMHAVLQLSARLTKTHALAALFFESGGLASLLNLPGTCIFPGFETLASAIVRHLIEDPQTLQSAMELEIRQSLSNHGSRTPSSFLTNMAPLISRDPVIFMKAATSVCQLDYSGGRLNVVLLKDKEKDREKQNVPVTESGVPCNEPVRVTAEVKTVDTPNRCSRNHKKVPASLPQVIDQLLEIIMSYPSASKEHGFDGYSLLTPMDVDEPNTKGKSKVGDGQELDGDAFSERSALLSKFAFVLKLMSEILLMYVHAVGIILRRDTEISVSRSCAQGAGHSGLLHHIFYLLLPLPSVKIADTSDDWIGNLSERASWFLVALCCRSAEGRRRVVSEIVKALNQFIGSASNTSRGSLIPDRKVLAFSELVNSILSRNSQSNLPVLGCSPDIAKPMVDGGMVQSLSVLLKVIDLDHPDAVRVVNLILKALDSLTRTAYTTDQVLNSDRFTKNRLPGSHEQTHEADDIVIPEQTTYDSHHHTNDIESASQQAQELSHVGGNNNENLDQPAEQEMGVDLADNSTSNGNPPTRAVQFMREEPIEGNVMAPSTDIGLAFSMQHQVDGMGVEDEDLGEESEDEEDEEIAAEGAGLMSIADTDIEDQENNAIGDDYNDDLMDEEDDDFLENHVIEVRWRESLTRMDYDHHLRFSRGRADSSGFIDISSESFHGVGTVDSFNLHRSFGLERRRQIGSRSLLDRPRTDVNAFLHPLLVRPAQSREGTNSAWPSGGTSSRDFHMLSFDIPSYMLDAGFSPETAPPVFGERVVSTAPPPLIDFSLGMDSLRIRRGPGDNLWTDDGQPQAGNHAAAIAQAVEDHFVSQLTVANNSNSAPQVRPEQTGNGANAHSELPDTGNAEPVTTDPLSQPVGRHQLVCTVNQGPVPANDVLCPTDVHVNQHLVDSIYDSRVVEPVQQTAAGDPNTIPQSDEMMCIAGTQLGGHPERDSLSGNGSYGNIMQNEIEAPQQVHLGNDPREPPSDLESSCHALVTSASAAPELSDAHVDSSAVNADVDMNIVDIAENEVGNSAPASDGNDLSSRRYEDALQEPQTVQTNAINEASSANEIDPTFLEALPEDLRAEVLASQQNRSAPAASYTPPAAEEIDPEFLAALPPDIQAEVLAQQRAQRIAHSQPAGQPVDMDNASIIATFPPDLREEVLLTSSEAVLSALPSALLAEAQMLRDRELSRYRARGSLFGGSYRLGGRRLPTDNQTVIDRAVGVTVGRRVISTTCSSKGKDVEGTPLLDSEALRALIRLLQLAPPLSRGLLQRLMSNLCAHSVTRVTLVGHLLNMIKPEYEGLSVSDCMATYRLHGCHWNIVYAQSCSANGVPPLVTRRLLEILTYLASASPSVVDLLIYFNPSASPNCLTLQHNKETSQESSMQNMMPPYSKAYTPIILLLKLLNKPLFLRSRVYLEKVLYLLEVVINNAASQVDCPPHSVQITNNSDIEFVDGTPYQTQVEPSTLEQGHIPDNNQSRDVEVPPSCAKLDVNVHAILTQLPDAELHNLCNILALEGLPDKVYSLAAEVVKKLASVAASHRKFFSIELAGVAQSLSSSAVEELVTLKNTQMLGLSTCSMAGAAILRILQVLSTLTSCVMDSRHEQDLGQEEQSFLWDLNAGLQPLWQELSDCISATEAKLVHNSSFASHAPSVDALAVSASSSVSSPLPPGTQRLLPFIESFFVLCEKLQTNQPVAQSDYTVIAPEVKESAGSSSSPSLKTGGTCNVTFIRIAEKHRRLLNVFIRQNPSILEKSLSMMLKVPRLIDFDNKRAYFRSRIRQQHDQHLPAPLHISVRRAYVLDDSYNQLRLRRTQDLKGRLTVQFQGEEGIDAGGLTREWYQLLSRVIFDKGTLLFTTVGNNATFQPNPNSDFQTEHLSYFKFVGRVVAKALFDGQLLDVHFTRSFYKHILGAKVTYHDIEAIDPDYYRNLKWMLENDVSDLPYLTFSMDPDEEKHILYEKTEVTDYELKPGGRNIRVTEETKQEYVDLVAEHILTTAIRPQINGFLEGFTELVPRDLISLFNDKELELLISGLPEIDLDDLKANTEYIGYSAASPVIQWFWEVVRAFSKEDMARLLQFVTGTSKVPLEGFKALQGISGPQRFQIYKAYGSPGRLPSAHTCFNQLDLPEYTSKEQLEERLLLAIHEASEGFGFG

SEQ ID NO: 167460 - protein, 3691 aa, Zea Mays
MKLKRRRAVEVPPSIKSFINSVTTVPLEDVELPLKDFAWEFDKGDFHHWLDLFNHFDSFFESYIKSRKDLHLEDNFLDVDPPFPREALLQILRVSKLILENCTNRHFSSFFEQHLSALLASTDADIVEASLQTLMAFVDKSVGKSSIRSASLASKLFALSQGWGGKEGGLGLVACSLPSVSDPVSTEVGSTLHFEFYRAADKSEKSQCLEKENKLEVIHLSNVNSCKEADLEILDRLVKDYSVPQALRFLLLTRLRFARAFDSLTCRHQYICIRLYAFIVLVQAGHDLEVVSTFLNNEPEFIDELLSLLSYEDEIPEKIRILGVLSLVALCQDRPHQPTVLSSVTSGGHRGILPILMQNTVDSIINGSMKWSIIFAEALLSLVSMLVSSTPGSLALQEAGFIPTILPLLKDTNTQHLHLVSKAVHVIESFLDYHNPSSAVFRDLGGLDDTIARLKLEVSQVEVDSKLIDHSTNEGNEVESYPPVQDIQPSCSESLILYHRKNLIKVLLRTISLATYVPGSSARVDGSEENVLPPCLCAIFKRGKDFGGGVFSLAANVMSDLIHKDPTCYTVLDSAGLPQAFLDAIMCGGLYNSDAVSCIPQCLDALCLNNNGLQLVKDRNALRCFVKIFTSRSYMKALSGDTAGALSSGLDELMRHAPSLRSSGVSMFIEILNTIFKVWCGVDSIPYKESDNYSAVIPMDTDVVVATSQSEGVPPEVGCSGETVDAPLDAVTSSSIELFLPECICNVARLLETVLQNADICRLFIEKKGIEAVLQLFKLPSIPVSVSIGQSISVAFKNFSPQHSVSLARAVCSFFRDHLKITNELLGSISGTMLVGSEPAKQSALLKPLSTLEGLLSIANFLLKGTTIMVSELAFADAEILKELGKVYIEVTWQISLLSDSKVDTQDADQDDLAEEASISERDSDDDTNTAPLSRYMNPVSARASISPWSMEQDFVSTVRSVSHMHHHGRHSLSRISGRLNGVLNATSTDLDGPCFPAETSRRHDALKRIPDDVVSELLKKFCCTMRSFLSTLVKGLPAHRRPDSNLNPNSRSLVTALAQFFLSALGFSGHSTAGFEMSLSVKCRYLGKVVEDMAVLTFDSRRRLCNSALVNSFYVNGTFKDVLTTFEATSQLLWTLPFSVLAAATDQGSSINEKVSHNSWLLDTLQSYCKFLEYYVNSTFLLSPSSSHNRLLVQPIVTELSINLFPVPSDPESFARMLQSQVLDAVLPVWNHTMFPVCNPAFVTSLVSIMNNICSVVGDMKQSRSSVGVANQRVTGPPLDESAIATIVEMGFSRARAEESLRSVRTNSVEMATDWLFNHPEDSVQEDVQLAQALALSLGSSIETPKEDGSNKNDTVIAEEKGVFVLPLDDILTVSTKLFQSSDSTLAFPLTDLLATLCNRNKSEYCKRVVLYLFEQLRHFSSDATDMGALYSVAHVLALLLSEDSGIRETSAENGVISQVLNILGSLKSRTDQTDHTWNSISALLLILYNMLQFNPKLSMETMDGISKSISDASSADSEENPLPTAEHRTEIIDSADDASANVFKKILGKSTGYLNDQESQKALVFCCEFIKLCVPATVMHAVLQLSARLTKTHALAALFFESGGLASLLNLPGTCIFPGFETLASAIVRHLIEDPQTLQSAMELEIRQSLSNHGSRTPSSFLTNMAPLISRDPVIFMKAATSVCQLDYSGGRLNVVLLKDKEKDREKQNVPVTESGVPCNEPVRVTAEVKTVDTPNRCSRNHKKVPASLPQVIDQLLEIIMSYPSASKEHGFDGYSLLTPMDVDEPNTKGKSKVGDGQELDGDAFSERSALLSKFAFVLKLMSEILLMYVHAVGIILRRDTEISVSRSCAQGAGHSGLLHHIFYLLLPLPSVKIADTSDDWIGNLSERASWFLVALCCRSAEGRRRVVSEIVKALNQFIGSASNTSRGSLIPDRKVLAFSELVNSILSRNSQSNLPVLGCSPDIAKPMVDGGMVQSLSVLLKVIDLDHPDAVRVVNLILKALDSLTRTAYTTDQVLNSDRFTKNRLPGSHEQTHEADDIVIPEQTTYDSHHHTNDIESASQQAQELSHVGGNNNENLDQPAEQEMGVDLADNSTSNGNPPTRAVQFMREEPIEGNVMAPSTDIGLAFSMQHQVDGMGVEDEDLGEESEDEEDEEIAAEGAGLMSIADTDIEDQENNAIGDDYNDDLMDEEDDDFLENHVIEVRWRESLTRMDYDHHLRFSRGRADSSGFIDISSESFHGVGTVDSFNLHRSFGLERRRQIGSRSLLDRPRTDVNAFLHPLLVRPAQSREGTNSAWPSGGTSSRDFHMLSFDIPSYMLDAGFSPETAPPVFGERVVSTAPPPLIDFSLGMDSLRIRRGPGDNLWTDDGQPQAGNHAAAIAQAVEDHFVSQLTVANNSNSAPQVRPEQTGNGANAHSELPDTGNAEPVTTDPLSQPVGRHQLVCTVNQGPVPANDVLCPTDVHVNQHLVDSIYDSRVVEPVQQTAAGDPNTIPQSDEMMCIAGTQLGGHPERDSLSGNGSYGNIMQNEIEAPQQVHLGNDPREPPSDLESSCHALVTSASAAPELSDAHVDSSAVNADVDMNIVDIAENEVGNSAPASDGNDLSSRRYEDALQEPQTVQTNAINEASSANEIDPTFLEALPEDLRAEVLASQQNRSAPAASYTPPAAEEIDPEFLAALPPDIQAEVLAQQRAQRIAHSQPAGQPVDMDNASIIATFPPDLREEVLLTSSEAVLSALPSALLAEAQMLRDRELSRYRARGSLFGGSYRLGGRRLPTDNQTVIDRAVGVTVGRRVISTTCSSKGKDVEGTPLLDSEALRALIRLLQLAPPLSRGLLQRLMSNLCAHSVTRVTLVGHLLNMIKPEYEGLSVSDCMATYRLHGCHWNIVYAQSCSANGVPPLVTRRLLEILTYLASASPSVVDLLIYFNPSASPNCLTLQHNKETSQESSMQNMMPPYSKAYTPIILLLKLLNKPLFLRSRVYLEKITNNSDIEFVDGTPYQTQVEPSTLEQGHIPDNNQSRDVEVPPSCAKLDVNVHAILTQLPDAELHNLCNILALEGLPDKVYSLAAEVVKKLASVAASHRKFFSIELAGVAQSLSSSAVEELVTLKNTQMLGLSTCSMAGAAILRILQVLSTLTSCVMDSRHEQDLGQEEQSFLWDLNAGLQPLWQELSDCISATEAKLVHNSSFASHAPSVDALAVSASSSVSSPLPPGTQRLLPFIESFFVLCEKLQTNQPVAQSDYTVIAPEVKESAGSSSSPSLKTGGTCNVTFIRIAEKHRRLLNVFIRQNPSILEKSLSMMLKVPRLIDFDNKRAYFRSRIRQQHDQHLPAPLHISVRRAYVLDDSYNQLRLRRTQDLKGRLTVQFQGEEGIDAGGLTREWYQLLSRVIFDKGTLLFTTVGNNATFQPNPNSDFQTEHLSYFKFVGRVVAKALFDGQLLDVHFTRSFYKHILGAKVTYHDIEAIDPDYYRNLKWMLENDVSDLPYLTFSMDPDEEKHILYEKTEVTDYELKPGGRNIRVTEETKQEYVDLVAEHILTTAIRPQINGFLEGFTELVPRDLISLFNDKELELLISGLPEIDLDDLKANTEYIGYSAASPVIQWFWEVVRAFSKEDMARLLQFVTGTSKVPLEGFKALQGISGPQRFQIYKAYGSPGRLPSAHTCFNQLDLPEYTSKEQLEERLLLAIHEASEGFGFG

SEQ ID NO: 167461 - protein, 2828 aa, Zea Mays
MKLKRRRAVEVPPSIKSFINSVTTVPLEDVELPLKDFAWEFDKGDFHHWLDLFNHFDSFFESYIKSRKDLHLEDNFLDVDPPFPREALLQILRVSKLILENCTNRHFSSFFEQHLSALLASTDADIVEASLQTLMAFVDKSVGKSSIRSASLASKLFALSQGWGGKEGGLGLVACSLPSVSDPVSTEVGSTLHFEFYRAADKSEKSQCLEKENKLEVIHLSNVNSCKEADLEILDRLVKDYSVPQALRFLLLTRLRFARAFDSLTCRHQYICIRLYAFIVLVQAGHDLEVVSTFLNNEPEFIDELLSLLSYEDEIPEKIRILGVLSLVALCQDRPHQPTVLSSVTSGGHRGILPILMQNTVDSIINGSMKWSIIFAEALLSLVSMLVSSTPGSLALQEAGFIPTILPLLKDTNTQHLHLVSKAVHVIESFLDYHNPSSAVFRDLGGLDDTIARLKLEVSQVEVDSKLIDHSTNEGNEVESYPPVQDIQPSCSESLILYHRKNLIKVLLRTISLATYVPGSSARVDGSEENVLPPCLCAIFKRGKDFGGGVFSLAANVMSDLIHKDPTCYTVLDSAGLPQAFLDAIMCGGLYNSDAVSCIPQCLDALCLNNNGLQLVKDRNALRCFVKIFTSRSYMKALSGDTAGALSSGLDELMRHAPSLRSSGVSMFIEILNTIFKVWCGVDSIPYKESDNYSAVIPMDTDVVVATSQSEGVPPEVGCSGETVDAPLDAVTSSSIELFLPECICNVARLLETVLQNADICRLFIEKKGIEAVLQLFKLPSIPVSVSIGQSISVAFKNFSPQHSVSLARAVCSFFRDHLKITNELLGSISGTMLVGSEPAKQSALLKPLSTLEGLLSIANFLLKGTTIMVSELAFADAEILKELGKVYIEVTWQISLLSDSKVDTQDADQDDLAEEASISERDSDDDTNTAPLSRYMNPVSARASISPWSMEQDFVSTVRSVSHMHHHGRHSLSRISGRLNGVLNATSTDLDGPCFPAETSRRHDALKRIPDDVVSELLKKFCCTMRSFLSTLVKGLPAHRRPDSNLNPNSRSLVTALAQFFLSALGFSGHSTAGFEMSLSVKCRYLGKVVEDMAVLTFDSRRRLCNSALVNSFYVNGTFKDVLTTFEATSQLLWTLPFSVLAAATDQGSSINEKVSHNSWLLDTLQSYCKFLEYYVNSTFLLSPSSSHNRLLVQPIVTELSINLFPVPSDPESFARMLQSQVLDAVLPVWNHTMFPVCNPAFVTSLVSIMNNICSVVGDMKQSRSSVGVANQRVTGPPLDESAIATIVEMGFSRARAEESLRSVRTNSVEMATDWLFNHPEDSVQEDVQLAQALALSLGSSIETPKEDGSNKNDTVIAEEKGVFVLPLDDILTVSTKLFQSSDSTLAFPLTDLLATLCNRNKSEYCKRVVLYLFEQLRHFSSDATDMGALYSVAHVLALLLSEDSGIRETSAENGVISQVLNILGSLKSRTDQTDHTWNSISALLLILYNMLQFNPKLSMETMDGISKSISDASSADSEENPLPTAEHRTEIIDSADDASANVFKKILGKSTGYLNDQESQKALVFCCEFIKLCVPATVMHAVLQLSARLTKTHALAALFFESGGLASLLNLPGTCIFPGFETLASAIVRHLIEDPQTLQSAMELEIRQSLSNHGSRTPSSFLTNMAPLISRDPVIFMKAATSVCQLDYSGGRLNVVLLKDKEKDREKQNVPVTESGVPCNEPVRVTAEVKTVDTPNRCSRNHKKVPASLPQVIDQLLEIIMSYPSASKEHGFDGYSLLTPMDVDEPNTKGKSKVGDGQELDGDAFSERSALLSKFAFVLKLMSEILLMYVHAVGIILRRDTEISVSRSCAQGAGHSGLLHHIFYLLLPLPSVKIADTSDDWIGNLSERASWFLVALCCRSAEGRRRVVSEIVKALNQFIGSASNTSRGSLIPDRKVLAFSELVNSILSRNSQSNLPVLGCSPDIAKPMVDGGMVQSLSVLLKVIDLDHPDAVRVVNLILKALDSLTRTAYTTDQVLNSDRFTKNRLPGSHEQTHEADDIVIPEQTTYDSHHHTNDIESASQQAQELSHVGGNNNENLDQPAEQEMGVDLADNSTSNGNPPTRAVQFMREEPIEGNVMAPSTDIGLAFSMQHQVDGMGVEDEDLGEESEDEEDEEIAAEGAGLMSIADTDIEDQENNAIGDDYNDDLMDEEDDDFLENHVIEVRWRESLTRMDYDHHLRFSRGRADSSGFIDISSESFHGVGTVDSFNLHRSFGLERRRQIGSRSLLDRPRTDVNAFLHPLLVRPAQSREGTNSAWPSGGTSSRDFHMLSFDIPSYMLDAGFSPETAPPVFGERVVSTAPPPLIDFSLGMDSLRIRRGPGDNLWTDDGQPQAGNHAAAIAQAVEDHFVSQLTVANNSNSAPQVRPEQTGNGANAHSELPDTGNAEPVTTDPLSQPVGRHQLVCTVNQGPVPANDVLCPTDVHVNQHLVDSIYDSRVVEPVQQTAAGDPNTIPQSDEMMCIAGTQLGGHPERDSLSGNGSYGNIMQNEIEAPQQVHLGNDPREPPSDLESSCHALVTSASAAPELSDAHVDSSAVNADVDMNIVDIAENEVGNSAPASDGNDLSSRRYEDALQEPQTVQTNAINEASSANEIDPTFLEALPEDLRAEVLASQQNRSAPAASYTPPAAEEIDPEFLAALPPDIQAEVLAQQRAQRIAHSQPAGQPVDMDNASIIATFPPDLREEVLLTSSEAVLSALPSALLAEAQMLRDRELSRYRARGSLFGGSYRLGGRRLPTDNQTVIDRAVGVTVGRRVISTTCSSKEAFFKGLCPIYVHIVSHVSPWLAICST

SEQ ID NO: 167462 - protein, 3646 aa, Zea Mays
MKLKRRRAVEVPPSIKSFINSVTTVPLEDVELPLKDFAWEFDKQHLSALLASTDADIVEASLQTLMAFVDKSVGKSSIRSASLASKLFALSQGWGGKEGGLGLVACSLPSVSDPVSTEVGSTLHFEFYRAADKSEKSQCLEKENKLEVIHLSNVNSCKEADLEILDRLVKDYSVPQALRFLLLTRLRFARAFDSLTCRHQYICIRLYAFIVLVQAGHDLEVVSTFLNNEPEFIDELLSLLSYEDEIPEKIRILGVLSLVALCQDRPHQPTVLSSVTSGGHRGILPILMQNTVDSIINGSMKWSIIFAEALLSLVSMLVSSTPGSLALQEAGFIPTILPLLKDTNTQHLHLVSKAVHVIESFLDYHNPSSAVFRDLGGLDDTIARLKLEVSQVEVDSKLIDHSTNEGNEVESYPPVQDIQPSCSESLILYHRKNLIKVLLRTISLATYVPGSSARVDGSEENVLPPCLCAIFKRGKDFGGGVFSLAANVMSDLIHKDPTCYTVLDSAGLPQAFLDAIMCGGLYNSDAVSCIPQCLDALCLNNNGLQLVKDRNALRCFVKIFTSRSYMKALSGDTAGALSSGLDELMRHAPSLRSSGVSMFIEILNTIFKVWCGVDSIPYKESDNYSAVIPMDTDVVVATSQSEGVPPEVGCSGETVDAPLDAVTSSSIELFLPECICNVARLLETVLQNADICRLFIEKKGIEAVLQLFKLPSIPVSVSIGQSISVAFKNFSPQHSVSLARAVCSFFRDHLKITNELLGSISGTMLVGSEPAKQSALLKPLSTLEGLLSIANFLLKGTTIMVSELAFADAEILKELGKVYIEVTWQISLLSDSKVDTQDADQDDLAEEASISERDSDDDTNTAPLSRYMNPVSARASISPWSMEQDFVSTVRSVSHMHHHGRHSLSRISGRLNGVLNATSTDLDGPCFPAETSRRHDALKRIPDDVVSELLKKFCCTMRSFLSTLVKGLPAHRRPDSNLNPNSRSLVTALAQFFLSALGFSGHSTAGFEMSLSVKCRYLGKVVEDMAVLTFDSRRRLCNSALVNSFYVNGTFKDVLTTFEATSQLLWTLPFSVLAAATDQGSSINEKVSHNSWLLDTLQSYCKFLEYYVNSTFLLSPSSSHNRLLVQPIVTELSINLFPVPSDPESFARMLQSQVLDAVLPVWNHTMFPVCNPAFVTSLVSIMNNICSVVGDMKQSRSSVGVANQRVTGPPLDESAIATIVEMGFSRARAEESLRSVRTNSVEMATDWLFNHPEDSVQEDVQLAQALALSLGSSIETPKEDGSNKNDTVIAEEKGVFVLPLDDILTVSTKLFQSSDSTLAFPLTDLLATLCNRNKSEYCKRVVLYLFEQLRHFSSDATDMGALYSVAHVLALLLSEDSGIRETSAENGVISQVLNILGSLKSRTDQTDHTWNSISALLLILYNMLQFNPKLSMETMDGISKSISDASSADSEENPLPTAEHRTEIIDSADDASANVFKKILGKSTGYLNDQESQKALVFCCEFIKLCVPATVMHAVLQLSARLTKTHALAALFFESGGLASLLNLPGTCIFPGFETLASAIVRHLIEDPQTLQSAMELEIRQSLSNHGSRTPSSFLTNMAPLISRDPVIFMKAATSVCQLDYSGGRLNVVLLKDKEKDREKQNVPVTESGVPCNEPVRVTAEVKTVDTPNRCSRNHKKVPASLPQVIDQLLEIIMSYPSASKEHGFDGYSLLTPMDVDEPNTKGKSKVGDGQELDGDAFSERSALLSKFAFVLKLMSEILLMYVHAVGIILRRDTEISVSRSCAQGAGHSGLLHHIFYLLLPLPSVKIADTSDDWIGNLSERASWFLVALCCRSAEGRRRVVSEIVKALNQFIGSASNTSRGSLIPDRKVLAFSELVNSILSRNSQSNLPVLGCSPDIAKPMVDGGMVQSLSVLLKVIDLDHPDAVRVVNLILKALDSLTRTAYTTDQVLNSDRFTKNRLPGSHEQTHEADDIVIPEQTTYDSHHHTNDIESASQQAQELSHVGGNNNENLDQPAEQEMGVDLADNSTSNGNPPTRAVQFMREEPIEGNVMAPSTDIGLAFSMQHQVDGMGVEDEDLGEESEDEEDEEIAAEGAGLMSIADTDIEDQENNAIGDDYNDDLMDEEDDDFLENHVIEVRWRESLTRMDYDHHLRFSRGRADSSGFIDISSESFHGVGTVDSFNLHRSFGLERRRQIGSRSLLDRPRTDVNAFLHPLLVRPAQSREGTNSAWPSGGTSSRDFHMLSFDIPSYMLDAGFSPETAPPVFGERVVSTAPPPLIDFSLGMDSLRIRRGPGDNLWTDDGQPQAGNHAAAIAQAVEDHFVSQLTVANNSNSAPQVRPEQTGNGANAHSELPDTGNAEPVTTDPLSQPVGRHQLVCTVNQGPVPANDVLCPTDVHVNQHLVDSIYDSRVVEPVQQTAAGDPNTIPQSDEMMCIAGTQLGGHPERDSLSGNGSYGNIMQNEIEAPQQVHLGNDPREPPSDLESSCHALVTSASAAPELSDAHVDSSAVNADVDMNIVDIAENEVGNSAPASDGNDLSSRRYEDALQEPQTVQTNAINEASSANEIDPTFLEALPEDLRAEVLASQQNRSAPAASYTPPAAEEIDPEFLAALPPDIQAEVLAQQRAQRIAHSQPAGQPVDMDNASIIATFPPDLREEVLLTSSEAVLSALPSALLAEAQMLRDRELSRYRARGSLFGGSYRLGGRRLPTDNQTVIDRAVGVTVGRRVISTTCSSKGKDVEGTPLLDSEALRALIRLLQLAPPLSRGLLQRLMSNLCAHSVTRVTLVGHLLNMIKPEYEGLSVSDCMATYRLHGCHWNIVYAQSCSANGVPPLVTRRLLEILTYLASASPSVVDLLIYFNPSASPNCLTLQHNKETSQESSMQNMMPPYSKAYTPIILLLKLLNKPLFLRSRVYLEKVLYLLEVVINNAASQVDCPPHSVQITNNSDIEFVDGTPYQTQVEPSTLEQGHIPDNNQSRDVEVPPSCAKLDVNVHAILTQLPDAELHNLCNILALEGLPDKVYSLAAEVVKKLASVAASHRKFFSIELAGVAQSLSSSAVEELVTLKNTQMLGLSTCSMAGAAILRILQVLSTLTSCVMDSRHEQDLGQEEQSFLWDLNAGLQPLWQELSDCISATEAKLVHNSSFASHAPSVDALAVSASSSVSSPLPPGTQRLLPFIESFFVLCEKLQTNQPVAQSDYTVIAPEVKESAGSSSSPSLKTGGTCNVTFIRIAEKHRRLLNVFIRQNPSILEKSLSMMLKVPRLIDFDNKRAYFRSRIRQQHDQHLPAPLHISVRRAYVLDDSYNQLRLRRTQDLKGRLTVQFQGEEGIDAGGLTREWYQLLSRVIFDKGTLLFTTVGNNATFQPNPNSDFQTEHLSYFKFVGRVVAKALFDGQLLDVHFTRSFYKHILGAKVTYHDIEAIDPDYYRNLKWMLENDVSDLPYLTFSMDPDEEKHILYEKTEVTDYELKPGGRNIRVTEETKQEYVDLVAEHILTTAIRPQINGFLEGFTELVPRDLISLFNDKELELLISGLPEIDLDDLKANTEYIGYSAASPVIQWFWEVVRAFSKEDMARLLQFVTGTSKVPLEGFKALQGISGPQRFQIYKAYGSPGRLPSAHTCFNQLDLPEYTSKEQLEERLLLAIHEASEGFGFG

SEQ ID NO: 167463 - protein, 3080 aa, Zea Mays
MKLKRRRAVEVPPSIKSFINSVTTVPLEDVELPLKDFAWEFDKGDFHHWLDLFNHFDSFFESYIKSRKDLHLEDNFLDVDPPFPREALLQILRVSKLILENCTNRHFSSFFEQHLSALLASTDADIVEASLQTLMAFVDKSVGKSSIRSASLASKLFALSQGWGGKEGGLGLVACSLPSVSDPVSTEVGSTLHFEFYRAADKSEKSQCLEKENKLEVIHLSNVNSCKEADLEILDRLVKDYSVPQALRFLLLTRLRFARAFDSLTCRHQYICIRLYAFIVLVQAGHDLEVVSTFLNNEPEFIDELLSLLSYEDEIPEKIRILGVLSLVALCQDRPHQPTVLSSVTSGGHRGILPILMQNTVDSIINGSMKWSIIFAEALLSLVSMLVSSTPGSLALQEAGFIPTILPLLKDTNTQHLHLVSKAVHVIESFLDYHNPSSAVFRDLGGLDDTIARLKLEVSQVEVDSKLIDHSTNEGNEVESYPPVQDIQPSCSESLILYHRKNLIKVLLRTISLATYVPGSSARVDGSEENVLPPCLCAIFKRGKDFGGGVFSLAANVMSDLIHKDPTCYTVLDSAGLPQAFLDAIMCGGLYNSDAVSCIPQCLDALCLNNNGLQLVKDRNALRCFVKIFTSRSYMKALSGDTAGALSSGLDELMRHAPSLRSSGVSMFIEILNTIFKVWCGVDSIPYKESDNYSAVIPMDTDVVVATSQSEGVPPEVGCSGETVDAPLDAVTSSSIELFLPECICNVARLLETVLQNADICRLFIEKKGIEAVLQLFKLPSIPVSVSIGQSISVAFKNFSPQHSVSLARAVCSFFRDHLKITNELLGSISGTMLVGSEPAKQSALLKPLSTLEGLLSIANFLLKGTTIMVSELAFADAEILKELGKVYIEVTWQISLLSDSKVDTQDADQDDLAEEASISERDSDDDTNTAPLSRYMNPVSARASISPWSMEQDFVSTVRSVSHMHHHGRHSLSRISGRLNGVLNATSTDLDGPCFPAETSRRHDALKRIPDDVVSELLKKFCCTMRSFLSTLVKGLPAHRRPDSNLNPNSRSLVTALAQFFLSALGFSGHSTAGFEMSLSVKCRYLGKVVEDMAVLTFDSRRRLCNSALVNSFYVNGTFKDVLTTFEATSQLLWTLPFSVLAAATDQGSSINEKVSHNSWLLDTLQSYCKFLEYYVNSTFLLSPSSSHNRLLVQPIVTELSINLFPVPSDPESFARMLQSQVLDAVLPVWNHTMFPVCNPAFVTSLVSIMNNICSVVGDMKQSRSSVGVANQRVTGPPLDESAIATIVEMGFSRARAEESLRSVRTNSVEMATDWLFNHPEDSVQEDVQLAQALALSLGSSIETPKEDGSNKNDTVIAEEKGVFVLPLDDILTVSTKLFQSSDSTLAFPLTDLLATLCNRNKSEYCKRVVLYLFEQLRHFSSDATDMGALYSVAHVLALLLSEDSGIRETSAENGVISQVLNILGSLKSRTDQTDHTWNSISALLLILYNMLQFNPKLSMETMDGISKSISDASSADSEENPLPTAEHRTEIIDSADDASANVFKKILGKSTGYLNDQESQKALVFCCEFIKLCVPATVMHAVLQLSARLTKTHALAALFFESGGLASLLNLPGTCIFPGFETLASAIVRHLIEDPQTLQSAMELEIRQSLSNHGSRTPSSFLTNMAPLISRDPVIFMKAATSVCQLDYSGGRLNVVLLKDKEKDREKQNVPVTESGVPCNEPVRVTAEVKTVDTPNRCSRNHKKVPASLPQVIDQLLEIIMSYPSASKEHGFDGYSLLTPMDVDEPNTKGKSKVGDGQELDGDAFSERSALLSKFAFVLKLMSEILLMYVHAVGIILRRDTEISVSRSCAQGAGHSGLLHHIFYLLLPLPSVKIADTSDDWIGNLSERASWFLVALCCRSAEGRRRVVSEIVKALNQFIGSASNTSRGSLIPDRKVLAFSELVNSILSRNSQSNLPVLGCSPDIAKPMVDGGMVQSLSVLLKVIDLDHPDAVRVVNLILKALDSLTRTAYTTDQVLNSDRFTKNRLPGSHEQTHEADDIVIPEQTTYDSHHHTNDIESASQQAQELSHVGGNNNENLDQPAEQEMGVDLADNSTSNGNPPTRAVQFMREEPIEGNVMAPSTDIGLAFSMQHQVDGMGVEDEDLGEESEDEEDEEIAAEGAGLMSIADTDIEDQENNAIGDDYNDDLMDEEDDDFLENHVIEVRWRESLTRMDYDHHLRFSRGRADSSGFIDISSESFHGVGTVDSFNLHRSFGLERRRQIGSRSLLDRPRTDVNAFLHPLLVRPAQSREGTNSAWPSGGTSSRDFHMLSFDIPSYMLDAGFSPETAPPVFGERVVSTAPPPLIDFSLGMDSLRIRRGPGDNLWTDDGQPQAGNHAAAIAQAVEDHFVSQLTVANNSNSAPQVRPEQTGNGANAHSELPDTGNAEPVTTDPLSQPVGRHQLVCTVNQGPVPANDVLCPTDVHVNQHLVDSIYDSRVVEPVQQTAAGDPNTIPQSDEMMCIAGTQLGGHPERDSLSGNGSYGNIMQNEIEAPQQVHLGNDPREPPSDLESSCHALVTSASAAPELSDAHVDSSAVNADVDMNIVDIAENEVGNSAPASDGNDLSSRRYEDALQEPQTVQTNAINEASSANEIDPTFLEALPEDLRAEVLASQQNRSAPAASYTPPAAEEIDPEFLAALPPDIQAEVLAQQRAQRIAHSQPAGQPVDMDNASIIATFPPDLREEVLLTSSEAVLSALPSALLAEAQMLRDRELSRYRARGSLFGGSYRLGGRRLPTDNQTVIDRAVGVTVGRRVISTTCSSKGKDVEGTPLLDSEALRALIRLLQLAPPLSRGLLQRLMSNLCAHSVTRVTLVGHLLNMIKPEYEGLSVSDCMATYRLHGCHWNIVYAQSCSANGVPPLVTRRLLEILTYLASASPSVVDLLIYFNPSASPNCLTLQHNKETSQESSMQNMMPPYSKAYTPIILLLKLLNKPLFLRSRVYLEKVLYLLEVVINNAASQVDCPPHSVQITNNSDIEFVDGTPYQTQVEPSTLEQGHIPDNNQSRDVEVPPSCAKLDVNVHAILTQLPDAELHNLCNILALEG

SEQ ID NO: 167464 - protein, 542 aa, Zea Mays
MASTSVPELTADKKCDKAIADTAAPLTSQGHSEEPTGKVSTLVPALPVVIAAGDGAASSGVIENRNGMDNSADGSLKRDDSEGAEKSSLRGSVKDSSVSAKCSDRASSLSKASGSAKISGQPADMIESGKSSLYRASGGSDLSDESTCSSICSSVSKPHKSNDSKWEAIQVVRTKEGSVGLGHFRLLKRLGCGDIGSVYLSELSGTKCYFAMKIMDKASLATRKKLLRAQTEREILQCLDHPFLPTLYTHFETDKFSCLVMEFCPGGDLHTLRQKQPGKYFPEQAAKFYVAEVLLALEYLHMLGIIYRDLKPENVLVREDGHIMLSDFDLSLRCAVSPTLLRSSNPSGDNQKGNPAYCVQPVCIEPACMQPSCVTTTTCFSPRFFSSKSKEKKDKKAKADLANQVRPLPELVAEPTDARSMSFVGTHEYLAPEIIKGEGHGSAVDWWTFGIFLYELLFGKTPFKGSGNRATLFNVVGQPLRFPESPVVSFAARDLIRGLLIKEPQHRLAYKRGATEIKQHPFFEGVNWALIRLTRPTRQPGF

SEQ ID NO: 167465 - protein, 60 aa, Zea Mays
MGFSRLERVPANRELSTPPSSLLPGGHTILSPSLHSHCGPTFLVLVRPRLSLPMMRHVAS

SEQ ID NO: 167466 - protein, 59 aa, Zea Mays
MHIPVASRHAMFDRAWAKQWDCGYRKNRYSTCSYVRPLKTVFFCQIAYNVVSYILLSLL

SEQ ID NO: 167467 - protein, 465 aa, Zea Mays
MAAPALRITARLGLALDGATAARRREASAPVAVPAAPWLKKAAVRCQRAVGAAVAEKKDAPVSVAQDRSGDGGAAPELTVVMKFGGSSVASAERMREVADLILSFPEEHPVVVLSAMGKTTNKLLMAGEKAVGCGATNVSELDELSFVKELHLGTLDQLGLDRSIVCGLLDELEQLLKGIAMMKELTLRTRDYLVSFGECMSTRIFAALLNKIGVKARQYDAFDLGFITTDDFTNADILEATYPAVARRLHVEWINDPAIPIVTGFLGKGWRSGAITTLGRGGSDLTATTIGKALGLREIQVWKDVDGVLTCDPNIHPKAKPVPYLTFDEAAELAYFGAQVLHPQSMRPAREGDVPVRVKNSYNRRAPGTLITKARDMSKTVLTSIVLKSNITMLDIVSTRMLGQYGFLAKVFSIFEDLGISVDCVATSEVSISLTLDPSKLWSCELVQHKNVWASIYSLLISCS

SEQ ID NO: 167468 - protein, 428 aa, Zea Mays
MAAPALRITARLGLALDGATAARRREASAPVAVPAAPWLKKAAVRCQRAVGAAVAEKKDAPVSVAQDRSGDGGAAPELTVVMKFGGSSVASAERMREVADLILSFPEEHPVVVLSAMGKTTNKLLMAGEKAVGCGATNVSELDELSFVKELHLGTLDQLGLDRSIVCGLLDELEQLLKGIAMMKELTLRTRDYLVSFGECMSTRIFAALLNKIGVKARQYDAFDLGFITTDDFTNADILEATYPAVARRLHVEWINDPAIPIVTGFLGKGWRSGAITTLGRGGSDLTATTIGKALGLREIQVWKDVDGVLTCDPNIHPKAKPVPYLTFDEAAELAYFGAQVLHPQSMRPAREGDVPVRVKNSYNRRAPGTLITKARDMSKTVLTSIVLKSNITMLDIVSTRMLGQYGFLAKTWASLLIVWLPVKSAYL

SEQ ID NO: 167469 - protein, 66 aa, Zea Mays
MMPRFSMFNRRACVSSSILQLQIRSLLLVVVVVVSAGCSRALGATRSTCTAYWNRSRESRPRGTAC

SEQ ID NO: 167470 - protein, 299 aa, Zea Mays
MVSALTPSAELLPHPRHPAKRGLLGFRRDHSRAATSKVRVTMLSQQNPGGESAGTPPLYLGIDFGTSGARYALIDEHGAIHSEGKRAYCAPVGDAAGWASSWRAALFQLLADVPPAHRPSVSSISIDGTSATALIVDSETGELLGGPFLYNEGFPDALPAVESVAPANHTVCSPTSTLCKLVSWWAASGGAAAGAAVLMHQSDWLLWLLHGRPGGVSDYNSALKVGYDPELGAYPGWLTSQPYSRMLPAAVRPPGAPVAALRDDVRSQYGFSEDCVVCAGTTDSIAAFLAARRSEPGTA

SEQ ID NO: 167471 - protein, 831 aa, Zea Mays
MAAPPKAWKAEYAKSGRASCKSCRSPIAKDQLRLGKMVQASQFDGFMPMWNHARCIFSKKNQIKSVDDVEGIDALRWDDQEKIRNYVGSASAGTSSTAAPPEKCTIEIAPSARTSCRRCSEKITKGSVRLSAKLESEGPKGIPWYHANCFFEVSPSATVEKFSGWDTLSDEDKRTMLDLVKKDVGNNEQNKGSKRKKSENDIDSYKSARLDESTSEGTVRNKGQLVDPRGSNTSSADIQLKLKEQSDTLWKLKDGLKTHVSAAELRDMLEANGQDTSGPERHLLDRCADGMLFGALGPCPVCANGMYYYNGQYQCSGNVSEWSKCTYSATEPVRVKKKWQIPHGTKNDYLMKWFKSQKVKKPERVLPPMSPEKSGSKATQRTSLLSSKGLDKLRFSVVGQSKEAANEWIEKLKLAGANFYARVVKDIDCLIACGELDNENAEVRKARRLKIPIVREGYIGECVKKNKMLPFDLYKLENALESSKGSTVTVKVKGRSAVHESSGLQDTAHILEDGKSIYNATLNMSDLALGVNSYYVLQIIEQDDGSECYVFRKWGRVGSEKIGGQKLEEMSKTEAIKEFKRLFLEKTGNSWEAWECKTNFRKQPGRFYPLDVDYGVKKAPKRKDISEMKSSLAPQLLELMKMLFNVETYRAAMMEFEINMSEMPLGKLSKENIEKGFEALTEIQNLLKDTADQALAVRESLIVAASNRFFTLIPSIHPHIIRDEDDLMIKAKMLEALQDIEIASKIVGFDSDSDESLDDKYMKLHCDITPLAHDSEDYKLIEQYLLNTHAPTHKDWSLELEEVFSLDRDGELNKYSRYKNNLHNKMLLWHG

SEQ ID NO: 167472 - protein, 548 aa, Zea Mays
MAAPPKAWKAEYAKSGRASCKSCRSPIAKDQLRLGKMVQASQFDGFMPMWNHARCIFSKKNQIKSVDDVEGIDALRWDDQEKIRNYVGSASAGTSSTAAPPEKCTIEIAPSARTSCRRCSEKITKGSVRLSAKLESEGPKGIPWYHANCFFEVSPSATVEKFSGWDTLSDEDKRTMLDLVKKDVGNNEQNKGSKRKKSENDIDSYKSARLDESTSEGTVRNKGQLVDPRGSNTSSADIQLKLKEQSDTLWKLKDGLKTHVSAAELRDMLEANGQDTSGPERHLLDRCADGMLFGALGPCPVCANGMYYYNGQYQCSGNVSEWSKCTYSATEPVRVKKKWQIPHGTKNDYLMKWFKSQKVKKPERVLPPMSPEKSGSKATQRTSLLSSKGLDKLRFSVVGQSKEAANEWIEKLKLAGANFYARVVKDIDCLIACGELDNENAEVRKARRLKIPIVREGYIGECVKKNKMLPFDLYKLENALESSKGSTVTVKVKGRSAVHESSGLQDTAHILEDGKSIYNATLNMSDLALGVNRIMVLRKHQNGKISVK

SEQ ID NO: 167473 - protein, 783 aa, Zea Mays
MWNHARCIFSKKNQIKSVDDVEGIDALRWDDQEKIRNYVGSASAGTSSTAAPPEKCTIEIAPSARTSCRRCSEKITKGSVRLSAKLESEGPKGIPWYHANCFFEVSPSATVEKFSGWDTLSDEDKRTMLDLVKKDVGNNEQNKGSKRKKSENDIDSYKSARLDESTSEGTVRNKGQLVDPRGSNTSSADIQLKLKEQSDTLWKLKDGLKTHVSAAELRDMLEANGQDTSGPERHLLDRCADGMLFGALGPCPVCANGMYYYNGQYQCSGNVSEWSKCTYSATEPVRVKKKWQIPHGTKNDYLMKWFKSQKVKKPERVLPPMSPEKSGSKATQRTSLLSSKGLDKLRFSVVGQSKEAANEWIEKLKLAGANFYARVVKDIDCLIACGELDNENAEVRKARRLKIPIVREGYIGECVKKNKMLPFDLYKLENALESSKGSTVTVKVKGRSAVHESSGLQDTAHILEDGKSIYNATLNMSDLALGVNSYYVLQIIEQDDGSECYVFRKWGRVGSEKIGGQKLEEMSKTEAIKEFKRLFLEKTGNSWEAWECKTNFRKQPGRFYPLDVDYGVKKAPKRKDISEMKSSLAPQLLELMKMLFNVETYRAAMMEFEINMSEMPLGKLSKENIEKGFEALTEIQNLLKDTADQALAVRESLIVAASNRFFTLIPSIHPHIIRDEDDLMIKAKMLEALQDIEIASKIVGFDSDSDESLDDKYMKLHCDITPLAHDSEDYKLIEQYLLNTHAPTHKDWSLELEEVFSLDRDGELNKYSRYKNNLHNKMLLWHG

SEQ ID NO: 167474 - protein, 73 aa, Zea Mays
MRMAMKRHRKYWQILSGLKHSRLILSTVLYHLGLQLIHSSLQALLLLLVNVLIKISTLKNLIQSGVGGQQTMS

SEQ ID NO: 167475 - protein, 183 aa, Zea Mays
MAAPYYGGPPAAPAPVAVVSPQFCAPYVVPLTVTKKAISLSDGDFTVTDANGATVLQVKGAVFSIRHRRVLLDAAGQPILTMLEKHAQQMGGVQRGQLERERPALHREEILDIPAEDGDGHLPGLQHRAAGVRLQDQGQLLREVVRLLPRQLQQHDRPDEPPVYRHQCAAWKGHVWRHCVPAR

SEQ ID NO: 167476 - protein, 377 aa, Zea Mays
MARPHPSRQCPWSPPRAPHHDDTTPSISLLSTPSRASHDHAHGRNLPPSPSPFMSPPSVIPSPPSSPRPHPSCRRPRPAALKSKKGYEYESQSRAGGRANSKASCSSPIRPSPNLIAGFRQKGWDAARFRRGLFCPFRAILLSAREASTDGSEDQGGGGGPRRWKWNAPMRKFQDSIKALQADIDHANAMVSEFLRDYDGSVIQMRVAYSAVAHFLLQWTDCKLAGALGLLKVMLYKVCADGSSALPDWDMEASIREFYGVIFPLLLQLPSGITELDDRKQRKLCLKKFRSRDEQLWEVDTERELECGICLEVSPKEMTPTLLRSLKPQDMSVIKQVQVSRKWEFHGNTDIGSILHIDMILADKERCLRCVVKSRRR

SEQ ID NO: 167477 - protein, 368 aa, Zea Mays
MARPHPSRQCPWSPPRAPHHDDTTPSISLLSTPSRASHDHAHGRNLPPSPSPFMSPPSVIPSPPSSPRPHPSCRRPRPAALKSKKGYEYESQSRAGGRANSKASCSSPIRPSPNLIAGFRQKGWDAARFRRGLFCPFRAILLSAREASTDGSEDQGGGGGPRRWKWNAPMRKFQDSIKALQADIDHANAMVSEFLRDYDGSVIQMRVAYSAVAHFLLQWTDCKLAGALGLLKVMLYKVCADGSSALPDWDMEASIREFYGVIFPLLLQLPSGITELDDRKQRKLCLKKFRSRDEQLWEVDTERELECGICLEEMTPTLLRSLKPQDMSVIKQVQVSRKWEFHGNTDIGSILHIDMILADKEVVGLEPF

SEQ ID NO: 167478 - protein, 373 aa, Zea Mays
MARPHPSRQCPWSPPRAPHHDDTTPSISLLSTPSRASHDHAHGRNLPPSPSPFMSPPSVIPSPPSSPRPHPSCRRPRPAALKSKKGYEYESQSRAGGRANSKASCSSPIRPSPNLIAGFRQKGWDAARFRRGLFCPFRAILLSAREASTDGSEDQGGGGGPRRWKWNAPMRKFQDSIKALQADIDHANAMVSEFLRDYDGSVIQMRVAYSAVAHFLLQWTDCKLAGALGLLKVMLYKVCADGSSALPDWDMEASIREFYGVIFPLLLQLPSGITELDDRKQRKLCLKKFRSRDEQLWEVDTERELECGICLEEMTPTLLRSLKPQDMSVIKQVQVSRKWEFHGNTDIGSILHIDMILADKERCLRCVVKSRRR

SEQ ID NO: 167479 - protein, 284 aa, Zea Mays
MARPHPSRQCPWSPPRAPHHDDTTPSISLLSTPSRASHDHAHGRNLPPSPSPFMSPPSVIPSPPSSPRPHPSCRRPRPAALKSKKGYEYESQSRAGGRANSKASCSSPIRPSPNLIAGFRQKGWDAARFRRGLFCPFRAILLSAREASTDGSEDQGGGGGPRRWKWNAPMRKFQDSIKALQADIDHANAMVSEFLRDYDGSVIQMRVAYSAVAHFLLQWTDCKLAGALGLLKVMLYKVCADGSSALPDWDMEASIREFYASEWHHRAGRQEAEEALPQEIQEQG

SEQ ID NO: 167480 - protein, 120 aa, Zea Mays
MDLMTALQLVMKKSSAHDGLVKGLREAAKAIEKHAAQLCVLAEDCDQPDYVKLVKALCAEHNVHLVTVPAAKTLGEWAGLCKIDSEGKARKVVGCSCVVVKDYGEESEGLNIVQEYVKSH

SEQ ID NO: 167481 - protein, 132 aa, Zea Mays
MASSSSSSHRRLILAAAVLLSVLAAASASAGTSCVPGWAIPHNPLPSCRWYVTSRTCGIGPRLPWPELKRRCCRELADAQLEGRLEDLPGCPREVQRGFAATLVTEAECNLATISGVAECPWILGGGTMPSK

SEQ ID NO: 167482 - protein, 127 aa, Zea Mays
MAPPFVERFTVQSPTLSNSGHTEATMQVDWEREMSVYEPGRSQEVSRTTDGGQYNSNLMNRDDSNFSLDDLDSPPMQQPSPMVRSSRPNHKRSKIFTEHEDALLVSAWLNISLDPVHGTNQTKGTFW

SEQ ID NO: 167483 - protein, 388 aa, Zea Mays
MSEHDLTALMAAQLDRHLVFPLLEFLQERQLYSESEILEAAAPLVAFLQNPQLVQEFRPDKQYNIHMLQERYQIGPDQIEALYQYAKFQFECGNYSGAADYLYQYRALCTNSERNVSALWGKLAAEILMQNWDVALEELNRLKEIIDSKNFSSPLNQLQNRIWLMHWALFIFFNHENGRNGIIDLFFQDRYLNAIQTNAHHLIRYLATAVVVNKRRRNMLKELIKVIQQEHHSYKDPVTEFLECLYVNYDFDGAQQKLIECEQVILNDPFLGKRIEEGNFVSVPLRDEFLENARLFIFETYCRIHRCIDISMLAQKLNMSYDEAELWIMNLVRSSKLDARIDSVSGTLIMTTNHVNVHEQIVESLKGLNMRTYMLAKNIVEPAQQATR

SEQ ID NO: 167484 - protein, 84 aa, Zea Mays
MYSFLANITCWPNAWNNGTIANSFLQTTTSIELGTTNKSSANAYNICLLLPAHITCHVTTPTIFTATFPYFSAICITVHCIAVK

SEQ ID NO: 167485 - protein, 726 aa, Zea Mays
MEGDADGVKSGRRGGGQVCQICGDGVGTTAEGDVFTACDVCGFPVCRPCYEYERKDGTQACPQCKNKYKRHKGSPAIRGEEGDDTDADDASDFNYPASGNDDQKQKIADRMRSWRMNAGGSGDVGRPKYDSGEIGLTKYDSGEIPRGYIPSVTNSQISGEIPGASPDHHMMSPTGNIGRRAPFPYMNHSSNPSREFSGSVGNVAWKERVDGWKMKQDKGTIPMTNGTSIAPSEGRGVGDIDASTDYNMEDALLNDETRQPLSRKVPLPSSRINPYRMVIVLRLIVLSIFLHYRITNPVRNAYPLWLLSVICEIWFALSWILDQFPKWFPINRETYLDRLALRYDREGEPSQLAAVDIFVSTVDPMKEPPLVTANTVLSILAVDYPVDKVSCYVSDDGAAMLTFDALAETSEFARKWVPFVKKYNIEPRAPEWYFSQKIDYLKDKVHPSFVKDRRAMKREYEEFKIRVNGLVAKAQKVPEEGWIMQDGTPWPGNNTRDHPGMIQVFLGHSGGLDTEGNELPRLVYVSREKRPGFQHHKKAGAMNALVRVSAVLTNGQYMLNLDCDHYINNSKALREAMCFLMDPNLGRSVCYVQFPQRFDGIDRNDRYANRNTVFFDINLRGLDGIQGPVYVGTGCVFNRTALYGYEPPIKQKKGGFLSSLCGGRKKGSKSKKGSDKKKSQKHVDSSVPVFNLEDIEEGVEGAGFDDEKSLLMSQGEVHHPRDQQLR

SEQ ID NO: 167486 - protein, 863 aa, Zea Mays
MEPPAAKEAPPLQPAAEEDAMLSATAAMAKEAAVAFQGCRYADCAAVLTRLLDKKEGDLKVHHNMAITEFFLDDCPDSNRLLKILGDFKLHFFLIFCWRTGNARYTHGEGDDTRRNSHFISRRSEELACASREQADSANGVGNSAHSGSRGSGALLPFSSTHNASTYGDEFDTTIITFNMAVILYHLHDYESALSVLDPLYRNIEPMDEPTALHVCFLLLDITLALQDATKAVDIVQYLERSFGVANTMNPNENASIAQQQLAQAKPPVKISMPPDSDSNAYAGGYENLSSGIFPDEQIEFESLCSSFDGHQNVGRRILNDFSRASADLAATAADLKVRLQIYKVRLLLLTRNLKVAKRELKVLMNMARGRDSSTELLLKSQLEYARGNYRKAVKLLSTPNNRTEPAMLAIFHNNMGCILHQQRSYHASIWCFSKALKYSLSFRSEKPMKLSTLSQDKSCLISYNCGIQHLMCGKPLLAASCFREAMPLFYKRPLFWLRFSECSLLALEKGLLCANGASSFNDEIEINVVGSGQWRQLIVNPVNSRSNLDSAGVTLGEHKNLVSLGFARQCLQNALLLLDATEKENWVIASDTEDWDQGTVHGYKSSGQKNTTSTDSKTPSGPTLANVNGEQKGTSLNATLQSSLAFYDEIRRKEYIKIRQAVLANLAFVELCLDNPLKTLTYAKSVLQVTDCSRMYAFLSHVYAAEALCTLNRTEDAAENLSVYIRDGNHVELPYSVENSEKALVEKDSDGEDLVAPAVTKLATEEPEQLRPEEARGVLYINLGMIAARQGEVEKANYMVSRGLAMLPNNPRAVLASVYVDLLQGKSQEAVVKLRRCRNVRFRPASIAASSQQSSLEKPPLS

SEQ ID NO: 167487 - protein, 802 aa, Zea Mays
MEPPAAKEAPPLQPAAEEDAMLSATAAMAKEAAVAFQGCRYADCAAVLTRLLDKKEGDLKRRSEELACASREQADSANGVGNSAHSGSRGSGALLPFSSTHNASTYGDEFDTTIITFNMAVILYHLHDYESALSVLDPLYRNIEPMDEPTALHVCFLLLDITLALQDATKAVDIVQYLERSFGVANTMNPNENASIAQQQLAQAKPPVKISMPPDSDSNAYAGGYENLSSGIFPDEQIEFESLCSSFDGHQNVGRRILNDFSRASADLAATAADLKVRLQIYKVRLLLLTRNLKVAKRELKVLMNMARGRDSSTELLLKSQLEYARGNYRKAVKLLSTPNNRTEPAMLAIFHNNMGCILHQQRSYHASIWCFSKALKYSLSFRSEKPMKLSTLSQDKSCLISYNCGIQHLMCGKPLLAASCFREAMPLFYKRPLFWLRFSECSLLALEKGLLCANGASSFNDEIEINVVGSGQWRQLIVNPVNSRSNLDSAGVTLGEHKNLVSLGFARQCLQNALLLLDATEKENWVIASDTEDWDQGTVHGYKSSGQKNTTSTDSKTPSGPTLANVNGEQKGTSLNATLQSSLAFYDEIRRKEYIKIRQAVLANLAFVELCLDNPLKTLTYAKSVLQVTDCSRMYAFLSHVYAAEALCTLNRTEDAAENLSVYIRDGNHVELPYSVENSEKALVEKDSDGEDLVAPAVTKLATEEPEQLRPEEARGVLYINLGMIAARQGEVEKANYMVSRGLAMLPNNPRAVLASVYVDLLQGKSQEAVVKLRRCRNVRFRPASIAASSQQSSLEKPPLS

SEQ ID NO: 167488 - protein, 755 aa, Zea Mays
MGRGTTHDETHILYQSEELACASREQADSANGVGNSAHSGSRGSGALLPFSSTHNASTYGDEFDTTIITFNMAVILYHLHDYESALSVLDPLYRNIEPMDEPTALHVCFLLLDITLALQDATKAVDIVQYLERSFGVANTMNPNENASIAQQQLAQAKPPVKISMPPDSDSNAYAGGYENLSSGIFPDEQIEFESLCSSFDGHQNVGRRILNDFSRASADLAATAADLKVRLQIYKVRLLLLTRNLKVAKRELKVLMNMARGRDSSTELLLKSQLEYARGNYRKAVKLLSTPNNRTEPAMLAIFHNNMGCILHQQRSYHASIWCFSKALKYSLSFRSEKPMKLSTLSQDKSCLISYNCGIQHLMCGKPLLAASCFREAMPLFYKRPLFWLRFSECSLLALEKGLLCANGASSFNDEIEINVVGSGQWRQLIVNPVNSRSNLDSAGVTLGEHKNLVSLGFARQCLQNALLLLDATEKENWVIASDTEDWDQGTVHGYKSSGQKNTTSTDSKTPSGPTLANVNGEQKGTSLNATLQSSLAFYDEIRRKEYIKIRQAVLANLAFVELCLDNPLKTLTYAKSVLQVTDCSRMYAFLSHVYAAEALCTLNRTEDAAENLSVYIRDGNHVELPYSVENSEKALVEKDSDGEDLVAPAVTKLATEEPEQLRPEEARGVLYINLGMIAARQGEVEKANYMVSRGLAMLPNNPRAVLASVYVDLLQGKSQEAVVKLRRCRNVRFRPASIAASSQQSSLEKPPLS

SEQ ID NO: 167489 - protein, 330 aa, Zea Mays
MGFVDPAAPLLATCGGDTVKLFDVTVETGDPCVLAYTPAPAHPVNAVKWNHTNLIVASAGDDKKISLWHKKGQNVGQLPTSTVDRGDDIEECIYSISFSNKGSRYLCSCGSGHIVRIWDLQRKRCIKWLSGHTDTITGVMYNCKDEHLASISMKGDLILHNLASGARVSELSDPNGQVLRVLDYSRNSRHLLVTAGDDGSVHLWDTTAKSPKVSWLKQHSAPTSGVCISPSSDKIIATVGLDKKLYTLDSGSRRPAHTIPHEAPFSSLAYNDDGTIIAAGTNSGRVVFYDIRGKPKPLTILRAYNTSEIPCLQQHLQALVLGWPLQVFSL

SEQ ID NO: 167490 - protein, 642 aa, Zea Mays
MATQGQAAAGSASESGGSPAALAAAAAAAAAFPATSLYVGDLHESVQDAQLFDVFSQVGGVVSVRVCRDINSRKSLGYAYVNYNNQGDAARALELLNFTPINGKPIRIMYSNRDPSSRKSGTGNIFIKNLDKSIDNKALYDTFCAFGNILSCKIATDPSGESRGYGFVQFEKDESAQSAIDKLNGMLINDKKVFVGPFVRKQDRENVSSNIKFSNVYVKNLSDTVTDDELKEMFGKYGTITSAVVMRDSDGKSRCFGFVNFENADAAAQAVQELNGKIFNDKELYVGRAQKKSEREMELKEKFEKNVQEVAEKFQNTNLYLKNLEENIDDEKLRELFAEYGNITSCKVMRDSNGVSRGSGFVAFKSAEDANRALTEMNGKMVGSKPLYVALAQRKEDRKAKLQAQFSQMRPVAMAPSVGPRMPMFPPGVPGVGQQLFYGQPPPAFINPQAGFAFQQPLMPGMRPGGPMPNFMMPMVQQGQQPQRPAGRRAGGMQQPMPMGGQQQVFPRGGRGYRYPTGRGMPDPGMHSVGAVMPPSYEMGGMPMREAAPQPVPIGALATALANAPPDQQRLLEREQAAKVTGMLLEMDQTEVLHLLESPDALKAKVAEAMEVLRSAQHLQQSNVSTEQQLANLSLNDGVVSS

SEQ ID NO: 167491 - protein, 368 aa, Zea Mays
MATQGQAAAGSASESGGSPAALAAAAAAAAAFPATSLYVGDLHESVQDAQLFDVFSQVGGVVSVRVCRDINSRKSLGYAYVNYNNQGDAARALELLNFTPINGKPIRIMYSNRDPSSRKSGTGNIFIKNLDKSIDNKALYDTFCAFGNILSCKIATDPSGESRGYGFVQFEKDESAQSAIDKLNGMLINDKKVFVGPFVRKQDRENVSSNIKFSNVYVKNLSDTVTDDELKEMFGKYGTITSAVVMRDSDGKSRCFGFVNFENADAAAQAVQELNGKIFNDKELYVGRAQKKSEREMELKEKFEKNVQEVAEKFQNTNLYLKNLEENIDDEKLRELFAELCGIRMVSAEVLDLLLSNLLKMLTELLRR

SEQ ID NO: 167492 - protein, 433 aa, Zea Mays
MATQGQAAAGSASESGGSPAALAAAAAAAAAFPATSLYVGDLHESVQDAQLFDVFSQVGGVVSVRVCRDINSRKSLGYAYVNYNNQGDAARALELLNFTPINGKPIRIMYSNRDPSSRKSGTGNIFIKNLDKSIDNKALYDTFCAFGNILSCKIATDPSGESRGYGFVQFEKDESAQSAIDKLNGMLINDKKVFVGPFVRKQDRENVSSNIKFSNVYVKNLSDTVTDDELKEMFGKYGTITSAVVMRDSDGKSRCFGFVNFENADAAAQAVQELNGKIFNDKELYVGRAQKKSEREMELKEKFEKNVQEVAEKFQNTNLYLKNLEENIDDEKLRELFAEYGNITSCKVMRDSNGVSRGSGFVAFKSAEDANRALTEMNGKMVGSKPLYVALAQRKEDRKAKLQAQFSQMRPVAMAPSVGPPLCPASPAEQCFY

SEQ ID NO: 167493 - protein, 700 aa, Zea Mays
MHRGGDRSGGPSSGGDRSGARFQRGPSRWSGSSGGGLGGSPPNRYSSRGAADGGGGGGGGSGGGGRFHPYRGSSDYSSGGGGYRGGSGVGNDFGDQRQRYGGGNRGGGRGDFQDHDSRSNYVKLFVGSVPRTATEEDVRPLFEEHGDVLEVALIKDRKTGEQQGCCFVKYATSEEAERAIRGLHNHYTLPGAMGPIQVRYADGERERHGAIEHKLFVASLNKQATPKEIEEIFAPYGHVEDVYIMRDSVKQSRGCGFVKFSSKEAAVEAMNALSGTYTMRGCEQPLIIRFADPKRPRPGESRGRPAFGGPGFSPRSDAALVIRPTANLDESRGQHMLPESWRPSSPRPMAPNQYNNFGSDNPLALSGGTVTSADTATFRPPMFPGNGSLSNQTAVPTSSHMGMNTPMVQEHHLRGQQIPSLQKPPGPPQNFAVQLQNAQPGQPLQGHIPQIGQLQAPQSTGPVSFGQNISSMQLPGQPPASQPLMQRNASLGALHAPPSGQSNPMQAVPGQQQLPTSVAPQMLQQSMQQMPSQAPQLLLQQQAALQSSYQSSQQAIYQLQQQLQLMQQQSNLNQQPSAQVGSSAVSSTCNWTEHTSPEGFKYYYNSITRESKWEKPEEYVLYEQQQQKLLLLQQHQQNIAVQQLQSPPQGQSLPSMQPIQQLPQAQGQTQMHMKQQAAGSIDPNRIQQGIPAAQERAWKN

SEQ ID NO: 167494 - protein, 720 aa, Zea Mays
MHRGGDRSGGPSSGGDRSGARFQRGPSRWSGSSGGGLGGSPPNRYSSRGAADGGGGGGGGSGGGGRFHPYRGSSDYSSGGGGYRGGSGVGNDFGDQRQRYGGGNRGGGRGDFQDHDSRSNYVKLFVGSVPRTATEEDVRPLFEEHGDVLEVALIKDRKTGEQQGCCFVKYATSEEAERAIRGLHNHYTLPGAMGPIQVRYADGERERHGAIEHKLFVASLNKQATPKEIEEIFAPYGHVEDVYIMRDSVKQSRGCGFVKFSSKEAAVEAMNALSGTYTMRGCEQPLIIRFADPKRPRPGESRGRPAFGGPGFSPRSDAALVIRPTANLDESRGQHMLPESWRPSSPRPMAPNQYNNFGSDNPLALSGGTVTSADTATFRPPMFPGNGSLSNQTAVPTSSHMGMNTPMVQEHHLRGQQIPSLQKPPGPPQNFAVQLQNAQPGQPLQGHIPQIGQLQAPQSTGPVSFGQNISSMQLPGQPPASQPLMQRNASLGALHAPPSGQSNPMQAVPGQQQLPTSVAPQMLQQSMQQMPSQAPQLLLQQQAALQSSYQSSQQSNLNQQPSAQSGQPVQSSNTGDPGAIIPTKINAISQQVGSSAVSSTCNWTEHTSPEGFKYYYNSITRESKWEKPEEYVLYEQQQQKLLLLQQHQQNIAVQQLQSPPQGQSLPSMQPIQQLPQAQGQTQMHMKQQELNYSQFQAAGSIDPNRIQQGIPAAQERAWKN

SEQ ID NO: 167495 - protein, 774 aa, Zea Mays
MPAKYLGPGALAEDRRQDLHRQVGCVTGILQAFDRRHPLASSSHKRLLPPTAGHAVSSNPSKEGDCTRYSPQIVLENSSKTWADSQRAPATELSQTSYSSSPSSSFSSVDDNKSTQQDLSSTDRMLFPERPFKSSPKLKSYFDSDTGLDYPDDAPTKSKDMPIVQSSLPTLGIRNLVKDSIYMDSRELSVRICTKEVTDHPSNCGDQPRELNGPPRDSTQEKSKGLVDINESLRVLAKLREASWTPAESVHHARLSYDAPRFSYDGKEAASKLREVPRLSLDIKESHLRNGEIDSRLNPSLSSTDRSSNTVIGSNAAFEIQQKQPACKRLPSVVAKLMGLEELPEHNQSIASSHACKTVQGSKQEAMFNPLSISSHNEHALRQQRNHDSTVRNLPNSKFPVETAPWKQQERIILPRKLPKGSKGAHGREQPAASVISDIEKRLKDLDFRQSYKDLRALKHILDSMQAKGLLENKNREEISMPKLSDGNHNGQEIASVNMRVNSNTNNVCMPEESNAESSFKSPIVIMKPSKCANLFNEVDSSVFPLGGSSDPPQQQTSNSTYRRKASTRNRTAKEQHAKFSSKVPTSQPLVSYDRRSYGRNDDSSNNQKSSSLLVTESSSRRQQLPRDSSISMKKNKHSTTPRLQQRKLGSERRARPPIPCAESNKSQNQSGDRNNAETVSPRSKFRRKLLCPQEGDDDMPSGLNNRTRSLNQHGNDMSTRSDGSITVASELDIISNDRSTEVDIPNFDQGIGTPSGRNPQRVVNNFLAILPYF

SEQ ID NO: 167496 - protein, 757 aa, Zea Mays
MILQCCPFLVLLQESRKACSSLARFSIDNDSLLAAGHAVSSNPSKEGDCTRYSPQIVLENSSKTWADSQRAPATELSQTSYSSSPSSSFSSVDDNKSTQQDLSSTDRMLFPERPFKSSPKLKSYFDSDTGLDYPDDAPTKSKDMPIVQSSLPTLGIRNLVKDSIYMDSRELSVRICTKEVTDHPSNCGDQPRELNGPPRDSTQEKSKGLVDINESLRVLAKLREASWTPAESVHHARLSYDAPRFSYDGKEAASKLREVPRLSLDIKESHLRNGEIDSRLNPSLSSTDRSSNTVIGSNAAFEIQQKQPACKRLPSVVAKLMGLEELPEHNQSIASSHACKTVQGSKQEAMFNPLSISSHNEHALRQQRNHDSTVRNLPNSKFPVETAPWKQQERIILPRKLPKGSKGAHGREQPAASVISDIEKRLKDLDFRQSYKDLRALKHILDSMQAKGLLENKNREEISMPKLSDGNHNGQEIASVNMRVNSNTNNVCMPEESNAESSFKSPIVIMKPSKCANLFNEVDSSVFPLGGSSDPPQQQTSNSTYRRKASTRNRTAKEQHAKFSSKVPTSQPLVSYDRRSYGRNDDSSNNQKSSSLLVTESSSRRQQLPRDSSISMKKNKHSTTPRLQQRKLGSERRARPPIPCAESNKSQNQSGDRNNAETVSPRSKFRRKLLCPQEGDDDMPSGLNNRTRSLNQHGNDMSTRSDGSITVASELDIISNDRSTEVDIPNFDQGIGTPSGRNPQRVVNNFLAILPYF

SEQ ID NO: 167497 - protein, 355 aa, Zea Mays
MANRTDPLAKSIHGTNPQNLVEKIVRSKIYQSTYWKEQCFGLTAETLVDKDIVVEFIKNEDYKYVRVLGAFYLRLTGTIADVYQYLEPLYNDYRKIRHKLSDGQFTLTHVDEFIDELLTKDYSCDTAMPRIQKRWVLEASGTLEPRRSALEDDFEEEEEDKEEQPMEIDEPNGRENDNHRGRSLARERDRDWDHDRKHERHNRDKDYDRDRDYDRDYGRGRERHRDRDRERDRNRDRDRDRHRLRDDDYNRNRDRDRERDGRERERRDRDRGRHRSRSRSRDRRDRDREDGEYRRRRGRGSVSPRGRGEDGGPREEPKRKKEKKEKGEGNAPDPNDPEIIEMNKLRASLGLKPLK

SEQ ID NO: 167498 - protein, 205 aa, Zea Mays
MPRIQKRWVLEASGTLEPRRSALEDDFEEEEEDKEEQPMEIDEPNGRENDNHRGRSLARERDRDWDHDRKHERHRDRDRERDRNRDRDRDRHRLRDDDYNRNRDRDRERDGRERERRDRDRGRHRSRSRSRDRRDRDREDGEYRRRRGRGSVSPRGRGEDGGPREEPKRKKEKKEKGEGNAPDPNDPEIIEMNKLRASLGLKPLK

SEQ ID NO: 167499 - protein, 690 aa, Zea Mays
MASAKLLYIVVVDENASSFRYTRSLLHSTLQLMGCKPRHAFEISRRVFDVIRGDHQGHGDTATSARVQRYEVAEATPTASPRQFQFELYKRRTTVLLPRDLFLDLVLDALALYKIRERKESITVLLCGTSGCGKSTLSTLLGSRLGITTVVSTDSIRHMMRSFVEEKENPLLWASTYHAGECLDPVAVAEAKARRKAKKRSGVSSSSTIDYEKSGSLTEKVDGKSIGKKQMAVEGFKAQSEMVIDSLDRLITAWEDRKESVVVEGVHLSLNFVMGLMRKHPSIIPFMIYISNEGKHTERFAVRAKYMTLDPTKNKYVKYISNIRTIQEYLCSRADKYLVPKVNNTNVDRSVASIHATVFSCLRRRSNGDQLYDPEGNTIAIVNEEYKNQCVANSMSSKGMFKLIQRLGSSRKLMAIINVDGSVSKAWPVESSGDGKCSSDNSNKKSVGNPIYGPLNIGRAESVNLQFGTFGISAWPTDTGCTSQAGNADESWVNAAEGSSSHVQSSSGSTKKLDGHCKEIKESSAAYGSDEEEEEEADVRPNSGSDEDLSEEDTMEIDEEMEGSVDEDCNRSDEEYDDLAMRDSLENGYLTDDGVFCSGLSNSSSGKFFGGNQLSHSTPKKPQEKFDAGVPETSRSYSAAVPAGTSSKRHATRKWKRSLSDPFRSRPHSAPELVSGCKGSPPVPVAPEER

SEQ ID NO: 167500 - protein, 676 aa, Zea Mays
MASAKLLYIVVVDENASSFRYTRSLLHSTLQLMGCKPRHAFEGHGDTATSARVQRYEVAEATPTASPRQFQFELYKRRTTVLLPRDLFLDLVLDALALYKIRERKESITVLLCGTSGCGKSTLSTLLGSRLGITTVVSTDSIRHMMRSFVEEKENPLLWASTYHAGECLDPVAVAEAKARRKAKKRSGVSSSSTIDYEKSGSLTEKVDGKSIGKKQMAVEGFKAQSEMVIDSLDRLITAWEDRKESVVVEGVHLSLNFVMGLMRKHPSIIPFMIYISNEGKHTERFAVRAKYMTLDPTKNKYVKYISNIRTIQEYLCSRADKYLVPKVNNTNVDRSVASIHATVFSCLRRRSNGDQLYDPEGNTIAIVNEEYKNQCVANSMSSKGMFKLIQRLGSSRKLMAIINVDGSVSKAWPVESSGDGKCSSDNSNKKSVGNPIYGPLNIGRAESVNLQFGTFGISAWPTDTGCTSQAGNADESWVNAAEGSSSHVQSSSGSTKKLDGHCKEIKESSAAYGSDEEEEEEADVRPNSGSDEDLSEEDTMEIDEEMEGSVDEDCNRSDEEYDDLAMRDSLENGYLTDDGVFCSGLSNSSSGKFFGGNQLSHSTPKKPQEKFDAGVPETSRSYSAAVPAGTSSKRHATRKWKRSLSDPFRSRPHSAPELVSGCKGSPPVPVAPEER

SEQ ID NO: 167501 - protein, 691 aa, Zea Mays
MASAKLLYIVVVDENASSFRYTRSLLHSTLQLMGCKPRHAFEGHGDTATSARVQRYEVAEATPTASPRQFQFELYKRRTTVLLPRDLFLDLVLDALALYKYVAPNQRADLMLACRIRERKESITVLLCGTSGCGKSTLSTLLGSRLGITTVVSTDSIRHMMRSFVEEKENPLLWASTYHAGECLDPVAVAEAKARRKAKKRSGVSSSSTIDYEKSGSLTEKVDGKSIGKKQMAVEGFKAQSEMVIDSLDRLITAWEDRKESVVVEGVHLSLNFVMGLMRKHPSIIPFMIYISNEGKHTERFAVRAKYMTLDPTKNKYVKYISNIRTIQEYLCSRADKYLVPKVNNTNVDRSVASIHATVFSCLRRRSNGDQLYDPEGNTIAIVNEEYKNQCVANSMSSKGMFKLIQRLGSSRKLMAIINVDGSVSKAWPVESSGDGKCSSDNSNKKSVGNPIYGPLNIGRAESVNLQFGTFGISAWPTDTGCTSQAGNADESWVNAAEGSSSHVQSSSGSTKKLDGHCKEIKESSAAYGSDEEEEEEADVRPNSGSDEDLSEEDTMEIDEEMEGSVDEDCNRSDEEYDDLAMRDSLENGYLTDDGVFCSGLSNSSSGKFFGGNQLSHSTPKKPQEKFDAGVPETSRSYSAAVPAGTSSKRHATRKWKRSLSDPFRSRPHSAPELVSGCKGSPPVPVAPEER

SEQ ID NO: 167502 - protein, 532 aa, Zea Mays
MMRSFVEEKENPLLWASTYHAGECLDPVAVAEAKARRKAKKRSGVSSSSTIDYEKSGSLTEKVDGKSIGKKQMAVEGFKAQSEMVIDSLDRLITAWEDRKESVVVEGVHLSLNFVMGLMRKHPSIIPFMIYISNEGKHTERFAVRAKYMTLDPTKNKYVKYISNIRTIQEYLCSRADKYLVPKVNNTNVDRSVASIHATVFSCLRRRSNGDQLYDPEGNTIAIVNEEYKNQCVANSMSSKGMFKLIQRLGSSRKLMAIINVDGSVSKAWPVESSGDGKCSSDNSNKKSVGNPIYGPLNIGRAESVNLQFGTFGISAWPTDTGCTSQAGNADESWVNAAEGSSSHVQSSSGSTKKLDGHCKEIKESSAAYGSDEEEEEEADVRPNSGSDEDLSEEDTMEIDEEMEGSVDEDCNRSDEEYDDLAMRDSLENGYLTDDGVFCSGLSNSSSGKFFGGNQLSHSTPKKPQEKFDAGVPETSRSYSAAVPAGTSSKRHATRKWKRSLSDPFRSRPHSAPELVSGCKGSPPVPVAPEER

SEQ ID NO: 167503 - protein, 178 aa, Zea Mays
MAPKRRGNKVVGSVVKTKLVQETVEVIVADDDGLHEEKQPETPRVASEKRKKAATPTKKTKTQQPRRRRQRLGQASSGGDAGMGGVGGYRRYVWRVLKQVHPDLGVSGHAMQVLDMMMADMFERLAEEAARLSKATGRATLTSREVQSAVRLVLPGELGRHAISEGTKAISKYMSYAA

SEQ ID NO: 167504 - protein, 59 aa, Zea Mays
MYLSVSLCMFRCFNRPTCSVSFLLSSSVYCSVCLIGSISPSMYRLASLSGIAIQFRNSP

SEQ ID NO: 167505 - protein, 89 aa, Zea Mays
MTALDPGAPVNGDWTFGIGTTPVAASIHSCCQSCQRSRRDICFKFINMGFKSIYRYHSSSWQLADVKTEAETSVPSRCAPDLQKRLCCT

SEQ ID NO: 167506 - protein, 242 aa, Zea Mays
MSLACGLPLLECVYCLACARWAWKRCLHSGEVDSATWGLASADDFEPVPRMCRLVMANYEPDLSPSAPLLFAPPGGYGIDPACVLRRRTYADTRGRVTPYLLYLDHAHADIVLALRGLNLVKESDYALLLDNRLGKRRFDGGYVHNGLLRAAGWVLDAECDLLRELLETYPDYTLTFTGHSLGAGIAAMLTMVVVLNLDKIGNIDRTRTRCYAMAPARTTSCPGRLLLLKTFSSRSSACLAS

SEQ ID NO: 167507 - protein, 301 aa, Zea Mays
MSLACGLPLLECVYCLACARWAWKRCLHSGEVDSATWGLASADDFEPVPRMCRLVMANYEPDLSPSAPLLFAPPGGYGIDPACVLRRRTYADTRGRVTPYLLYLDHAHADIVLALRGLNLVKESDYALLLDNRLGKRRFDGGYVHNGLLRAAGWVLDAECDLLRELLETYPDYTLTFTGHSLGAGIAAMLTMVVVLNLDKIGNIDRTRTRCYAMAPARCMSLNLAVRYADVINSVVLQDDFLPRTATPLEDIFKSILCLPCLLGLRCLRDTCIPEDAMLKDPRRLYAPGRIYHIVERRTCS

SEQ ID NO: 167508 - protein, 300 aa, Zea Mays
MSSARGDHKPVKWNATVTSSQLISPVAEEQKVSYIKYLHPFENKGKEFLFTVTIRKIDNKWWYNSCRKCACTAVTHGDSYKCTNCDCANIAMPVQRYKILVTAGDETADTYFILFGRMAQRIVKRPCDMLIANTPSGFIPDAITKLLERTFIWNVSFSGHTINSGDVCFQVNATVKELGNQNVDISTSTVGTHQSSLMFSQGASSSMEDTPHKTDTLSSPLTPLTPQGSIATTKYLETVDIGDAERVTTQSSTTRKRSCSSPSKSIAKKLFVADDEEGSISQSSGGGVGGSRSGCLSSDY

SEQ ID NO: 167509 - protein, 184 aa, Zea Mays
MSSARGDHKPVKWNATVTSSQLISPVAEEQKVSYIKYLHPFENKGKEFLFTVTIRKIDNKWWYNSCRKCACTAVTHGDSYKCTNCDCANIAMPVQRYKILVTAGDETADTYFILFGRMAQRIVKRPCDMLIANTPSGFIPDAITKLLERTFIWNGHTSLHLCSHKVQAAAWKTLLTRQTPCLHL

SEQ ID NO: 167510 - protein, 1095 aa, Zea Mays
MRASAVPMEASASARRSAAGPDPRAKKPRLAPPPRDPRSYAATASSNGNTSAAEQALVDELLGQYRTALGELTFNSKPIITNLTIIAGENLQAAKPIAALICANILEVTFVFDSSYARQTAVFPSSFSIDHVKVILRRHQVVTSTHWLSVMLDISHVLGGAVPSEQKLPSLYLLDSIVKNIGKDYVKHFSARLPEVFCKAYKQVDPSIHHSMRHLFGTWKGVFPLPPLQMIEKELGFQSSANGSSSAAPSRTDSQSPRPSNSIHVNPKYLEARQQLNQPTKGILGSGAKTTVIADTGGDIERPNRLGTDRNAGRRLDASNARPNIQRTQRDPSSNSLHEKQAVRDVGGLGFSNISQQAVVGTGQVRSKPKAQDGIGGPYYASGVGSSEEQFDRRSNFYASKDARPSGSVRLESALLPTPSINADRVGKPSSNKSWKHSEEEEYVWDDVHSKAAEYGGSHNVIKGEWMSDDGNAKFANLQRAKWADAGPVERIDPNTHKLDNVSRFGLGAGQERRISEYMDQEEYLLGKREVEARIDKEIRSDGQQFPAARGSPLWVSQEKTLLDIGLEPRISRFSTQPAERSTIYTGTMSAGITSSVPVGLSGNYAGRSSLDTANGMPIRSTEAFGQQKHRYWSSSPPQADTSSSTAPFARQGSPNPAESDFYPSRSLSRQNPQEYSKRALPVLAKDSHVVVHNDGFTQGQPSLQATRQTQKYPILQSKSHIKPSDQLQASFSRENSPSLFRPSIELGEVSLPSDSTPISSDLTSASNLLASLVKSGFKPNNHSDAQALGPSGPLPVASLSLQNAAGENTTLQAHTPNTSRPPLPPPPSTQSAEKAAPLSSLLSSLVAKGLISSPAYDSSSAVISQPNKASSMNVKDATASAVPLLALRPSVGKASSNSDSSAPTNASLTKAIEIKMSDLIGLEFKPEKLRKYHEHVISSLFDDDQSHQCKTCGNRFRLEELSLHTSSCGQRKSETIYTGIAPKRWYPSKNIYIDGSHEIEDSTEASDGDLGSAEEVCEFMVPSDERQIICALCGEPFDDIYSFEKGDWMYKDAVFLDYPKGESSCRNSVEGEEHVPIVHVRCMPRGSNDGMEVD

SEQ ID NO: 167511 - protein, 629 aa, Zea Mays
MSDDGNAKFANLQRAKWADAGPVERIDPNTHKLDNVSRFGLGAGQERRISEYMDQEEYLLGKREVEARIDKEIRSDGQQFPAARGSPLWVSQEKTLLDIGLEPRISRFSTQPAERSTIYTGTMSAGITSSVPVGLSGNYAGRSSLDTANGMPIRSTEAFGQQKHRYWSSSPPQADTSSSTAPFARQGSPNPAESDFYPSRSLSRQNPQEYSKRALPVLAKDSHVVVHNDGFTQGQPSLQATRQTQKYPILQSKSHIKPSDQLQASFSRENSPSLFRPSIELGEVSLPSDSTPISSDLTSASNLLASLVKSGFKPNNHSDAQALGPSGPLPVASLSLQNAAGENTTLQAHTPNTSRPPLPPPPSTQSAEKAAPLSSLLSSLVAKGLISSPAYDSSSAVISQPNKASSMNVKDATASAVPLLALRPSVGKASSNSDSSAPTNASLTKAIEIKMSDLIGLEFKPEKLRKYHEHVISSLFDDDQSHQCKTCGNRFRLEELSLHTSSCGQRKSETIYTGIAPKRWYPSKNIYIDGSHEIEDSTEASDGDLGSAEEVCEFMVPSDERQIICALCGEPFDDIYSFEKGDWMYKDAVFLDYPKGESSCRNSVEGEEHVPIVHVRCMPRGSNDGMEVD

SEQ ID NO: 167512 - protein, 884 aa, Zea Mays
MRHLFGTWKGVFPLPPLQMIEKELGFQSSANGSSSAAPSRTDSQSPRPSNSIHVNPKYLEARQQLNQPTKGILGSGAKTTVIADTGGDIERPNRLGTDRNAGRRLDASNARPNIQRTQRDPSSNSLHEKQAVRDVGGLGFSNISQQAVVGTGQVRSKPKAQDGIGGPYYASGVGSSEEQFDRRSNFYASKDARPSGSVRLESALLPTPSINADRVGKPSSNKSWKHSEEEEYVWDDVHSKAAEYGGSHNVIKGEWMSDDGNAKFANLQRAKWADAGPVERIDPNTHKLDNVSRFGLGAGQERRISEYMDQEEYLLGKREVEARIDKEIRSDGQQFPAARGSPLWVSQEKTLLDIGLEPRISRFSTQPAERSTIYTGTMSAGITSSVPVGLSGNYAGRSSLDTANGMPIRSTEAFGQQKHRYWSSSPPQADTSSSTAPFARQGSPNPAESDFYPSRSLSRQNPQEYSKRALPVLAKDSHVVVHNDGFTQGQPSLQATRQTQKYPILQSKSHIKPSDQLQASFSRENSPSLFRPSIELGEVSLPSDSTPISSDLTSASNLLASLVKSGFKPNNHSDAQALGPSGPLPVASLSLQNAAGENTTLQAHTPNTSRPPLPPPPSTQSAEKAAPLSSLLSSLVAKGLISSPAYDSSSAVISQPNKASSMNVKDATASAVPLLALRPSVGKASSNSDSSAPTNASLTKAIEIKMSDLIGLEFKPEKLRKYHEHVISSLFDDDQSHQCKTCGNRFRLEELSLHTSSCGQRKSETIYTGIAPKRWYPSKNIYIDGSHEIEDSTEASDGDLGSAEEVCEFMVPSDERQIICALCGEPFDDIYSFEKGDWMYKDAVFLDYPKGESSCRNSVEGEEHVPIVHVRCMPRGSNDGMEVD

SEQ ID NO: 167513 - protein, 1953 aa, Zea Mays
MVSPPAFAAAVAVVAVLLCASAAANPAGGPHMADLSVLLPPRMTKPVEYRLIGGDGCFSWSWDHHDLISVKPEYNDSSRCSTSARLASIAPYSGRRETSVYATDIISGITIHCKVFVDKISRISIFHHAVKIDLDEIATLRIHAFDDEENVFSTLVGLQFLWHLTPRLVDNSSHHLIRIPLKETHLSDCGGFCGDMNIRFELEDKNLGSDFSVVKGIEIGQEVVKAQLFEPQFEHVIDTITLTVAESMSLEPSSPVLVTVGVLVKFKLKVFRQKVAQVVKLPSQYHRWYATNSSVAQVDSLGILHALSLGFTKVVVEDTRVSGHEQVSSLHVVIPRTLFLYLVPIMDDSAHLHGITNIPSSKVWYVYPGRKYMVLAKAFAEGFDAREIYITEENELKLESSTMEFWNLSQVPDSSTSSYEVQTSRLLSPIFQGQGHLDASLTYLTGASGPTKVLKLVQEVNVCSKVKAFWDEGLENSNVIYLPWVPGVHQEVEMMAIGGCGKTLDDYKLFSSDEDVASVSDSRIVRAKKPGQAVIRVVSAFDFLNFDEVIVEVSIPSVLSILPIFPVEVPVGTRLHSAAVLKTSAGHPFSQCTHFNAFIRWSLLSEDEAFHILNTAEASSIDDIKHNSGYWGQNGNPCAWVSLSAFAAGRSTIVATFAVDSDSDIETFGGPISLEATSKISAYYPLVVLQGGNGNHFGGYWFDLSGIHSRIKNMDNNSPKELYLVPGSTMDVLIFGGPERWDQVIDFVETVDVIDPSKNHIISSTAVKKLSSGLYRVSCLSKVSYKLLFSRGNMVGKDHPVPAISKSEFTVICDFPSEITLIANENENRLDILEAARKADRGPDRLQASPIVISNGRNIRLAAASIHVNGRFFANSSSLRLKWEATGCEGLAYFEETKSVEMLDESAWERSLVLQNSTGVCTVRATVDDFSTKYAGQTHEEEYTFHSLTDAIQLQIVSSLRVTPEYVLLVFHPEAQENLIVSGGTCSLDASTNDTHVVQIVTHPGKALCSQLILAAKGLGEAIIIIQDVGLSPRATTHSLVRVANVDWIKITAEEQISLMEGSTKDFQILAGTQDGQIFGDSQFKYMDIELHLDDEILELIGPSESMDGPEFSIKAAKIGITSLYVSTKQSSGHRVLSQVVKVEVYGPLQIHPEYIYLTPGASFVLSVKGGPKTGVSIEYSSLNMGIVEVQNTTGKLSAKSVGNSTVRAAVLANGGILVCEAFGRVEVDIPVAMTLNTQSERLCIGCSMPVYPSLPKGDLFSFYETCQSYSWMIADEKVVTFQSAKSWRYRLDQGLYSDGKKSPWFSNGSSKFFISHMLGRSAGKTKISISVVCDFLLPGTSGSVVSYNASKIILVVPDPPLALALPMTWLFPPFYTTMSLLPRSANSLGEPNSLDLESSVGYSLLRGNGRIIDGSKIQTGESNTVDCIQAKDHSAGRTEIAACLRVAQVAQVRVAAAESSIQIVYLSVNDKVELDIKYADELGYIFNEAHGVVPVKIETNYPDVVSVLMPRDFNGTYDTRERFVLQARSHGTALVRLHTNNVPNKVDFIMVSVGAQIYPRDVILHSGQHLNFTVIGDSMDMCGHGHWLSSNGKIVHINRVTGEAQARSEGVAEVIFKGSNFKLQTTITVLKVNQIVVDAPAETLTNAAGLPDGYMFSVRFSDSIEHSIGSSASPINVPFECKVDPSFVGFVEPWTEHATKKSYCLFHPYSPAQLLPVKLDPNEGTLHILVRANLKEDPKVTGSAHALFVKGFYIKEPGKLNLTPSCNHSVITIDGNTDIELFWNAKDLLRVSRVDTNENNGVLSRVVYRVEALKRLSFSDKVTIVLPATGQTEEVEVSYDTGEEAESPSSWGLTTTAVMLTCIIVTIVTVALFIKLLQRPIRQAPSGSMTASTPARAPAADPAAMADPASPANGQFSPRTPQPFMEYVRRTIDDTPYYKRDARRRFNPQNTY

SEQ ID NO: 167514 - protein, 1860 aa, Zea Mays
MVSPPAFAAAVAVVAVLLCASAAANPAGGPHMADLSVLLPPRMTKPVEYRLIGGDGCFSWSWDHHDLISVKPEYNDSSRCSTSARLASIAPYSGRRETSVYATDIISGITIHCKVFVDKISRISIFHHAVKIDLDEIATLRIHAFDDEENVFSTLVGLQFLWHLTPRLVDNSSHHLIRIPLKETHLSDCGGFCGDMNIRFELEDKNLGSDFSVVKGIEIGQEVVKAQLFEPQFEHVIDTITLTVAESMSLEPSSPVLVTVGVLVKFKLKVFRQKVAQVVKLPSQYHRWYATNSSVAQVDSLGILHALSLGFTKVVVEDTRVSGHEQVSSLHVVIPRTLFLYLVPIMDDSAHLHGITNIPSSKVWYVYPGRKYMVLAKAFAEGFDAREIYITEENELKLESSTMEFWNLSQVPDSSTSSYEVQTSRLLSPIFQGQGHLDASLTYLTGASGPTKVLKLVQEVNVCSKVKAFWDEGLENSNVIYLPWVPGVHQEVEMMAIGGCGKTLDDYKLFSSDEDVASVSDSRIVRAKKPGQAVIRVVSAFDFLNFDEVIVEVSIPSVLSILPIFPVEVPVGTRLHSAAVLKTSAGHPFSQCTHFNAFIRWSLLSEDEAFHILNTAEASSIDDIKHNSGYWGQNGNPCAWVSLSAFAAGRSTIVATFAVDSDSDIETFGGPISLEATSKISAYYPLVVLQGGNGNHFGGYWFDLSGIHSRIKNMDNNSPKELYLVPGSTMDVLIFGGPERWDQVIDFVETVDVIDPSKNHIISSTAVKKLSSGLYRVSCLSKVSYKLLFSRGNMVGKDHPVPAISKSEFTVICDFPSEITLIANENENRLDILEAARKADRGPDRLQASPIVISNGRNIRLAAASIHVNGRFFANSSSLRLKWEATGCEGLAYFEETKSVEMLDESAWERSLVLQNSTGVCTVRATVDDFSTKYAGQTHEEEYTFHSLTDAIQLQIVSSLRVTPEYVLLVFHPEAQVRVANVDWIKITAEEQISLMEGSTKDFQILAGTQDGQIFGDSQFKYMDIELHLDDEILELIGPSESMDGPEFSIKAAKIGITSLYVSTKQSSGHRVLSQVVKVEVYGPLQIHPEYIYLTPGASFVLSVKGGPKTGVSIEYSSLNMGIVEVQNTTGKLSAKSVGNSTVRAAVLANGGILVCEAFGRVEVDIPVAMTLNTQSERLCIGCSMPVYPSLPKGDLFSFYETCQSYSWMIADEKVVTFQSAKSWRYRLDQGLYSDGKKSPWFSNGSSKFFISHMLGRSAGKTKISISVVCDFLLPGTSGSVVSYNASKIILVVPDPPLALALPMTWLFPPFYTTMSLLPRSANSLGEPNSLDLESSVGYSLLRGNGRIIDGSKIQTGESNTVDCIQAKDHSAGRTEIAACLRVAQVAQVRVAAAESSIQIVYLSVNDKVELDIKYADELGYIFNEAHGVVPVKIETNYPDVVSVLMPRDFNGTYDTRERFVLQARSHGTALVRLHTNNVPNKVDFIMVSVGAQIYPRDVILHSGQHLNFTVIGDSMDMCGHGHWLSSNGKIVHINRVTGEAQARSEGVAEVIFKGSNFKLQTTITVLKVNQIVVDAPAETLTNAAGLPDGYMFSVRFSDSIEHSIGSSASPINVPFECKVDPSFVGFVEPWTEHATKKSYCLFHPYSPAQLLPVKLDPNEGTLHILVRANLKEDPKVTGSAHALFVKGFYIKEPGKLNLTPSCNHSVITIDGNTDIELFWNAKDLLRVSRVDTNENNGVLSRVVYRVEALKRLSFSDKVTIVLPATGQTEEVEVSYDTGEEAESPSSWGLTTTAVMLTCIIVTIVTVALFIKLLQRPIRQAPSGSMTASTPARAPAADPAAMADPASPANAIEHPVWNDV

SEQ ID NO: 167515 - protein, 1617 aa, Zea Mays
MVSPPAFAAAVAVVAVLLCASAAANPAGGPHMADLSVLLPPRMTKPVEYRLIGGDGCFSWSWDHHDLISVKPEYNDSSRCSTSARLASIAPYSGRRETSVYATDIISGITIHCKVFVDKISRISIFHHAVKIDLDEIATLRIHAFDDEENVFSTLVGLQFLWHLTPRLVDNSSHHLIRIPLKETHLSDCGGFCGDMNIRFELEDKNLGSDFSVVKGIEIGQEVVKAQLFEPQFEHVIDTITLTVAESMSLEPSSPVLVTVGVLVKFKLKVFRQKVAQVVKLPSQYHRWYATNSSVAQVDSLGILHALSLGFTKVVVEDTRVSGHEQVSSLHVVIPRTLFLYLVPIMDDSAHLHGITNIPSSKVWYVYPGRKYMVLAKAFAEGFDAREIYITEENELKLESSTMEFWNLSQVPDSSTSSYEVQTSRLLSPIFQGQGHLDASLTYLTGASGPTKVLKLVQEVNVCSKVKAFWDEGLENSNVIYLPWVPGVHQEVEMMAIGGCGKTLDDYKLFSSDEDVASVSDSRIVRAKKPGQAVIRVVSAFDFLNFDEVIVEVSIPSVLSILPIFPVEVPVGTRLHSAAVLKTSAGHPFSQCTHFNAFIRWSLLSEDEAFHILNTAEASSIDDIKHNSGYWGQNGNPCAWVSLSAFAAGRSTIVATFAVDSDSDIETFGGPISLEATSKISAYYPLVVLQGGNGNHFGGYWFDLSGIHSRIKNMDNNSPKELYLVPGSTMDVLIFGGPERWDQVIDFVETVDVIDPSKNHIISSTAVKKLSSGLYRVSCLSKVSYKLLFSRGNMVGKDHPVPAISKSEFTVICDFPSEITLIANENENRLDILEAARKADRGPDRLQASPIVISNGRNIRLAAASIHVNGRFFANSSSLRLKWEATGCEGLAYFEETKSVEMLDESAWERSLVLQNSTGVCTVRATVDDFSTKYAGQTHEEEYTFHSLTDAIQLQIVSSLRVTPEYVLLVFHPEAQENLIVSGGTCSLDASTNDTHVVQIVTHPGKALCSQLILAAKGLGEAIIIIQDVGLSPRATTHSLVRVANVDWIKITAEEQISLMEGSTKDFQILAGTQDGQIFGDSQFKYMDIELHLDDEILELIGPSESMDGPEFSIKAAKIGITSLYVSTKQSSGHRVLSQVVKVEVYGPLQIHPEYIYLTPGASFVLSVKGGPKTGVSIEYSSLNMGIVEVQNTTGKLSAKSVGNSTVRAAVLANGGILVCEAFGRVEVDIPVAMTLNTQSERLCIGCSMPVYPSLPKGDLFSFYETCQSYSWMIADEKVVTFQSAKSWRYRLDQGLYSDGKKSPWFSNGSSKFFISHMLGRSAGKTKISISVVCDFLLPGTSGSVVSYNASKIILVVPDPPLALALPMTWLFPPFYTTMSLLPRSANSLGEPNSLDLESSVGYSLLRGNGRIIDGSKIQTGESNTVDCIQAKDHSAGRTEIAACLRVAQVAQVRVAAAESSIQIVYLSVNDKVELDIKYADELGYIFNEAHGVVPVKIETNYPDVVSVLMPRDFNGTYDTRERFVLQARSHGTALVRLHTNNVPNKVDFIMVSVGAQIYPRDVILHSGQHLNFTVIGDSMDMCGHGHWLSSNGKIVHINRVTGEAQARSEGVAEDSC

SEQ ID NO: 167516 - protein, 1620 aa, Zea Mays
MVSPPAFAAAVAVVAVLLCASAAANPAGGPHMADLSVLLPPRMTKPVEYRLIGGDGCFSWSWDHHDLISVKPEYNDSSRCSTSARLASIAPYSGRRETSVYATDIISGITIHCKVFVDKISRISIFHHAVKIDLDEIATLRIHAFDDEENVFSTLVGLQFLWHLTPRLVDNSSHHLIRIPLKETHLSDCGGFCGDMNIRFELEDKNLGSDFSVVKGIEIGQEVVKAQLFEPQFEHVIDTITLTVAESMSLEPSSPVLVTVGVLVKFKLKVFRQKVAQVVKLPSQYHRWYATNSSVAQVDSLGILHALSLGFTKVVVEDTRVSGHEQVSSLHVVIPRTLFLYLVPIMDDSAHLHGITNIPSSKVWYVYPGRKYMVLAKAFAEGFDAREIYITEENELKLESSTMEFWNLSQVPDSSTSSYEVQTSRLLSPIFQGQGHLDASLTYLTGASGPTKVLKLVQEVNVCSKVKAFWDEGLENSNVIYLPWVPGVHQEVEMMAIGGCGKTLDDYKLFSSDEDVASVSDSRIVRAKKPGQAVIRVVSAFDFLNFDEVIVEVSIPSVLSILPIFPVEVPVGTRLHSAAVLKTSAGHPFSQCTHFNAFIRWSLLSEDEAFHILNTAEASSIDDIKHNSGYWGQNGNPCAWVSLSAFAAGRSTIVATFAVDSDSDIETFGGPISLEATSKISAYYPLVVLQGGNGNHFGGYWFDLSGIHSRIKNMDNNSPKELYLVPGSTMDVLIFGGPERWDQVIDFVETVDVIDPSKNHIISSTAVKKLSSGLYRVSCLSKVSYKLLFSRGNMVGKDHPVPAISKSEFTVICDFPSEITLIANENENRLDILEAARKADRGPDRLQASPIVISNGRNIRLAAASIHVNGRFFANSSSLRLKWEATGCEGLAYFEETKSVEMLDESAWERSLVLQNSTGVCTVRATVDDFSTKYAGQTHEEEYTFHSLTDAIQLQIVSSLRVTPEYVLLVFHPEAQENLIVSGGTCSLDASTNDTHVVQIVTHPGKALCSQLILAAKGLGEAIIIIQDVGLSPRATTHSLVRVANVDWIKITAEEQISLMEGSTKDFQILAGTQDGQIFGDSQFKYMDIELHLDDEILELIGPSESMDGPEFSIKAAKIGITSLYVSTKQSSGHRVLSQVVKVEVYGPLQIHPEYIYLTPGASFVLSVKGGPKTGVSIEYSSLNMGIVEVQNTTGKLSAKSVGNSTVRAAVLANGGILVCEAFGRVEVDIPVAMTLNTQSERLCIGCSMPVYPSLPKGDLFSFYETCQSYSWMIADEKVVTFQSAKSWRYRLDQGLYSDGKKSPWFSNGSSKFFISHMLGRSAGKTKISISVVCDFLLPGTSGSVVSYNASKIILVVPDPPLALALPMTWLFPPFYTTMSLLPRSANSLGEPNSLDLESSVGYSLLRGNGRIIDGSKIQTGESNTVDCIQAKDHSAGRTEIAACLRVAQVAQVRVAAAESSIQIVYLSVNDKVELDIKYADELGYIFNEAHGVVPVKIETNYPDVVSVLMPRDFNGTYDTRERFVLQARSHGTALVRLHTNNVPNKVDFIMVSVGAQIYPRDVILHSGQHLNFTVIGDSMDMCGHGHWLSSNGKIVHINRVTGEAQARSEGVAEGEPDSC

SEQ ID NO: 167517 - protein, 1635 aa, Zea Mays
MRRCYAVRACKESHTFSLDGCWSVPHWEVREAEVPQRTELVPWRAGQVPRGPEELPEGLCRSCPEGRRKRCLEGRNKCLGGRNAKQVLWRSEELPRGLRELSREAAHEGKPWGMAPADEDAWWLPTYGTRGGGTMVAEENELKLESSTMEFWNLSQVPDSSTSSYEVQTSRLLSPIFQGQGHLDASLTYLTGASGPTKVLKLVQEVNVCSKVKAFWDEGLENSNVIYLPWVPGVHQEVEMMAIGGCGKTLDDYKLFSSDEDVASVSDSRIVRAKKPGQAVIRVVSAFDFLNFDEVIVEVSIPSVLSILPIFPVEVPVGTRLHSAAVLKTSAGHPFSQCTHFNAFIRWSLLSEDEAFHILNTAEASSIDDIKHNSGYWGQNGNPCAWVSLSAFAAGRSTIVATFAVDSDSDIETFGGPISLEATSKISAYYPLVVLQGGNGNHFGGYWFDLSGIHSRIKNMDNNSPKELYLVPGSTMDVLIFGGPERWDQVIDFVETVDVIDPSKNHIISSTAVKKLSSGLYRVSCLSKVSYKLLFSRGNMVGKDHPVPAISKSEFTVICDFPSEITLIANENENRLDILEAARKADRGPDRLQASPIVISNGRNIRLAAASIHVNGRFFANSSSLRLKWEATGCEGLAYFEETKSVEMLDESAWERSLVLQNSTGVCTVRATVDDFSTKYAGQTHEEEYTFHSLTDAIQLQIVSSLRVTPEYVLLVFHPEAQVRVANVDWIKITAEEQISLMEGSTKDFQILAGTQDGQIFGDSQFKYMDIELHLDDEILELIGPSESMDGPEFSIKAAKIGITSLYVSTKQSSGHRVLSQVVKVEVYGPLQIHPEYIYLTPGASFVLSVKGGPKTGVSIEYSSLNMGIVEVQNTTGKLSAKSVGNSTVRAAVLANGGILVCEAFGRVEVDIPVAMTLNTQSERLCIGCSMPVYPSLPKGDLFSFYETCQSYSWMIADEKVVTFQSAKSWRYRLDQGLYSDGKKSPWFSNGSSKFFISHMLGRSAGKTKISISVVCDFLLPGTSGSVVSYNASKIILVVPDPPLALALPMTWLFPPFYTTMSLLPRSANSLGEPNSLDLESSVGYSLLRGNGRIIDGSKIQTGESNTVDCIQAKDHSAGRTEIAACLRVAQVAQVRVAAAESSIQIVYLSVNDKVELDIKYADELGYIFNEAHGVVPVKIETNYPDVVSVLMPRDFNGTYDTRERFVLQARSHGTALVRLHTNNVPNKVDFIMVSVGAQIYPRDVILHSGQHLNFTVIGDSMDMCGHGHWLSSNGKIVHINRVTGEAQARSEGVAEVIFKGSNFKLQTTITVLKVNQIVVDAPAETLTNAAGLPDGYMFSVRFSDSIEHSIGSSASPINVPFECKVDPSFVGFVEPWTEHATKKSYCLFHPYSPAQLLPVKLDPNEGTLHILVRANLKEDPKVTGSAHALFVKGFYIKEPGKLNLTPSCNHSVITIDGNTDIELFWNAKDLLRVSRVDTNENNGVLSRVVYRVEALKRLSFSDKVTIVLPATGQTEEVEVSYDTGEEAESPSSWGLTTTAVMLTCIIVTIVTVALFIKLLQRPIRQAPSGSMTASTPARAPAADPAAMADPASPANGQFSPRTPQPFMEYVRRTIDDTPYYKRDARRRFNPQNTY

SEQ ID NO: 167518 - protein, 723 aa, Zea Mays
MRRCYAVRACKESHTFSLDGCWSVPHWEVREAEVPQRTELVPWRAGQVPRGPEELPEGLCRSCPEGRRKRCLEGRNKCLGGRNAKQVLWRSEELPRGLRELSREAAHEGKPWGMAPADEDAWWLPTYGTRGGGTMVAEENELKLESSTMEFWNLSQVPDSSTSSYEVQTSRLLSPIFQGQGHLDASLTYLTGASGPTKVLKLVQEVNVCSKVKAFWDEGLENSNVIYLPWVPGVHQEVEMMAIGGCGKTLDDYKLFSSDEDVASVSDSRIVRAKKPGQAVIRVVSAFDFLNFDEVIVEVSIPSVLSILPIFPVEVPVGTRLHSAAVLKTSAGHPFSQCTHFNAFIRWSLLSEDEAFHILNTAEASSIDDIKHNSGYWGQNGNPCAWVSLSAFAAGRSTIVATFAVDSDSDIETFGGPISLEATSKISAYYPLVVLQGGNGNHFGGYWFDLSGIHSRIKNMDNNSPKELYLVPGSTMDVLIFGGPERWDQVIDFVETVDVIDPSKNHIISSTAVKKLSSGLYRVSCLSKVSYKLLFSRGNMVGKDHPVPAISKSEFTVICDFPSEITLIANENENRLDILEAARKADRGPDRLQASPIVISNGRNIRLAAASIHVNGRFFANSSSLRLKWEATGCEGLAYFEETKSVEMLDESAWERSLVLQNSTGVCTVRATVDDFSTKYAGQTHEEEYTFHSLTDAIQLQIVSSLRVTPEYVLLVFHPEAQV

SEQ ID NO: 167519 - protein, 605 aa, Zea Mays
MTKFQFNLLLQRVGLSALSPGMEDINFEAWWSRSAEVTPKDLRDGLNSLVVLGAWTIWRHRNDCVFNGAQPSIARLLTSASDEFNMWCFAGAKGNYVMPNVSFDAVIIIVQVAQVRVAAAESSIQIVYLSVNDKVELDIKYADELGYIFNEAHGVVPVKIETNYPDVVSVLMPRDFNGTYDTRERFVLQARSHGTALVRLHTNNVPNKVDFIMVSVGAQIYPRDVILHSGQHLNFTVIGDSMDMCGHGHWLSSNGKIVHINRVTGEAQARSEGVAEVIFKGSNFKLQTTITVLKVNQIVVDAPAETLTNAAGLPDGYMFSVRFSDSIEHSIGSSASPINVPFECKVDPSFVGFVEPWTEHATKKSYCLFHPYSPAQLLPVKLDPNEGTLHILVRANLKEDPKVTGSAHALFVKGFYIKEPGKLNLTPSCNHSVITIDGNTDIELFWNAKDLLRVSRVDTNENNGVLSRVVYRVEALKRLSFSDKVTIVLPATGQTEEVEVSYDTGEEAESPSSWGLTTTAVMLTCIIVTIVTVALFIKLLQRPIRQAPSGSMTASTPARAPAADPAAMADPASPANGGDSTRRTPTEHAWQRVVWTGWSVVTFLI

SEQ ID NO: 167520 - protein, 439 aa, Zea Mays
MADVDDDAVLSDVDEDPLPPPSTSSASSHKSLPQAQPQSQSDAQAQQQRLLDLAAELEEERRLRRAAEASLAEAEPRVARFKAFAQEALRKRDDLTAQAAASARSLAALQAEAATASSMLSSGFERISAKASPSSPPAPLPTSQKYSSGLPALAYGVLKRANDIVDELLAQIDAANRDRDRAREQMEHRNYQIAIEVSELEASLASRSAEGESLSKSLSQREAEISELRDKITSLEGKLAAQRPVLAEQIGCTSKLYHEMREVVKLVDAEAVSALSDSVFVWKETDVEESLKVSLEGTKLAYELAAIALEKVGACIDDKESKLRRLENMVDGLIKEKEHISVLLRNALQATTSEVLKVAEDGLREAGIEIGLNERKEHMLGSVEKDEVYTLAGALENTMKESQVKIIELQHLVEALRTFVLSFFAAKEKHLELGGVWFT

SEQ ID NO: 167521 - protein, 331 aa, Zea Mays
MRMWSVVAWLFNPFTFTIGTRGNCEPIVCAVILWILICLMKGRVLQAAFWYGFIVHFRIYPIIYAIPFVIVLGKGYAGPVGRPTLTMWRSKQQLQDDKVSQIEEPTSFLATVWGFLSNFISRNGILFGLLSGSMFFAWTGVFFYLYGWDFLNEALLYHLTRTDPRHNFSIYFYHIYLHHQQGFSSIQRLASFLPQLIVQLALILRFSRDLPFCMFLQTVAFVAFNKVMTAQYFVWFFCLLPLILPWSSMKLKWKGLACAVVWMGSQLHWLMWAYLLEFEGRNVFVQLWVAGLMFLAANTFVMLMVMKHHKYTLLFSTPLKSGNKVATKKEE

SEQ ID NO: 167522 - protein, 759 aa, Zea Mays
MGKEKLHKQPSGRLIESLKMERMRNILTHRYPYPHEHSRHFIIAVFACWLFFISSDNLQNLIMKLDKNFKWWSMYACLIGFFYFFSSPFIRKTIKPNYSNFNRWYIAWIFLAALYHLPSFQSMGLDLRMNLSLFLTIYISSLIFLMVFHIIFLGLWYLGFVSRMAEKKPEMLTIIQNCAVISIACCVFYSHCGNRTVSRDKSIDRRTASWIVFSLWTKHDDNTLISRLLRMHKFKEQICSSWFAPVGSASDYPLLSKWAIYGELSSNGSGSSNEISPVYSLWATFMGLYIANYVIERSTGWVLTHPLTISEYEKLKKQLKPDFEDMVPWYSGTSTDLFKTVFDLMISVTLFVGRFDMRMMQAAMNKTPDEANSHDLLYDHLDGKDELWFDFIADTGDGGNSTYAVARLLAQPLLVINSDDSRLTFPRGQLLLVGGDLAYPNPSSFSYERRFFCPFEYALQPPAWYKPEHIALEKPELPLGVSELRRYRGPQCFMIPGNHDWFDGLNTFIRYICHKSWVGGWFLPQKKSYFALKLPNGWWVFGLDQALHGDIDVYQFKFFAELCQQKVGESDSVIIITHEPNWLLDWYWGDSTGTNVAYLIREYLRGRCKLRMAGDLHHYMRHSCIESKEPVHVQHLLVNGCGGAFLHPTHVFENFRVFYGNKYETKSTYPSYHDSSKIALGNILKFRRKNWQFDVIGGFVYFVLVFSMFPQCDSFHILHEDSWAGRINGFFTAMWNAVFEILERSYVSLGGVVTLLMCY

SEQ ID NO: 167523 - protein, 586 aa, Zea Mays
MGKEKLHKQPSGRLIESLKMERMRNILTHRYPYPHEHSRHFIIAVFACWLFFISSDNLQNLIMKLDKNFKWWSMYACLIGFFYFFSSPFIRKTIKPNYSNFNRWYIAWIFLAALYHLPSFQSMGLDLRMNLSLFLTIYISSLIFLMVFHIIFLGLWYLGFVSRMAEKKPEMLTIIQNCAVISIACCVFYSHCGNRTVSRDKSIDRRTASWIVFSLWTKHDDNTLISRLLRMHKFKEQICSSWFAPVGSASDYPLLSKWAIYGELSSNGSGSSNEISPVYSLWATFMGLYIANYVIERSTGWVLTHPLTISEYEKLKKQLKPDFEDMVPWYSGTSTDLFKTVFDLMISVTLFVGRFDMRMMQAAMNKTPDEANSHDLLYDHLDGKDELWFDFIADTGDGGNSTYAVARLLAQPLLVINSDDSRLTFPRGQLLLVGGDLAYPNPSSFSYERRFFCPFEYALQPPAWYKPEHIALEKPELPLGVSELRRYRGPQCFMIPGNHDWFDGLNTFIRYICHKSWVGGWFLPQKKSYFALKLPNGWWVFGLDQALHGDIDVYQFKFFAELCQQKGKMQTADGWGPAPLYATFLH

SEQ ID NO: 167524 - protein, 251 aa, Zea Mays
MLLMELAIEICIRNHLLATSGYHTLYEWYRKVESEHFPDPTGLRARLEHWTFGLYPACIKYLMSAFDIPEVMAVTRSTICKKGIESLPRGGAIIYYVCVFLYFWVLSTPVVSLVFGSYLYLCINWFHIHFDEAFSSLRIANYKAFTRLHIKKNGDLEVFTLAVDKVPKDWMLDPDWDMEPKQPFQMSYTRKFPSKWRAASGLDPINAVRIVDRFVIPRTPSSPTTPGGSVSSPTTPGGSVSSPTTPGGFMR

SEQ ID NO: 167525 - protein, 189 aa, Zea Mays
MSAFDIPEVMAVTRSTICKKGIESLPRGGAIIYYVCVFLYFWVLSTPVVSLVFGSYLYLCINWFHIHFDEAFSSLRIANYKAFTRLHIKKNGDLEVFTLAVDKVPKDWMLDPDWDMEPKQPFQMSYTRKFPSKWRAASGLDPINAVRIVDRFVIPRTPSSPTTPGGSVSSPTTPGGSVSSPTTPGGFMR

SEQ ID NO: 167526 - protein, 96 aa, Zea Mays
MILLDVWNLVQGFQLQPGVPDQHRWTHSASSQYSSRSAYGRFFSGNVLFEPAQRIWKTWAPPRCKSFIWLASLNRCWTADRLARRAVFTSRPTNRD

SEQ ID NO: 167527 - protein, 91 aa, Zea Mays
MNVAKGSKQKCSNHPNRALTIAFDRKKMKKLYLEDHGRHRSYLISYSIQDTNNARKAATNSDSNHTSQSNTEDHKENIKCQKNNCQPVKRR

SEQ ID NO: 167528 - protein, 112 aa, Zea Mays
MVNEQISSPSLSLSLCLSLSPCSQSCMEIARSTLGWVGFCSLPPIARLLLTYDYEQIVVRSARRFQLRVRFPWAGLGLDLCAFQLNLHFLISKKKMTEWYALIFVYTRIDLC

SEQ ID NO: 167529 - protein, 360 aa, Zea Mays
MAGEKAPRAFPIEELPGHLIGEVLTSGGLAAADLARLEATCRALRPLAEYAASKLCAARAAFAAMGPAARGGLLERCGGSWKKVLRFLQSVEQSSGTVETTSGSMQVATGRYHTLLVHDSSVYSCGSSLCGVLGHGPDTTQCAAFSRVSFPSLSCVINISASHNHAAFVLESGEVFTCGDNSSLCCGHGEVGRTIFRPMQVEALKGIPCKQVATGLSFTVILTRDGQVYTCGSNTHGQLGHGDTIDRATPKLIELFEGSTPVVQIAAGASYTFAVTDDGTVHSFGSCTNFCLGHGDQHDELLPRAIQSFKWRNIHVVRVSAGDEHAVALDALGYVWCSGERYLTESPVVGFSKQSLHICG

SEQ ID NO: 167530 - protein, 220 aa, Zea Mays
MAGEKAPRAFPIEELPGHLIGEVLTSGGLAAADLARLEATCRALRPLAEYAASKLCAARAAFAAMGPAARGGLLERCGGSWKKVLRFLQSVEQSSGTVETTSGSMQVATGRYHTLLVHDSSVYSCGSSLCGVLGHGPDTTQCAAFSRVSFPSLSCVINISASHNHAAFVLESGEVFTCGDNSSLCCGHGEVGRTIFRPMQVEALKGIPCKQGWTSIYLWK

SEQ ID NO: 167531 - protein, 340 aa, Zea Mays
MAGEKAPRAFPIEELPGHLIGEVLTSGGLAAADLARLEATCRALRPLAEYAASKLCAARAAFAAMGPAARGGLLERCGGSWKKVLRFLQSVEQSSGTVETTSGSMQVATGRYHTLLVHDSSVYSCGSSLCGVLGHGPDTTQCAAFSRVSFPSLSCVINISASHNHAAFVLESGEVFTCGDNSSLCCGHGEVGRTIFRPMQVEALKGIPCKQVATGLSFTVILTRDGQVYTCGSNTHGQLGHGDTIDRATPKLIELFEGSTPVVQIAAGASYTFAVTDDGTVHSFGSCTNFCLGHGDQHDELLPRAIQSFKWRNIHVVRVSAGDEHAVALDALGYWREVSH

SEQ ID NO: 167532 - protein, 447 aa, Zea Mays
MAGEKAPRAFPIEELPGHLIGEVLTSGGLAAADLARLEATCRALRPLAEYAASKLCAARAAFAAMGPAARGGLLERCGGSWKKVLRFLQSVEQSSGTVETTSGSMQVATGRYHTLLVHDSSVYSCGSSLCGVLGHGPDTTQCAAFSRVSFPSLSCVINISASHNHAAFVLESGEVFTCGDNSSLCCGHGEVGRTIFRPMQVEALKGIPCKQVATGLSFTVILTRDGQVYTCGSNTHGQLGHGDTIDRATPKLIELFEGSTPVVQIAAGASYTFAVTDDGTVHSFGSCTNFCLGHGDQHDELLPRAIQSFKWRNIHVVRVSAGDEHAVALDALGYVCARKRKTFVLTDKGSVVAFGWMGFGSLGFPDRGPLDKVMRPRALESLQDHYVSQISTGLYHTVAVTSKGIVFGFGDNERAQLGQEYIRGCLKPTEIMFQKSMEDIPIAAPSG

SEQ ID NO: 167533 - protein, 285 aa, Zea Mays
MQVEALKGIPCKQVATGLSFTVILTRDGQVYTCGSNTHGQLGHGDTIDRATPKLIELFEGSTPVVQIAAGASYTFAVTDDGTVHSFGSCTNFCLGHGDQHDELLPRAIQSFKWRNIHVVRVSAGDEHAVALDALGYVYTWGKGYCGALGHGDENDKTSPELISSLKGQVAVQVCARKRKTFVLTDKGSVVAFGWMGFGSLGFPDRGPLDKVMRPRALESLQDHYVSQISTGLYHTVAVTSKGIVFGFGDNERAQLGQEYIRGCLKPTEIMFQKSMEDIPIAAPSG

SEQ ID NO: 167534 - protein, 155 aa, Zea Mays
MAGEKAPRAFPIEELPGHLIGEVLTSGGLAAADLARLEATCRALRPLAEYAASKLCAARAAFAAMGPAARGGLLERCGGSWKKVLRFLQSVEQSSGTVETTSGSLVWCARSWPRYYTVCGIQSGFLPITFLCYKHLCFTQPCCFCFGIWGGFHLW

SEQ ID NO: 167535 - protein, 348 aa, Zea Mays
MAGEKAPRAFPIEELPGHLIGEVLTSGGLAAADLARLEATCRALRPLAEYAASKLCAARAAFAAMGPAARGGLLERCGGSWKKVLRFLQSVEQSSGTVETTSGSMQVATGRYHTLLVHDSSVYSCGSSLCGVLGHGPDTTQCAAFSRVSFPSLSCVINISASHNHAAFVLESGEVFTCGDNSSLCCGHGEVGRTIFRPMQVEALKGIPCKQVATGLSFTVILTRDGQVYTCGSNTHGQLGHGDTIDRATPKLIELFEGSTPVVQIAAGASYTFAVTDDGTVHSFGSCTNFCLGHGDQHDELLPRAIQSFKWRNIHVVRVSAGDEHAVALDALGCLYMGQRILWSLRPW

SEQ ID NO: 167536 - protein, 610 aa, Zea Mays
MASSPPRAPQLFPFDLNVAQEEVDEEPIEVLEEDVDEEGAPLAQPQEVVVEEVVEKLVEHAVPITEDEPAEDVIMEEPSEEVIMEDEEPTPSPAEEVVGEGKRRKKRVDYEVFVSGLPQDAAEEDVAQALADAGDIEEVRLVRDPADQRLNKGFAFVRFAAAWQARWAANDLREATIKGKACGICKNSETETLHLRNICFDWSKDDLAEKLKPFKLENLDRINLIEHPDRKGKNRGYAFLDFRTHVDAVEAFVKLQKIDLYLGTDSRANISFSNTLSQDDEIMEKVKSVFLDGVPPHWDEDKVREIFGKFGEIDSIQLARNMFTAARKDFGFIGFTARQSALDCIKMVNKDGVGEGSGKVPIKASLQRPRHAFKKYSRQGSSSLLGVRRGFVDKSSSGRGHHSDRYRHFSPVRRSYSDNHSRRHSIDVEERHTSVRGYRAYYRRDSPVHAPSYKYGRTHLETRISEEYTEGRYTSKYPKHRHTMHGTMERDANRRIKYGHSYQERAHRTCPGCKLCGQNYNYPNGEEFSAISGCQEAYYQTDHDLIPSTSQVASHCEGSCCKLLTIETCILQNQESTPSSSDHARTRSNLPAPPHHWHVKHSNEHRRYVS

SEQ ID NO: 167537 - protein, 636 aa, Zea Mays
MASSPPRAPQLFPFDLNVAQEEVDEEPIEVLEEDVDEEGAPLAQPQEVVVEEVVEKLVEHAVPITEDEPAEDVIMEEPSEEVIMEDEEPTPSPAEEVVGEGKRRKKRVDYEVFVSGLPQDAAEEDVAQALADAGDIEEVRLVRDPADQRLNKGFAFVRFAAAWQARWAANDLREATIKGKACGICKNSETETLHLRNICFDWSKDDLAEKLKPFKLENLDRINLIEHPDRKGKNRGYAFLDFRTHVDAVEAFVKLQKIDLYLGTDSRANISFSNTLSQDDEIMEKVKSVFLDGVPPHWDEDKVREIFGKFGEIDSIQLARNMFTAARKDFGFIGFTARQSALDCIKMVNKDGVGEGSGKVPIKASLQRPRHAFKKYSRQGSSSLLGVRRGFVDKSSSGRGHHSDRYRHFSPVRRSYSDNHSRRHSIDVEERHTSVRGYRAYYRRDSPVHAPSYKYGRTHLETRISEEYTEGRYTSKYPKHRHTMHGTMERDANRRIKYGHSYQERAHRTCPGCKLCGQNYNYPNGEEFSAISGCQEAYYQTDHDLIPSTSQVASHCEGSCCKLLTIETCILQNQESTPSSSDHARTRSNLPAPPHHWHVKHSNEHRRSGKAEAGIYLPKMLQVLTPGSTIGQQDKL

SEQ ID NO: 167538 - protein, 610 aa, Zea Mays
MASSPPRAPQLFPFDLNVAQEEVDEEPIEVLEEDVDEEGAPLAQPQEVVVEEVVEKLVEHAVPITEDEPAEDVIMEEPSEEVIMEDEEPTPSPAEEVVGEGKRRKKRVDYEVFVSGLPQDAAEEDVAQALADAGDIEEVRLVRDPADQRLNKGFAFVRFAAAWQARWAANDLREATIKGKACGICKNSETETLHLRNICFDWSKDDLAEKLKPFKLENLDRINLIEHPDRKGKNRGYAFLDFRTHVDAVEAFVKLQKIDLYLGTDSRANISFSNTLSQDDEIMEKVKSVFLDGVPPHWDEDKVREIFGKFGEIDSIQLARNMFTAARKDFGFIGFTARQSALDCIKMVNKDGVGEGSGKVPIKASLQRPRHAFKKYSRQGSSSLLGVRRGFVDKSSSGRGHHSDRYRHFSPVRRSYSDNHSRRHSIDVEERHTSVRGYRAYYRRDSPVHAPSYKYGRTHLETRISEEYTEGRYTSKYPKHRHTMHGTMERDANRRIKYGHSYQERAHRTCPGCKLCGQNYNYPNGEEFSAISGCQEAYYQTDHDLIPSTSQVASHCEGSCCKLLTIETCILQNQESTPSSSDHARTRSNLPAPPHHWHVKHSNEHRRACY

SEQ ID NO: 167539 - protein, 644 aa, Zea Mays
MASSPPRAPQLFPFDLNVAQEEVDEEPIEVLEEDVDEEGAPLAQPQEVVVEEVVEKLVEHAVPITEDEPAEDVIMEEPSEEVIMEDEEPTPSPAEEVVGEGKRRKKRVDYEVFVSGLPQDAAEEDVAQALADAGDIEEVRLVRDPADQRLNKGFAFVRFAAAWQARWAANDLREATIKGKACGICKNSETETLHLRNICFDWSKDDLAEKLKPFKLENLDRINLIEHPDRKGKNRGYAFLDFRTHVDAVEAFVKLQKIDLYLGTDSRANISFSNTLSQDDEIMEKVKSVFLDGVPPHWDEDKVREIFGKFGEIDSIQLARNMFTAARKDFGFIGFTARQSALDCIKMVNKDGVGEGSGKVPIKASLQRPRHAFKKYSRQGSSSLLGVRRGFVDKSSSGRGHHSDRYRHFSPVRRSYSDNHSRRHSIDVEERHTSVRGYRAYYRRDSPVHAPSYKYGRTHLETRISEEYTEGRYTSKYPKHRHTMHGTMERDANRRIKYGHSYQERAHRTCPGCKLCGQNYNYPNGEEFSAISGCQEAYYQTDHDLIPSTSQVASHCEGSCCKLLTIETCILQNQESTPSSSDHARTRSNLPAPPHHWHVKHSNEHRRHVTDAHSAFEVRESRSWYLSSKDAPSTHSRKHHRPAR

SEQ ID NO: 167540 - protein, 622 aa, Zea Mays
MASSPPRAPQLFPFDLNVAQEEVDEEPIEVLEEDVDEEGAPLAQPQEVVVEEVVEKLVEHAVPITEDEPAEDVIMEEPSEEVIMEDEEPTPSPAEEVVGEGKRRKKRVDYEVFVSGLPQDAAEEDVAQALADAGDIEEVRLVRDPADQRLNKGFAFVRFAAAWQARWAANDLREATIKGKACGICKNSETETLHLRNICFDWSKDDLAEKLKPFKLENLDRINLIEHPDRKGKNRGYAFLDFRTHVDAVEAFVKLQKIDLYLGTDSRANISFSNTLSQDDEIMEKVKSVFLDGVPPHWDEDKVREIFGKFGEIDSIQLARNMFTAARKDFGFIGFTARQSALDCIKMVNKDGVGEGSGKVPIKASLQRPRHAFKKYSRQGSSSLLGVRRGFVDKSSSGRGHHSDRYRHFSPVRRSYSDNHSRRHSIDVEERHTSVRGYRAYYRRDSPVHAPSYKYGRTHLETRISEEYTEGRYTSKYPKHRHTMHGTMERDANRRIKYGHSYQERAHRTCPGCKLCGQNYNYPNGEEFSAISGCQEAYYQTDHDLIPSTSQVASHCEGSCCKNQESTPSSSDHARTRSNLPAPPHHWHVKHSNEHRRESRSWYLSSKDAPSTHSRKHHRPAR

SEQ ID NO: 167541 - protein, 644 aa, Zea Mays
MASSPPRAPQLFPFDLNVAQEEVDEEPIEVLEEDVDEEGAPLAQPQEVVVEEVVEKLVEHAVPITEDEPAEDVIMEEPSEEVIMEDEEPTPSPAEEVVGEGKRRKKRVDYEVFVSGLPQDAAEEDVAQALADAGDIEEVRLVRDPADQRLNKGFAFVRFAAAWQARWAANDLREATIKGKACGICKNSETETLHLRNICFDWSKDDLAEKLKPFKLENLDRINLIEHPDRKGKNRGYAFLDFRTHVDAVEAFVKLQKIDLYLGTDSRANISFSNTLSQDDEIMEKVKSVFLDGVPPHWDEDKVREIFGKFGEIDSIQLARNMFTAARKDFGFIGFTARQSALDCIKMVNKDGVGEGSGKVPIKASLQRPRHAFKKYSRQGSSSLLGVRRGFVDKSSSGRGHHSDRYRHFSPVRRSYSDNHSRRHSIDVEERHTSVRGYRAYYRRDSPVHAPSYKYGRTHLETRISEEYTEGRYTSKYPKHRHTMHGTMERDANRRIKYGHSYQERAHRTCPGCKLCGQNYNYPNGEEFSAISGCQEAYYQTDHDLIPSTSQVASHCEGSCCKGQQLKPKSYSVMRDYDYINQESTPSSSDHARTRSNLPAPPHHWHVKHSNEHRRSGKAEAGIYLPKMLQVLTPGSTIGQQDKL

SEQ ID NO: 167542 - protein, 652 aa, Zea Mays
MASSPPRAPQLFPFDLNVAQEEVDEEPIEVLEEDVDEEGAPLAQPQEVVVEEVVEKLVEHAVPITEDEPAEDVIMEEPSEEVIMEDEEPTPSPAEEVVGEGKRRKKRVDYEVFVSGLPQDAAEEDVAQALADAGDIEEVRLVRDPADQRLNKGFAFVRFAAAWQARWAANDLREATIKGKACGICKNSETETLHLRNICFDWSKDDLAEKLKPFKLENLDRINLIEHPDRKGKNRGYAFLDFRTHVDAVEAFVKLQKIDLYLGTDSRANISFSNTLSQDDEIMEKVKSVFLDGVPPHWDEDKVREIFGKFGEIDSIQLARNMFTAARKDFGFIGFTARQSALDCIKMVNKDGVGEGSGKVPIKASLQRPRHAFKKYSRQGSSSLLGVRRGFVDKSSSGRGHHSDRYRHFSPVRRSYSDNHSRRHSIDVEERHTSVRGYRAYYRRDSPVHAPSYKYGRTHLETRISEEYTEGRYTSKYPKHRHTMHGTMERDANRRIKYGHSYQERAHRTCPGCKLCGQNYNYPNGEEFSAISGCQEAYYQTDHDLIPSTSQVASHCEGSCCKGQQLKPKSYSVMRDYDYISQHLVQVTMPEQDLIFQRRLIIGMLNILMSIGGMLLMHILLLRSGKAEAGIYLPKMLQVLTPGSTIGQQDKL

SEQ ID NO: 167543 - protein, 471 aa, Zea Mays
MGLAQTKIKGKACGICKNSETETLHLRNICFDWSKDDLAEKLKPFKLENLDRINLIEHPDRKGKNRGYAFLDFRTHVDAVEAFVKLQKIDLYLGTDSRANISFSNTLSQDDEIMEKVKSVFLDGVPPHWDEDKVREIFGKFGEIDSIQLARNMFTAARKDFGFIGFTARQSALDCIKMVNKDGVGEGSGKVPIKASLQRPRHAFKKYSRQGSSSLLGVRRGFVDKSSSGRGHHSDRYRHFSPVRRSYSDNHSRRHSIDVEERHTSVRGYRAYYRRDSPVHAPSYKYGRTHLETRISEEYTEGRYTSKYPKHRHTMHGTMERDANRRIKYGHSYQERAHRTCPGCKLCGQNYNYPNGEEFSAISGCQEAYYQTDHDLIPSTSQVASHCEGSCCKGQQLKPKSYSVMRDYDYINQESTPSSSDHARTRSNLPAPPHHWHVKHSNEHRRESRSWYLSSKDAPSTHSRKHHRPAR

SEQ ID NO: 167544 - protein, 150 aa, Zea Mays
MMLMTFPNATKYLKKCSMVVWKRWGAIASATTSSSLAPSPLGRSRGSRASASVCYLPGCSSPASRRPTERSLSTSSQSGSRSPPLGSNPALGASSDWRRGWRLRIQATITDHNIKCMRQGKEANRCRFSSFLLDPFLAILDLHSPGLQVL

SEQ ID NO: 167545 - protein, 164 aa, Zea Mays
MMLMTFPNATKYLKKVGGYRVGYDIKLSGTESPRSVTGLEGVRVRVLFAWVLITGVEATDGEVTVHIEPIRKSFPAIGFKSSPRCIIGLATGVETKDPSHYHGPQHQVYEAGQRGQQVQVFLIFIRSFLSDLGSPLSRTPGFAVFLTITRIKKGSQVLLVKYHN

SEQ ID NO: 167546 - protein, 143 aa, Zea Mays
MGKDDVVQSGAGGGEFAAKDYTDPPPAPLVDAAELGSWSLYRAVIAEFIATLLFLFWLPSPSASPCSWSTWPPSPSPAPASTRPGAWAPPSSTTRTSHGMTTGFSGWARSWALPSRPSTTSTSSGRAPSRLSAPSGATRDEQS

SEQ ID NO: 167547 - protein, 72 aa, Zea Mays
MVHLATIPVTGTGINPARSLGAAVVYNKDKPWDDHWIFWVGPLLGAAIAAFYHQYILRAGAIKALGSFRSNA

SEQ ID NO: 167548 - protein, 51 aa, Zea Mays
MDPPQQPEPVTYVCGDCGAENTVKLVDVVQCRECGHRILYKKRTRRKAVLC

SEQ ID NO: 167549 - protein, 575 aa, Zea Mays
MDPPQQPEPVTYVCGDCGAENTVKLVDVVQCRECGHRILYKKRTRRNVCGLLVVSSLGSVITHIRSTSVLPISYTPFTTNTPYAAASTVPRKNAQARPRGSIVLPFRFLSPTASMDHAPAPPFAVHLVTGGGSSSGIALLLRSLAAARVVALDAEWKPRRRGSPAAADPAALGDDTTPASETSPAPPKFPTVTLLQVACRFSDGGGGEGERSEVFVVDLLSVPLADLWAPLRELFERPETLKLGFRFKQDLVYLSSTFSAALGCDSGFDRVEPFLDVTNIYYYLKGHDRQKKLPKETKSLATICEELLGILLSKELQCSDWSCRPLSEGQIQYAASDAYYLLDIFDLFQKRITMEGKCSSTTELTSDRHCSSVVIECSSSGYGICSGSCLMSIVTKYSEKIILTESDAKPRTSRRKEKLKIPANAKRKDNVDCSSEWQGPPPWDPSIGGDGYPKFLCDVMIEGLAKHLRCVGIDAAIPSSKKPEPRDLLNQTYKEGRILLTRDAKLLKYQYLAGNQVYRVKSLLKHDQLAEVCAYFDLFHLKCDLYNSFHKLMLNLPWLKFILVILLTPYIWLPN

SEQ ID NO: 167550 - protein, 488 aa, Zea Mays
MDPPQQPEPVTYVCGDCGAENTVKLVDVVQCRECGHRILYKKRTRRNVCGLLVVSSLGSVITHIRSTSVLPISYTPFTTNTPYAAASTVPRKNAQARPRGSIVLPFRFLSPTASMDHAPAPPFAVHLVTGGGSSSGIALLLRSLAAARVVALDAEWKPRRRGSPAAADPAALGDDTTPASETSPAPPKFPTVTLLQVACRFSDGGGGEGERSEVFVVDLLSVPLADLWAPLRELFERPETLKLGFRFKQDLVYLSSTFSAALGCDSGFDRVEPFLDVTNIYYYLKGHDRQKKLPKETKSLATICEELLGILLSKELQCSDWSCRPLSEGQIQYAASDAYYLLDIFDLFQKRITMEGKCSSTTELTSDRHCSSVVIECSSSGYGICSGSCLMSIVTKYSEKIILTESDAKPRTSRRKEKLKIPANAKRKDNVDCSSEWQGPPPWDPSIGGDGYPKFLCDVMGSIKSNIQGRKNIINTGCQALEISIFSW

SEQ ID NO: 167551 - protein, 607 aa, Zea Mays
MDPPQQPEPVTYVCGDCGAENTVKLVDVVQCRECGHRILYKKRTRRNVCGLLVVSSLGSVITHIRSTSVLPISYTPFTTNTPYAAASTVPRKNAQARPRGSIVLPFRFLSPTASMDHAPAPPFAVHLVTGGGSSSGIALLLRSLAAARVVALDAEWKPRRRGSPAAADPAALGDDTTPASETSPAPPKFPTVTLLQVACRFSDGGGGEGERSEVFVVDLLSVPLADLWAPLRELFERPETLKLGFRFKQDLVYLSSTFSAALGCDSGFDRVEPFLDVTNIYYYLKGHDRQKKLPKETKSLATICEELLGILLSKELQCSDWSCRPLSEGQIQYAASDAYYLLDIFDLFQKRITMEDRHCSSVVIECSSSGYGICSGSCLMSIVTKYSEKIILTESDAKPRTSRRKEKLKIPANAKRKDNVDCSSEWQGPPPWDPSIGGDGYPKFLCDVMIEGLAKHLRCVGIDAAIPSSKKPEPRDLLNQTYKEGRILLTRDAKLLKYQYLAGNQVYRVKSLLKHDQLAEVINIFQLKISEDQLMSRCTKCNGSFIQKPLTLEEAVEASKGFQIIPTCLFNRNLEFWKCTDCNQLYWEGTQYHNAVQRFLSVCNISD

SEQ ID NO: 167552 - protein, 85 aa, Zea Mays
MRSNKQKQSAGGEKSWIGRKLFLYNVTVGLYAMDPWERYLFNSIVLVLLWFICYTTTKPMWQAFDNHLRSSMRLGARNCSTVAMS

SEQ ID NO: 167553 - protein, 545 aa, Zea Mays
MCGPANYDPNSATAIVVYKPGSNSIPPMQNETTAQEENSKKACSHFIELWKQKHETGQWIEVEPEAISTRSEFPPFNASGIVLMGDNMKQNLESGSINGEPNGEDGAKADQKSSQQMGSHAAYPPWAMHPASGAVLYPPYPMQGMPFYPGVNPYYPPYPPVDDPSSGGGNSHGHKSHRKGKRSGKKPSVVVIKNVNVTSKKCGSSESESQSSSEVESADSDNSHSKSRERKHKSSCSKEGRRTTFDPGDEYNKDETSNGHGVEQGNWSAFQNFLLRAEEKTRSSDADLFAGEKEPPSRRKQNVNTADPIILVERDGGNVCEQNKIGFDSANGRTRVIRVMSNDELVMSGEGRIYMDCEMKEIEAGGGRYRRGTGDDYMVYGQGCQIDRHCLLDPLAEAQYKNPVQQDNNRNGVTDESFMIPLRSSSQDNIGAESRTTMDIDVELPSSIHKASDKKAGHQLFYEPDELSTVKVEDAKPEDVLPVTDGVQKVEKEKLKNARDGSDKRTKDSLLRRLSAPRTPLNDAQKRAQNLRAYKADLQKLKKEQ

SEQ ID NO: 167554 - protein, 471 aa, Zea Mays
MCGPANYDPNSATAIVVYKPGSNSIPPMQNETTAQEENSKKACSHFIELWKQKHETGQWIEVEPEAISTRSEFPPFNASGIVLMGDNMKQNLESGSINGEPNGEDGAKADQKSSQQMGSHAAYPPWAMHPASGAVLYPPYPMQGMPFYPGVNPYYPPYPPVDDPSSGGGNSHGHKSHRKGKRSGKKPSVVVIKNVNVTSKKCGSSESESQSSSEVESADSDNSHSKSRERKHKSSCSKEGRRTTFDPGDEYNKDETSNGHGVEQGNWSAFQNFLLRAEEKTRSSDADLFAGEKEPPSRRKQNVNTADPIILVERDGGNVCEQNKIGFDSANGRTRVIRVMSNDELVMSGEGRIYMDCEMKEIEAGGGRYRRGTGDDYMVYGQGCQIDRHCLLDPLAEAQYKNPVQQDNNRNGVTDESFMIPLRSSSQDNIGAESRTTMDIDVELPSSIHKASDKKAGHQLFYEPDELVPER

SEQ ID NO: 167555 - protein, 650 aa, Zea Mays
MPNTIHPLIGGPANYDPNSATAIVVYKPGSNSIPPMQNETTAQEENSKKACSHFIELWKQKHETGQWIEVEPEAISTRSEFPPFNASGIVLMGDNMKQNLESGSINGEPNGEDGAKADQKSSQQMGSHAAYPPWAMHPASGAVLYPPYPMQGMPFYPGVNPYYPPYPPVDDPSSGGGNSHGHKSHRKGKRSGKKPSVVVIKNVNVTSKKCGSSESESQSSSEVESADSDNSHSKSRERKHKSSCSKEGRRTTFDPGDEYNKDETSNGHGVEQGNWSAFQNFLLRAEEKTRSSDADLFAGEKEPPSRRKQNVNTADPIILVERDGGNVCEQNKIGFDSANGRTRVIRVMSNDELVMSGEGRIYMDCEMKEIEAGGGRYRRGTGDDYMVYGQGCQIDRHCLLDPLAEAQYKNPVQQDNNRNGVTDESFMIPLRSSSQDNIGAESRTTMDIDVELPSSIHKASDKKAGHQLFYEPDELSTVKVEDAKPEDVLPVTDGVQKVEKEKLKNARDGSDKRTKDSLLRRLSAPRTPLNDAQKRAQNLRAYKADLQKLKKEQEEEQIKRLERLKLDRQKWIAARGNGKGPGNDAPRANGMNGLSKSVPTFTGMKRVENGTTESLSGRLKRLSEPKSIVGAEHSLNPKSAGAGRSRRSMA

SEQ ID NO: 167556 - protein, 303 aa, Zea Mays
MSNDELVMSGEGRIYMDCEMKEIEAGGGRYRRGTGDDYMVYGQGCQIDRHCLLDPLAEAQYKNPVQQDNNRNGVTDESFMIPLRSSSQDNIGAESRTTMDIDVELPSSIHKASDKKAGHQLFYEPDELSTVKVEDAKPEDVLPVTDGVQKVEKEKLKNARDGSDKRTKDSLLRRLSAPRTPLNDAQKRAQNLRAYKADLQKLKKEQEEEQIKRLERLKLDRQKWIAARGNGKGPGNDAPRANGMNGLSKSVPTFTGMKRVENGTTESLSGRLKRLSEPKSIVGAEHSLNPKSAGAGRSRRSMA

SEQ ID NO: 167557 - protein, 667 aa, Zea Mays
MLYRIVHAFEDCLNHIVSLGYQKEKQGGPANYDPNSATAIVVYKPGSNSIPPMQNETTAQEENSKKACSHFIELWKQKHETGQWIEVEPEAISTRSEFPPFNASGIVLMGDNMKQNLESGSINGEPNGEDGAKADQKSSQQMGSHAAYPPWAMHPASGAVLYPPYPMQGMPFYPGVNPYYPPYPPVDDPSSGGGNSHGHKSHRKGKRSGKKPSVVVIKNVNVTSKKCGSSESESQSSSEVESADSDNSHSKSRERKHKSSCSKEGRRTTFDPGDEYNKDETSNGHGVEQGNWSAFQNFLLRAEEKTRSSDADLFAGEKEPPSRRKQNVNTADPIILVERDGGNVCEQNKIGFDSANGRTRVIRVMSNDELVMSGEGRIYMDCEMKEIEAGGGRYRRGTGDDYMVYGQGCQIDRHCLLDPLAEAQYKNPVQQDNNRNGVTDESFMIPLRSSSQDNIGAESRTTMDIDVELPSSIHKASDKKAGHQLFYEPDELSTVKVEDAKPEDVLPVTDGVQKVEKEKLKNARDGSDKRTKDSLLRRLSAPRTPLNDAQKRAQNLRAYKADLQKLKKEQEEEQIKRLERLKLDRQKWIAARGNGKGPGNDAPRANGMNGLSKSVPTFTGMKRVENGTTESLSGRLKRLSEPKSIVGAEHSLNPKSAGAGRSRRSMA

SEQ ID NO: 167558 - protein, 514 aa, Zea Mays
MVSGNLLYRRKRSWRADEFVSRSTLQLLDFDDGSPPEHAWRRKLSSHANRLKEFNVTFREAIRMMKLGLRLWSYIREEASHGRKAPIDPFTREGNKPSASQGVPLGGMGSGSISRGFRGEFKHWQITPGSCEMSPVMANQFSIFVTRGGTKKYASVLSPGQLDGLKKSTDDGISSWDWKLKGDRSTYHALFPRAWTVYDGEPDPELKVSCRQISPFIPHDYQESSLPTSVFVYTLVNTGKERAKVSLLMTWANSIGGLSHHSGDHVNEPFVGKNGVSGVLLHHKTANNNPPVTFAIAACENQNVNVTVLPVFGLSGESSVTARGMWGTMVQDGSFDQDNLNTGPSMPSLLGDTVCAAVSASTWVEPHGRCAVVFALAWSSPQVKFKKGSTYYRRYTKFYGTSPRSAVNLVEDALMKYKHWEEEIDKWQTPVLQDERLPEWYKITLFNELYFLVAGGTVWIDSGSLVSDADNKSNPEESNLSHEIDDKENVGKFLYLEGIEYFMWCTYDSCFAGR

SEQ ID NO: 167559 - protein, 775 aa, Zea Mays
MSPVMANQFSIFVTRGGTKKYASVLSPGQLDGLKKSTDDGISSWDWKLKGDRSTYHALFPRAWTVYDGEPDPELKVSCRQISPFIPHDYQESSLPTSVFVYTLVNTGKERAKVSLLMTWANSIGGLSHHSGDHVNEPFVGKNGVSGVLLHHKTANNNPPVTFAIAACENQNVNVTVLPVFGLSGESSVTARGMWGTMVQDGSFDQDNLNTGPSMPSLLGDTVCAAVSASTWVEPHGRCAVVFALAWSSPQVKFKKGSTYYRRYTKFYGTSPRSAVNLVEDALMKYKHWEEEIDKWQTPVLQDERLPEWYKITLFNELYFLVAGGTVWIDSGSLVSDADNKSNPEESNLSHEIDDKENVGKFLYLEGIEYFMWCTYDVHFYASFALLDLFPKIELSIQRDFARAVLREDNRRVRFLADGTWGIRKVIGAVAHDLGAHDPWHELNAYNIHDTSRWKDLNPKFVLQIYRDFAATGDKSFGKDVWPAVCTAMEYMEQFDHDGDGMIENDGFPDQTYDAWTVQGVSAYCGCLWLAALQAAAALAGSLGHDDYAERCMTRFVKAKTVFEARLWNGSHFNYDSGTSYSSRSIQADQLAGQWYTASSGLPPLFDEDRIKCTLQKIFDYNVMRVKGGRMGAVNGMHPNGKVDETCMQSREIWTGVTYSLAATMLLHGMEHQAFTTAEGIYTAGWSEEGYGYWFQTPEAWTIDGHYRSLIYMRPLAIWAMQWALSPPRSILEAPKVNTMDRAHISPGTFQFLQDSVRKMTPKNGCFGNTVINLDC

SEQ ID NO: 167560 - protein, 800 aa, Zea Mays
MGSGSISRGFRGEFKHWQITPGSCEMSPVMANQFSIFVTRGGTKKYASVLSPGQLDGLKKSTDDGISSWDWKLKGDRSTYHALFPRAWTVYDGEPDPELKVSCRQISPFIPHDYQESSLPTSVFVYTLVNTGKERAKVSLLMTWANSIGGLSHHSGDHVNEPFVGKNGVSGVLLHHKTANNNPPVTFAIAACENQNVNVTVLPVFGLSGESSVTARGMWGTMVQDGSFDQDNLNTGPSMPSLLGDTVCAAVSASTWVEPHGRCAVVFALAWSSPQVKFKKGSTYYRRYTKFYGTSPRSAVNLVEDALMKYKHWEEEIDKWQTPVLQDERLPEWYKITLFNELYFLVAGGTVWIDSGSLVSDADNKSNPEESNLSHEIDDKENVGKFLYLEGIEYFMWCTYDVHFYASFALLDLFPKIELSIQRDFARAVLREDNRRVRFLADGTWGIRKVIGAVAHDLGAHDPWHELNAYNIHDTSRWKDLNPKFVLQIYRDFAATGDKSFGKDVWPAVCTAMEYMEQFDHDGDGMIENDGFPDQTYDAWTVQGVSAYCGCLWLAALQAAAALAGSLGHDDYAERCMTRFVKAKTVFEARLWNGSHFNYDSGTSYSSRSIQADQLAGQWYTASSGLPPLFDEDRIKCTLQKIFDYNVMRVKGGRMGAVNGMHPNGKVDETCMQSREIWTGVTYSLAATMLLHGMEHQAFTTAEGIYTAGWSEEGYGYWFQTPEAWTIDGHYRSLIYMRPLAIWAMQWALSPPRSILEAPKVNTMDRAHISPGTFQFLQDSVRKMTPKNGCFGNTVINLDC

SEQ ID NO: 167561 - protein, 685 aa, Zea Mays
MLCFLEHGLFMMLVNTGKERAKVSLLMTWANSIGGLSHHSGDHVNEPFVGKNGVSGVLLHHKTANNNPPVTFAIAACENQNVNVTVLPVFGLSGESSVTARGMWGTMVQDGSFDQDNLNTGPSMPSLLGDTVCAAVSASTWVEPHGRCAVVFALAWSSPQVKFKKGSTYYRRYTKFYGTSPRSAVNLVEDALMKYKHWEEEIDKWQTPVLQDERLPEWYKITLFNELYFLVAGGTVWIDSGSLVSDADNKSNPEESNLSHEIDDKENVGKFLYLEGIEYFMWCTYDVHFYASFALLDLFPKIELSIQRDFARAVLREDNRRVRFLADGTWGIRKVIGAVAHDLGAHDPWHELNAYNIHDTSRWKDLNPKFVLQIYRDFAATGDKSFGKDVWPAVCTAMEYMEQFDHDGDGMIENDGFPDQTYDAWTVQGVSAYCGCLWLAALQAAAALAGSLGHDDYAERCMTRFVKAKTVFEARLWNGSHFNYDSGTSYSSRSIQADQLAGQWYTASSGLPPLFDEDRIKCTLQKIFDYNVMRVKGGRMGAVNGMHPNGKVDETCMQSREIWTGVTYSLAATMLLHGMEHQAFTTAEGIYTAGWSEEGYGYWFQTPEAWTIDGHYRSLIYMRPLAIWAMQWALSPPRSILEAPKVNTMDRAHISPGTFQFLQDSVRKMTPKNGCFGNTVINLDC

SEQ ID NO: 167562 - protein, 820 aa, Zea Mays
MVSGNLLYRRKRSWRADEFVSRSTLQLLDFDDGSPPEHAWRRKLSSHANRLKEFNVTFREAIRMMKLGLRLWSYIREEASHGRKAPIDPFTREGNKPSASQGVPLGGMGSGSISRGFRGEFKHWQITPGSCEMSPVMANQFSIFVTRGGTKKYASVLSPGQLDGLKKSTDDGISSWDWKLKGDRSTYHALFPRAWTVYDGEPDPELKVSCRQISPFIPHDYQESSLPTSVFVYTLVNTGKERAKVSLLMTWANSIGGLSHHSGDHVNEPFVGKNGVSGVLLHHKTANNNPPVTFAIAACENQNVNVTVLPVFGLSGESSVTARGMWGTMVQDGSFDQDNLNTGPSMPSLLGDTVCAAVSASTWVEPHGRCAVVFALAWSSPQVKFKKGSTYYRRYTKFYGTSPRSAVNLVEDALMKYKHWEEEIDKWQTPVLQDERLPEWYKITLFNELYFLVAGGTVWIDSGSLVSDADNKSNPEESNLSHEIDDKENVGKFLYLEGIEYFMWCTYDIYRDFAATGDKSFGKDVWPAVCTAMEYMEQFDHDGDGMIENDGFPDQTYDAWTVQGVSAYCGCLWLAALQAAAALAGSLGHDDYAERCMTRFVKAKTVFEARLWNGSHFNYDSGTSYSSRSIQADQLAGQWYTASSGLPPLFDEDRIKCTLQKIFDYNVMRVKGGRMGAVNGMHPNGKVDETCMQSREIWTGVTYSLAATMLLHGMEHQAFTTAEGIYTAGWSEEGYGYWFQTPEAWTIDGHYRSLIYMRPLAIWAMQWALSPPRSILEAPKVNTMDRAHISPGTFQFLQDSVRKMTPKNGCFGNTVINLDC

SEQ ID NO: 167563 - protein, 455 aa, Zea Mays
MVSGNLLYRRKRSWRADEFVSRSTLQLLDFDDGSPPEHAWRRKLSSHANRLKEFNVTFREAIRMMKLGLRLWSYIREEASHGRKAPIDPFTREGNKPSASQGVPLGGMGSGSISRGFRGEFKHWQITPGSCEMSPVMANQFSIFVTRGGTKKYASVLSPGQLDGLKKSTDDGISSWDWKLKGDRSTYHALFPRAWTVYDGEPDPELKVSCRQISPFIPHDYQESSLPTSVFVYTLVNTGKERAKVSLLMTWANSIGGLSHHSGDHVNEPFVGKNGVSGVLLHHKTANNNPPVTFAIAACENQNVNVTVLPVFGLSGESSVTARGMWGTMVQDGSFDQDNLNTGPSMPSLLGDTVCAAVSASTWVEPHGRCAVVFALAWSSPQVKFKKGSTYYRRYTKFYGTSPRSAVNLVEDALMSMFPSINIGKKRLISGRPRFSKMRGFQNGTRLHSLMSCTS

SEQ ID NO: 167564 - protein, 659 aa, Zea Mays
MTWANSIGGLSHHSGDHVNEPFVGKNGVSGVLLHHKTANNNPPVTFAIAACENQNVNVTVLPVFGLSGESSVTARGMWGTMVQDGSFDQDNLNTGPSMPSLLGDTVCAAVSASTWVEPHGRCAVVFALAWSSPQVKFKKGSTYYRRYTKFYGTSPRSAVNLVEDALMKYKHWEEEIDKWQTPVLQDERLPEWYKITLFNELYFLVAGGTVWIDSGSLVSDADNKSNPEESNLSHEIDDKENVGKFLYLEGIEYFMWCTYDVHFYASFALLDLFPKIELSIQRDFARAVLREDNRRVRFLADGTWGIRKVIGAVAHDLGAHDPWHELNAYNIHDTSRWKDLNPKFVLQIYRDFAATGDKSFGKDVWPAVCTAMEYMEQFDHDGDGMIENDGFPDQTYDAWTVQGVSAYCGCLWLAALQAAAALAGSLGHDDYAERCMTRFVKAKTVFEARLWNGSHFNYDSGTSYSSRSIQADQLAGQWYTASSGLPPLFDEDRIKCTLQKIFDYNVMRVKGGRMGAVNGMHPNGKVDETCMQSREIWTGVTYSLAATMLLHGMEHQAFTTAEGIYTAGWSEEGYGYWFQTPEAWTIDGHYRSLIYMRPLAIWAMQWALSPPRSILEAPKVNTMDRAHISPGTFQFLQDSVRKMTPKNGCFGNTVINLDC

SEQ ID NO: 167565 - protein, 65 aa, Zea Mays
MNGQQYLSLEYHSFCVKRKLQEVTCTIRCSSCLILAPLSTGFSRQQDNNQGFARQQSMTATNGKN

SEQ ID NO: 167566 - protein, 130 aa, Zea Mays
MVAGGAVKGDDDVQLPCGRGEDDVVKTASLYTVSSKCRCPGHGEQGDPWASKVSSTEGKGQQNDSWSSKMTSRGAEDTRGGWDSKVKGSSCNDGVADATEELEHDTINSGILCNVDARTLTFIIRKTSYC

SEQ ID NO: 167567 - protein, 99 aa, Zea Mays
MNKTIVVYREIEYFYVKSFTREVSLHIQNSLSFKAIIDNPSGVSMGLIDSLLQSMPPVVGVSLVADATEELEHDTINSGILCNVDARTLTFIIRKTSYC

SEQ ID NO: 167568 - protein, 91 aa, Zea Mays
MQGSSGGGELRTHENNEMRLLASRAFLAAVPQGGGLGGRPSSRGVSRHVRTNSPPRDPACFAAAVLFVTVIYIYICDRTAMHGKKSLRACY

SEQ ID NO: 167569 - protein, 80 aa, Zea Mays
MDFSHSSIRFCALIMVWSLVRLQRPLSGEREGVPQGHEARLPSRCGRSPRGPVTERLPFYGPLSPSLSWLGMAWRLDFSR

SEQ ID NO: 167570 - protein, 95 aa, Zea Mays
MDFSHSSIRFCALIMVWSLRIWQSSQCHNCEILKSMIIYVSSGEREGVPQGHEARLPSRCGRSPRGPVTERLPFYGPLSPSLSWLGMAWRLDFSR

SEQ ID NO: 167571 - protein, 75 aa, Zea Mays
MKRACLAAVAVLREVRSLSVYHFMARYLPPCHGLVWRGAWILAADRNCRVRRVQLGSGDWGTLSICVSETWCIIN

SEQ ID NO: 167572 - protein, 92 aa, Zea Mays
MPLLHLRLAPTTASPSPEGSTLAPIKREHRRPPPQAPRLHSASLPPDISTLAIQWSCYSPQPRVRRLRLAPTQCLDPGPDVTKRKGWRRAPR

SEQ ID NO: 167573 - protein, 353 aa, Zea Mays
MRRWLCCNCHYDVEEDDHAKEQAKAQSNKTDSKQKSSKPPGSQPEPEFSPPTIDVPELSLDDLKLKTDDFGSSALIGEGSYGRVYHATLDDGRQAAVKKLDASENEPNDEFLKQVSLASKLKHENLVEMLGYCVDGNYRILAYEFATMGSLHDVLHGRKGVQGAQPGPVLDWMQRVKIAIEAAKGIEYLHEKVQPSIIHRDIRSSNVLLFEDFKAKIADFNLLNQAPDMAARLHSTRVLGTFGYHAPDFGVVLLELLTGRKPVDHTMPRGQQSLVTWATPRLSEDKVKQCVDPRLKGEYPPKGVAKLAAVAALCAQYEAEFRPNMSIVVKALSPLLQQRPAPTTEEPAPQPGS

SEQ ID NO: 167574 - protein, 321 aa, Zea Mays
MTSRKMTTPRNRPKLRAIRPTKSSKPPGSQPEPEFSPPTIDVPELSLDDLKLKTDDFGSSALIGEGSYGRVYHATLDDGRQAAVKKLDASENEPNDEFLKQVSLASKLKHENLVEMLGYCVDGNYRILAYEFATMGSLHDVLHGRKGVQGAQPGPVLDWMQRVKIAIEAAKDFNLLNQAPDMAARLHSTRVLGTFGYHAPEYAMTGQLTQKSDVYSFGVVLLELLTGRKPVDHTMPRGQQSLVTWATPRLSEDKVKQCVDPRLKGEYPPKGVAKLAAVAALCAQYEAEFRPNMSIVVKALSPLLQQRPAPTTEEPAPQPGS

SEQ ID NO: 167575 - protein, 187 aa, Zea Mays
MRRWLCCNCHYDVEEDDHAKEQAKAQSNKTDSKQKSSKPPGSQPEPEFSPPTIDVPELSLDDLKLKTDDFGSSALIGEGSYGRVYHATLDDGRQAAVKKLDASENEPNDEFLKQVSLASKLKHENLVEMLGYCVDGNYRILAYEFATMGSLHDVLHGRKGVQGAQPGPVLDWMQRVKIAIEAAKGML

SEQ ID NO: 167576 - protein, 331 aa, Zea Mays
MRRWLCCNCHYDVEEDDHAKEQAKAQSNKTDSKQKSSKPPGSQPEPEFSPPTIDVPELSLDDLKLKTDDFGSSALIGEGSYGRVYHATLDDGRQAAVKKLDASENEPNDEFLKQVSLASKLKHENLVEMLGYCVDGNYRILAYEFATMGSLHDVLHGVQGAQPGPVLDWMQRVKIAIEAAKDFNLLNQAPDMAARLHSTRVLGTFGYHAPEYAMTGQLTQKSDVYSFGVVLLELLTGRKPVDHTMPRGQQSLVTWATPRLSEDKVKQCVDPRLKGEYPPKGVAKLAAVAALCAQYEAEFRPNMSIVVKALSPLLQQRPAPTTEEPAPQPGS

SEQ ID NO: 167577 - protein, 990 aa, Zea Mays
MRRRTASMTWTTSSTGTAMTRGLWPTPCSTAVEVTLMARHNLSSSTPMFHSSPTGRWYCCCRIQVDDIPPEQHALVPSFMGGGGKRIHPLPYADPSLPVQPRSMDPSKDLAAYGYGSVAWKERVENWKQRQERMHQTRNDGGGDDGDDADLPLMDESRQPLSRKIPLPSSQINPYRMIIIIRLVVLGFFFHYRVMHPVNDAFALWLISVICEIWFAMSWILDQFPKWFPIERETYLDRLSLRFDKEGQPSQLAPIDFFVSTVDPLKEPPLVTANTVLSILSVDYPVDKVSCYVSDDGAAMLTFEALSETSEFAKKWAPFCKRYNIEPRAPEWYFQQKIDYLKDKVAANFVRERRAMKREYEEFKVRINALVAKAQKVPEEGWTMQDGTPWPGNNVRDHPGMIQVFLGQSGGLDCEGNELPRLVYVSREKRPGYNHHKKAGAMNALVRVSAVLSNAPYLLNLDCDHYINNSKAIKEAMCFMMDPLLGKKVCYVQFPQRFDGIDRHDRYANRNVVFFDINMKGLDGIQGPIYVGTGCVFRRQALYGYDAPKTKKPPSRTCNCWPKWCFCCCCCGNRKHKKKTTKPKTEKKKLLFFKKEENQSPAYALGEIDEAAPGAENEKAGIVNQQKLEKKFGQSSVFATSTLLENGGTLKSASPASLLKEAIHVISCGYEDKTDWGKEIGWIYGSVTEDILTGFKMHCHGWRSIYCIPKRPAFKGSAPLNLSDRLHQVLRWALGSIEIFFSNHCPLWYGYGGGLKFLERFSYINSIVYPWTSIPLLAYCTLPAICLLTGKFITPELNNVASLWFMSLFICIFATSILEMRWSGVGIDDWWRNEQFWVIGGVSSHLFAVFQGLLKVIAGVDTSFTVTSKGGDDDEFSELYTFKWTTLLIPPTTLLLLNFIGVVAGVSNAINNGYESWGPLFGKLFFAFWVIVHLYPFLKGLVGRQNRTPTIVIVWSILLASIFSLLWVRIDPFLAKDDGPLLEECGLDCN

SEQ ID NO: 167578 - protein, 238 aa, Zea Mays
MRGRTVVGAVGPDDVSRSVEFVPTASSPASPSPNQPSRGQGGHLAPLRSDLGWFLFLDDTPTRPDRRESTRRQRHPSRQKPRRPRNLGTVAPLSLSLKSCCWSPLPSLRPPTMDEAQVVESKDGTISVASAFAGYQEAVQDRDHKFLTKAVEEAYRGVDCGDGGPFGAVVVCNDEVVVSCHNMVLKHTDPTAHAEVTAIREACKKLGKIELSDCEIYASCEPCPMCFGAVHLSRIKML

SEQ ID NO: 167579 - protein, 51 aa, Zea Mays
MSRVRSSLSAFATKRRASVYPFPRPHCGSFRQWAYPHIYKARLLKNRKSCL

SEQ ID NO: 167580 - protein, 141 aa, Zea Mays
MVSPAPGCRDSGEDGGKAEWLIYAFVARGIAVLAEYTEFTGNFPAIAAQCLQRLPAGSSSASTGPDGRGGAPVRFSYACDGHTFNFLLHRGYAYCVVAKESVPKNVSVAFLERLKDDFMKRYGGGKADTALAKSLNKEYGN

SEQ ID NO: 167581 - protein, 249 aa, Zea Mays
MVSPAPGCRDSGEDGGKAEWLIYAFVARGIAVLAEYTEFTGNFPAIAAQCLQRLPAGSSSASTGPDGRGGAPVRFSYACDGHTFNFLLHRGYVAKESVPKNVSVAFLERLKDDFMKRYGGGKADTALAKSLNKEYGPVIKQHIQYVLDHSQELDKTLKVQAQVSEVKNIMLNNIEKTLDRGEKLSELQDKTSDLHSQAQEFKKQGVKIRRKTWLQNVKIKLVILGILLLLVIIVWVSVCQGFDCTKHET

SEQ ID NO: 167582 - protein, 177 aa, Zea Mays
MLVISQEPKLLCHVLPSYCVVAKESVPKNVSVAFLERLKDDFMKRYGGGKADTALAKSLNKEYGPVIKQHIQYVLDHSQELDKTLKVQAQVSEVKNIMLNNIEKTLDRGEKLSELQDKTSDLHSQAQEFKKQGVKIRRKTWLQNVKIKLVILGILLLLVIIVWVSVCQGFDCTKHET

SEQ ID NO: 167583 - protein, 788 aa, Zea Mays
MEASAGLVAGSHNRNELVVIRRESGAGGGGGGGAARRAEAPCQICGDEVGVGFDGEPFVACNECAFPVCRACYEYERREGSQACPQCRTRYKRLKGCPRVAGDEEEDGVDDLEGEFGLQDGAGHEDDPQYVAESMLRAQMSYGRGGDAHPDFNPVPNVPLLTNGQMVDDIPPEQHALVPSYMGSGGGGKRIHPLPFADSNLPVQPRSMDPSKDLAAYGYGSVAWKERMEGWKQKQERLQHVRSEGGGDWDGDNADLPLMDEARQPLSRKVPISSSRINPYRMIIVIRLVVLGFFFHYRVMHPAKDAFALWLISVICEIWFAMSWILDQFPKWLPIERETYLDRLSLRFDKEGQPSQLAPIDFFVSTVDPTKEPPLVTANTVLSILSVDYPVEKVSCYVSDDGAAMLTFEALSETSEFAKKWVPFSKKFNIEPRAPEWYFQQKIDYLKDKVAASFVRERRAMKREYEEFKVRINALVAKAQKVPEEGWTMQDGSLWPGNNVRDHPGMIQVFLGQSGGRDVEGNELPRLVYVSREKRPGYNHHKKAGAMNALVRVSAVLSNAPYLLNLDCDHYINNSKAIKEAMCFMMDPLVGKKVCYVQFPQRFDGIDRHDRYANRNVVFFDINMKGLDGIQGPIYVGTGCVFRRQALYGYDAPKTKKPPSRTCNCWPKWCLSCCCSRNKNKKKTTKPKTEKKKRLFFKKAENPSPAYALGEIEEGAPDIEKAGIVNQQKLEKKFGQSSVFVASTLLENGGTLKSASPASLLKEAIHVISCGYEDKTDWGKEVYIPYIT

SEQ ID NO: 167584 - protein, 495 aa, Zea Mays
MDAAQVPAAVVVDVGALTGPIGSEAPAAPKGPAWKRFLYHVGPGFMLLWVTLIGLIFALIIQSLSANLGVVTGRHLAELCKTEYPAWVRICLWLLAELAVIAADIPEVIGTAFAFNILFHVPLWVGVLITGSSTLLLLGLQKYGVRKLELLVGLLVFVMAACFFIEMSIVKPPAEEVIHGLFIPSLSGPGATGDTIALLGALVMPHNLFLHSALVLSRNTPSSVRGINDACRFFLLESGVAMFVALIINICIISVSGTVCNSSNVSPDDSAKCSDITLDSSSFLLRNVLGNSSAVVYGVALLACGISSSITGTYAGQYIMQGFLDIKMRQWLRNLMTRSIAIIPSLIVAIIGGSSGAGRLVIIASMILSFELPFALIPLLKFSSSSSTMGQHKNSIFIIGFSWILGFVIIGINIYFLSSKFVGWILHNSLQIYANILIGIVVFPLMLIYVCAVIYLTLRKETIKFVACGELQTIETDKSKLANGSNMEEKKDQLV

SEQ ID NO: 167585 - protein, 408 aa, Zea Mays
MDAAQVPAAVVVDVGALTGPIGSEAPAAPKFRGQHSAKLGRALRMFVEMPTAIAHSSRIPIAGYMNMYDAKGPAWKRFLYHVGPGFMVCLAYLDPGNLGTDLQAGADHRYELLWVTLIGLIFALIIQSLSANLGVVTGRHLAELCKTEYPAWVRICLWLLAELAVIAADIPEVIGTAFAFNILFHVPLWVGVLITGSSTLLLLGLQKYGVRKLELLVGLLVFVMAACFFIEMSIVKPPAEEVIHGLFIPSLSGPGATGDTIALLGALVMPHNLFLHSALVLSRNTPSSVRGINDACRFFLLESGVAMFVALIINICIISVSGTVCNSSNVSPDDSAKCSDITLDSSSFLLRNVLGNSSAVVYGVALLACGISSSITGTYAGQYIMQVALLGLLKMHRGSVFVLASNHR

SEQ ID NO: 167586 - protein, 132 aa, Zea Mays
MSLSVGGARTSLLPSSFTASSSRPRFLALPLHRRSHGSLTSLPAACRRRLRVRMARTESTGVTIGFRAPDFELPEPLTGKLWTLDDFEGNSALLVSEFFFQYFLRYYICAPIQHVFHTHAFGIRCRTHFLCN

SEQ ID NO: 167587 - protein, 219 aa, Zea Mays
MSLSVGGARTSLLPSSFTASSSRPRFLALPLHRRSHGSLTSLPAACRRRLRVRMARTESTGVTIGFRAPDFELPEPLTGKLWTLDDFEGNSALLVMFICNHCPFVKHLKKDISKLASFYVEMHCRKDLVLLPYRPTQLGRIPRMAQIAWLKKQSCSNILSHIFTMRSGRTVPWIQRFFSDHEDAFLGRVISYPFSALKFFLVTNFVYFFVTTATYSLKR

SEQ ID NO: 167588 - protein, 313 aa, Zea Mays
MAGAIVGRLGRHPTSLLLLTLPRHAAAHHRLHSPSSSQVARAGLPGQYSKMGDPSERNGHGALTRVLFCGPYWPASTNYTREYLQDYPFIQVDEVGLEQVPDVIHSYHICVVKNKRIDSDIIAKATQMKIIMQYGVGLEGVDVNAATEHKIKVARIPGSTTGNAVSCAEMAIYLTLGILRKQKEMDTAVNRKDLGVPVGDTLFGKTILILGFGAIGIEVAKRLRPFGVKILATKRNWSSDTLPSYVDELVDKKGGPEDMYEFAGEANIVIACMTLTSETIGIVDHKFVSSMKKVHACFCHTGLHVIRSVGSFR

SEQ ID NO: 167589 - protein, 289 aa, Zea Mays
MAGAIVGRLGRHPTSLLLLTLPRHAAAHHRLHSPSSSQGQYSKMGDPSERNGHGALTRVLFCGPYWPASTNYTREYLQDYPFIQVDEVGLEQVPDVIHSYHICVVKNKRIDSDIIAKATQMKIIMQYGVGLEGVDVNAATEHKIKVARIPGSTTGNAVSCAEMAIYLTLGILRKQKEMDTAVNRKDLGVPVGDTLFGKTILILGFGAIGIEVAKRLRPFGVKILATKRNWSSDTLPSYVDELVDKKGGPEDMYEFAGEANIVIACMTLTSETIGIVDHKFVSSMKKCCA

SEQ ID NO: 167590 - protein, 169 aa, Zea Mays
MKIIMQYGVGLEGVDVNAATEHKIKVARIPGSTTGNAVSCAEMAIYLTLGILRKQKEMDTAVNRKDLGVPVGDTLFGKTILILGFGAIGIEVAKRLRPFGVKILATKRNWSSDTLPSYVDELVDKKGGPEDMYEFAGEANIVIACMTLTSETIGIVDHKFVSSMKKCCA

SEQ ID NO: 167591 - protein, 373 aa, Zea Mays
MMKQIFGRRKASKTAGKECGGRTFNQLLSGSGFADLSGQLPILSSTGDIYGNGNRTGFQDSRINDTLFSSNFRLLPSFKDVPNTEKQNLLIKKLNMCCTLFDFEDAAKNIKEKEIKTLMLLEIDEYVRTANAKFPEIIVEAITKMISVNLFRTLISPPREKKVLQAFDLEEDEPLMDPAWPHLYHVYELLLTFVQSPENDAKLAKKYIDHSFILRLLELFDSEDARERDRLKTVLHRIYGKFMVYRPFIRKAINNIFYQFIYETEKHNGIAELLEIFGSIINGFALPLKEEHKLFLGRTLIPLHKPRCTSMYHRQLSYCITQFVEKDCKLADTVIRGLIKYWPITNSTKEVLFLGELEEVLDATQPAEFQKCC

SEQ ID NO: 167592 - protein, 480 aa, Zea Mays
MMKQIFGRRKASKTAGKECGGRTFNQLLSGSGFADLSGQLPILSSTGDIYGNGNRTGFQDSRINDTLFSSNFRLLPSFKDVPNTEKQNLLIKKLNMCCTLFDFEDAAKNIKEKEIKTLMLLEIDEYVRTANAKFPEIIVEAITKMISVNLFRTLISPPREKKVLQAFDLEEDEPLMDPAWPHLYHVYELLLTFVQSPENDAKLAKKYIDHSFILRLLELFDSEDARERDRLKTVLHRIYGKFMVYRPFIRKAINNIFYQFIYETEKHNGIAELLEIFGSIINGFALPLKEEHKLFLGRTLIPLHKPRGLIKYWPITNSTKEVLFLGELEEVLDATQPAEFQKCMVPLSHQIAHCLNSSHFQVAERVLFFWNNIHFENFVKQNSKVILPIILPALEKNINGHWNQVVQSLSLNVRKLLSDRDPQMFTECLRKYEEDKGREKEFKLKQELAWKRLDEIASAKVTSGEAVLVSPTLPRQPSFL

SEQ ID NO: 167593 - protein, 1016 aa, Zea Mays
MMTVPMDSASAAPSSTRDLAERLLTRNNELEDQLRKSAQSKVPSDPNIWLQMRDNFEKIILIDHDLSEQRDVEYLLWQLHYKRIEDFRRNISAASSLASQSGKSNTNPDRVKRIKSAFKSFLSEATGFYHDLMLKIKSNWGLPLNYFPDSLDNANNSVRDDMKTVQLKKAASSYYKEAASIYPSSGNPHHQLAILASYSGNEVVAVYRYFRSLAADTPFATARDNLIILFEKNRQSYGQLPDNSKVPSTKTLPPRPSGWGRGRGEVRFQPKDVNAETAERERECNNGDTLKTFYIRFVRLNGILFTRTSLETFGELFSSVSNDLQILLSSGLEEDLNFGSDAAENALAAVRLTVILIFTVHNVNKEPDRQSYAEIVQRRVLLQSAFTAAFDFVGRILRRCSELHDIASSFYLPAILVYIEWLASHPELAVDSEMEEKHANARSFFWSQCISFMNKLILTNLASVNDDDDEACFSNMSIYEEGETGNRFALWEDLELRGFLPLLPAHTILDFSSKHTFGSTKEKKARVQRIFAAGKSLLNFVQIDQLRIYFDSSSKKFVMAKNPPVSKTNTPLHESPDALKTSGTEMDYEAARRFDSVSSNMGTLQSKVQFCPDGDDDEEIVFKPTASEKFPKAPSDLLVNGYTHPVPMSTAGWPTNASLVPVQSTGSMTATGWPPNGGSNAFPSTASLSAAGNYNINQSLPRSSVGWAVNGEQSVIPSIAPRFELVQPVEEPVSSWTSSGAQHVGTQHKHTGLTFPDVVSEPLVSASMVQRFSSTDYSKFLSEQEMLLVNGLNTVNLTGNGYLKQRLQPGLSGLQSMGYSSQTPIEPGGTTANSMHNHLKITGENVPSTLDSVVPSIAPLGGMPMKFTEAPLTASKKNPVSRPSKPVGPPPGFDHVAPKRQDDSIPVEKLQIPQVDDYSWLDGYQQSIDHVHNLRTVYSGVSDSTAFATPFPFPGKQQLSGMHAQGATNEKTWQDFRLFEPSKQNMLQNYHQRNQQNGQIAEQEPANSVWSSSYHV

SEQ ID NO: 167594 - protein, 842 aa, Zea Mays
MVMVILLVVNTQRLLVTTRRQLLSILPVATLIIRYFRSLAADTPFATARDNLIILFEKNRQSYGQLPDNSKVPSTKTLPPRPSGWGRGRGEVRFQPKDVNAETAERERECNNGDTLKTFYIRFVRLNGILFTRTSLETFGELFSSVSNDLQILLSSGLEEDLNFGSDAAENALAAVRLTVILIFTVHNVNKEPDRQSYAEIVQRRVLLQSAFTAAFDFVGRILRRCSELHDIASSFYLPAILVYIEWLASHPELAVDSEMEEKHANARSFFWSQCISFMNKLILTNLASVNDDDDEACFSNMSIYEEGETGNRFALWEDLELRGFLPLLPAHTILDFSSKHTFGSTKEKKARVQRIFAAGKSLLNFVQIDQLRIYFDSSSKKFVMAKNPPVSKTNTPLHESPDALKTSGTEMDYEAARRFDSVSSNMGTLQSKVQFCPDGDDDEEIVFKPTASEKFPKAPSDLLVNGYTHPVPMSTAGWPTNASLVPVQSTGSMTATGWPPNGGSNAFPSTASLSAAGNYNINQSLPRSSVGWAVNGEQSVIPSIAPRFELVQPVEEPVSSWTSSGAQHVGTQHKHTGLTFPDVVSEPLVSASMVQRFSSTDYSKFLSEQEMLLVNGLNTVNLTGNGYLKQRLQPGLSGLQSMGYSSQTPIEPGGTTANSMHNHLKITGENVPSTLDSVVPSIAPLGGMPMKFTEAPLTASKKNPVSRPSKPVGPPPGFDHVAPKRQDDSIPVEKLQIPQVDDYSWLDGYQQSIDHVHNLRTVYSGVSDSTAFATPFPFPGKQQLSGMHAQGATNEKTWQDFRLFEPSKQNMLQNYHQRNQQNGQIAEQEPANSVWSSSYHV

SEQ ID NO: 167595 - protein, 154 aa, Zea Mays
MDTVAPRLSRSSTRYGPISSSAASFSGPVRKWRKAWVPLTGTGTGTAGSGGGSSRGDNKVVLFRWTPVNGCSGGGGGTDGGMELAAAGASTCRRRYAAGEAQSTTKKGTSSELNLNLELEDPDDDTDADMSTDEPRDVEDNSARLESRLKRKAF

SEQ ID NO: 167596 - protein, 194 aa, Zea Mays
MSRGGSHGELGQRIDYVFKVVLIGDSAVGKSQLLARFARNQFNLDSKATIGVEFQTRTLNIDARNVKAQIWDTAGQERWLEELRGHADKNIVIMLMGNKSDLGTLRAVPIEDAKEFAERENLFFMETSALEAINVENAFMTVLTEIYRTVSKKNLVANEEPDSSGNSSLLKGTKIVVPGQEPPSTLKATCCMSS

SEQ ID NO: 167597 - protein, 1047 aa, Zea Mays
MKFLDGLKDDIKSVVMIQRPKDLDTAFVLAQLQEEVGDTTKKKELRKWDLSSPFRPYSKGPMPLPLPPNKLSSSPAAVNDKLGLVPAKQHSTTDERLSNLYAYRKAQGLCYKCGLSYSRGHKCPDVVQLHLVEELWQQLDLGDSDDQQVADEAELHNLLLSQSAAGLKVSSKTMKFRGSIQGLELLILLDSGSSHTFLSASVAAQLMGCSPVDVPMPVQVANGHNLLCSSELRETVWFLNEYQFQSTLKILPLTTYDMVVDMDWLELHSPMSVHWLDKWLTIPYRGSIIKLLGLQASSSQCAVMELCHIATLPDKDNQLVQDLPEALQHLIARFSHVFALLQGLPPARDCDHHIPLLPGVRPVQIRPYRYAPALKTEIEKQVAEMLQSGIIERSKSDFSSSVILVRKKDNTYRFCVDYRHLNAITAKTKFPVPIIDEFLDELHGAAWFSTLDLRAGFHQIRLAPEDQHKSAFQTHHGHFEFRVMAFGLSGAPATFQGAMNRTLGPLLRSCVLVFFDDILVYSPTWEDHLHHLEQVLQLLSTDQWQVKLSKCSFAKQQIHYLGHVISNRGVATDPSKVAAVTTWPQPTDCKQLRGFLGLAGYYRKFVRHFGVIAKTLTGLLKKNTPFVWTGEHEQSFQALKTALSTAPVLALPDFSKQFAIETDASGKGIGAVLTQEGHPLAFVSKALSTKTQGLSTYEKEYLAVLLAVNQWRPYLQHSEFIIFSDQRSLSHLSEQRLHTPWQQRVFTKLLGLQYRIVYKKGVDNGAADALSRRPQEGLEVFHVSAASPQWLSKVVQGYSQDNKAQSLLTELSLHPTTEGPYSLHQGLIRYKGRVWLGNNLSLQQQALSALHDSALGGHSGFPVTYRRVKQLFSWPGLKKTVKDYVTSCSICQQAKSDRAKYPGLLQPLPVPEHAWQVVSLDFIEGLPRSGNADCILAVVDTFSKYAHFIGLLHPFTALKVAQIFIAHVYKLHGLPKALVSDRERIFTSTLWQELFRLSDTQLQMSTAYHPQSDGQTERVNQCLETFLRSFVHSCPNKWSAWLPQAEF

SEQ ID NO: 167598 - protein, 87 aa, Zea Mays
MAGVADPSIATALEEQSKSLKAQAKSLDSTQKILQRICDRFDARMRATASWKHPWPARRRIWRHSAPGKATPCPTCGRIWSIKWRRG

SEQ ID NO: 167599 - protein, 90 aa, Zea Mays
MHIGLKFYAVSKGVANTAERRFRHVKLHSNPKNPYSGSITMLLAGFIHQNCTQFTRLHFHYKMLDYNQYFHFFGACVEVSPCKVYTKLSC

SEQ ID NO: 167600 - protein, 209 aa, Zea Mays
MKNPFITLGPEACLLTIPHAVLCSEMGTHVSPCGRFLVACVACVLPHSYGGHGSQLHEHYDSTGAGTSPTRQAFPSRQIIYELRVYSLEDATFGTVLATRAIKAAHCLTSIQFSPTSEHILLAYGRQHSSLLRTILINGETRVPVYTVLEVYRVSDMELVRVLPSVGEEVNVACFHPSPGSGLVYGTKQGKVRFLRHHGASFTCWGERS

SEQ ID NO: 167601 - protein, 224 aa, Zea Mays
MAECRIQDWKRASTPESVSRHETSIPRTKQRNIFSLLAQRELSPRTKNQAKNLWTKPPRLDACPIESKFWGTYAQHDLLSWAEAEFLHWWIPKYCPLTPSSKATIAAAFSTDGRVLASTHGDHTVKIIDWQTGKCLNVLLGHHRTPWVVRFHPQRSDILASGSLDCEVRLWDAKTSRCTAELVFCQLHQLHFMQLGSFWQLHQVTNCFYGTAINDGKLWNFQSY

SEQ ID NO: 167602 - protein, 188 aa, Zea Mays
MAECRIQDWKRASTPESVSRHETSIPRTKQRNIFSLLAQRELSPRTKNQAKNLWTKPPRLDACPIESKFWGTYAQHDLLSWAEAEFLHWWIPKYCPLTPSSKATIAAAFSTDGRVLASTHGDHTVKIIDWQTGKCLNVLLGHHRTPWVVRFHPQRSDILASGSLDCEVRLWDAKTSRCTAELVFCNYP

SEQ ID NO: 167603 - protein, 185 aa, Zea Mays
MKNPFITLGPEACLLTIPHAVLCSYGGHGSQLHEHYDSTGAGTSPTRQAFPSRQIIYELRVYSLEDATFGTVLATRAIKAAHCLTSIQFSPTSEHILLAYGRQHSSLLRTILINGETRVPVYTVLEVYRVSDMELVRVLPSVGEEVNVACFHPSPGSGLVYGTKQGKVRFLRHHGASFTCWGERS

SEQ ID NO: 167604 - protein, 223 aa, Zea Mays
MAECRIQDWKRASTPESVSRHETSIPRTKQRNIFSLLAQRELSPRTKNQAKNLWTKPPRLDACPIESKFWGTYAQHDLLSWAEAEFLHWWIPKYCPLTPSSKATIAAAFSTDGRVLASTHGDHTVKIIDWQTGKCLNVLLGHHRTPWVVRFHPQRSDILASGSLDCEVRLWDAKTSRCTAELIGQLHQLHFMQLGSFWQLHQVTNCFYGTAINDGKLWNFQSY

SEQ ID NO: 167605 - protein, 584 aa, Zea Mays
MAECRIQDWKRASTPESVSRHETSIPRTKQRNIFSLLAQRELSPRTKNQAKNLWTKPPRLDACPIESKFWGTYAQHDLLSWAEAEFLHWWIPKYCPLTPSSKATIAAAFSTDGRVLASTHGDHTVKIIDWQTGKCLNVLLGHHRTPWVRFHPQRSDILASGSLDCEVRLWDAKTSRCTAELVFYRPVASIAFHATGELLAVASGHKLFLWDCNKRWETLELPIILETRRSLRAVQFHPHGAPYLLTGEVHNLDSEDSTMTPALLSNYSFRDTPLLGGSGVDNLISELQYMQNFEQVGASSSVPVTTGSFDGSRLHDTSGHHLMTSLPSVGRPLLGTHAAEAPAISLSVGSEQTTSLLGGGTELPCTVKLRIWRHEMKNPFITLGPEACLLTIPHAVLCSEMGTHVSPCGRFLVACVACVLPHSYGGHGSQLHEHYDSTGAGTSPTRQAFPSRQIIYELRVYSLEDATFGTVLATRAIKAAHCLTSIQFSPTSEHILLAYGRQHSSLLRTILINGETRVPVYTVLEVYRVSDMELVRVLPSVGEEVNVACFHPSPGSGLVYGTKQGKVRFLRHHGASFTCWGERS

SEQ ID NO: 167606 - protein, 561 aa, Zea Mays
MAECRIQDWKRASTPESVSRHETSIPRTKQRNIFSLLAQRELSPRTKNQAKNLWTKPPRLDACPIESKFWGTYAQHDLLSWAEAEFLHWWIPKYCPLTPSSKATIAAAFSTDGRVLASTHGDHTVKIIDWQTGKCLNVLLGHHRTPWVVRFHPQRSDILASGSLDCEVRLWDAKTSRCTAELVFYRPVASIAFHATGELLAVASGHKLFLWDCNKRWETLELPIILETRRSLRAVQFHPHGAPYLLTGEVHNLDSEDSTMTPALLSNYSFRDTPLLGGSGVDNLISELQYMQNFEQVGASSSVPVTTGSFDGSRLHDTSGHHLMTSLPSVGRPLLGTHAAEAPAISLSVGSEQTTSLLGGGTELPCTVKLRIWRHEMKNPFITLGPEACLLTIPHAVLCSYGGHGSQLHEHYDSTGAGTSPTRQAFPSRQIIYELRVYSLEDATFGTVLATRAIKAAHCLTSIQFSPTSEHILLAYGRQHSSLLRTILINGETRVPVYTVLEVYRVSDMELVRVLPSVGEEVNVACFHPSPGSGLVYGTKQGKVRFLRHHGASFTCWGERS

SEQ ID NO: 167607 - protein, 281 aa, Zea Mays
MLGCGIGILSQKKPLIRLRRIIFPSSLFFHSTLSTPYQQVGQAFVFSKMLSNSYFSGLPISIIESWYQRDGYVKSMADLIEKELSAFSNPEEVMIFFSAHGVPLTYVQDAGDPYRDQMEDCISLIMGELRSRGILNGHTLAYQSRVGPVQWLKPYTDEVLVELGQNGVKSLLAVPVSFVSEHIETLEEIDMEYKELALESGIENWGRVPALGCTSTFISDLADAVVEALPSASALGTRKPEDTDSSMDLMHYLTKMFFGSILAFILLLSPRLVSAFRNTML

SEQ ID NO: 167608 - protein, 106 aa, Zea Mays
MTGAKQSRRCNLLTFFSTILATVLLLIFQRFSPTAAAVPQWRRGGTQEHIDVARGAEAVGHGQGRCEDSLRGGSSRWRRRRGFADGGRGTRVRLALQHAAVGNWEL

SEQ ID NO: 167609 - protein, 319 aa, Zea Mays
MTGAKQSRRCNLLTFFSTILATVLLLIFQRFSPTAAAVPQWRRGGTQEHIDVARGAEAVGHGQGRCEDSLRGGSSRWRRRRGFADGGRGTRVRLALQHAAVGNWYAGNSDPDKLREKAAELVKLSAEELLKRQMEIKELMEKFKAPSDAELIKIAIADLNNSSLEDRQRALQELLILVEPIDNANGLLPLIQELGNADEGIRTTSAWVLGKASQDNVLVQNQINGYGALDRLVKMGYSSSGPEAAKALYTISSLIRDNEHGQELFLSENGYAMLQHILSTTNTSVRLQKKVVSLLAYIADFQLNTGKSQAQSLLNHFFI

SEQ ID NO: 167610 - protein, 178 aa, Zea Mays
MLQWAIGNSDPDKLREKAAELVKLSAEELLKRQMEIKELMEKFKAPSDAELIKIAIADLNNSSLEDRQRALQELLILVEPIDNANDEGIRTTSAWVLGKASQDNVLVQNQINGYGALDRLVKMGYSSSGPEAAKHILSTTNTSVRLQKKVVSLLAYIADFQLNTGKSQAQSLLNHFFI

SEQ ID NO: 167611 - protein, 259 aa, Zea Mays
MTGAKQSRRCNLLTFFSTILATVLLLIFQRFSPTAAAVPQWRRGGTQEHIDVARGAEAVGHGQGRCEDSLRGGSSRWRRRRGFADGGRGTRVRLALQHAAVGNWYRLGTLRVLPHLLGNSDPDKLREKAAELVKLSAEELLKRQMEIKELMEKFKAPSDAELIKIAIADLNNSSLEDRQRALQELLILVEPIDNANGTWQCRRRNKNYFSMGAGQSQSGQCSCSKPDQWIWSFGQISEDGLFQFWTRSCKGIVHYILFD

SEQ ID NO: 167612 - protein, 248 aa, Zea Mays
MTGAKQSRRCNLLTFFSTILATVLLLIFQRFSPTAAAVPQWRRGGTQEHIDVARGAEAVGHGQGRCEDSLRGGSSRWRRRRGFADGGRGTRVRLALQHAAVGNWYAGNSDPDKLREKAAELVKLSAEELLKRQMEIKELMEKFKAPSDAELIKIAIADLNNSSLEDRQRALQELLILVEPIDNANGTWQCRRRNKNYFSMGAGQSQSGQCSCSKPDQWIWSFGQISEDGLFQFWTRSCKGIVHYILFD

SEQ ID NO: 167613 - protein, 167 aa, Zea Mays
MLMELGNADEGIRTTSAWVLGKASQDNVLVQNQINGYGALDRLVKMGYSSSGPEAAKALYTISSLIRDNEHGQELFLSENGYAMLQALLAVRNLLHLTSADATDLQKFSGLDDSLNALKVQLDELTSHEEQREYAPEIEILRREVHTVFQRKTDQARVVTNEGKYNG

SEQ ID NO: 167614 - protein, 322 aa, Zea Mays
MTGAKQSRRCNLLTFFSTILATVLLLIFQRFSPTAAAVPQWRRGGTQEHIDVARGAEAVGHGQGRCEDSLRGGSSRWRRRRGFADGGRGTRVRLALQHAAVGNWYRLGTLRVLPHLLGNSDPDKLREKAAELVKLSAEELLKRQMEIKELMEKFKAPSDAELIKIAIADLNNSSLEDRQRALQELLILVEPIDNANDEGIRTTSAWVLGKASQDNVLVQNQINGYGALDRLVKMGYSSSGPEAAKALYTISSLIRDNEHGQELFLSENGYAMLQVEKGNHILNIKAKARLKCTNALFVCSTYCQPQTLVFGFRKRLCLYWHI

SEQ ID NO: 167615 - protein, 160 aa, Zea Mays
MLRLIASYLLDAQSGMSVSPRVPAQDMKESQEVKEALRAQMEVQRRLHEQVEVQKRVQIRMEAFQKYIDSILESACKMVTEQFASSGFSISDPDLPEISPGGVVMCGGPTDTLSSSVFNQLSVSSIGSHSPGGKPSPSPSGMECPPLLLHKSHELKRRSS

SEQ ID NO: 167616 - protein, 145 aa, Zea Mays
MSVSPRVPAQDMKESQEVKEALRAQMEVQRRLHEQVEVQKRVQIRMEAFQKYIDSILESACKMVTEQFASSGFSISDPDLPEISPGGVVMCGGPTDTLSSSVFNQLSVSSIGSHSPGGKPSPSPSGMECPPLLLHKSHELKRRSS

SEQ ID NO: 167617 - protein, 89 aa, Zea Mays
MILHVLVLSITNNEINRGKHILKAVKEQPAASYLLDAQSGMSVSPRVPAQDMKESQEVKEALRAQMEVQRRLHEQVEPQLHTRPCSLQS

SEQ ID NO: 167618 - protein, 104 aa, Zea Mays
MEWPPPSTSPSPSLVVRSPRQTVSLIRNRRPHRDWAPSSRSPSFAARDHGPKPSEVYGFVGSITTVIATAVYLAWAYTPEPVLQSLGITYYPSTGHWRCHRSWL

SEQ ID NO: 167619 - protein, 168 aa, Zea Mays
MSTCPSCIVYCDFGFCCGGASDDGGLECHAPPQQLLPPPPPRLPPCHGHTEVTTVVNATVQLPPPPPPPPPCHGHKEVITTVVNAPTMQPPPLPLHPHVLVPYSNQLPPPVPAPPHPPRPPTITVYDTPPPLQAIVPRRQCVPPPPPLPPPAKARYETDDDPSSSSAL

SEQ ID NO: 167620 - protein, 207 aa, Zea Mays
MLTASLRPVQPTATTTSSCSLSSPTRGVSGAAPDEIAGGLMEIPVIYEALGDLDEAQKLLHRALRRGLIEGVEHCCRCCGTNGRSVLHGGRYANSGNSFKGAVAKSRAIVQIDGVHSDIFSPGAERGSHTLLIQVLFTRYEFKVGTHDGLGHNPEQQDVEILFGPGYTGLADLGNRYFEKQSLKAAFATALADPTVDLNMQMHRRDL

SEQ ID NO: 167621 - protein, 85 aa, Zea Mays
MLQLISQPPDTRHAAGVGQRQPPGRRGSDFQRRAPPGNRPHPPPPGWLGRVDTKVSSSAPLLRILFCSETPAEAGSTWYKDDYFN

SEQ ID NO: 167622 - protein, 292 aa, Zea Mays
MHHLSDKITSQLDISKLTDKLRQAKVDSSALTPKEKYETWEEIKIKSFAKIVSSMWAMTLLSLYVRVQVTILGRHLYLDFAQGTNGPQLQAESDTFSENGHRSFLAMADYLVTDKITGFLTQMQRAATEVLKEKQLKDRMNMDQVLQTVLQILDMFMGLSEDNSWINYLVPENPPVYAQLMAVSSSGFDDSSLLNDFRKLDQLMSETRIVLARNIMERSLRKIAGVVVEDLGVQIVTPGSGLPLATLLPKVDHLSSPLLEEPNKNKHIQIIRSMPEVELFYTLLYTNMPPET

SEQ ID NO: 167623 - protein, 118 aa, Zea Mays
MHHLSDKITSQLDISKLTDKLRQAKVDSSALTPKEKYETWEEIKIKSFAKIVSSMWAMTLLSLYVRVQVTILGRHLYLDFAQGTNGPQLQNLTPLVKMDTGAFLQWLIILSLTKSLDS

SEQ ID NO: 167624 - protein, 190 aa, Zea Mays
MADYLVTDKITGFLTQMQRAATEVLKEKQLKDRMNMDQVLQTVLQILDMFMGLSEDNSWINYLVPENPPVYAQLMAVSSSGFDDSSLLNDFRKLDQLMSETRIVLASDDFRNIMERSLRKIAGVVVEDLGVQIVTPGSGLPLATLLPKVDHLSSPLLEEPNKNKHIQIIRSMPEVELFYTLLYTNMPPET

SEQ ID NO: 167625 - protein, 173 aa, Zea Mays
MQRDAGSGDRTPGTPSPTHGGRLRHRKRSNEVPSDVNTTNGANLLLNDQNKYKSMLVRTYSSLWMMAGVVFLIYMGHLYIWAMVVVVQIFMAKELFNLLRKANEDRQLPGFRMLNWHFFFTAMLFTYGRFLSHQLVNTMTSDKLLYKLVSRLIKYQMFICYFLYIAGSSSQLR

SEQ ID NO: 167626 - protein, 420 aa, Zea Mays
MPAPATGRRAPRARRTVAGSGTGSAPTSDVNTTNGANLLLNDQNKYKSMLVRTYSSLWMMAGVVFLIYMGHLYIWAMVVVVQIFMAKELFNLLRKANEDRQLPGFRMLNWHFFFTAMLFTYGRFLSHQLVNTMTSDKLLYKLVSRLIKYQMFICYFLYIAGFVWFIITLKKKTYKYQFSQYAWTHMILLMVFAQSSFTVANIFDGIFWFILPASLIAINDVAAYFFGFFFGKTPLIKLSPKKTWEGFIGASVTTLLSAFVVANFMGHFQWLTCPRKDLSTGWLYCDPGPMFTPEGYDLPGWIPQWFPWREIAIMPVQWHALALGLFASIIAPFGGFFASGFKRAFKFKDFGDSIPGHGGFTDRMDCQMVMAVFAYIYYQSFVMVQDLSVETILEQILRNLTFEEQRELYGQLGKLLVRAN

SEQ ID NO: 167627 - protein, 55 aa, Zea Mays
MLYQRQGRKRRWQGASTAGRAAKRRNARLGASAGEQEEQRMDATQGLGPKTTMAG

SEQ ID NO: 167628 - protein, 85 aa, Zea Mays
MSRTLVPSLVPPVVTVVVQLIVFMHILLSQIPLFNKFQMMLTKVCYLLLLPPVKSTHKPYHLKGYGGCHTRELARVSRFFVLFIV

SEQ ID NO: 167629 - protein, 56 aa, Zea Mays
MKSNPPFEMIMIALSTQSSQIIHASYPQLLHLSLELTISYAKYQQASADKAKKHPQ

SEQ ID NO: 167630 - protein, 52 aa, Zea Mays
MSPSWTARVDPVAHEVEAADGESGLRGTTARGRRGGARRKTIRRDASRSNGR

SEQ ID NO: 167631 - protein, 713 aa, Zea Mays
MAAAEVYSPTEAVAAQQQREKAASQIILMPGRGTTATAMKPHCVAPSTCSTEYRSTCRPDLQPWLRGRQTPLPSTLCLTLHQCDEMSERIDDMRPEFDSARLFDVYFTHCDLVDDVFTVKCLETGETVAIKKVLQDKRYKNHGIVISYFIAKKIRNSINVCTHCLKLHIDGARIFHASAALGVLVDRLVKAADSVLVCLSKGLGAPVGSVIVGSKASIDKARILRKTLGGGMRHVGVLCAAAHVAVRDTVGKLADDHKKAKALAVWVLKLLCLVGFIFLEGLKKIEQITVDSASVETNMFKLYKVRSVLFGQKGIPYLNTYDGRTMRYPDPLIKANDTIKIDLETNKIMDFIKLYLPFHGLHQNILPSSASDPSGHAVLRPTLSFVGVRYPLLSGPAASNPSPEVAFMPLRSEIPANAAPAQTPAPEPVGRLMLDYDIYIILSADPVHRLLYCKCFFDCTAPVLYNVLLTLQDSVHKVFYAVVEAAAVRADNSHLGGLVRGELPKTLKQTPLDNGNPRYGPIHLYQHVLNAGDDMIGVECLEEDCDGKCFFDCRRRGRCSSRRKQPSWRYLIPILYVSVELVKALQAHIINWDIHMFDEEIGNTTQGGKFDHADRLFQSIESAYINRLSNTSDVKELIPEFFYMPEFLENSNSYHLGVKQDGELIGDVALPPWAKDNNSSDEFDKDSIESGDRSLEELSWETLELLVVPHIFR

SEQ ID NO: 167632 - protein, 258 aa, Zea Mays
MENGQLSNEWAEEQNEQYLHDDWADSLGVFIENPEYANTFEDDTSSQQTFPSHEKAKGKEQKKLRKQKNVAHRGSAFTKEEDAVICSAFLHVSKDPIAGVNQSACAYYKRMYDFFCENKPERSTRSQIGIKKGGNLSKRQLVSFLHSNRKLIGEMKVAKNEQDRIDDVVKMYEEKEAFQFLHCWKLLHNEPKWNDKVLELNNTPTRKTQQPEGPCNPVGTQPNTENAAITRPEGRDTAKKRRFKEDTASSSAAVEVLQ

SEQ ID NO: 167633 - protein, 262 aa, Zea Mays
MENGQLSNEWAEEQNEQYLHDDWADSLGVFIENPEYANTFEYSRQDDTSSQQTFPSHEKAKGKEQKKLRKQKNVAHRGSAFTKEEDAVICSAFLHVSKDPIAGVNQSACAYYKRMYDFFCENKPERSTRSQIGIKKGGNLSKRQLVSFLHSNRKLIGEMKVAKNEQDRIDDVVKMYEEKEAFQFLHCWKLLHNEPKWNDKVLELNNTPTRKTQQPEGPCNPVGTQPNTENAAITRPEGRDTAKKRRFKEDTASSSAAVEVLQ

SEQ ID NO: 167634 - protein, 391 aa, Zea Mays
MMKFKKGGCCGKASKDENTRKDNMILLGKREAKQATPAADAQVSTMRGSMFCGGDLRWWMLAIFFLCTLIAAAEERVVTHLPGFQGPLPFQLRTGYVEVDEDNGVRLFYYFTLSEGSSADDPVMLWLSGGPGCTSFTGLVYQIGPLSFDLDSYMGGLPKLVYRPESWTKVSNIIFLDSPVGAGFSYSVKEQGYNSSDTKAVSHILVFLKKWFDEHPEFLSNPLYIGGDSYAGMIVPTVTSEIAKGLKIVGSKPTMNLKGCLVGNPFTDQSNFDGPSKIPFAHRMALISDQMYKSYKKSCRGGDNRHQSIQCRNSLDAIDECVKDISEFHVLEPRCAYASPHQYNVLKLKTSLGVQKMQQLPDFTAEGLHLSEISTEQCYIHCLEYGQTMPQ

SEQ ID NO: 167635 - protein, 632 aa, Zea Mays
MYTFLRRKTMFSSGIIWRLIRVSPSLYPSDPLGGDWATAAVSLRLVPRYLCRRRAPARGMGMEVVGAEAAPAEIKVSDDVNLFQEKESKATAKEREEAAVFGSETTTNVTDLAPPTDVKDEWPEPKQTYAFYFIKVRSFEDPKLRAKLEQADKEFQKKIQARSKLIEAVRAKKAERSSIIAELKPLSAENKQYNGVVNEKIKEMEPLRNSLGKFREENNAMRAQSAGLCSSIEDLDLTIKMLNDRIVHESIPLSEEKRLVKEIKDLEKTRSKVISNAANRAKLQGTVVEKEAIQDQVKIIGEGIDEIKKERQAVRSKIKVLEDELKLVDAEIASLQEDLDAATARKDKAYELLQELRAGRDAKNAPFMQNRTVLAKARDYSLRNMLSELQELHKAEVDKFMSQWCESKAFREDYEKRILTSLNSRQLTRDGRMRNPDEKPIFIESQAPAPEPEPFPVKLPAKQVKEVPAPQADNASKIEAPSKGPVQLHKAKAALDADDDYEAAKAVARAQKEAEKKLKKEEKKAKKKSGAADTDEPSESDAKSDEAMEAPAEQEVAPASTTVKKEQKESARYRNVVSRSKAPLPKAILKRKKAQSYWSWAGPAAMVAAVLVALLAVLGYYQYYYLPANTSN

SEQ ID NO: 167636 - protein, 615 aa, Zea Mays
MGMEVVGAEAAPAEIKVSDDVNLFQEKESKATAKEREEAAVFGSETTTNVTDLAPPTDVKDEWPEPKQTYAFYFIKVRSFEDPKLRAKLEQADKEFQKKIQARSKLIEAVRAKKAERSSIIAELKPLSAENKQYNGVVNEKIKEMEPLRNSLGKFREENNAMRAQSAGLCSSIEDLDLTMLNDRIVHESIPLSEEKRLVKEIKDLEKTRSKVISNAANRAKLQGTVVEKEAIQDQVKIIGEGIDEIKKERQAVRSKIKVLEDELKLVDAEIASLQEDLDAATARKDKAYELLQELRAGRDAKNAPFMQNRTVLAKARDYSLRNMLSELQELHKAEVDKFMSQWCESKAFREDYEKRILTSLNSRQLTRDGRMRNPDEKPIFIESQAPAPEPEPFPVKLPAKQVKEVPAPQADNASKIEAPSKGPVQLHKAKAALDADDDYEAEPPKEKAKPTGADVAKLKEMKRQEEIEKNKLALERKKRQAEKQAAKAVARAQKEAEKKLKKEEKKAKKKSGAADTDEPSESDAKSDEAMEAPAEQEVAPASTTVKKEQKESARYRNVVSRSKAPLPKAILKRKKAQSYWSWAGPAAMVAAVLVALLAVLGYYQYYYLPANTSN

SEQ ID NO: 167637 - protein, 305 aa, Zea Mays
MGMEVVGAEAAPAEIKVSDDVNLFQEKESKATAKEREEAAVFGSETTTNVTDLAPPTDVKDEWPEPKQTYAFYFIKVRSFEDPKLRAKLEQADKEFQKKIQARSKLIEAVRAKKAERSSIIAELKPLSAENKQYNGVVNEKIKEMEPLRNSLGKFREENNAMRAQSAGLCSSIEDLDLTIKMLNDRIVHESIPLSEEKRLVKEIKDLEKTRSKVISNAANRAKLQGTVVEKEAIQDQVKIIGEGIDEIKKERQAVRSKIKVLEDELKLVDAEIASLQEDLDAATARKDKAYELLQELRAGRDAKF

SEQ ID NO: 167638 - protein, 156 aa, Zea Mays
MDDTEAAKNTATTGPTFASPLFSFSNLGGASFGSGFGFKSSAPLPPAIEVQLCEESPVPAARLEPVVVDDSLTIYKGRVSTSDVFGVKDSDLVPGKYEGGLKLWEGSLDLVKALNSDIKEDKFHLEGKRVLELGCGHGLPGIFAGLKISMPRCLGA

SEQ ID NO: 167639 - protein, 382 aa, Zea Mays
MPAAAAAAAAEVQGRHLHQQRQHARRPESLLGEGGFGCVFKGWIEENGTAPVKPGTGLTVAVKTLNHDGLQGHKEWVAEVDFLGNLHHPNLVKLIGYCVEDDQRLLVYEFMPRGSLDNHLFRRSLPLPWAIRMKVALGAAKGLAFLHEEAESPVIYRDFKTSNILLDAEYNAKLSDFGLAKDGPVGDKTHVSTRVMGTYGYAAPEYVMTGHLTSKSDVYSFGVVLLEMMSGRRSMDKNRPNGEHNLVEWARPLLGERQRFYKLVDPRLEGNFSVKGAQKAAQLARACLSRDPKARPLMSQVVEVLRPLQNLRDMASASYFYQTMHAERMAHSSSMNGRSSHGHGSSKAQSPFGRNGQQQPVRSLSDGPRASPFRYSPKPNVK

SEQ ID NO: 167640 - protein, 505 aa, Zea Mays
MGLAPPELGQFDGWESSGEERERWGWCRRSRRGSSRRRADPKGADDDTAVSTGCCIRLWPVGTCPPPPPPPPPRSKVDTSTSSASTHGEKSTENGSRNQPVALVVSGSTTTSNAESSSSASKDGELIKVAFQLRKFAFNDLKCATRNFRPESLLGEGGFGCVFKGWIEENGTAPVKPGTGLTVAVKTLNHDGLQGHKEWVAEVDFLGNLHHPNLVKLIGYCVEDDQRLLVYEFMPRGSLDNHLFRRSLPLPWAIRMKVALGAAKGLAFLHEEAESPVIYRDFKTSNILLDAEYNAKLSDFGLAKDGPVGDKTHVSTRVMGTYGYAAPEYVMTGHLTSKSDVYSFGVVLLEMMSGRRSMDKNRPNGEHNLVEWARPLLGERQRFYKLVDPRLEGNFSVKGAQKAAQLARACLSRDPKARPLMSQVVEVLRPLQNLRDMASASYFYQTMHAERMAHSSSMNGRSSHGHGSSKAQSPFGRNGQQQPVRSLSDGPRASPFRYSPKPNVK

SEQ ID NO: 167641 - protein, 197 aa, Zea Mays
MIIVYLQCTKSQIAYFIFSLWSGALNRESLHLVIPMAASMRHVSTLVYDQIQVDQSTVAIKENFGKFSEVLEPGCHFLPWCIGQQIAGYLSLRVRQLDVRCETKTKDNVFVTVVASVQYRALADKASDAFYKLSNTREQIQSYVFDVIRATVPKLGLDDAFEQKNEIAKAVEEELEKLACGVGNVYLWLSDRANANC

SEQ ID NO: 167642 - protein, 106 aa, Zea Mays
MVGPGLYTEIGKKTRDLLYKDYQTDHKFTLTTYTSNGVAVTASSTKKADLILGEIQSQIKNKNMTIDVKANSESNIITTITVDEIATPGLKTILSFAVPDQRSGKT

SEQ ID NO: 167643 - protein, 1124 aa, Zea Mays
MVVQVLGMPGAGVKPPAPPVEAATGLPPRRLTPSRVSAKRSWPPGCGRFPAPLPAPASPAAAGPEVNGVDGAFTIVGGRADDEAAPAVISPSAQNGCPDKVEEAVAAATVSPLPENGAPPRPQGSDKVEEAAATVSPLPENGAPPRQQGSDKVEEAVAAATVSPLPQNGAPPRQQGSDKVEEVADPAAVSPVAQSCGLPHQEDDKVDDLSAVLPAARSSALPHALPQSGPERARQDGDGGENGEVQLVGGAVKLSSDGQQGDRVVQVAGPTLEVLGSCTTVGASSMQNGGEGDGLLVAAEKGCGGSSDMGQEVAANDFTEIENKTGTGELQGKENGIAGSRTKRWSSESSLNPLPKRRAVSAVRKFPPGCGRTIVTTADSGVLEVSPIRSFAPSFGMSAVNTTGSGDREWLPSEATPVNNGDALVAIPVLVLGESAFPTSAIEASNKKVESKKIVDEGHSKAHNRVQVRDDFAGTKQDGDQRNVVSKATQRNVSDEKMNGKFSAHKGEQVAQEMVDHKMKNELESSLQRSNLRTPLSNPIDVKVKRLDSGKMNAGLLGNARSSAGGKMQSKTLSAKKEVSSNMNTKQNKFAHKLKSDDTSKGNLHLSARESKLGTHVAINQIEEPNQIIVQALMAPDNCPWTRGRKSFASASKSLVPRNKLKGKDGSASKSLVRMNKIKEKDTTRKDILARKVTSNESINDETMDDNETRGREPIDSTSKWLVPVNKLDATPNDIPVGKVVSCDSSNDEAMDDNDGIILEDDDNSRALVVYGQKQEMCLTVLPVVPSGSHHKQSRDHDIDARSKVRKLLQLFQATYRKLTQVEEQGKRKVGRIDIEAAKALKNDPIYKKLGAVVGNFPGVEVGDEFHFRVELSIIGLHGPLQAGIATSKVNGINVAISIVASGGYPDELSSSDELIYTGSGGKAGGNKEGDDQKLERGNLALKNCIETKTPVRVIHGFKGQNRSEIGHSKGKQTSIFIYDGLYEVLECWQEGPKGERVFKYKLQRIAGQPELALHAVKATRKSKVREGLCLPDISQGRERIPICVINTIDDMKPAPFKYITEVIYPDWYEKEPPKGCNCTNGCSDSITCACAVKNGGEIMFNFNGAIVEARPLIYECGPSCRSR

SEQ ID NO: 167644 - protein, 91 aa, Zea Mays
MEGFTIDASECGNVGRFINHSCSPNLYAQNVLWDHDDMRMPHVMFFAVENIPPLQELTYHYNYKIGEVYINGEEKVKHCYCGASDCCGRLY

SEQ ID NO: 167645 - protein, 155 aa, Zea Mays
MPLPVHGPACNSSGHLIGWHTFNSLPFSGKTATVVGEAAPVLPRDLEWAGFVLNSRMLWKEADGKPDWVKDLDAVGENGEEIENPLTLLNDPSSVEPLGNYGKKVLLWWLCVEARADSKFPEGFILLTPADIGLLIHTKIDSYLALNLKMLIRSF

SEQ ID NO: 167646 - protein, 329 aa, Zea Mays
MKQTSGTGLEELKNLACYTPVSLDCKGSANRCVSEDNKFTDFKAFDPLFPKPQKEYCEMHAPWKETRKSQPWWQLADADGLASLVAERAMENIVDNDLPRPTQTVRVHGGEVKVPENKDDYGLSALCADKELDPAHDTMECSYSVSSTTNNDTNSSDGGHWQQHQRNKEPGEAHDSYSSTANTPGGKPAYQNASERAKLLDALRHSQTRAREAEIAAKKAYDEKDHVIKLLFRQASHLFACKQWLKMLQLENICLQLRFREHQIATMFPELPWMVTKEKVAPSQEHSDRKKGRRLNRKGGLRDAVAFAVGVGIVGAGLLLGWTLGWLLP

SEQ ID NO: 167647 - protein, 163 aa, Zea Mays
MATPWWWPSLLPAWLSSSALWFLVANAVVAAVAILSRRPPLPLPLPLPSPRRRRRSSGAAAALTRRASSALLQRLRSFSIFAVPSACFNTTTPFPHPDAAQGTETEAPRRSEVDAKPEEFIRGFEDHQRQQRLNSIFNYTQMLKQRAAAARRQRQPDAPPDQL

SEQ ID NO: 167648 - protein, 201 aa, Zea Mays
MAALLELFLGSSPTPVDWEAEVYPAYGDFAVLPLLVAFFPAVRFLLDRLVFEVLARKFIFGKGHDKLSETDDSRKKINKFKESAWKFVFFLSGELLSLSVTYNEPWFKNTRYFWIGPGDQIWPDQKIKLKLKAVYMYAAGFYTYSIFALLFWETRRSDFGVSMSHHIATVVLIILSYIFRCIVVVPIKQIRSCWHCCFSPS

SEQ ID NO: 167649 - protein, 203 aa, Zea Mays
MPNAWKGRDGESDGDGSGGRKDSVEEAEQFLCSMLGDNSELGMGVVRDVPVGTGYPTGKNTRAGTGMGKILYPRVYMGNPTGRIFFDGYGYGMTAPAPKKHTPARKPRKPPANPGNPTSVFIAAANRPQPRPPDLRIHRCRAANRPPDLRNRIHGANTPWFWMGATQSVRRGYQQSSQPDLEEALEASRYASHPYSSHPKEIE

SEQ ID NO: 167650 - protein, 382 aa, Zea Mays
MAGKQRSKQAKKCLRAACREREEKKLVVLVAKKEFAAQLYSISQISPNLTAHQLLRPGDGASAAPSDDRNHNLTVLLTFDIFFSFTLLYPRSRALPLLPKGPRGGARGLADGVLLPDRLLEPDRLVHHVSTLWTSNMDERYAQAAMTWVCREPWRQRPHELYNSGRFQMAGRGSLAGLLPFGDANDIVLQMANEVLPVVKGVPVLAGVCAIDPFRRMEYFLRQLETIGFCGVQNFPTVGLFDGNFRHNLEETGMSMEVEMISMAHRMGFLTTPYAFNPDEVAAMAKAGSHIVVAHMGLTTAGSFGAMTATTLDDSVLRVQAIADAAFGVNPDIIVLCHEGPISGPLEAEFILKNTERVHGFYGASSMERLPVEQTITNTVRE

SEQ ID NO: 167651 - protein, 126 aa, Zea Mays
MHLNSRKKQQIGFNPKEAKYILGCRRISTPSVEVVDCSGVPVVDRSDDGRPLVVLPQRAGQHPRDRRNQHLAPLQTGRDGMLVLHSAVAHVLWRPVAIDGGLGGTSTLSSRLVFSSRGRAVWWRET

SEQ ID NO: 167652 - protein, 217 aa, Zea Mays
MKNRWDSLKRMYTQWKTLNERATGLGRDPHTGSISAPDEWWAKQNEAMPGCIQFKIALLENEDDLKIMFGPIVCTNETTLVPGVEDANSSSDGHEEEIVGGGENSTPDPGSIEKGKRKVFHDSPTPKKKRDVKDEYMKRLVEAYESRSLCSNMSITSYENDPVRKEVAAQLQQVIEDGAPERSDLHFFATHLLMEKRYRDVFATLKTKEGRSLGCVV

SEQ ID NO: 167653 - protein, 240 aa, Zea Mays
MSLWILDPAGRDATVLREALNGDTMDLRAATEIICSRTPSQLQIMKQTYYARFGTYLEHDIAHHTSGDHQKLLLAYMGIPRYEGPEVDPTIVTHDAKDLYKAGEKRLGTDEKIFIRVFTERSWAHLASVSSAYHHMYDRKLEKVIKSETSGNFEFALLTILRCAENPAKYFAKLLRKAMKGLGTDDMTLIRVVVTRTEIDMQYIKAEYLKKYKKPLAEAINSETSGNYRTFLLSLVGHGH

SEQ ID NO: 167654 - protein, 248 aa, Zea Mays
MRNSPTKAMSLWILDPAGRDATVLREALNGDTMDLRAATEIICSRTPSQLQIMKQTYYARFGTYLEHDIAHHTSGDHQKLLLAYMGIPRYEGPEVDPTIVTHDAKDLYKAGEKRLGTDEKIFIRVFTERSWAHLASVSSAYHHMYDRKLEKVIKSETSGNFEFALLTILRCAENPAKYFAKLLRKAMKGLGTDDMTLIRVVVTRTEIDMQYIKAEYLKKYKKPLAEAINSETSGNYRTFLLSLVGHGH

SEQ ID NO: 167655 - protein, 105 aa, Zea Mays
MYDRKLEKVIKSETSGNFEFALLTILRCAENPAKYFAKLLRKAMKGLGTDDMTLIRVVVTRTEIDMQYIKAEYLKKYKKPLAEAINSETSGNYRTFLLSLVGHGH

SEQ ID NO: 167656 - protein, 340 aa, Zea Mays
MDPLRPWLPAATASSSPPAPLRVSVHAPIDQSHLFAAAHASAASALMKDKMKDFVKKITSSGSGTPSSFKGTSHVLGSGPSPSSSSSHPASRPSNPSANPRPAPMRPSPPPPPTSTTDFAPLTPLVSSSSCRPDANGTAAAAVACPSCGDAFPSEVAVSEHLDGCLASAGGARACASAYLAADPPPPAASVEVVKRLLGNLLREPENDKFRRVRLSNPRIKEAVADREGGMELLEAVGFRVRDEGGEPFAVMNEVPRDARLNGIRRAVLLLEGAHPSAPPVKAEVEAKESCSNVADLQDGAKNIDRFGYFSLFLRVLWHKMMYQILFTILLVMRYGMKQR

SEQ ID NO: 167657 - protein, 234 aa, Zea Mays
MCTAHIILANVLIRLQLSRRLRHQKTELAPSCLPSSAGPLLSASNPPVRRRRRRRRAEMKVSVKTLKGSSFQIEVEPTDKVAAVKKVIENMQEQASYPADQQVLIHQGKVLSDDTTLEENQVTENNFLVIMLRQNKGSSSAAPAKTTANQAPPTQTVPVVPPQTSAAPAAPAPIVPVSALAATATASAAPAVAVSGFLNKWMFLHHLRVSSQSILSRLHKQLKLQLHLDQMLTL

SEQ ID NO: 167658 - protein, 210 aa, Zea Mays
MKVSVKTLKGSSFQIEVEPTDKVAAVKKVIENMQEQASYPADQQVLIHQGKVLSDDTTLEENQVTENNFLVIMLRQNKGSSSAAPAKTTANQAPPTQTVPVVPPQTSAAPAAPAPIVPVSALAATATASAAPAVAVSTEADSYGQAASNLVAGSNLEGTIQSILEMGGGIWDRDTVLRALRVAYNNPERAVEYLYSVRMILCPPLLLSRP

SEQ ID NO: 167659 - protein, 374 aa, Zea Mays
MKVSVKTLKGSSFQIEVEPTDKVAAVKKVIENMQEQASYPADQQVLIHQGKVLSDDTTLEENQVTENNFLVIMLRQAPPTQTVPVVPPQTSAAPAAPAPIVPVSALAATATASAAPAVAVSTEADSYGQAASNLVAGSNLEGTIQSILEMGGGIWDRDTVLRALRVAYNNPERAVEYLYSGIPEQMDVPTSPPSIQPVNPVQAAQAAQTAAPSGPNANPLDLFPQSLPNASANAGTGNLDVLRNNVQFQNLLGLVQANPQILQPLLQELGKQNPQVMQLIQENQAEFMRMINEPLEGDEENEMMLDQMADAAETIAVTPEENEAILRLEGMGFDRALVLEVFFACNKNEQLTANYLLDHMHEFDNDDGLGGPPL

SEQ ID NO: 167660 - protein, 189 aa, Zea Mays
MDVPTSPPSIQPVNPVQAAQAAQTAAPSGPNANPLDLFPQSLPNASANAGTGNLDVLRNNVQFQNLLGLVQANPQILQPLLQELGKQNPQVMQLIQENQAEFMRMINEPLEGDEENEMMLDQMADAAETIAVTPEENEAILRLEGMGFDRALVLEVFFACNKNEQLTANYLLDHMHEFDNDDGLGGPPL

SEQ ID NO: 167661 - protein, 333 aa, Zea Mays
MQEQASYPADQQVLIHQGKNKGSSSAAPAKTTANQAPPTQTVPVVPPQTSAAPAAPAPIVPVSALAATATASAAPAVAVSTEADSYGQAASNLVAGSNLEGTIQSILEMGGGIWDRDTVLRALRVAYNNPERAVEYLYSGIPEQMDVPTSPPSIQPVNPVQAAQAAQTAAPSGPNANPLDLFPQSLPNASANAGTGNLDVLRNNVQFQNLLGLVQANPQILQPLLQELGKQNPQVMQLIQENQAEFMRMINEPLEGDEENEMMLDQMADAAETIAVTPEENEAILRLEGMGFDRALVLEVFFACNKNEQLTANYLLDHMHEFDNDDGLGGPPL

SEQ ID NO: 167662 - protein, 215 aa, Zea Mays
MARLFPEAGDGHSRVHTRVAGTNGYMAPEYLMHGDLSTKADVFSFGVVVLEIVSGRKNSAFVPPLDAEADSLLEYAWRLYKKGRSLELLDPAVKSSAVPEQVELCVRIGLLCVQADPRLRPDMKRVVIILSKKQSTLEEPTRPGVPGSRYRRRPHGLRGSHYSVGSSSGTSSPSTSATSHASASASASASHAMTTSSTHTMRSRGLPSHREEEQE

SEQ ID NO: 167663 - protein, 320 aa, Zea Mays
MSWRLPAPGATLTPMTIYPPSLRSDSQAATTTATGGRRRQAGSQARAQVVSSAHTQRTGSGSGQMGAENGSNNPSSTVLDGLYGVQLGRPSDPAQTDGGASSSPAACEHHHKRGRGGTAQAQQRLQIRRLWQHRPSCFKPIHCTITCDKHAGETVANVVTSLPFIVLGLQAPRKNLNAAIYANSLVGMGVASSLYHSSRGGIRRLLRWADYTMIATTTLCLSRAVGNENPRLLMAASALLLPFQPLVVSAVHTGLMEVSFARRASMEPELRMAHNLHKVSSLLGGALFIADDCFPETPYIHAAWHLAAAIGVGTCNKLLE

SEQ ID NO: 167664 - protein, 256 aa, Zea Mays
MGAENGSNNPSSTVLDGLYGVQLGRPSDPAQTDGGASSSPAACEHHHKRGRGGTAQAQQRLQIRRLWQHRPSCFKPIHCTITCDKHAGETVANVVTSLPFIVLGLQAPRKNLNAAIYANSLVGMGVASSLYHSSRGGIRRLLRWADYTMIATTTLCLSRAVGNENPRLLMAASALLLPFQPLVVSAVHTGLMEVSFARRASMEPELRMAHNLHKVSSLLGGALFIADDCFPETPYIHAAWHLAAAIGVGTCNKLLE

SEQ ID NO: 167665 - protein, 330 aa, Zea Mays
MSWRLPAPGATLTPMTIYPPSLRSDSQAATTTATGGRRRQAGWVSTSTTTTTRARDLAVVSSAHTQRTGSGSGQMGAENGSNNPSSTVLDGLYGVQLGRPSDPAQTDGGASSSPAACEHHHKRGRGGTAQAQQRLQIRRLWQHRPSCFKPIHCTITCDKHAGETVANVVTSLPFIVLGLQAPRKNLNAAIYANSLVGMGVASSLYHSSRGGIRRLLRWADYTMIATTTLCLSRAVGNENPRLLMAASALLLPFQPLVVSAVHTGLMEVSFARRASMEPELRMAHNLHKVSSLLGGALFIADDCFPETPYIHAAWHLAAAIGVGTCNKLLE

SEQ ID NO: 167666 - protein, 259 aa, Zea Mays
MQDGLALRIGPAQCRKRKLKVSVVAVPKTIDNDILFMDKTFGFDTAVEEAQRAINSAYIEARSAYHGIGLVKLMGRSSGFIAMHASLSSGQIDVCLIPEVSFTLDGEHGVLRHLEHLLNTKGFCVVCVAEGAGQDLLQKSNATDASGNVILSDFGVHMQQKIKKHFKDIGVPADLKYIDPTYMVRACRANASDAILCTVLGQNAVHGAFAGFSGITSGVCNTHYVYLPITEVITTPKHVNPNSRMWHRCLTSTGQPDFH

SEQ ID NO: 167667 - protein, 268 aa, Zea Mays
MQDGLALRIGPAQCRKRKLKVSVVAVPKTIDNDILFMDKTFGFDTAVEEAQRAINSAYIEARSAYHGIGLVKLMGRSSGFIAMHASLSSGQIDVCLIPEVSFTLDGEHGVLRHLEHLLNTKGFCVVCVAEGAGQKCIFVLLAQDLLQKSNATDASGNVILSDFGVHMQQKIKKHFKDIGVPADLKYIDPTYMVRACRANASDAILCTVLGQNAVHGAFAGFSGITSGVCNTHYVYLPITEVITTPKHVNPNSRMWHRCLTSTGQPDFH

SEQ ID NO: 167668 - protein, 1007 aa, Zea Mays
MFVSDGGLAMDAGGRAGVSGPAAANGSFGLVRTVVGYSTSPLFFWLLTVALVAAIHIVSGSSSKPARNNETEERKKARRDRFLPAAEEREASGRGDDRVLEMMRSFSFMQATEEDFMEGMTAYEHNGVGDGTAHGPVAPEPPALTATSLSFRFQHQMPEVPTETALVSREFTAARQETAVVSRELTAARDDDGRQREEEKEPHFPLEPFAPLQTAADMQEHRHDEAEETEFLAEEPAEERSGEVAQEEAAPPKTVAATHNYQFLTERDFRGFVREPEAVTVRVQESFVPSPPPAHQPEERRVVDVSSRSGRFLTARDFRPANEPDVCESVASSGKWTPPPPRPRPKPKPKPASSPSAASMGGGGGFTSEFSGFGDSDSESSASDGYSVKDLVVDSDSDWFLSEKEFPASALGSGNLKTYKAKVLRAIEAMEAASNLEPSYQEDSATTVSPSSVRQRSPDTVPDGSPKFPEDVWSRSPSPDVEYKEDEEEVTREAEAQYDEDIEQRSTGEEEEGKGIDMSDDEHSSGGKEVESAPIYDLAPVADDCMDHSEKGIITLNDHSGGQAASDAQRSPEAVSARQLAAVPSDQVAGPVKRSPEPPEQEFVGMVDHSLEHSSYDRKQTASESDQSYEIVFDDKRRPQRAETGFLGTSSPSHELVSEVWEEIVTRNDQPPLGPHADEQGLDTAEEEYVGTGDQPHGAVSDEKSGAETPEQEFSLTDHRNVAVPDARNISETREDEEQASADDHSDNAVTGKAKVYDEDGEDREARWKDLTDEEEDELESLWEHQDLVEQLKLELKKVRSSVGLPTILEESDTPKAPVEDLKPWSMDAKFLREDPMDELNKFYKSYRERMRKLDILCYQKMYAIDFLQLRGSQQSNNNNNNSVKSLSPTVASILSHNFRSSRRRSPEDPSERFLRELRYDLETVYVGQMCLSWEFLRWQYEQARDLPESDSYHSHQYNQVAGEFQQFQVVVQRFVEDESFKGPRLSNYINNRCVLRNLLQVPVIKA

SEQ ID NO: 167669 - protein, 555 aa, Zea Mays
MVDHSLEHSSYDRKQTASESDQSYEIVFDDKRRPQRAETGFLVWEEIVTRNDQPPLGPHADEQGLDTAEEEYVGTGDQPHGAVSDEKSGAETPEQEFSLTDHRNVAVPDARNISETREDEEQASADDHSDNAVTGKAKVYDEDGEDREARWKDLTDEEEDELESLWEHQDLVEQLKLELKKVRSSVGLPTILEESDTPKAPVEDLKPWSMDAKFLREDPMDELNKFYKSYRERMRKLDILCYQKMYAIDFLQLRGSQQSNNNNNNSVKSLSPTVASILSHNFRSSRRRSPEDPSERFLRELRYDLETVYVGQMCLSWEFLRWQYEQARDLPESDSYHSHQYNQVAGEFQQFQVVVQRFVEDESFKGPRLSNYINNRCVLRNLLQVPVIKEDSLKDRMEDQRKGNYVITSEELEDVMEEAMHVLWEFIKADRAETTTTAAAASVLKGLSSSNVELQDPLDHGLMAHIHSALQKKEKRLKDLLRTGNCIAKKFKKPKEDRSNQNLFFSQVDMKLVARVLRMPRITSEQLQWCRAKLDKIVLVDRKIHREASFLLFPC

SEQ ID NO: 167670 - protein, 1094 aa, Zea Mays
MFVSDGGLAMDAGGRAGVSGPAAANGSFGLVRTVVGYSTSPLFFWLLTVALVAAIHIVSGSSSKPARNNETEERKKARRDRFLPAAEEREASGRGDDRVLEMMRSFSFMQATEEDFMEGMTAYEHNGVGDGTAHGPVAPEPPALTATSLSFRFQHQMPEVPTETALVSREFTAARQETAVVSRELTAARDDDGRQREEEKEPHFPLEPFAPLQTAADMQEHRHDEAEETEFLAEEPAEERSGEVAQEEAAPPKTVAATHNYQFLTERDFRGFVREPEAVTVRVQESFVPSPPPAHQPEERRVVDVSSRSGRFLTARDFRPANEPDVCESVASSGKWTPPPPRPRPKPKPKPASSPSAASMGGGGGFTSEFSGFGDSDSESSASDGYSVKDLVVDSDSDWFLSEKEFPASALGSGNLKTYKAKVLRAIEAMEAASNLEPSYQEDSATTVSPSSVRQRSPDTVPDGSPKFPEDVWSRSPSPDVEYKEDEEEVTREAEAQYDEDIEQRSTGEEEEGKGIDMSDDEHSSGGKEVESAPIYDLAPVADDCMDHSEKGIITLNDHSGGQAASDAQRSPEAVSARQLAAVPSDQVAGPVKRSPEPPEQEFVGMVDHSLEHSSYDRKQTASESDQSYEIVFDDKRRPQRAETGFLGTSSPSHELVSEVWEEIVTRNDQPPLGPHADEQGLDTAEEEYVGTGDQPHGAVSDEKSGAETPEQEFSLTDHRNVAVPDARNISETREDEEQASADDHSDNAVTGKAKVYDEDGEDREARWKDLTDEEEDELESLWEHQDLVEQLKLELKKVRSSVGLPTILEESDTPKAPVEDLKPWSMDAKFLREDPMDELNKFYKSYRERMRKLDILCYQKMYAIDFLQLRGSQQSNNNNNNSVKSLSPTVASILSHNFRSSRRRSPEDPSERFLRELRYDLETVYVGQMCLSWEFLRWQYEQARDLPESDSYHSHQYNQVAGEFQQFQVVVQRFVEDESFKGPRLSNYINNRGQPEGQDGGPAQGELRDNQRGAGGRHGRGDARPVGVHQGRQGRDDDDGGGGIGAQGPVEQQRRAPGPSGSWPHGAHPFRVTEEREEAQGPAQDGQLHREEV

SEQ ID NO: 167671 - protein, 146 aa, Zea Mays
MDHGRYRLGAGKERRRLFPCRADATTRPRSPLALLSVWIWSYPLRRRPCPPGLSHEPERRAPGLVSPRRRHGRRRGDAAGAEEQGQEETAAGGARGGGLRQRGQTHYRLKKQARYMPSPLGSNKAAALADHGAGDPSAFYQQKLKT

SEQ ID NO: 167672 - protein, 187 aa, Zea Mays
MDDIAWERGRNADDSSRAVLTPPRGPGLLSPSSPSGSGPIPSAAVLALPASATSQSAGLLASSRLAGDMDGGGETLLVRRSKGKKRPQPAAPAEEGSGSGGRFRAIWRDYHDLLQVSVASRFLLHPLIYFALSSFRAVHLFRPVLDGPQGHCPHFHYEMVKSLTTQKASSTRDMRLSINLHTQHATD

SEQ ID NO: 167673 - protein, 1118 aa, Zea Mays
MRVRMDILLLLILVVPFLAASTSADGKAGDMQRRRRRQVLLRDKATLLDLKQGLRLSSSAALADWNESNGDVCGFTGVTCDWRREHVVGLSLANLGISVAIPRVIGNLSHLRGLDVSNNTISGQIPTSVGNLTRLERLFMNNNDISGTISSIFSNLLPLQRLRKLDLSYNSISGAIPLDIGRFGQLQSFNITYNNISGAVPPSIGNLTLLEYLYVQTNFISGEISLAICNLTSLVELEMSGNHLTGQIPAELSNLRNIQAIHLGTNNFHGGIPPSLSELTGLFYLGLEQNNLSGTIPPAIFLNLTGLHLFDVGSNDVSGEIPGAISSTGCAFFVINLYSNKLHGTLPRWIANCTDLMTLDVESNLLDDELPTSIISGKKGFKFLHLSNNRFQSHDGNSNLEPFFVALSSCTSLQEVEAAAVGMGGQLPSRLGSLLPSNMWHLNLELNAIEGPIPESIGEVINMTWMNLSSNFLNGTIPTSLCRLKCLQQLVLSNNSLTGEIPACIGSATQLIALDLSANVLSGAIPSSIGSLAELQSLFLQGNKLSGVIPPSLGHCAALLHIDLSSNSLTGVISEEIAGIVTLNLSRNQLGGMLPAGLSSMQHVQEIDLSWNNFNGEILANIGNCIELTVLDLSHNSLAGNLPSTLSQLKNLESLNVANNNLSGEIPISLANCDRLKYLNLSYNDFSGGVPTTGPFVNFSCLSYLGNRRLSGPVLRRCGGRHRSWYQSRKFVVILCVCSAALAFALTILCTVSVRKIRERVAAMREDMFSGRRGGGSSPVMKYKFPRITYRELVEATEEFSEDRLVGTGSYGRVYRGTLRDGTMVAVKVLQLQTGNSTKSFNRECQVLKRIRHRNLMRIVTACSLPDFKALVLPFMANGSLERCLYAGPPAELSLVQRVNICSDIAEGMAYLHHHSPVKVIHCDLKPSNVLINDDMTALVSDFGISRLVMSIGGVANTADVGASTANMLCGSIGYIPPEYGYGSNPTTKGDAYSFGVLVLEMVTRRKPTDDMFDAGLSLHKWVKTHYHGRADAVVDQALVRMVRDQTPEVRRMSDVAIGELLELGILCTQEQSSARPTMMDAADDLDRLKRYLGGDTTATFASSLGFSSTTLEVEDID

SEQ ID NO: 167674 - protein, 642 aa, Zea Mays
MGSYLFGSYAESSCAALVVASISSFGINHQFTPMVYPLLVSSVGIIACLITTLFATDFFEIKAVSEIEPALKKQLIISTVVMTIGIALMLAWQLFLCVAVGLWAGLVIGFITEYYTSNAYRTGAATNVIFGLALGYKSVIIPIFAIAFSIFLSFSLAAMYGVVVAALGMLSTIATDLAIDAYGPISDNAGSLSLSTATTIGGAPNTVAPCAPAWCGDLAISYPFWLAGTHLPKCGYDQGFKVTCDKAKDDGTCNIDKFVNASFVPSPPFEIEPQQNQELFFVYDCNLRAPQLPRSWTPLRCGNNGSFTWLSGEYRPEDSSMAMPGNCNVAMIPVVAYEGATAADYQWFVEGGFFLSYYLTDTEDDDYYDQCQACSYRAGHGQCRTIVSDNGFQCYCSDGVYSTTACGTKRANWKTTIVERYGNKCGKHDLSNSKTIFVVESKRELNQECSIYIGLRMNEHQERVREEAYTVGTCPSQWRCSGDGGDRHWHGEAAKPTAAEPHLEEEVENLCRYELPNESWEVNLPPEKVSPELPVPTLGINFARDGIQKKEWLSMVAAHSDAWLLSVAFYLGAQFGFNKNYSNSENMRQTDLNRVEMIPSYLYEDFPSKARDNGYLLCDDSKRMRLIDCVAVVAPIEKYYQY

SEQ ID NO: 167675 - protein, 383 aa, Zea Mays
MFLPRRRSTRFGLRVVIKVLPPPHLLLAAVRLSADDVRAPAVPAWTGRAISYSFSTAFLMARNRAGADGDDRRRAEAAGKGQRRPRPKDQFPVGMRVLAVDDDPTCLKVLENLLFRCQYHGTSPDNNGPGSHCPELLREKKDQFDPVISNVHMPDMDGFKLLELVGLEMDLPGIRYFHHFWYGSVCNVPGIIILFLVWIWNGLGSTTMMRQSCSKDWMISIPLLPIRLGSPSPLCPTGTKQPMELEQPMDDFHSPAANSPNCFDPSTQSACTQPIVAANSDWVRKPEGRGAWLTQNGRQDTAGGSLQPHAWWPVWEGAHCSSSDDFRNFSGQVVGREGSKESKQERSRFHWWLRFWIKGESCCRLQLPGPSSSPASSAPMAAI

SEQ ID NO: 167676 - protein, 175 aa, Zea Mays
MMRQSCSKDWMISIPLLPIRLGSPSPLCPTGTKQPMELEQPMDDFHSPAANSPNCFDPSTQSACTQPIVAANSDWVRKPEGRGAWLTQNGRQDTAGGSLQPHAWWPVWEGAHCSSSDDFRNFSGQVVGREGSKESKQERSRFHWWLRFWIKGERCREKKAILLLISVSTSLPIMP

SEQ ID NO: 167677 - protein, 223 aa, Zea Mays
MGSYLFGSYAESSCAALVVASISSFGINHQFTPMVYPLLVSSVGIIACLITTLFATDFFEIKAVSEIEPALKKQLIISTVVMTIGIALMLAWQLFLCVAVGLWAGLVIGFITEYYTSNAYRTGAATNVIFGLALGYKSVIIPIFAIAFSIFLSFSLAAMYGVVVAALGMLSTIATDLAIDAYGPISDNAGSLSLYGCILSFICISESLSIFLNRRCLETLVTT

SEQ ID NO: 167678 - protein, 146 aa, Zea Mays
MSAPAVTPAAHRTKPPRDLGAQPLTMATTTSPTSASSVPLPLLHRRRGILGHVPPEAPVHALRPPRGHQAFLMARNRAGADGDDRRRAEAAGKGQRRPRPKDQFPVGMRVLAVDDDPTCLKVLENLLFRCQYHVTTMGQAATALSC

SEQ ID NO: 167679 - protein, 137 aa, Zea Mays
MFYFISNCTLLQLVGTDHSTFNSTQIVHVSFSHHDLSLGYFHHFWYGSVCNVPGIIILFLVWIWNGLGSTTMMRQSCSKDWMISIPLLPIRLGSPSPLCPTGTKQPMELEQPMDDFHSPAANSPNCFDPSTQSACTQ

SEQ ID NO: 167680 - protein, 291 aa, Zea Mays
MPDMDGFKLLELVGLEMDLPGIRYFHHFWYGSVCNVPGIIILFLVWIWNGLGSTTMMRQSCSKDWMISIPLLPIRLGSPSPLCPTGTKQPMELEQPMDDFHSPAANSPNCFDPSTQSACTQPIVAANSDWVRKPEGRGAWLTQNGRQDTAGGSLQPHAWWPVWEGAHCSSSDDFRNFSGQGHDEISVCYLASFTTKIILHNRFRQQKLMEFAEMPFQACSICATRLWASCLLPAVFWCFYIAINLFEIYYGDDWEGLFEAITGYGLGGSLAVLVVVFIPRLLMLVPTLWGR

SEQ ID NO: 167681 - protein, 133 aa, Zea Mays
MFLPRRRSTRFGLRVVIKVLPPPHLLLAAVRLSADDVRAPAVPAWTGRAISYSFSTAFLMARNRAGADGDDRRRAEAAGKGQRRPRPKDQFPVGMRVLAVDDDPTCLKVLENLLFRCQYHVTTMGQAATALSC

SEQ ID NO: 167682 - protein, 374 aa, Zea Mays
MFLPRRRSTRFGLRVVIKVLPPPHLLLAAVRLSADDVRAPAVPAWTGRAISYSFSTAFLMARNRAGADGDDRRRAEAAGKGQRRPRPKDQFPVGMRVLAVDDDPTCLKVLENLLFRCQYHGTSPDNNGPGSHCPELLREKKDQFDPVISNVHMPDMDGFKLLELVGLEMDLPGIRYFHHFWYGSVCNVPGIIILFLVWIWNGLGSTTMMRQSCSKDWMISIPLLPIRLGSPSPLCPTGTKQPMELEQPMDDFHSPAANSPNCFDPSTQSACTQPIVAANSDWVRKPEGRGAWLTQNGRQDTAGGSLQPHAWWPVWEGAHCSSSDDFRNFSGQVVGREGSKESKQERSRFHWWLRFWIKGERCREKKVATPWAKQ

SEQ ID NO: 167683 - protein, 155 aa, Zea Mays
MAMPGNCNVAMIPVVAYEGATAADYQWFVEGGFFLSYYLTDTEDDDYYDQCQACSYRAGHGQCRTIVSDNGFQCYCSDGVYSTTACGTKRANWKTTIVERYGNKCGKHDLSNSKTIFVVESKRELNQECSIYIGLSCMEAITESRILYLYRSQPF

SEQ ID NO: 167684 - protein, 423 aa, Zea Mays
MYGVVVAALGMLSTIATDLAIDAYGPISDNAGSLSLSTATTIGGAPNTVAPCAPAWCGDLAISYPFWLAGTHLPKCGYDQGFKVTCDKAKDDGTCNIDKFVNASFVPSPPFEIEPQQNQELFFVYDCNLRAPQLPRSWTPLRCGNNGSFTWLSGEYRPEDSSMAMPGNCNVAMIPVVAYEGATAADYQWFVEGGFFLSYYLTDTEDDDYYDQCQACSYRAGHGQCRTIVSDNGFQCYCSDGVYSTTACGTKRANWKTTIVERYGNKCGKHDLSNSKTIFVVESKRELNQECSIYIGLRMNEHQERVREEAYTVGTCPSQWRCSGDGGDRHWHGEAAKPTAAEPHLEEEVENLCRYELPNESWEVNLPPEKEPEEFSLRRSLLRPKERGHIHVDARRLEPEEDWARRRARRTTSPHTSPPGRRR

SEQ ID NO: 167685 - protein, 322 aa, Zea Mays
MAMPGNCNVAMIPVVAYEGATAADYQWFVEGGFFLSYYLTDTEDDDYYDQCQACSYRAGHGQCRTIVSDNGFQCYCSDGVYSTTACGTKRANWKTTIVERYGNKCGKHDLSNSKTIFVVESKRELNQECSIYIGLRMNEHQERVREEAYTVGTCPSQWRCSGDGGDRHWHGEAAKPTAAEPHLEEEVENLCRYELPNESWEVNLPPEKVSPELPVPTLGINFARDGIQKKEWLSMVAAHSDAWLLSVAFYLGAQFGFNKNYSNSENMRQTDLNRVEMIPSYLYEDFPSKARDNGYLLCDDSKRMRLIDCVAVVAPIEKYYQY

SEQ ID NO: 167686 - protein, 430 aa, Zea Mays
MYGVVVAALGMLSTIATDLAIDAYGPISDNAGSLSLSTATTIGGAPNTVAPCAPAWCGDLAISYPFWLAGTHLPKCGYDQGFKVTCDKAKDDGTCNIDKFVNASFVPSPPFEIEPQQNQELFFVYDCNLRAPQLPRSWTPLRCGNNGSFTWLSGEYRPEDSSMAMPGNCNVAMIPVVAYEGATAADYQWFVEGGFFLSYYLTDTEDDDYYDQCQACSYRAGHGQCRTIVSDNGFQCYCSDGVYSTTACGTKRANWKTTIVERYGNKCGKHDLSNSKTIFVVESKRELNQECSIYIGLRMNEHQERVREEAYTVGTCPSQWRCSGDGGDRHWHGEAAKPTAAEPHLEEEVENLCRYELPNESWEVNLPPEKVSPELPVPTLGINFARDGIQKKEWLSMVAAHSDAWLLSVAFYLGAQFGFNKNYRSRKSSR

SEQ ID NO: 167687 - protein, 360 aa, Zea Mays
MEFAEMPFQACSICATRLWASCLLPAVFWCFYIAINLFEIYYGDDWEGLFEAITGYGLGGSLAVLVVVIADNVGDNVGDIVGMGSYLFGSYAESSCAALVVASISSFGINHQFTPMVYPLLVSSVGIIACLITTLFATDFFEIKAVSEIEPALKKQLIISTVVMTIGIALMLAWQLFLCVAVGLWAGLVIGFITEYYTSNAYRTGAATNVIFGLALGYKSVIIPIFAIAFSIFLSFSLAAMYGVVVAALGMLSTIATDLAIDAYGPISDNAGSLSLSTATTIGGAPNTVAPCAPAWCGDLAISYPFWLAGTHLPKCGYDQGFKVTCDKAKVYLKNSTCTYQIQAIFYAMKLLRVAIVGLS

SEQ ID NO: 167688 - protein, 221 aa, Zea Mays
MSAPAVTPAAHRTKPPRDLGAQPLTMATTTSPTSASSVPLPLLHRRRGILGHVPPEAPVHALRPPRGHQAFLMARNRAGADGDDRRRAEAAGKGQRRPRPKDQFPVGMRVLAVDDDPTCLKVLENLLFRCQYHGTSPDNNGPGSHCPELLREKKDQFDPVISNVHMPDMDGFKLLELVGLEMDLPGISKLSLAHSCSCLYCSCSRPMISKFWHCLKNHHCE

SEQ ID NO: 167689 - protein, 100 aa, Zea Mays
MGSYLFGSYAESSCAALVVASISSFGINHQFTPMVYPLLVSSVGIIACLITTLFATDFFEIKAVSEIEPALKKQLIISTVVMTIGIALMLAWSSIHLHHL

SEQ ID NO: 167690 - protein, 636 aa, Zea Mays
MAGRARHPPFRLMFYLIGLLASLIPATSRAQPPETVTVGLIIDADSPVGRIASTTIPMALDDFYAALPNSSTRVQILQHDSGGDVVAAASAALQLMTTQGARAILGPQSSVESAFVADLATRAEVPVVSFSATSPSVSHSEARFFVRAALSDAAQAEAIAALATYFGWRRVVPIYQDDDYGAAFVPFLVDALTAVRAEVPYRCALPSGASRDAVAAAMYRLESEQTRAFVVHARPALAELVFAAAVEAGMMAEGYAWVITDGLTGLLGSIHPPQGVIGLAPHVPSTARLRDVRKRWAHKFMRQHRDADLAQAEMGCYALWAYDAAWAVASAAERLVSPGDQPSLQGLVGGRSGPTDFSGLGKSMSGAKFLAAITSTTFEGLGGRFELINGELAVPAFRIVNIMDDARERGIGFWTRKGGLHRQLGRRGIASNSGLLPVIWPADSTVVPIGWVQPTSGRKLQVAVLGRVDPGYWPIMHLDVDPATNRTVAGGFVIEVFEAAVRLLPYALPFEYVLVGSMRYDTLVERVGKGEFDAAVADITITANRSQHVDFTLPYMSSGISMVVPMRDQRSKRAAWVFLKPLRYDLWLISFAFFVFTGFVVWAIEHRSNEEFRGPPSYQIGTLLYFGFSTLVFAHT

SEQ ID NO: 167691 - protein, 138 aa, Zea Mays
MIAGAAAAGQLLVVAGGARSSGSAALPSRPLALLLLLLLLLLCLVGAEQAAPTPGAAGERRRVDVDVGVILDRTTWLGNISWACMELALQDFYADDDDAGYSTRVRLHLRDAPAGPSAVDAASAGVDLLKNVHVQAIV

SEQ ID NO: 167692 - protein, 535 aa, Zea Mays
MSYQLALKFFQLAKDEGMMGQGYVWITAYGLTDIFNVVGYPALEVMEGVVGIEPYVPETVKLNKFRRRWREKYRSENPGTSINEPITSGLYAYDTVWAIALAAEQAGFVNSDFVLSETNNGSTDFDKISAYKAAEKFRGAFLKVNFTGISGQFVIQDMQFQLVSTTYKIINIAGREKRAVGVWTPGLNMSKILEKKDGISTIIWPGGSENTPRGWLLPANKELKVGVPVKPGFGSFIRSEDGIPKGFCIDVFEEVISNLTYKVPKHYVEFGNGEGESNGTYDELVYKVYLKEFDAVVGDITILANRSLYVDYTLPYTESGVRMLVPVRDQRQKTAWTFLEPLTADLWFGTGSFVVFTGFIVWFIEHRTNQEFRGPPASQIGSVFYFSFSTLVFAHRERIVNNLSRIAVVVWLFVVLILQQSYTASLSSILTVEQLQPTVTNLDEVIRRGDYVGYLNDSFMPNLLKRLKINETKMRAFSSPEEYNDALSTGKVAVIVDEIPYLKVFLAKYCHNYTMVGPTYKFDGFGYNCAIVHLY

SEQ ID NO: 167693 - protein, 124 aa, Zea Mays
MWFFRCPWGNRTDPIKLSGAHAWPSEVFETRAGACGPDNLGDSAIVALSTAEDEYIATGHCCAQLLWMRQTLRDYDYKFSKVPLLCDNESAIHMADNPVEHSRTKHIAIRYHFLRDHQQRGIPR

SEQ ID NO: 167694 - protein, 415 aa, Zea Mays
MMLIRPPRFLSPSPSPGTREPRLRRPLDASRIFSSPRPPGRRSRPRPRLVSPSTDLRRLTARIVDLTRRRQLAQIMEEVEAARRRVRGGGLLNTIVMNAVLEACVRCGDVDRALRLFEEMRGPMGCGVDDVSYGILLKGLGIARRIDEAFEILESIEKDSSIGGPRLSPHLICGFLNALIEAGDMRRANALVARFRMVLYEDHSVLLYNLLMKGYIKSNFPLGALTVKDEILRQGLKPDRLTYNTIISACVKSAENDKAIQFLEDMKEEANTESNPELLPDAVTYTTLLKGLGNSRDLYSVVKIVVEMKSSLISIDRTAYTAMVDALLACGSIDVVQHLAFHLTLTSDISHSYLYPFMSQLPKQHIQSKVSKMVKLFFVSCVCIIFYNYITDVYNLVVLLKSSHAVTISYTKIIF

SEQ ID NO: 167695 - protein, 257 aa, Zea Mays
MRAFATRGDVDMVMRFNKRMWLDSVGSISRAAKEETHELLMEAAINNNQIDLARGLLRRIVNEKECFSWTSRVGLVAVKVESLSGFTNSLLRPHVFPQIILNDPVEKYMVPFQESRPLPADLILRKVVMRLLKERAVPLVDDWGGCIGIVHRDDCTKLDAPLISMSRGPPLCVPTSTTVEHVIDLLLRNKSEMVIVVKSGNMYEGSYTSSSRPLGVFSLAILWSFTGDYSSGSDDVPDAGISRAAKPKPDAEACNHS

SEQ ID NO: 167696 - protein, 149 aa, Zea Mays
MVPFQESRPLPADLILRKVVMRLLKERAVPLVDDWGGCIGIVHRDDCTKLDAPLISMSRGPPLCVPTSTTVEHVIDLLLRNKSEMVIVVKSGNMYEGSYTSSSRPLGVFSLAILWSFTGDYSSGSDDVPDAGISRAAKPKPDAEACNHS

SEQ ID NO: 167697 - protein, 89 aa, Zea Mays
MSGAPEDSNFKLITFGKFQRRLRYNSPDCPVYTGHVRCSKEERPQELASLGYSFQLLRYNKPDCPVYTGLSGVTAGQRLLRRQRLPATH

SEQ ID NO: 167698 - protein, 400 aa, Zea Mays
MSTEILGNYSKKEDQLMTAAFGTRPKRRLNIVLDAIGFEYSDYGWLDKGAEGLKRKRVADILIKDDEDQPKKKKEKFEPKVAASRKRKAASPKPVSPESESLVRDEEVPATPSATQVEEILKVMTESLPVKLSPLAPELTKFFQKDKEASAAESPAKPKKRRIIQVTDVIHQTPPSVSASKIVIAETAEAEAAAAEATGAETTEIATAGAEATGAEAAETTGAEATGAEAGATEDSNLETTLEVIDNILLKMAEEEAAVAAVNTATEKGKEQVEDILEEENFNFQDLLGQDLTSAEKEELKKYAISCGYKPGSMLFGGVNEGKLRCLRNRTEAKVVRTFSKSVGLPKIEADLCRYQRQHIAGSLLYANFKVKNIIIVLLLLLLFLCRFLTKVVLAEYTIK

SEQ ID NO: 167699 - protein, 100 aa, Zea Mays
MPTRKEISTRERRFGIISTDERRLEIGTTERGLISTYGKEESINGLRWLIGDIFYFFLSFSSTKEYIYMFSDSDLSKMQIDRIKMLSEYVTILSDSGIRN

SEQ ID NO: 167700 - protein, 51 aa, Zea Mays
MMQFTHDSLSQFILHISLYGGQLIIKRRAMHRRRCHTLTIGQLIMVTHLLT

SEQ ID NO: 167701 - protein, 80 aa, Zea Mays
MKVLIVALALLALAASAASSTSGGCGCQTPPFHLPPPFYMPPPFYLPPQQQPQPWQYPTQPPQLSPCQQFGSCAAGGVYY

SEQ ID NO: 167702 - protein, 169 aa, Zea Mays
MKVLIVALALLALAASAASVLSAAAAAAAAMAIPHSTTAAKPVPAVRILRRRQRRQPVPGPVRRVPEAPVQPGGDALRLATVPGAAAAVLPPDQAGGAAAPVPGDIRCGPAVLPAAAAAGRARGADGGPGSAAADGDVRPAAAAARSLPLQRSCRRCLLLRKLCTVVIM

SEQ ID NO: 167703 - protein, 215 aa, Zea Mays
MGDDDGAKAATGAKQMVRLRELLHKWQHLMALADQKQQREEEEDDHAAGGGVPEEAVAPAIPPLVVRRLRRTETAESVSDDESCGHSPEPPPPPPDVPRGYCPVYVGAEQRRFVIPTGYLAHPVFRLLLEKAEEEFGFQHQGALAIPCETEAFKYILQCVQRHDRRGDDGSHSVQAVVLVPDRDRQSHACISDASPSPLEFLQKRRTKNRQCIVL

SEQ ID NO: 167704 - protein, 51 aa, Zea Mays
MGLLNQLWDDTVAGPRPDSGLGKLRNCSDDAQGRGLDEEAARESQDGRRRR

SEQ ID NO: 167705 - protein, 147 aa, Zea Mays
MGLLNQLWDDTVAGPRPDSGLGKLRKYASFSPSSSSSAAVAAAAAAGSAPPPGAVTRSLTMLRRPAALSVVTSPRSESSSAPSSPSPASGAPDSPFGAAAATTPRGEGWTKKLRGKARMGGGGGDDAPGTPRSPTVYDWVVISSLDL

SEQ ID NO: 167706 - protein, 137 aa, Zea Mays
MGLLNQLWDDTVAGPRPDSGLGKLRKYASFSPSSSSSAAVAAAAAAGSAPPPGAVTRSLTMLRRPAALSVVTSPRSESSSAPSSPSPASGAPDSPFGAGDRLAPPCLFFSPSSCCLCLCVCVCGVSVLASRMNLWDS

SEQ ID NO: 167707 - protein, 298 aa, Zea Mays
MGSEGRAWNGAGMAAGSGYGGGVEAKATTTAVSAAAPAEVPTSAASVDISLPLLKMSPRIIALCKELVEGWSSIDSSLFSIETVSGGITNLLLKVSVKEDNGNESSVTVRLYGPNTDLVIDRKRELQAIPYLSAAGFGARLLGIFENGVVQSFIYARTLSPADMKEPKIAAEIAKELRKFHQVDIPGSKEPQLWNDIFKFLKKAAALKFEDNMKQKRYEKISFREIQDEVQELKDLLDILRAPVVYAHNDLLSGNLMLNDLEGKLYFIDFEYGSYSYRGYDIANHFNEYAGFDCDYNL

SEQ ID NO: 167708 - protein, 324 aa, Zea Mays
MGSEGRAWNGAGMAAGSGYGGGVEAKATTTAVSAAAPAEVPTSAASVDISLPLLKMSPRIIALCKELVEGWSSIDSSLFSIETVSGGITNLLLKVSVKEDNGNESSVTVRLYGPNTDLVIDRKRELQAIPYLSAAGFGARLLGIFENGVVQSFIYARTLSPADMKEPKIAAEIAKELRKFHQVDIPGSKEPQLWNDIFKFLKKAAALKFEDNMKQKRYEKISFREIQDEVQELKDLLDILRAPVVYAHNDLLSGNLMLNDLEATVAMTLQIISMSMQDLIVTIICTQIKMPSITSSGIIYTLIDLVRWMHKIWKYFMWKQTLSD

SEQ ID NO: 167709 - protein, 266 aa, Zea Mays
MGSEGRAWNGAGMAAGSGYGGGVEAKATTTAVSAAAPAEVPTSAASVDISLPLLKMSPRIIALCKELVEGWSSIDSSLFSIETVSGGITNLLLKVSVKEDNGNESSVTVRLYGPNTDLVIDRKRELQAIPYLSAAGFGARLLGIFENGVVQSFIYARTLSPADMKEPKIAAEIAKELRKFHQVDIPGSKEPQLWNDIFKFLKKAAALKFEDNMKQKRYEKISFREIQDEVQELKDLLDILRAPVVYAHNDLLSGNLMLNDLEAIFY

SEQ ID NO: 167710 - protein, 142 aa, Zea Mays
MGSEGRAWNGAGMAAGSGYGGGVEAKATTTAVSAAAPAEVPTSAASVDISLPLLKMSPRIIALCKELVEGWSSIDSSLFSIETVSGGITNLLLKVSVKEDNGNESSVTVRLYGPNTDLVIDRKRELQLQGSGLGYLEYLRME

SEQ ID NO: 167711 - protein, 370 aa, Zea Mays
MGSEGRAWNGAGMAAGSGYGGGVEAKATTTAVSAAAPAEVPTSAASVDISLPLLKMSPRIIALCKELVEGWSSIDSSLFSIETVSGGITNLLLKVSVKEDNGNESSVTVRLYGPNTDLVIDRKRELQAIPYLSAAGFGARLLGIFENGVVQSFIYARTLSPADMKEPKIAAEIAKELRKFHQVDIPGSKEPQLWNDIFKFLKKAAALKFEDNMKQKRYEKISFREIQDEVQELKDLLDILRAPVVYAHNDLLSGNLMLNDLEGKLYFIDFEYGSYSYRGYDIANHFNEYAGFDCDYNLYPDKDAQYHFFRNYLHTDRPSEVDAQDMEVLYVETNTFRLASHIYWALWALIQISSVGLGRAPRPVRQARIQ

SEQ ID NO: 167712 - protein, 230 aa, Zea Mays
MPRGRRRANATKGGVSTVCEPLGPDRPIWFPGSSPPPWLDGSLPGDFGFDPLGLGSEPELLRWFAQAELMHGRWAMLAAAGILVPDLLARWGFIDAGFSWFDAGSREYFADPWTLFVSQMALMGWAEGRRWADYLRPGCVDIEPRFPNRKNPVPDVGYPGGLWFDWANWGRGSPEPVMVLRTKEIKNGRLAMLAFVGFWFQAVYTGQGPIDNLLAHLADPGHCNIFSGRL

SEQ ID NO: 167713 - protein, 236 aa, Zea Mays
MFSSDSRGFALRCCVTSSESYKKDWREDGIVSPVKNQGHCGSCWTFSTTGALEAAYTQATGKAISLSEQQLVDCGFAFNNFGCKGGLPSQAFEYIKYNGGLDTEESYPYQGVNGICQFKAENVGVKVLDSVNITLGAEDELKDAVGLVRPVSVAFEVISGFRLYKTGVYTSDHCGTTPMDVNHAVLAVGYGVENGVPYWLIKNSWGADWGDEGYFKMEMGKNMCGVATCASYPVVA

SEQ ID NO: 167714 - protein, 126 aa, Zea Mays
MISYRKCGLESACKLLAWPSNQSWTHGLETNQALLVRLRLHIPRQLARPSLSLSNSLLTAVLHSTISDVRGAFHPRPLNTSNTMVVLTPRSPTLTKVSTESASSRLRMLESRFWTRLTSPWVLRMN

SEQ ID NO: 167715 - protein, 403 aa, Zea Mays
MLTCIACSKQQFSGGGPPLHEPPEDDDVVGGGAGTSAGAATPSTRHAIKALTAQIKDMALKASGAYRQCKPCAGSSAAASRRHHPYHHRGGSAFGGSDADSGASDRFHYAYRRAGSSAASTPRLRSGGAALSSGDATPSISVRTGTDFPAGDDDDDEMTPEATGGCGGKDDDAKEWVAQVEPGVLITFVSLAEGGNDLKRIRFSREMFNKWEAQRWWAENYDKVMELYNVQKFNQTVPLPATPKSEDESSKEDSPVTPPLDKERLPRTFHRQGGGAMGSSSSDSLEHHSNHYCTGRHHHHHHHGHQCCDSMGLRRSTGLVSSRCPSAMRATRRGSGSKKTSQAYISQSGLYLVGSESFAAFGSAGRSSARCMPGCGGKRTERGYTNNTSEKRRPTPSAARAHE

SEQ ID NO: 167716 - protein, 197 aa, Zea Mays
MFNKWEAQRWWAENYDKVMELYNVQKFNQTVPLPATPKSEDESSKEDSPVTPPLDKERLPRTFHRQGGGAMGSSSSDSLEHHSNHYCTGRHHHHHHHGHQCCDSMGLRRSTGLVSSRCPSAMRATRRGSGSKKTSQAYISQSGLYLVGSESFAAFGSAGRSSARCMPGCGGKRTERGYTNNTSEKRRPTPSAARAHE

SEQ ID NO: 167717 - protein, 295 aa, Zea Mays
MSEQDGQHVAASTPDTAIESFSQLPFVRPKPPQPASTSSASSIRLFGFKVPPDAAATSSSTGTSDATAASATVAGQAAVSGAGAGDGGGGGRKFECHYCRRNFPTSQALGGHQNAHKRERQHAKRAQCQSAMAMHHAHHYPDHTHAYPAFTSYHHQFGMARYEPPPHYPSWSSHLPHAAPPLVPRYYGGSGSLSQPINGSPVPAAALWRVPAAVSVAAPLVRQERPTPLSLCGHDEEALTGARRGDISADAGQGGSRSSSTSSSTSSRHQPRRAGAAENRENLIQPRMEARRASR

SEQ ID NO: 167718 - protein, 379 aa, Zea Mays
MGKPFDVELGGGAGGLEIAGAGGGGPWGGRVFGAIGRAVSFRCVFVLLLAAGVLIPVLFLLVPSRQQGYLSDDHDVLAAEIKVGFTLEKPVSFLTSHIDKLGNDIFEDIGVPNSKILGNLTELKDQLKLGLNLRSYEKIYFQFRNEIGSSVEAPATIVASVLDGSSNLLPDRLRQLAKLIREPDARNLGLNHSVFGKVKGVQLSSYLQHKISGLSPSPSPAPSPSQSPSPSMPTSLSPYPASSLPGPALAPSWSRHPCFPCFRCNPSPAGSSTVKPPCIVRDPRLPPLMHSPKPPIMPSPPKYLPPADPPVPSHVVPPRPLPNPNHFPKAVSRPNSQMMPIPSPSRPVSQHWKAPRKKENSRTSNFSPIAPSPYALLHT

SEQ ID NO: 167719 - protein, 428 aa, Zea Mays
MGKPFDVELGGGAGGLEIAGAGGGGPWGGRVFGAIGRAVSFRCVFVLLLAAGVLIPVLFLLVPSRQQGYLSDDHDVLAAEIKVGFTLEKPVSFLTSHIDKLGNDIFEDIGVPNSKVSIVSMHPLTSKYFTHIVFGVLPYPKDASISLPALSVLRSSLIEMMLQQILGNLTELKDQLKLGLNLRSYEKIYFQFRNEIGSSVEAPATIVASVLDGSSNLLPDRLRQLAKLIREPDARNLGLNHSVFGKVKGVQLSSYLQHKISGLSPSPSPAPSPSQSPSPSMPTSLSPYPASSLPGPALAPSWSRHPCFPCFRCNPSPAGSSTVKPPCIVRDPRLPPLMHSPKPPIMPSPPKYLPPADPPVPSHVVPPRPLPNPNHFPKAVSRPNSQMMPIPSPSRPVSQHWKAPRKKENSRTSNFSPIAPSPYALLHT

SEQ ID NO: 167720 - protein, 99 aa, Zea Mays
MVIVLAESTISSIAFKQYLGLKSNLVEGGISDLSCKLTKSMGKSAATLYLCLYVLLLRETRPWLLFVGLLLPLCLTTCFARSPFSSGNGDLGRVLLTAC

SEQ ID NO: 167721 - protein, 312 aa, Zea Mays
MDRRTFFILCEMLRDVGGLKATRNMTIEEIVAHFLYTLAHHLKNRTIGRFFFRSGETVSRQFNLCLLAVLKLQHLLLKTPEPIPENSTDNTWKNFKNCLGALDGTAIKNNPDAKGLYGVSFPYYDELSMVYSKDMATGEGAEDMTDAVQNLEEELVRVNANDEEDGEDMTSVETPRRSVDSTSSSSKKRKKEWKGKKTSSSDPLLDVFNEVSGDLKVATMSIGKMAQAMDREASNQEKARDEDPQQKLREKAINEVRRLEFTGSEVIKAAGVFVRMPDQMGMLFALPEPLRREYIVDMLRDEAARRERERSK

SEQ ID NO: 167722 - protein, 408 aa, Zea Mays
MRGRMDLLPRLLLRRHVHRRAKPASPSPPPLPPNPPRPPQKPEPVSIHGETWHDSYAWMGALSDAAAMRHMDLHMEAEEKYAEACLAACGADRLARKLQLEMASCLASDSCTPPVRWGPWLYYRRADEGKQYPVLCRRSAALHSEFVSYSDPSAGFDFTAGKRIEQKLVDYNKEAERFGGYSYEELSEVSPDHRFIAYTMYDKDKDSFTLMVRDLVTGTLHDKPCADRVSNISWAMDGKALVYIVTNEERRPYRLFCSMIGSNKDAILMLEEPDENIFLNIRHTKDFRYITLNVFSDTHSKVYLINASNPLSQMTLVWEGESQVHCIVEHHRGHLYLFTDAAREGVPVDSHYIMQSVVESSGPNSWKVQIIHLLCYVDFFLNPCFLHIQVQSLCDYYTEALLPKIIYF

SEQ ID NO: 167723 - protein, 389 aa, Zea Mays
MRGRMDLLPRLLLRRHVHRRAKPASPSPPPLPPNPPRPPQKPEPVSIHGETWHDSYAWMGALSDAAAMRHMDLHMEAEEKYAEACLAACGADRLARKLQLEMASCLASDSCTPPVRWGPWLYYRRADEGKQYPVLCRRSAALHSEFVSYSDPSAGFDFTAGKRIEQKLVDYNKEAERFGGYSYEELSEVSPDHRFIAYTIHTKDFRYITLNVFSDTHSKVYLINASNPLSQMTLVWEGESQVHCIVEHHRGHLYLFTDAAREGVPVDSHYIMQSVVESSGPNSWKNVLVEEPGVILEDVDFCDTHMVLTLRQGRKLRLCSVKLPLTEDIKVPTHLSDLRPIDLPLPSDVCQIVSGPNYDYYSSTMRFTISSPVMPDAVVDYNLLNGQCK

SEQ ID NO: 167724 - protein, 458 aa, Zea Mays
MAFSFASPAASNPFQTPATPNPFQTPAPATSQAPSLSPSPFQFSFQQQPQPQQQVAPAAQPPQPQPQPQPQKLMLYTTDMKSAGYSTKWEELHAESQKALLQIEDKIRDYKDECERLDQCSRLYDSSISNANFELDASRIAQELGGTTTVMEREKASIQELMNVVNEMMWNTEFGIRSYLMLRPRFTRPSAGVANGGSSNPSAGAPPNQPVVDFYSGVPKRPSIFMQRTVNKFECYLAECCKWIGELEQLVQMETNKRSSDSLESLPKVMSNVHDYFIYVASKVENLHQHVESMKTEYLNEQRRTGNGSDPFLEANRREAAKQEAAARRVHPTLHLPTPAQPTAQIAAPATSQPQQPSFPSAATSSSAFSTFSTPASAPSSSSLFATPTTPAPSGNLFGAPGSAQLTTPFGTPSTPTLASTPAPGFGTSATSNLGGATASGSSFGGASKGRSKPRGRR

SEQ ID NO: 167725 - protein, 319 aa, Zea Mays
MEREKASIQELMNVVNEMMWNTEFGIRSYLMLRPRFTRPSAGVANGGSSNPSAGAPPNQPVVDFYSGVPKRPSIFMQRTVNKFECYLAECCKWIGELEQLVQMETNKRSSDSLESLPKVMSNVHDYFIYVASKVENLHQHVESMKTEYLNEQRRTGNGSDPFLEANRREAAKQEAAARRVHPTLHLPTPAQPTAQIAAPATSQPQQPSFPSAATSSSAFSTFSTPASAPSSSSLFATPTTPAPSGNLFGAPGSAQLTTPFGTPSTPTLASTPAPGFGTSATSNLGGTSLFSTPFGGGATASGSSFGGASKGRSKPRGRR

SEQ ID NO: 167726 - protein, 101 aa, Zea Mays
MLTSIDIESIGLFKLHCYMVTEYEASQPIHQQNQHAWQRVKLWLFVAYVVSFVCLAGSVGLLVQDALTNKGPSVWTGVAGVLQCVLVLISGLVYWTCHSED

SEQ ID NO: 167727 - protein, 211 aa, Zea Mays
MARRRRDPVAVAARPGQFLDEITASRTQRLISNASTAFAIMSPSRAKRKVAQIREQALSAAVGDVVARTMSAVAGRYDAHASVDDQLERLATLLVMVHSAVDEAERVHVANWWLRRWLWRLRYAALDGDEVLLSMRQQRAAEAAEATAMTQSAGGRLWNAATRVVVRSAKSLLVSSRSGGRGGGPNMAQYCLSNTLGWPTKRVGHPSQPPP

SEQ ID NO: 167728 - protein, 128 aa, Zea Mays
MCPLCRGEVKGYTLVEPARKQLNRKRRSCMEDGCSYMGTYRELCKHVQKKHPTANPRAVDPLHAYRWKRLLFRSSLHDMICSTTSEAMRRFCSHMLQIEEVVAALREGGDHRGATNDDQLIHDLLTSR

SEQ ID NO: 167729 - protein, 145 aa, Zea Mays
MQLVQKEASEDPDAIELMCPLCRGEVKGYTLVEPARKQLNRKRRSCMEDGCSYMGTYRELCKHVQKKHPTANPRAVDPLHAYRWKRLLFRSSLHDMICSTTSEAMRRFCSHMLQIEEVVAALREGGDHRGATNDDQLIHDLLTSR

SEQ ID NO: 167730 - protein, 83 aa, Zea Mays
MDHTFTQSAIPFQDTAKSSGTRRKHGLLVRVTSWAPCWVLEWNHAPLLLLFGTVLVVATYICFTAASVCSSFRKLRCWFGLET

SEQ ID NO: 167731 - protein, 272 aa, Zea Mays
MDELLRSIWTAEETQAKASASIAGASAGMPPTPMQRQGSSLTLPRMLSTKTVDEAWRNLVRDEPPQGADGGGHQPPHRQSTLGEMTLEEFLVRAGAVKENPASAPPAPPPMVPPRPVPVAPKSSAFFGDLPGADDDAATAAVGFAPVGMVDLALIPPRAAGMGGSAMAVQTANDSGEKAWRRSGESGGEAAAEDDQEQGVRREVPSAQTGLYNGVRSRSSETQRAESGTGEETGRNYGNAEQRGIRNVEGSIRTEETAVLAKNVDGPLVTIA

SEQ ID NO: 167732 - protein, 509 aa, Zea Mays
MIPFSVLAGALVLLVGVADALPGYQISCGATSDKVAGNVTWVADGAFIHAGKVAELDSPGVMPMLSSLRYFPPDASSAAKYCYAVPAAMHARYLVRTTYYYGGFDGGGAPPVFDQIIDGTRWSAVDTAGGYARGLATYYEAVVEAAGKELSVCLARSAATAPGRSPFISALEVVPLEESVYSAVNFTAYALSTVARHSFGHNGSIIGYPDDRFNRYWEPYSDGGIPVVESQASVATEAFWNKPPEAVFRRGLTASRDKSLELQWPPAPLPAASYYLALYFQDNRGPSALSWRVFDVAVNGQPFFAGLNVSTAGCMVYGVDWPLSGQTRITLTPALESPVGPLINAAELMMVVPLGGRTHPRDVIGMQELARGFTNPPSDWRGDPCLPQGNSWTGVTCNQDPLARVTGLVGGSISNNIANLTAISSIWLVGNNLTGPIPDLNHLLHVVSLHLEDNGLTGPLPESLGNLTRLEELSVQNNSLQGTIPSSIRNRAAVDPRFRFQYTPGNNLS

SEQ ID NO: 167733 - protein, 85 aa, Zea Mays
MAIKNMTVDEFKEWLRRFDTDQDGRISRDELRRALRAIRSRFTGWRSRQGISYADTDGDGYIDDSEVDGLIEFAQKNLGLKIVAY

SEQ ID NO: 167734 - protein, 82 aa, Zea Mays
MAAATATAAVLGCSRLQSDIAGAGIPKKGKVGRSPPAEEVEAFLAAAERGMARRFAVKYNYDVVKDAPMDGGRYEWVRVRPG

SEQ ID NO: 167735 - protein, 58 aa, Zea Mays
MAAATATAAVLGCSRLQSDIAGAGIPKKGKVGRSPPAEEVEAFLAAAERGMARRFAVK

SEQ ID NO: 167736 - protein, 145 aa, Zea Mays
MGLSSSISVQKTLYEVLSVSEDATYDEIRAAYSVQKAWEILRHPTSRADYDKQLQSSRQNIEIIASEVQVGDMIIESTADADTVELSYPCRCGDYFSITSCELSGMGISVSGDGDGEVELQASDSPSASVVLGCGSCSLKIRLVL

SEQ ID NO: 167737 - protein, 87 aa, Zea Mays
MSEERPVPRRESPWGLPEGDTRQPKAHRCNDRAEDVVQACFEGNPFKTVPGPFKLFWQCMRSKPGGISRMDLWFSGRNQPSPIPTCS

SEQ ID NO: 167738 - protein, 94 aa, Zea Mays
MSEERPVPRRESPWGLPEGDTRQPKAHRCNDRAEDVVQACFEGNPFKTVPGPFKLFWQCMRSKPGEEPTEPYTYLQLDPPRRVEVNLEQTGSEP

SEQ ID NO: 167739 - protein, 73 aa, Zea Mays
MIIESTADADTVELSYPCRCGDYFSITSCELSGMGISVSGDGDGEVELQASDSPSASVVLGCGSCSLKIRLVL

SEQ ID NO: 167740 - protein, 747 aa, Zea Mays
MSEFLDLELQDGIRMPWNVIPGTKQETVNCVIPVSAIYTPLKPISDIPVLPYSPLRCRMCRSILNPFSIVDYVAKIWVCSFCFQRNQFPQHYSSISENNLPAELFPQYTTVEYISSTETGPIVPPVFIFVVDTCMIEEEIGYLKSALAQAVELLPDNSLVGFITFGTYVQVHELGFGLLPKSYVFKGTKEVTKEQILEQMCFFAGKKMPTTGVIAGTRDGLSSESISRFLLPASECEFVLNSVIEEIQKDPWPVPADQRASRCTGAALSVAANLLGVCVPGSGARIMAFVGGPSTEGPGPIVSKSLSEPIRSHKDLDKDSAPLYDKAVKFYDQIAKQLVHQGHVLDLFACAVDQVGVAEMKVAIEKTGGIVVLAESFGHSVFKDSLLRIFQSTDDNLGLSFNGILEINCSKDVKVQGIIGPCSSLEKKSPLSSDTVIGQGNTSAWKMCGLDRKTSLCLVYDIAKKDGPDSIAQSANNQFYFQFLTYYQHNEGQMRLRSTTISRRWVSGDNHVEELVAGFDQEAAAAVMARLVSFKMETEVDFDPVRWLDRALIRLCSKFGDYQKETPSSFSLSPRLSIFPQFIFNLRRSQFVQVFNNSPDETAYFRMMLDRENVTNTVVMIQPSLISYSFQSGPEPVLLDATAIASDKILLLDSYFTVVIFHGVTIAQWRNAGYQDQEGHEVFAQLLKAPHEEANLIIKERFPVPRLVVCDQYGSQARFLLAKLNPSVTYNSDNPSPGGDVIFTDDV

SEQ ID NO: 167741 - protein, 880 aa, Zea Mays
MTKGCASFGVLKNPNFSTVGWLLGRPINNFPVRASRFSRSRSRSRSRSRSLRPFAYPVDPAFTRAISCGDNWAIDAAAAVAVLYERCAGVRWSLRQAFVYPSPTTSTIYLQARFLCLTCGSLLQLLYKAAVLKMSEFLDLELQDGIRMPWNVIPGTKQETVNCVIPVSAIYTPLKPISDIPVLPYSPLRCRMCRSILNPFSIVDYVAKIWVCSFCFQRNQFPQHYSSISENNLPAELFPQYTTVEYISSTETGPIVPPVFIFVVDTCMIEEEIGYLKSALAQAVELLPDNSLVGFITFGTYVQVHELGFGLLPKSYVFKGTKEVTKEQILEQMCFFAGKKMPTTGVIAGTRDGLSSESISRFLLPASECEFVLNSVIEEIQKDPWPVPADQRASRCTGAALSVAANLLGVCVPGSGARIMAFVGGPSTEGPGPIVSKSLSEPIRSHKDLDKDSAPLYDKAVKFYDQIAKQLVHQGHVLDLFACAVDQVGVAEMKVAIEKTGGIVVLAESFGHSVFKDSLLRIFQSTDDNLGLSFNGILEINCSKDVKVQGIIGPCSSLEKKSPLSSDTVIGQGNTSAWKMCGLDRKTSLCLVYDIAKKDGPDSIAQSANNQFYFQFLTYYQHNEGQMRLRSTTISRRWVSGDNHVEELVAGFDQEAAAAVMARLVSFKMETEVDFDPVRWLDRALIRLCSKFGDYQKETPSSFSLSPRLSIFPQFIFNLRRSQFVQVFNNSPDETAYFRMMLDRENVTNTVVMIQPSLISYSFQSGPEPVLLDATAIASDKILLLDSYFTVVIFHGVTIAQWRNAGYQDQEGHEVFAQLLKAPHEEANLIIKERFPVPRLVVCDQYGSQARFLLAKLNPSVTYNSDNPSPGGDVIFTDDV

SEQ ID NO: 167742 - protein, 547 aa, Zea Mays
MSEFLDLELQDGIRMPWNVIPGTKQETVNCVIPVSAIYTPLKPISDIPVLPYSPLRCRMCRSILNPFSIVDYVAKIWVCSFCFQRNQFPQHYSSISENNLPAELFPQYTTVEYISSTETGPIVPPVFIFVVDTCMIEEEIGYLKSALAQAVELLPDNSLVGFITFGTYVQVHELGFGLLPKSYVFKGTKEVTKEQILEQMCFFAGKKMPTTGVIAGTRDGLSSESISRFLLPASECEFVLNSVIEEIQKDPWPVPADQRASRCTGAALSVAANLLGVCVPGSGARIMAFVGGPSTEGPGPIVSKSLSEPIRSHKDLDKDSAPLYDKAVKFYDQIAKQLVHQGHVLDLFACAVDQVGVAEMKVAIEKTGGIVVLAESFGHSVFKDSLLRIFQSTDDNLGLSFNGILEINCSKDVKVQGIIGPCSSLEKKSPLSSDTVIGQGNTSAWKMCGLDRKTSLCLVYDIAKKDGPDSIAQSANNQFYFQFLTYYQHNEGQMRLRSTTISRRWVSGDNHVEELVAGFDQEAAAAVMARLVSFKMETEYSRLILTQ

SEQ ID NO: 167743 - protein, 485 aa, Zea Mays
MSEFLDLELQDGIRMPWNVIPGTKQETVNCVIPVSAIYTPLKPISDIPVLPYSPLRCRMCRSILNPFSIVDYVAKIWVCSFCFQRNQFPQHYSSISENNLPAELFPQYTTVEYISSTETGPIVPPVFIFVVDTCMIEEEIGYLKSALAQAVELLPDNSLVGFITFGTYVQVHELGFGLLPKSYVFKGTKEVTKEQILEQMCFFAGKKMPTTGVIAGTRDGLSSESISRFLLPASECEFVLNSVIEEIQKDPWPVPADQRASRCTGAALSVAANLLGVCVPGSGARIMAFVGGPSTEGPGPIVSKSLSEPIRSHKDLDKDSAPLYDKAVKFYDQIAKQLVHQGHVLDLFACAVDQVGVAEMKVAIEKTGGIVVLAESFGHSVFKDSLLRIFQSTDDNLGLSFNGILEINCSKDVKVQGIIGPCSSLEKKSPLSSDTVIGQGNTSAWKMCGLDRKTSLCLVYDIAKKDGPDSIAQSANNQFYFQFLT

SEQ ID NO: 167744 - protein, 632 aa, Zea Mays
MHTAPPMNGRSRRPAAARGAKAAPKSDSRVMEKDPRKAATPAKGPANAGTRVTMNRIQSRERKLALQQDVDKLKKKLRHEENVHRALERAFTRPLGALPRLPPYLPSQTLALLAEVAVLEEEVVRLEEQVVSFRQGIYQEAIIFSSTKNAQLPDGQVPVPAQLVPSYPVLNSEVSPATVSQGPPDHPPGARPSPHSGVANGKQTPRNPVATSPSQDDRSGAGKENQSCSNTPSTSSRQSPSQQKTPKCRATPPDRRRVTPAQMVFASSMQTSPAVAPDRKRPADAAAGTGSNSDNVTTSHDDASSSVPNKVSEELLRCLLAIFSQMGGSAAGGGRGLGDEDQQALSPSVSGSSESSASSEADAYPQDPYGILELGARDIGAYKRFHVVDAASFDGNGDTPLVRRRLKALLRRLSSVDLAGLSHQQKLAFWINVYNSCMMNAFLEHGIPTTPQMLVAMMPKATVSVGGRTHSAMSIEHFILRLPYSAKQVKVSREGAKCDDGDVTAARGAFGLEWPEPLVTFALSCGSWSSPAVRVYTAARVEEELEAAKREYLQAAAGVWAAGRLAVPKLLHWYLLDFAKDVDALMDWVCLQLPPELRQEAVRAVEVGRRAGAGGRVRVLPYEFRFRYLLAS

SEQ ID NO: 167745 - protein, 279 aa, Zea Mays
MHTAPPMNGRSRRPAAARGAKAAPKSDSRVMEKDPRKAATPAKGPANAGTRVTMNRIQSRERKLALQQDVDKLKKKLRHEENVHRALERAFTRPLGALPRLPPYLPSQTLALLAEVAVLEEEVVRLEEQVVSFRQGIYQEAIIFSSTKNAQLPDGQVPVPAQLVPSYPVLNSEVSPATVSQGPPDHPPGARPSPHSGVANGKQTPRNPVATSPSQDDRSGAGKENQSCSNTPSTSSRQSPSQQKTPKCRATPPDRRRVTPAQCVDGVRVVHADKPCCCA

SEQ ID NO: 167746 - protein, 602 aa, Zea Mays
MEKDPRKAATPAKGPANAGTRVTMNRIQSRERKLALQQDVDKLKKKLRHEENVHRALERAFTRPLGALPRLPPYLPSQTLALLAEVAVLEEEVVRLEEQVVSFRQGIYQEAIIFSSTKNAQLPDGQVPVPAQLVPSYPVLNSEVSPATVSQGPPDHPPGARPSPHSGVANGKQTPRNPVATSPSQDDRSGAGKENQSCSNTPSTSSRQSPSQQKTPKCRATPPDRRRVTPAQMVFASSMQTSPAVAPDRKRPADAAAGTGSNSDNVTTSHDDASSSVPNKVSEELLRCLLAIFSQMGGSAAGGGRGLGDEDQQALSPSVSGSSESSASSEADAYPQDPYGILELGARDIGAYKRFHVVDAASFDGNGDTPLVRRRLKALLRRLSSVDLAGLSHQQKLAFWINVYNSCMMNAFLEHGIPTTPQMLVAMMPKATVSVGGRTHSAMSIEHFILRLPYSAKQVKVSREGAKCDDGDVTAARGAFGLEWPEPLVTFALSCGSWSSPAVRVYTAARVEEELEAAKREYLQAAAGVWAAGRLAVPKLLHWYLLDFAKDVDALMDWVCLQLPPELRQEAVRAVEVGRRAGAGGRVRVLPYEFRFRYLLAS

SEQ ID NO: 167747 - protein, 594 aa, Zea Mays
MEKDPRKAATPAKGPANAGTRVTMNRIQSRERKLALQQDVDKLKKKLRHEENVHRALERAFTRPLGALPRLPPYLPSQTLALLAEVAVLEEEVVRLEEQVVSFRQGIYQEAIIFSSTKNAQLPDGQVPVPAQLVPSYPVLNSEVSPATVSQGPPDHPPGARPSPHSGVANGKQTPRNPVATSPSQDDRSGAGKENQSCSNTPSTSSRQSPSQQKTPKCRATPPDRRRVTPAQTSPAVAPDRKRPADAAAGTGSNSDNVTTSHDDASSSVPNKVSEELLRCLLAIFSQMGGSAAGGGRGLGDEDQQALSPSVSGSSESSASSEADAYPQDPYGILELGARDIGAYKRFHVVDAASFDGNGDTPLVRRRLKALLRRLSSVDLAGLSHQQKLAFWINVYNSCMMNAFLEHGIPTTPQMLVAMMPKATVSVGGRTHSAMSIEHFILRLPYSAKQVKVSREGAKCDDGDVTAARGAFGLEWPEPLVTFALSCGSWSSPAVRVYTAARVEEELEAAKREYLQAAAGVWAAGRLAVPKLLHWYLLDFAKDVDALMDWVCLQLPPELRQEAVRAVEVGRRAGAGGRVRVLPYEFRFRYLLAS

SEQ ID NO: 167748 - protein, 466 aa, Zea Mays
MHTAPPMNGRSRRPAAARGAKAAPKSDSRVMEKDPRKAATPAKGPANAGTRVTMNRIQSRERKLALQQDVDKLKKKLRHEENVHRALERAFTRPLGALPRLPPYLPSQTLALLAEVAVLEEEVVRLEEQVVSFRQGIYQEAIIFSSTKNAQLPDGQVPVPAQLVPSYPVLNSEVSPATVSQGPPDHPPGARPSPHSGVANGKQTPRNPVATSPSQDDRSGAGKENQSCSNTPSTSSRQSPSQQKTPKCRATPPDRRRVTPAQTSPAVAPDRKRPADAAAGTGSNSDNVTTSHDDASSSVPNKVSEELLRCLLAIFSQMGGSAAGGGRGLGDEDQQALSPSVSGSSESSASSEADAYPQDPYGILELGARDIGAYKRFHVVDAASFDGNGDTPLVRRRLKALLRRLSSVDLAGLSHQQKLAFWINVYNSCMMNVSHRAVTFQSWVFPLLVCFFLKEEDSKIRNSVCY

SEQ ID NO: 167749 - protein, 423 aa, Zea Mays
MASISGAAAPPSSAVCRLRLRRHLLLRPSHLRLRAPHSIADLSRSSNSAPSPARPALGSGPENGSGGVRAVEKDPIKLWERYVEWLYQHKELGIFVDVSRMGFTEEFLRQMEPRMQQAFVDMRELEKGAIANPDEGRMVGHYWLRDPALAPNSFLRNKIETALDRILAFSQDVVSGKILSPSGRFTSILSIGIGGSALGPQFVAEALAPDNPPLKIRFIDNTDPAGIDHQIAQLGPELATTLVIVISKSGGTPETRNGLLEVQKAFRDAGLQFSKQGVAITQENSLLDNTARIEGWLARFPMFDWVGGRTSEMSAVGLLPAALQGIDIKEMLVGAALMDEETRNTVVKANPAALLALCWYWASEGIGKKDMVVLPYKDSLLLLSRYLQQLVMESLGKEFDLDGNRVNQGLTVYGNKGSTDQHA

SEQ ID NO: 167750 - protein, 539 aa, Zea Mays
MASISGAAAPPSSAVCRLRLRRHLLLRPSHLRLRAPHSIADLSRSSNSAPSPARPALGSGPENGSGGVRAVEKDPIKLWERYVEWLYQHKELGIFVDVSRMGFTEEFLRQMEPRMQQAFVDMRELEKGAIANPDEGRMVGHYWLRDPALAPNSFLRNKIETALDRILAFSQDVVSGKILSPSGRFTSILSIGIGGSALGPQFVAEALAPDNPPLKIRFIDNTDPAGIDHQIAQLGPELATTLVIVISKSGGTPETRNGLLEVQKAFRDAGLQFSKQGVAITQENSLLDNTARIEGWLARFPMFDWVGGRTSEMSAVGLLPAALQGIDIKEMLVGAALMDEETRNTVVKANPAALLALCWYWASEGIGKKDMVVLPYKDSLLLLSRYLQQLVMESLGKEFDLDGNRVNQGLTVYGNKGSTDQHAPAGHDWELEPGVTCGDYLFGMLQGTRSALYANDRESISVTVQEVTPRAVGALIALYERAVGIYASLVNINAYHQPGVEAGKKAAGEVLALQKRVLTVLKEAMYGTSDLCSFCFSVK

SEQ ID NO: 167751 - protein, 531 aa, Zea Mays
MASISGAAAPPSSAVCRLRLRRHLLLRPSHLRLRAPHSIADLSRSSNSAPSPARPALGSGPENGSGGVRAVEKDPIKLWERYVEWLYQHKELGIFVDVSRMGFTEEFLRQMEPRMQQAFVDMRELEKGAIANPDEGRMVGHYWLRDPALAPNSFLRNKIETALDRILAFSQDVVSGKILSPSGRFTSILSIGIGGSALGPQFVAEALAPDNPPLKIRFIDNTDPAGIDHQIAQLGPELATTLVIVISKSGGTPETRNGLLEVQKAFRDAGLQFSKQGVAITQENSLLDNTARIEGWLARFPMFDWVGGRTSEMSAVGLLPAALQGIDIKEMLVGAALMDEETRNTVVKANPAALLALCWYWASEGIGKKDMVVLPYKDSLLLLSRYLQQLVMESLGKEFDLDGNRVNQGLTVYGNKGSTDQHAYIQQLREGVQNFFVTFIEVLRDRPAGHDWELEPGVTCGDYLFGMLQGTRSALYANDRESISVTVQEVTPRAVGALIALYERAVGIYASLVLRLGKRQQEKYWPFRKGF

SEQ ID NO: 167752 - protein, 319 aa, Zea Mays
MPPPTLHAGSYKRGLTSRHTARSTSLTPSLAPPPLLAFLGRIKNTSRKEKRRSPIRARQPISICTITVRAPDYQNPAEGNGAEQLRDGGFHPAVRRGQQQHPGPRSGGPGGGGGGAAGAEQDARGAQRGLPRAVRGMRRRFRGGGGGAHAAGGLRREAARRGHGSPRPDGRHRLDLEGSRVLRFRPSHRLLGRQLPGPLPLALPASGRQVLDDAAAVRGVLVPGCQDGGDLRSSVSGPAGRGRAVRVRGEDGAEDGAAGPQHAQMEDASGHPLLVHRLLPPPAQRRRCAEQTRPPPGATRTATAPRLFAARGGRLADDD

SEQ ID NO: 167753 - protein, 393 aa, Zea Mays
MPPPTLHAGSYKRGLTSRHTARSTSLTPSLAPPPLLAFLGRIKNTSRKEKRRSPIRARQPISICTITVRAPDYQNPAEGNGAEQLRDGGFHPAVRRGQQQHPGPRSGGPGGGGGGAAGAEQDARGAQRGLPRAVRGMRRRFRGGGGGAHAAGGLRREAARRGHGSPRPDGRHRLDLEGSRVLRFRPSHRLLGRQLPGPLPLALPASGRQVLDDAAAVRGVLVPGCQDGGDLRSSVSGPAGRGRAVRVRGEDGAEDGAAGPQHAQMEDASGHPLLVHRLLPPPAQRRRCAEQTRRPPIRGAHPARRERNVLPGFQALGGRRGCRRRRGRRGARRGYRQGLHPPRARGTACACPRPLLASLVVRFNAMRCNTLSVYRMDPNPSRRFAAVLDLCSY

SEQ ID NO: 167754 - protein, 54 aa, Zea Mays
MNKDGNGAGRAENVPFSKTNSLSCLGSLNRDKSIPISVPWRTLHPKNCSLIQGQ

SEQ ID NO: 167755 - protein, 111 aa, Zea Mays
MDERSTTPPSQPNQSVRATVLHCSNTNEQMPPVLLNRMPNGIWIFGWKKKNGEKKKKEGINGSTRITNKLQHGAVQISLLSVEGGGGGEHCHGQGRELEARHCSRVGEREA

SEQ ID NO: 167756 - protein, 268 aa, Zea Mays
MELHLATIAHRPPLPVPARGHHLRRRLHHLPAPLSFQNTYSPSLSSPHHHRLSPTLRRHLRLPLLASQAPNSNPEPEPEPEPTGAKLLPLVISIAIGLAVRFLAPRPVEVSPQAWQLLSIFLSTIAGLVLGPLPVGAWAFLGLTAAVATRTLPFTAAFSAFTNEVIWLIVISFFFARGFVKTGLGDRIATYFVKWLGSSTLGLSYGLTLSEACIAPAMPSTTARAGGVFLPIIKSLSLSAESKPNHPSSRKLGSYLVMTQFQGCYWCV

SEQ ID NO: 167757 - protein, 367 aa, Zea Mays
MELHLATIAHRPPLPVPARGHHLRRRLHHLPAPLSFQNTYSPSLSSPHHHRLSPTLRRHLRLPLLASQAPNSNPEPEPEPEPTGAKLLPLVISIAIGLAVRFLAPRPVEVSPQAWQLLSIFLSTIAGLVLGPLPVGAWAFLGLTAAVATRTLPFTAAFSAFTNEVIWLIVISFFFARGFVKTGLGDRIATYFVKWLGSSTLGLSYGLTLSEACIAPAMPSTTARAGGVFLPIIKSLSLSAESKPNHPSSRKLGSYLVMTQFQASGNSSALFLTAAAQNLLCLKLAEELGVIIANPWVSWFKAASLPALVSLLATPYLLYKIFPPETKDTPDAPALAEKKLKLMGPVTKNESVMIGTMILAVSLWVFG

SEQ ID NO: 167758 - protein, 87 aa, Zea Mays
MDETPASQARGTDAKATRAKMSMGSQGGSRPLQLQEMACWRVVAAAGGQADMELSVGDGAVASGMEEESRGSGGGAAVSESSKAGDG

SEQ ID NO: 167759 - protein, 118 aa, Zea Mays
MPGVESMGHGSQFTYFLTAPMQAFCQLAGITSDIDTDTYANAENILFSALEEYEGILCTSVGLNNVWGQILPDPFLRRLILRFIFCRAVLFYFHSDEHEHLPTCLPSLPESVSQTQRP

SEQ ID NO: 167760 - protein, 200 aa, Zea Mays
MKNAARLDSEIIYDRDFDYDYFGFKTLERSYLLKLDGKVVERLQQMLMKVSLGIHKEDIESAIRTYHLMSQRWFTHASPMLFSMLARRGPNCFLICMKDDIIEGIYETLKECAVISKSAGGIGVSVHNIRATESYIRGTNGTSNGIVLMLRVFNDTARYVDQGGGKRKVHFAVYLEPWHADIFEFFDLRKNPRKFVFLGS

SEQ ID NO: 167761 - protein, 77 aa, Zea Mays
MPIKRSRSATPAGKRICKNLQEHAANREEDLHERCQPGDRHHRRQPSIVVTQIYAVRIRVIRRASWYLESQVPGKLC

SEQ ID NO: 167762 - protein, 76 aa, Zea Mays
MPIKRSRSATPAGKRICKNLQEHAANREEDLHERCQPGDRHHRRQPSIVVTQIYVRIRVIRRASWYLESQVPGKLC

SEQ ID NO: 167763 - protein, 127 aa, Zea Mays
MCREAVTQEHGQKINRYQAILAARLKAKFFSKKAFDRGNIFESETIVGGETIRSSRWPCTRSFANPEFFSRDKNSHEKGNSPSSAADFSAKNNSPPLAGEASPKNNASALVTENNLTTGNRQQSKKN

SEQ ID NO: 167764 - protein, 110 aa, Zea Mays
MRCAGVLLPLLLLSLSAASTAEAHKERLGDAAAALSTGRRWLTGRKTLAAPGRDEVVEGAKKSTGANTAHVHGAETTVEVAVVGRRSRTAGLVPFCADYRTPRTHPPRNN

SEQ ID NO: 167765 - protein, 332 aa, Zea Mays
MASHGIHGGAGYTFFKTTYWEKHIKARFIFVLRRKKELIEFQTSVLQFLLKKQSFMLSVPEAVAVVRLLRIEKGKAFVDLLNEKANDSGDKEIGYVQRTLGFSTRYLEDRDIRLVTVIVAGTVRWKRYLDYLIMSLCSEEKVFREMEPLLLQILRIGFFEILKLDVPAYAAVDENVRLAKVALRPGAGNMVNAILRKLVLLKETDSLPLPKIEGDDRAQARALSIIYSHPVWMVRRWIRFHGKDEALRLMNWNNSDPHFSLRVNTSKGYTRADLVKRLESLQVHYEESIMDEFVRIREGMQQVLKAGLLKDGICAVQDESAGKTANYRPKWV

SEQ ID NO: 167766 - protein, 526 aa, Zea Mays
MASHGIHGGAGYTFFKTTYWEKHIKARFIFVLRRKKELIEFQTSVLQFLLKKQSFMLSVPEAVAVVRLLRIEKGKAFVDLLNEKANDSGDKEIGYVQRTLGFSTRYLEDRDIRLVTVIVAGTVRWKRYLDYLIMSLCSEEKVFREMEPLLLQILRIGFFEILKLDVPAYAAVDENVRLAKVALRPGAGNMVNAILRKLVLLKETDSLPLPKIEGDDRAQARALSIIYSHPVWMVRRWIRFHGKDEALRLMNWNNSDPHFSLRVNTSKGYTRADLVKRLESLQVHYEESIMDEFVRIREGMQQVLKAGLLKDGICAVQDESAGLVVSVVDPQPGETIVDCCAAPGGKTLFMASRLSGEGKIWALDINKGRLRILMDAAKLHGLDDMITDIHADLRLYAKETTVKYDKVLLDAPCSGLGVLSKRADLRWNRQFENLEELMCLQDELLDSASMLVKPGGILIYSTCSIDPEENEERITAFVQRHPEFALQSVCGYVPREFITDEGFYSSNPTKHSMDGAFAARLVRSTH

SEQ ID NO: 167767 - protein, 381 aa, Zea Mays
MEPLLLQILRIGFFEILKLDVPAYAAVDENVRLAKVALRPGAGNMVNAILRKLVLLKETDSLPLPKIEGDDRAQARALSIIYSHPVWMVRRWIRFHGKDEALRLMNWNNSDPHFSLRVNTSKGYTRADLVKRLESLQVHYEESIMDEFVRIREGMQQVLKAGLLKDGICAVQDESAGLVVSVVDPQPGETIVDCCAAPGGKTLFMASRLSGEGKIWALDINKGRLRILMDAAKLHGLDDMITDIHADLRLYAKETTVKYDKVLLDAPCSGLGVLSKRADLRWNRQFENLEELMCLQDELLDSASMLVKPGGILIYSTCSIDPEENEERITAFVQRHPEFALQSVCGYVPREFITDEGFYSSNPTKHSMDGAFAARLVRSTH

SEQ ID NO: 167768 - protein, 286 aa, Zea Mays
MSKDTFINLDVSHHRAVAVVRLLRIEKGKAFVDLLNEKANDSGDKEIGYVQRTLGFSTRYLEDRDIRLVTVIVAGTVRWKRYLDYLIMSLCSEEKVFREMEPLLLQILRIGFFEILKLDVPAYAAVDENVRLAKVALRPGAGNMVNAILRKLVLLKETDSLPLPKIEGDDRAQARALSIIYSHPVWMVRRWIRFHGKDEALRLMNWNNSDPHFSLRVNTSKGYTRADLVKRLESLQVHYEESIMDEFVRIREGMQQVLKAGLLKDGICAVQDESAGKTANYRPKWV

SEQ ID NO: 167769 - protein, 481 aa, Zea Mays
MSKDTFINLDVSHHRAAVAVVRLLRIEKGKAFVDLLNEKANDSGDKEIGYVQRTLGFSTRYLEDRDIRLVTVIVAGTVRWKRYLDYLIMSLCSEEKVFREMEPLLLQILRIGFFEILKLDVPAYAAVDENVRLAKVALRPGAGNMVNAILRKLVLLKETDSLPLPKIEGDDRAQARALSIIYSHPVWMVRRWIRFHGKDEALRLMNWNNSDPHFSLRVNTSKGYTRADLVKRLESLQVHYEESIMDEFVRIREGMQQVLKAGLLKDGICAVQDESAGLVVSVVDPQPGETIVDCCAAPGGKTLFMASRLSGEGKIWALDINKGRLRILMDAAKLHGLDDMITDIHADLRLYAKETTVKYDKVLLDAPCSGLGVLSKRADLRWNRQFENLEELMCLQDELLDSASMLVKPGGILIYSTCSIDPEENEERITAFVQRHPEFALQSVCGYVPREFITDEGFYSSNPTKHSMDGAFAARLVRSTH

SEQ ID NO: 167770 - protein, 406 aa, Zea Mays
MASHGIHGGAGYTFFKTTYWEKHIKARFIFVLRRKKELIEFQTSVLQFLLKKQVTVIVAGTVRWKRYLDYLIMSLCSEEKVFREMEPLLLQILRIGFFEILKLDVPAYAAVDENVRLAKVALRPGAGNMVNAILRKLVLLKETDSLPLPKIEGDDRAQARALSIIYSHPVWMVRRWIRFHGKDEALRLMNWNNSDPHFSLRVNTSKGYTRADLVKRLESLQVHYEESIMDEFVRIREGMQISSNKIVKMDGSMLLIALDVILTVITVGLVVSVVDPQPGETIVDCCAAPGGKTLFMASRLSGEGKIWALDINKGRLRILMDAAKLHGLDDMITDIHADLRLYAKETTVKYDKVLLDAPCSGLGVLSKRADLRWNRQFENLEELMCLQDELLDSASMWYTNLQYVFD

SEQ ID NO: 167771 - protein, 255 aa, Zea Mays
MSLRTQCACSCMLQPYSASSSSITLSMRATPTHQRRARPPPPSCLATRHLRRRRAPAGINRVPNLGSAVSTKKAGMSKDTFINLDVSHHRAVAVVRLLRIEKGKAFVDLLNEKANDSGDKEIGYVQRTLGFSTRYLEDRDIRLVTVIVAGTVRWKRYLDYLIMSLCSEEKVFREMEPLLLQILRIGFFEILKLDVPAYAAVDENVRLAKVALRPGAGNMVNAILRKLVLLKETDSLPLPKIEVDGETMDTVSWKR

SEQ ID NO: 167772 - protein, 555 aa, Zea Mays
MSLRTQCACSCMLQPYSASSSSITLSMRATPTHQRRARPPPPSCLATRHLRRRRAPAGINRVPNLGSAVSTKKAGMSKDTFINLDVSHHRAVAVVRLLRIEKGKAFVDLLNEKANDSGDKEIGYVQRTLGFSTRYLEDRDIRLVTVIVAGTVRWKRYLDYLIMSLCSEEKVFREMEPLLLQILRIGFFEILKLDVPAYAAVDENVRLAKVALRPGAGNMVNAILRKLVLLKETDSLPLPKIEGDDRAQARALSIIYSHPVWMVRRWIRFHGKDEALRLMNWNNSDPHFSLRVNTSKGYTRADLVKRLESLQVHYEESIMDEFVRIREGMQQVLKAGLLKDGICAVQDESAGLVVSVVDPQPGETIVDCCAAPGGKTLFMASRLSGEGKIWALDINKGRLRILMDAAKLHGLDDMITDIHADLRLYAKETTVKYDKVLLDAPCSGLGVLSKRADLRWNRQFENLEELMCLQDELLDSASMLVKPGGILIYSTCSIDPEENEERITAFVQRHPEFALQSVCGYVPREFITDEGFYSSNPTKHSMDGAFAARLVRSTH

SEQ ID NO: 167773 - protein, 294 aa, Zea Mays
MVRRWIRFHGKDEALRLMNWNNSDPHFSLRVNTSKGYTRADLVKRLESLQVHYEESIMDEFVRIREGMQQVLKAGLLKDGICAVQDESAGLVVSVVDPQPGETIVDCCAAPGGKTLFMASRLSGEGKIWALDINKGRLRILMDAAKLHGLDDMITDIHADLRLYAKETTVKYDKVLLDAPCSGLGVLSKRADLRWNRQFENLEELMCLQDELLDSASMLVKPGGILIYSTCSIDPEENEERITAFVQRHPEFALQSVCGYVPREFITDEGFYSSNPTKHSMDGAFAARLVRSTH

SEQ ID NO: 167774 - protein, 361 aa, Zea Mays
MSLRTQCACSCMLQPYSASSSSITLSMRATPTHQRRARPPPPSCLATRHLRRRRAPAGINRVPNLGSAVSTKKAGMSKDTFINLDVSHHRAVAVVRLLRIEKGKAFVDLLNEKANDSGDKEIGYVQRTLGFSTRYLEDRDIRLVTVIVAGTVRWKRYLDYLIMSLCSEEKVFREMEPLLLQILRIGFFEILKLDVPAYAAVDENVRLAKVALRPGAGNMVNAILRKLVLLKETDSLPLPKIEGDDRAQARALSIIYSHPVWMVRRWIRFHGKDEALRLMNWNNSDPHFSLRVNTSKGYTRADLVKRLESLQVHYEESIMDEFVRIREGMQQVLKAGLLKDGICAVQDESAGKTANYRPKWV

SEQ ID NO: 167775 - protein, 478 aa, Zea Mays
MLSVPEAVAVVRLLRIEKGKAFVDLLNEKANDSGDKEIGYVQRTLGFSTRYLEDRDIRLVTVIVAGTVRWKRYLDYLIMSLCSEEKVFREMEPLLLQILRIGFFEILKLDVPAYAAVDENVRLAKVALRPGAGNMVNAILRKLVLLKETDSLPLPKIEGDDRAQARALSIIYSHPVWMVRRWIRFHGKDEALRLMNWNNSDPHFSLRVNTSKGYTRADLVKRLESLQVHYEESIMDEFVRIREGMQISSNKIVKMDGSMLLIALDVILTVITVGLVVSVVDPQPGETIVDCCAAPGGKTLFMASRLSGEGKIWALDINKGRLRILMDAAKLHGLDDMITDIHADLRLYAKETTVKYDKVLLDAPCSGLGVLSKRADLRWNRQFENLEELMCLQDELLDSASMLVKPGGILIYSTCSIDPEENEERITAFVQRHPEFALQSVCGYVPREFITDEGFYSSNPTKHSMDGAFAARLVRSTH

SEQ ID NO: 167776 - protein, 471 aa, Zea Mays
MLSVPEAVAVVRLLRIEKGKAFVDLLNEKANDSGDKEIGYVQRTLGFSTRYLEDRDIRLVTVIVAGTVRWKRYLDYLIMSLCSEEKVFREMEPLLLQILRIGFFEILKLDVPAYAAVDENVRLAKVALRPGAGNMVNAILRKLVLLKETDSLPLPKIEGDDRAQARALSIIYSHPVWMVRRWIRFHGKDEALRLMNWNNSDPHFSLRVNTSKGYTRADLVKRLESLQVHYEESIMDEFVRIREGMQQVLKAGLLKDGICAVQDESAGLVVSVVDPQPGETIVDCCAAPGGKTLFMASRLSGEGKIWALDINKGRLRILMDAAKLHGLDDMITDIHADLRLYAKETTVKYDKVLLDAPCSGLGVLSKRADLRWNRQFENLEELMCLQDELLDSASMLVKPGGILIYSTCSIDPEENEERITAFVQRHPEFALQSVCGYVPREFITDEGFYSSNPTKHSMDGAFAARLVRSTH

SEQ ID NO: 167777 - protein, 105 aa, Zea Mays
MVPTVAGLIEKKLPVWIFSGDFDSVCPLPATRFSIHDLNLHVTTPWRPWTVNMEVGGYVQQYQGGFTFASVRGAGHMVPSSQADRALVLLDSFLKGVLPPYVQEQ

SEQ ID NO: 167778 - protein, 553 aa, Zea Mays
MEVDEQKAKEVGIELPHATDVLHKNGSDGLEMNDVSGLRTVGILNTSSAKESDVHSLSNKMKHPNISREQQTRTSNSNAAHHATNSITDQTTALPDATIRIIKNQLTTAKMYLGLFASRGNHGFTRELRARMRDIQRALGDARSDRQLPHNVHSKTRAMEQTLVKVRKIHDGCSSAVNRLHTVLHSTEQQLESNKRQANYLAQVAAKSLPKGLHCLTLRLTNEYYFTNSKNKDFPYVEKLEDPKLYHYALFSDNVLAAAVVVNSTLVHAKKPEKHVFHIVTDSLNYAAMKMWFLANPFGKAAIQVQNIEEFTWLNSSYSPVLKQLETRFMIDYYFRTGHARHDENPKFRNPKYLSILNHLRFYLPEIFPRLNKVLFLDDDTVVQRDLSALWLVDLKGKVNGAVETCRQDFHRFDKYLNFSNPLIAKNFDPHACGWAYGMNMFDLSDWRKQNITEVYHTWQKLNENRLLWKLGTLPAGLVTFWNRTFPLDRSWHQLGLGYNPNVNVKDIRRAAVIHYNGNLKPWLEIGLPKYRKYWSAHVNYDQVFLRECNINP

SEQ ID NO: 167779 - protein, 1055 aa, Zea Mays
MLPRSRDAAPRLAFLEPLACALLLLLVSPCHCVNEQGQALLRWKDSLRPPSGALASWRSADANPCRWTGVSCNARGDVVGLSITSVDLQGPLPGNLQPLAASLKTLELSGTNLTGAIPKEIGGYGELTTLDLSKNQLTGAIPAELCRLTKLESLALNSNSLRGAIPDDIGNLTSLVYLTLYDNELSGPIPASIGNLKKLQVLRAGGNQGLKGPLPPEIGGCSGLTMLGLAETGVSGSLPETIGQLKKIQTIAIYTTLLSGRIPESIGNCTELTSLYLYQNSLSGPIPAQLGQLKKLQTLLLWQNQLVGAIPPELGQCKELTLIDLSLNSLTGSIPASLGGLPNLQQLQLSTNQLTGTIPPELSNCTSLTDIEVDNNLLSGEISIDFPRLRNLTLFYAWKNRLTGGVPASLAQAPSLQAVDLSYNNLTGTIPKVLFGLQNLTKLLLLNNELSGLIPPEIGNCTNLYRLRLNGNRLSGTIPAEIGNLKNLNFLDMSENHLVGPVPAAISGCASLEFLDLHSNALSGALPDTLPRSLQLIDVSDNQLAGPLSSSIGSMLELTKLYMGNNRLTGGIPPELGKIPSQFAGLDKLGSLDLSRNELSGSLDPLAALQNLVTLNISYNAFSGELPNTPFFQKLPLSDLAGNRHLVVGDGSDESSRRGAISSLKVAMSVLAAASALLLVSAAYMLARAHHRGGGRIIHGEGSWEVTLYQKLDIAMDDVLRSLTAANMIGTGSSGAVYKVDTPNGYTFAVKKMWPSDEATSAAFRSEIAALGSIRHRNIVRLLGWAANGGTRLLFYSYLPNGSLSGLLHGGHAAKGSPADEWGARYGIALGVAHAVAYLHHDCVPAILHGDVKSMNVLLGPAYEPYLADFGLARVLAAASSTKLDTGKQPRVAGSYGYMAPEYASMQRISEKSDVYSFGVVLLEILTGRHPLDPTLPGGAHLVQWAREHVQARRDASELLLDARLRARAAEADVHEMRQALSVAALCVSRRADDRPAMKDVAALLREIRRPAAVDDAKQPSPTGAAAAHAAAAPVSAHSRGQSSSRSFAVSENSA

SEQ ID NO: 167780 - protein, 161 aa, Zea Mays
MDDQRQPVCKAKRGAREEEVHAAPPDFPFEEAAATAGEGDDGGEASRRPPGVFQFPWQECSGGLGVSAAGPWELRDVFFRSLVDGGAAAIGVPGDRLVSPPTGRRALLEGVDAWLAAAADGEVDPVWRSALMAPRPRAEDGDGRTSWALPAHASGVSPAWH

SEQ ID NO: 167781 - protein, 63 aa, Zea Mays
MANGNWQSVITLSFECPFRSMFYFICTAIIVRRSGNNSNNNKINVFFGKSFQHQFLAFHLHTE

SEQ ID NO: 167782 - protein, 274 aa, Zea Mays
MKLIHSMEGGSTREIKQVSDGDERSGSSLRAENLKGMLSDISNAESESDVDDVGLTVVQKSTDHSLLTPVHEEVKGSDTSIFCSSSSKHLLDTTPGAPQATPQMEMPIQLTCRKYFPTFGWLNNLGNAYISLHGTSAGRTLENLATGLITLLIRISSFFHLSVYRQERFIETVQPCAAAQEPEPQREEDMSACLRRLKKLESLCDHLMSKPPDMPKEKELVLMQSFDRIKSLEAELEATKNALQAAVEKQMELVETVEALQHQSTSVRRRFCCS

SEQ ID NO: 167783 - protein, 322 aa, Zea Mays
MSVSHADEHEISLCDPSSEDDRRRRKIGSLPLKAIHALRKKRARRRVTDFRFPAAISIEDVRDAEEERAVAAFRDRLAAHRLLPDKHDDYHMMLRFLKARKFDSDKAMQMWSEMLRWRKEFGTDTILEGYHGVDREGRPVYIERLGKVDPNKLMQITSVDRYIKYHVQEFERAFRERFPACTLSAKRHIDSTTTILDVHGVGFKNFSKTARELVQRMQRIDSDYYPETLHQMYVVNAGSGFKLIWNSVKGFLDPKTSSKIHVLGSNYQSRLIEVIDSSELPKFLGGSCTCSEKGGCLRSNRGPWNDPVIMKERYLLSVPLQA

SEQ ID NO: 167784 - protein, 429 aa, Zea Mays
MRKPEEITKEEYAAFYKSLTNDWEEHLAVKHFSVEGQLEFKAVLFVPKRAPFDLFDTKKKQNNIKLYVRRVFIMDNCEELIPEWLSFVKGIVDSEDLPLNISRETLQQNKILKVIRKNLVKKCVELFFEIAENKEDYNKFYEAFSKNLKLGIHEDSQNRTKIAELLRYHSTKSGDELTSLKDYVTRMKEGQNDIYYITGESKKAVENSPFLEKLKKRGYEVLYMVDAIDEYAVGQLKEFEGKKLVSATKEGLKLDETEDEKKRKEELKEKFEGLCKVIKEVLGDKVEKVVVSDRVVDSPCCLVTGEYGWTANMERIMKAQALRDSSMAGYMSSKKTMEINPENPIMDELRKRAEADKNDKSVKDLVMLLFETALLTSGFSLDDPNTFGNRIHRMLKLGLSIDEDEPVEAEAEMPQLEDDAGESKMEEVD

SEQ ID NO: 167785 - protein, 679 aa, Zea Mays
MASETETFAFQAEINQLLSLIINTFYSNKEIFLRELISNSSDPELFIHLVPDKATNTLSIIDSGIGMTKSDLVNNLGTIARSGTKEFMEALAAGADVSMIGQFGVGFYSAYLVADRVVVTTKHNDDEQYVWESQAGGSFTVTRDTSGEQLGRGTKITLFLKDDQLEYLEERRLKDLVKKHSEFISYPISLWTEKTTEKEISDDEDEEEKKDAEEGKVEDVDEKEEKEKKKKKIKEVSHEWSLVNKQKPIWMRKPEEITKEEYAAFYKSLTNDWEEHLAVKHFSVEGQLEFKAVLFVPKRAPFDLFDTKKKQNNIKLYVRRVFIMDNCEELIPEWLSFVKGIVDSEDLPLNISRETLQQNKILKVIRKNLVKKCVELFFEIAENKEDYNKFYEAFSKNLKLGIHEDSQNRTKIAELLRYHSTKSGDELTSLKDYVTRMKEGQNDIYYITGESKKAVENSPFLEKLKKRGYEVLYMVDAIDEYAVGQLKEFEGKKLVSATKEGLKLDETEDEKKRKEELKEKFEGLCKVIKEVLGDKVEKVVVSDRVVDSPCCLVTGEYGWTANMERIMKAQALRDSSMAGYMSSKKTMEINPENPIMDELRKRAEADKNDKSVKDLVMLLFETALLTSGFSLDDPNTFGNRIHRMLKLGLSIDEDEPVEAEAEMPQLEDDAGESKMEEVD

SEQ ID NO: 167786 - protein, 623 aa, Zea Mays
MASETETFAFQAEINQLLSLIINTFYSNKEIFLRELISNSSDALDKIRFESLTDKSKLDAQPELFIHLVPDKATNTLSIIDSGIGMTKSDLVNNLGTIARVVVTTKHNDDEQYVWESQAGGSFTVTRDTSGEQLGRGTKITLFLKDDQLEYLEERRLKDLVKKHSEFISYPISLWTEKTTEKEISDDEDEEEKKDAEEGKVEDVDEKEEKEKKKKKIKEVSHEWSLVNKQKPIWMRKPEEITKEEYAAFYKSLTNDWEEHLAVKHFSVEGQLEFKAVLFVPKRAPFDLFDTKKKQNNIKLYVRRVFIMDNCEELIPEWLSFVKGIVDSEDLPLNISRETLQQNKILKVIRKNLVKKCVELFFEIAENKEDYNKFYEAFSKNLKLGIHEDSQNRTKIAELLRYHSTKSGDELTSLKDYVTRMKEGQNDIYYITGESKKLVSATKEGLKLDETEDEKKRKEELKEKFEGLCKVIKEVLGDKVEKVVVSDRVVDSPCCLVTGEYGWTANMERIMKAQALRDSSMAGYMSSKKTMEINPENPIMDELRKRAEADKNDKSVKDLVMLLFETALLTSGFSLDDPNTFGNRIHRMLKLGLSIDEDEPVEAEAEMPQLEDDAGESKMEEVD

SEQ ID NO: 167787 - protein, 291 aa, Zea Mays
MATSQLKPEEVAGIIKDFDEPGTLAPTGLFVGGTKYMVIQGEPGVVIRGKKLKNELPGDKYSKAEGASVVTSTTSAGIQLLPEKHCADEACGAMAGSNGPEGVPVVTSADDPPTRADIPFLCNSVDETCEATGDDSAPLDAQICTGFSKLISLEVKKGLQKCATFPPSSGQPQQEDCSCSHVGDGLTGAPAFWRSVSLPAITRTPRPRTSLLAKSVINGEWRFTTQPPDLGASFAVLARLRNCILRASKRRDGTPVATRYDRFELECGGIVGQCHQRWVEVSVESRKERFV

SEQ ID NO: 167788 - protein, 148 aa, Zea Mays
MDGGSCGLEGASVVTSTTSAGIQLLPEKHCADEACGAMAGSNGPEGVPVVTSADDPPTRADIPFLCNSVDETCEATGDDSAPLDAQICTGFSKLISLEVKKGLQKCATFPPSSGQPQQEDCSCSHVGDGLTGAPAFWRSVSLPVSTSC

SEQ ID NO: 167789 - protein, 255 aa, Zea Mays
MVIQGEPGVVIRGKKLKNELPGDKYSKAEGASVVTSTTSAGIQLLPEKHCADEACGAMAGSNGPEGVPVVTSADDPPTRADIPFLCNSVDETCEATGDDSAPLDAQICTGFSKLISLEVKKGLQKCATFPPSSGQPQQEDCSCSHVGDGLTGAPAFWRSVSLPAITRTPRPRTSLLAKSVINGEWRFTTQPPDLGASFAVLARLRNCILRASKRRDGTPVATRYDRFELECGGIVGQCHQRWVEVSVESRKERFV

SEQ ID NO: 167790 - protein, 168 aa, Zea Mays
MVIQGEPGVVIRGKKLKNELPGDKYSKAEGASVVTSTTSAGIQLLPEKHCADEACGAMAGSNGPEGVPVVTSADDPPTRADIPFLCNSVDETCEATGDDSAPLDAQICTGFSKLISLEVKKGLQKCATFPPSSGQPQQEDCSCSHVGDGLTGAPAFWRSVSLPVSTSC

SEQ ID NO: 167791 - protein, 305 aa, Zea Mays
MRYRQPRRHLFLPFSPPAPLKPEEVAGIIKDFDEPGTLAPTGLFVGGTKYMVIQGEPGVVIRGKKLKNELPGDKYSKAEGASVVTSTTSAGIQLLPEKHCADEACGAMAGSNGPEGVPVVTSADDPPTRADIPFLCNSVDETCEATGDDSAPLDAQICTGFSKLISLEVKKGLQKCATFPPSSGQPQQEDCSCSHVGDGLTGAPAFWRSVSLPAITRTPRPRTSLLAKSVINGEWRFTTQPPDLGASFAVLARLRNCILRASKRRDGTPVATRYDRFELECGGIVGQCHQRWVEVSVESRKERFV

SEQ ID NO: 167792 - protein, 115 aa, Zea Mays
MVLWNHLAYLINYYYNREWGPEAITRTPRPRTSLLAKSVINGEWRFTTQRPPDLGASFAVLARLRNCILRASKRRDGTPVATRYDRFELECGGIVGQCHQRWVEVSVESRKERFV

SEQ ID NO: 167793 - protein, 278 aa, Zea Mays
MDLWITSCSQAARHHARIGSVDFPVKKNVKSSQVQNATCFVGLVRQLQCRRSAKSHILNVKSDTVAHQKVSGVSWSLENMPRRIGCVVSGLGFAAYGLASAEGPVNNNIDSTESAMSSTNLSHGKEVHTDYSVTGIPGDGRCLFRSVVHGAYIRSRKPIPNEDHQRRLADELRTKVADEFIKRRAETEWFVEGDFDTYVSQIRKPHVWGGEPELLMASHVLQMPITVYMHDKAAGGLIAIAEYGQEHGTEAPVQVLYHGYGHYDALQIPGEGGPRSRL

SEQ ID NO: 167794 - protein, 406 aa, Zea Mays
MYGAPVPKDLNLPAALPQPTRAGARTPPQQQQQMSSAGLLRYRSAPSTLLGEVMCGDQDFPATDGGGGHGPPDHAATDNVLALFLAGHHSEARDCKPPRPAAAAHFMDEAAASQQQQLMYQSQQQQQMAAMEGLYHNVSSGGTEHGAGVGAGNNSLIRQSSSPAGFLTNGYGGMLRAGMGMAGGFRNGVSDARLKGQLSFPSRQGSVMSQISEVGSEELDGGGGGSPEAAGSNASGAPRGYVGIPGYPMGGGTSGAWSDEPSPSPTSGAKRRPRDSGPAPQNVQQQPLAPQLSLPSGGKPASAEMAAIEKFLQFQDAVPCKIRAKRGCATHPRSIAERVRRTKISERIRKLQELVPNMEKQTNTADMLDLAVDYIKDLQKQVKVLNDGRANCTCSGGGKLQDPFTS

SEQ ID NO: 167795 - protein, 404 aa, Zea Mays
MYGAPVPKDLNLPAALPQPTRAGARTPPQQQQQMSSAGLLRYRSAPSTLLGEVMCGDQDFPATDGGGGHGPPDHAATDNVLALFLAGHHSEARDCKPPRPAAAAHFMDEAAASQQQQLMYQSQQQQQMAAMEGLYHNVSSGGTEHGAGVGAGNNSLIRQSSSPAGFLTNGYGGMLRAGMGMAGGFRNGVSDARLKGQLSFPSRQGSVMSQISEVGSEELDGGGGGSPEAAGSNASGAPRGYVGIPGYPMGGGTSGAWSDEPSPSPTSGAKRRPRDSGPAPQNVQQQPLAPQLSLPSGGKPASAEMAAIEKFLQFQDAVPCKIRAKRGCATHPRSIAERVRRTKISERIRKLQELVPNMEKQTNTADMLDLAVDYIKDLQKQVLNDGRANCTCSGGGKLQDPFTS

SEQ ID NO: 167796 - protein, 420 aa, Zea Mays
MAAAGEGEAERVSALLREITGEGGFAFVASAEKAGAGDLRAAEAAREMAWEQLHSGPWSEVGTAWRDAYALACLNVARLRTHAASGGDSDRSAALRALDMGLIMGGNLLRADLEAALARISAEACGGSEGGEGVVDKENQRWREALDRNRDIADALKILPANSLSCKKVERRSCISLEEFICNYFLRDTPVIISGTIDHWPARTKWKDIEYLKKIAGDRTVPVEVGKNYVCSEWKQELITFSQFLDRMSSTVCPSNLTYLAQHPLFEQIKELSEDIIVPEYCYAGGGALQSLNAWFGPEGTVTPLHHDPHHNILAQVLGRKYIRLYPAFIAEDLYPHTETMLSNTSQLECTVVLQVDLDNIDLKEFPRVENLEFIDCILEEGDLLYIPPKWWHYVRSLSTSFSVTPLLNGCTHVITNVHC

SEQ ID NO: 167797 - protein, 72 aa, Zea Mays
MLSNTSQVDLDNIDLKEFPRVENLEFIDCILEEGDLLYIPPKWWHYVRSLSTSFSVTPLLNGCTHVITNVHC

SEQ ID NO: 167798 - protein, 163 aa, Zea Mays
MSSTVCPSNLTYLAQHPLFEQIKELSEDIIVPEYCYAGGGALQSLNAWFGPEGTVTPLHHDPHHNILAQVLGRKYIRLYPAFIAEDLYPHTETMLSNTSQVDLDNIDLKEFPRVENLEFIDCILEEGDLLYIPPKWWHYVRSLSTSFSVSFWWRAAVQPSGGS

SEQ ID NO: 167799 - protein, 165 aa, Zea Mays
MSSTVCPSNLTYLAQHPLFEQIKELSEDIIVPEYCYAGGGALQSLNAWFGPEGTVTPLHHDPHHNILAQVLGRKYIRLYPAFIAEDLYPHTETMLSNTSQVDLDNIDLKEFPRVENLEFIDCILEEGDLLYIPPKWWHYVRSLSTSFSVTPLLNGCTHVITNVHC

SEQ ID NO: 167800 - protein, 194 aa, Zea Mays
MTDETSTGSSYFDIRMISGKRDCSAMKSATGGGVLVDGERRRFRAGAPRALSEQRTEIRRPRKNWFRCPASERRGRGEMLALAWLGRQKYYTASPWAVRTLTCQGPGTGVTVKAVPRTIYITAQEACNTYKYNQRNGRLNTRHDTVPCPCCAGSGHALLCSLPYGGDAMRRSGEGTPTEEAKKPVSGRLPTEDH

SEQ ID NO: 167801 - protein, 248 aa, Zea Mays
MPEAAPLRGLVVLLLLGRRVAAALGLLLPPPPPLLLPSALRRDHGRLRVLHGLGLGSVVLLVVGVVSRVVLLRPPPPLVGWRHGHGLLLAAAAGVSILAVVSLRRRPFSLPSPWPRKNWFRCPASERRGRGEMLALAWLGRQKYYTASPWAVRTLTCQGPGTGVTVKAVPRTIYITAQEACNTYKYNQRNGRLNTRHDTVPCPCCAGSGHALLCSLPYGGDAMRRSGEGTPTEEAKKPVSGRLPTEDH

SEQ ID NO: 167802 - protein, 151 aa, Zea Mays
MGTQAESWESVRLCDMAPEDIRWGFDGHLSNRDVWSPSGPMLMRHMTNNGAMAGSIKGRGRLSINETIKDYAPPENGTNRNFDHVDIPNTGSVVMEVKRVLFNPNMPEIEKARKLLKDQEQSLLDAIARLDEASDSDNGKFLASSTSLKIR

SEQ ID NO: 167803 - protein, 392 aa, Zea Mays
MKAVGYSPYDSSGTDDDLPPAQNRGLRGRSFSGNVVASAGAFPYMRANNDLESEIHRVEQDAYTGILRAFKVQSDAISWEKESLITELRKELRVSDEEHRELLNKVNEDGTIRRMRELRQAGGSPSGLHHGNMVLYGAEPGSTTKRQRASHSIPLQSAGLQSPMMPSHSVSSAKWGPLQARGTKARTPIPLALPSVDPSSLINHKVYTRWPEDNNFYEATITRYNPVTGEHGLVYDMGTQAESWESVRLCDMAPEDIRWGFDGHLSNRDVWSPSGPMLMRHMTNNGAMAGSIKGRGRLSINETIKDYAPPENGTNRNFDHVDIPNTGSVVMEVKRVLFNPNMPEIEKARKLLKDQEQSLLDAIARLDEASDSDNGFSTTASSKDSVHAWCTE

SEQ ID NO: 167804 - protein, 261 aa, Zea Mays
MKAVGYSPYDSSGTDDDLPPAQNRGLRGRSFSGNVVASAGAFPYMRANNDLESEIHRVEQDAYTGILRAFKVQSDAISWEKESLITELRKELRVSDEEHRELLNKVNEDGTIRRMRELRQAGGSPSGLHHGNMVLYGAEPGSTTKRQRASHSIPLQSAGLQSPMMPSHSVSSAKWGPLQARGTKARTPIPLALPSVDPSSLINHKVYTRWPEDNNFYEATITRYNPVTGEHGLVYDMGTQAESWESVRLCDVQSREEGGYQ

SEQ ID NO: 167805 - protein, 147 aa, Zea Mays
MRELRQAGGSPSGLHHGNMVLYGAEPGSTTKRQRASHSIPLQSAGLQSPMMPSHSVSSAKWGPLQARGTKARTPIPLALPSVDPSSLINHKVYTRWPEDNNFYEATITRYNPVTGEHGLVYDMGTQAESWESVRLCDVQSREEGGYQ

SEQ ID NO: 167806 - protein, 387 aa, Zea Mays
MKAVGYSPYDSSGTDDDLPPAQNRGLRGRSFSGNVVASAGAFPYMRANNDLESEIHRVEQDAYTGILRAFKVQSDAISWEKESLITELRKELRVSDEEHRELLNKVNEDGTIRRMRELRQAGGSPSGLHHGNMVLYGAEPGSTTKRQRASHSIPLQSAGLQSPMMPSHSVSSAKWGPLQARGTKARTPIPLALPSVDPSSLINHKVYTRWPEDNNFYEATITRYNPVTGEHGLVYDMGTQAESWESVRLCDMAPEDIRWGFDGHLSNRDVWSPSGPMLMRHMTNNGAMAGSIKGRGRLSINETIKDYAPPENGTNRNFDHVDIPNTGSVVMEVKRVLFNPNMPEIEKARKLLKDQEQSLLDAIARLDEASDSDNGKFLASSTSLKIR

SEQ ID NO: 167807 - protein, 278 aa, Zea Mays
MRELRQAGGSPSGLHHGNMVLYGAEPGSTTKRQRASHSIPLQSAGLQSPMMPSHSVSSAKWGPLQARGTKARTPIPLALPSVDPSSLINHKVYTRWPEDNNFYEATITRYNPGEHGLVYDMGTQAESWESVRLCDMAPEDIRWGFDGHLSNRDVWSPSGPMLMRHMTNNGAMAGSIKGRGRLSINETIKDYAPPENGTNRNFDHVDIPNTGSVVMEVKRVLFNPNMPEIEKARKLLKDQEQSLLDAIARLDEASDSDNEDMAMEGRMGSAGERNGITT

SEQ ID NO: 167808 - protein, 392 aa, Zea Mays
MKAVGYSPYDSSGTDDDLPPAQNRGLRGRSFSGNVVASAGAFPYMRANNDLESEIHRVEQDAYTGILRAFKVQSDAISWEKESLITELRKELRVSDEEHRELLNKVNEDGTIRRMRELRQAGGSPSGLHHGNMVLYGAEPGSTTKRQRASHSIPLQSAGLQSPMMPSHSVSSAKWGPLQARGTKARTPIPLALPSVDPSSLINHKVYTRWPEDNNFYEATITRYNPGEHGLVYDMGTQAESWESVRLCDMAPEDIRWGFDGHLSNRDVWSPSGPMLMRHMTNNGAMAGSIKGRGRLSINETIKDYAPPENGTNRNFDHVDIPNTGSVVMEVKRVLFNPNMPEIEKARKLLKDQEQSLLDAIARLDEASDSDNEDMAMEGRMGSAGERNGITT

SEQ ID NO: 167809 - protein, 198 aa, Zea Mays
MKAVGYSPYDSSGTDDDLPPAQNRGLRGRSFSGNVVASAGAFPYMRANNDLESEIHRVEQDAYTGILRAFKVQSDAISWEKESLITELRKELRVSDEEHRELLNKVNEDGTIRRMRELRQAGGSPSGLHHGNMVLYGAEPGSTTKRQRASHSIPLQSAGLQSPMMPSHSVSSAKWGPLQARAHSFGVTICGSKFTNKP

SEQ ID NO: 167810 - protein, 274 aa, Zea Mays
MRELRQAGGSPSGLHHGNMVLYGAEPGSTTKRQRASHSIPLQSAGLQSPMMPSHSVSSAKWGPLQARGTKARTPIPLALPSVDPSSLINHKVYTRWPEDNNFYEATITRYNPVTGEHGLVYDMGTQAESWESVRLCDMAPEDIRWGFDGHLSNRDVWSPSGPMLMRHMTNNGAMAGSIKGRGRLSINETIKDYAPPENGTNRNFDHVDIPNTGSVVMEVKRVLFNPNMPEIEKDQEQSLLDAIARLDEASDSDNEDMAMEGRMGSAGERNGITT

SEQ ID NO: 167811 - protein, 253 aa, Zea Mays
MKAVGYSPYDSSAQNRGLRGRSFSGNVVASAGAFPYMRANNDLESEIHRVEQDAYTGILRAFKVQSDAISWEKESLITELRKELRVSDEEHRELLNKVNEDGTIRRMRELRQAGGSPSGLHHGNMVLYGAEPGSTTKRQRASHSIPLQSAGLQSPMMPSHSVSSAKWGPLQARGTKARTPIPLALPSVDPSSLINHKVYTRWPEDNNFYEATITRYNPVTGEHGLVYDMGTQAESWESVRLCDVQSREEGGYQ

SEQ ID NO: 167812 - protein, 270 aa, Zea Mays
MVCCRVVHFIYYSIGSSPFIVGTDDDLPPAQNRGLRGRSFSGNVVASAGAFPYMRANNDLESEIHRVEQDAYTGILRAFKVQSDAISWEKESLITELRKELRVSDEEHRELLNKVNEDGTIRRMRELRQAGGSPSGLHHGNMVLYGAEPGSTTKRQRASHSIPLQSAGLQSPMMPSHSVSSAKWGPLQARGTKARTPIPLALPSVDPSSLINHKVYTRWPEDNNFYEATITRYNPVTGEHGLVYDMGTQAESWESVRLCDVQSREEGGYQ

SEQ ID NO: 167813 - protein, 401 aa, Zea Mays
MVCCRVVHFIYYSIGSSPFIVGTDDDLPPAQNRGLRGRSFSGNVVASAGAFPYMRANNDLESEIHRVEQDAYTGILRAFKVQSDAISWEKESLITELRKELRVSDEEHRELLNKVNEDGTIRRMRELRQAGGSPSGLHHGNMVLYGAEPGSTTKRQRASHSIPLQSAGLQSPMMPSHSVSSAKWGPLQARGTKARTPIPLALPSVDPSSLINHKVYTRWPEDNNFYEATITRYNPGEHGLVYDMGTQAESWESVRLCDMAPEDIRWGFDGHLSNRDVWSPSGPMLMRHMTNNGAMAGSIKGRGRLSINETIKDYAPPENGTNRNFDHVDIPNTGSVVMEVKRVLFNPNMPEIEKARKLLKDQEQSLLDAIARLDEASDSDNEDMAMEGRMGSAGERNGITT

SEQ ID NO: 167814 - protein, 213 aa, Zea Mays
MLLGVISLLLSQTARFISEICVPSSLFTSRFYICSESDYQDLLRNTDANQTALDKNMFGGQRLHVCGEGHEPFVSYEGLEQLHRFLFILGITHVLYSFVTVVLSMIKIYSWRKWETLAGPIAAEELKARRTKVMRRQSTFVFNNASHPWSKNKILIWMLCFLRQFKGSIIRSDYLALSITSYHIHMTSINTWYGAWKIITMGLLVSVGHFGHM

SEQ ID NO: 167815 - protein, 1537 aa, Zea Mays
MTAEGTACNGAGEALKAEFAPEKVVAVSLEEKPVGEREGEDVGGPFLIVNGGDSDGHSEPGSDLGKAPDEDPASEEDDVPTFNAAPDAAVAGDHGTAEGQVGAQGAALGASSADGGDRASDGSEGSADESRGDPSSDCVAEVAQQEAVGEEDSGAAALASRECEPTITSADSEAHYVDSEVEDKEGTVDGSAVVDAVEAVVHQEASTEQDEDAAVMSSGHDDALTSPKSCSAAVESEVIREDSKEQSITDGVEPQQQGTVGASTLVENEHLCADMMADSFVAANEPDSQEDAAVMSSGHDDALTSPKSCSAAVESEVIREDSKEQSITDGVEPQQQGTVGASALVENEHLCVDMAADSFVAATEPDSQEDAAVESCGHDDLLTFTESGSADIESEVYGEDSEQKESNTVVVEIVVQGVGRADVLMANGHLCADTQAGSSEATTEPENHANGSKLTDVAESVEGDAGSGEQDTMDSSQTNGHIYVALSADSCIVPSESKAHSFETDGQRTDQLQEEAPKLEAEVLEGVLKPTERNCAGSVEKLIGEEVGTDGHASIGGTADAYGEQEAKPMQVEGEVTCGILEFEKVDKDGEEGLCDDYTVGVVSSNEETELPMKEKVDEAVPSVNVGGPEKVTDNTSQDTKTVDFIDEITAESNFKAENMVEVKSAAREVDKTEVKDLAFADEANVAPLHLQRDCESVMETIEHEKVELPGGCQAHEIVYSSELEPKKEFEMGVDGAVPLQGAAASVASVFHHEPMSIDLSENDSGNHSGPTTALESCDHVQNEESISQEISMTTIEQPIAIDQVEPVNLNVDELVVDDDQPGFAPRCESARLDKPGCTSKKDDSNEIVEDSKSLENQLEICNAATMSDECSSRNANEDPSPINMSAECSSRTANEGFSPINEASHLAEESCLSDKSYNAISYENGNGPAKSSEEPDKSCNAIICENENEPAKSSDVVETRCVEALAPSSVGTVVTAEQKDNGHRASGEWHGDNVQVIGQQQKIYIIKVPKFAGDDLWNKIQAAQAHLDHLTQERDAINRRRQKQKAVCDQYREKLEAARREEREARTAHGDKKNDLNNVRSVLGKLHQANSAEELDELIAKKERTMQHETISLKEEKLLIKEINELKAQRKQLSTTMGSKAEINEAFDQKDHIHERHKVLKKDSDVLLTNLKFLEENTRKIQKSFEDERTGLRKLTEEHRAANEIRQKAYIEWTELRSEPSKKNEYFFRYRDDRNAAEIFRANGDINGLKSHCNSQIEGVMEMWNKNEEFRKQYVESNKVSTLKRLGTHDGRKLGPDEDPPVISSRRPSSIYPLSASSPGVATLASIPAPVVAAPAAVSAKEDSFPVLEAPQTSKRTKSKASDICAQTENNSVIVSEAEALEQTLKEKAKAKEAEERKRRKAEKDKEKAEFKARKEAEEREKKKAKKDKRRGTAPADSSLTGDGHAAALATADTDSNASDNPREAEAPQPAAAPKRLSRPAAAIKQLNRVQPMPAPLRNRGRRRLRQYILIAAAVLSGLALFVAGNYIPRLKSVHS

SEQ ID NO: 167816 - protein, 1575 aa, Zea Mays
MTAEGTACNGAGEALKAEFAPEKVVAVSLEEKPVGEREGEDVGGPFLIVNGGDSDGHSEPGSDLGKAPDEDPASEEDDVPTFNAAPDAAVAGDHGTAEGQVGAQGAALGASSADGGDRASDGSEGSADESRGDPSSDCVAEVAQQEAVGEEDSGAAALASRECEPTITSADSEAHYVDSEVEDKEGTVDGSAVVDAVEAVVHQEASTEQDEDAAVMSSGHDDALTSPKSCSAAVESEVIREDSKEQSITDGVEPQQQGTVGASTLVENEHLCADMMADSFVAANEPDSQEDAAVMSSGHDDALTSPKSCSAAVESEVIREDSKEQSITDGVEPQQQGTVGASALVENEHLCVDMAADSFVAATEPDSQEDAAVESCGHDDLLTFTESGSADIESEVYGEDSEQKESNTVVVEIVVQGVGRADVLMANGHLCADTQAGSSEATTEPENHANGSKLTDVAESVEGDAGSGEQDTMDSSQTNGHIYVALSADSCIVPSESKAHSFETDGQRTDQLQEEAPKLEAEVLEGVLKPTERNCAGSVEKLIGEEVGTDGHASIGGTADAYGEQEAKPMQVEGEVTCGILEFEKVDKDGEEGLCDDYTVGVVSSNEETELPMKEKVDEAVPSVNVGGPEKVTDNTSQDTKTVDFIDEITAESNFKAENMVEVKSAAREVDKTEVKDLAFADEANVAPLHLQRDCESVMETIEHEKVELPGGCQAHEIVYSSELEPKKEFEMGVDGAVPLQGAAASVASVFHHEPMSIDLSENDSGNHSGPTTALESCDHVQNEESISQEISMTTIEQPIAIDQVEPVNLNVDELVVDDDQPGFAPRCESARLDKPGCTSKKDDSNEIVEDSKSLENQLEICNAATMSDECSSRNANEDPSPINMSAECSSRTANEGFSPINEASHLAEESCLSDKSYNAISYENGNGPAKSSEEPDKSCNAIICENENEPAKSSDVVETRCVEALAPSSVGTVVTAEQKDNGHRASGEWHGDNVQVIGQQQKIYIIKVPKFAGDDLWNKIQAAQAHLDHLTQERDAINRRRQKQKAVCDQYREKLEAARREEREARTAHGDKKNDLNNVRSVLGKLHQANSAEELDELIAKKERTMQHETISLKEEKLLIKEINELKAQRKQLSTTMGSKAEINEAFDQKDHIHERHKKDSDVLLTNLKFLEENTRKIQKSFEDERTGLRKLTEEHRAANEIRQKAYIEWTELRSEPSKKNEYFFRYRDDRNAAEIFRANGDINGLKSHCNSQIEGVMEMWNKNEEFRKQYVESNKVSTLKRLGTHDGRKLGPDEDPPVISSRRPSSIYPLSASSPGVATLASIPAPVVAAPAAVSAKEDSFPVLEAPQTSKRTKSKASDICAQTENNSVIVSEAEALEQTLKEKARLLEEQLELARKAEELARKEEELSKERAAAEKERLRMEQKAKAKEAEERKRRKAEKDKEKAEFKARKEAEEREKKKAKKDKRRGTAPADSSLTGDGHAAALATADTDSNASDNPREAEAPQPAAAPKRLSRPAAAIKQLNRVQPMPAPLRNRGRRRLRQYILIAAAVLSGLALFVAGNYIPRLKSVHS

SEQ ID NO: 167817 - protein, 51 aa, Zea Mays
MPYPSKGWRPIFIALEAALPHLLTHTTQQDCPLDAKETTEDSQKRLLSSRC

SEQ ID NO: 167818 - protein, 450 aa, Zea Mays
MWIASRLFLAAAALLMAVLLLVAGPVAAQDAAVEGVAPPAEEIAANARAKEAAVLAAELVQLRAKISALESRIAEQNLEFKTKNDAIETLNMIVKEKSQKIATMQNEAKGSLAAEEQASKANALAIELKKQTEKLKKDITEQKIKKAALEARAGNADKKVQELNMKLEKLQRTSSDQKRRIQKTEHALKAAEEELMKAQLETTTKVKQLREVHGAWLPPWLATHAARSMEVMSNHWNEHGKPAFDSFLQKASEKTVQTKKWAEPHLETAKTKWMPVAKEKWVTLKKHAKPYVQMVSEKSLEAYQTSSDFVRPHLVNAHQVVDPYFQEAKKLSKPYVDQIATATKPHVEKVRTALKPYTERARHVYGQFLETATTYHQQAQATISDYLHRHEFTKQFVTKELVWYLASALLVTPFFVLYTLLTETFWFVLHFWCPASIRCLLQIDFVRHLI

SEQ ID NO: 167819 - protein, 451 aa, Zea Mays
MWIASRLFLAAAALLMAVLLLVAGPVAAQDAAVEGVAPPAEEIAANARAKEAAVLAAELVQLRAKISALESRIAEQNLEFKTKNDAIETLNMIVKEKSQKIATMQNEAKGSLAAEEQASKANALAIELKKQTEKLKKDITEQKIKKAALEARAGNADKKVQELNMKLEKRTSSDQKRRIQKTEHALKAAEEELMKAQLETTTKVKQLREVHGAWLPPWLATHAARSMEVMSNHWNEHGKPAFDSFLQKASEKTVQTKKWAEPHLETAKTKWMPVAKEKWVTLKKHAKPYVQMVSEKSLEAYQTSSDFVRPHLVNAHQVVDPYFQEAKKLSKPYVDQIATATKPHVEKVRTALKPYTERARHVYGQFLETATTYHQQAQATISDYLHRHEFTKQFVTKELVWYLASALLVTPFFVLYTLLTETFCTKKKKKTPRSSNTNHGHRRHKRRHADK

SEQ ID NO: 167820 - protein, 522 aa, Zea Mays
MWIASRLFLAAAALLMAVLLLVAGPVAAQDAAVEGVAPPAEEIAANARAKEAAVLAAELVQLRAKISALESRIAEQNLEFKTKNDAIETLNMIVKEKSQKIATMQNEVTSLEAKGSLAAEEQASKANALAIELKKQTEKLKKDITEQKIKKAALEARAGNADKKVQELNMKLEKLQRTSSDQKRRIQKTEHALKAAEEELMKAQLETTTKVKQLREVHGAWLPPWLATHAARSMEVMSNHWNEHGKPAFDSFLQKASEKTVQTKKWAEPHLETAKTKWMPVAKEKWVTLKKHAKPYVQMVSEKSLEAYQTSSDFVRPHLVNAHQVVDPYFQEAKKLSKPYVDQIATATKPHVEKVRTALKPYTERARHVYGQFLETATTYHQQAQATISDYLHRHEFTKQFVTKELVWYLASALLVTPFFVLYTLLTETFCTKKKKKTPRSSNTNHGHRRHKRRHADKSWKLDHLPFTVNGIDTIIRHRRTLLCIHELEYTQEMCFCPPSCWESCVFHQSRDRELKSVGVIS

SEQ ID NO: 167821 - protein, 456 aa, Zea Mays
MWIASRLFLAAAALLMAVLLLVAGPVAAQDAAVEGVAPPAEEIAANARAKEAAVLAAELVQLRAKISALESRIAEQNLEFKTKNDAIETLNMIVKEKSQKIATMQNEVTSLEAKGSLAAEEQASKANALAIELKKQTEKLKKDITEQKIKKAALEARAGNADKKVQELNMKLEKRTSSDQKRRIQKTEHALKAAEEELMKAQLETTTKVKQLREVHGAWLPPWLATHAARSMEVMSNHWNEHGKPAFDSFLQKASEKTVQTKKWAEPHLETAKTKWMPVAKEKWVTLKKHAKPYVQMVSEKSLEAYQTSSDFVRPHLVNAHQVVDPYFQEAKKLSKPYVDQIATATKPHVEKVRTALKPYTERARHVYGQFLETATTYHQQAQATISDYLHRHEFTKQFVTKELVWYLASALLVTPFFVLYTLLTETFCTKKKKKTPRSSNTNHGHRRHKRRHADK

SEQ ID NO: 167822 - protein, 451 aa, Zea Mays
MWIASRLFLAAAALLMAVLLLVAGPVAAQDAAVEGVAPPAEEIAANARAKEAAVLAAELVQLRAKISALESRIAEQNLEFKTKNDAIETLNMIVKEKSQKIATMQNEAKGSLAAEEQASKANALAIELKKQTEKLKKDITEQKIKKAALEARAGNADKKVQELNMKLEKLQRTSSDQKRRIQKTEHALKAAEEELMKAQLETTTKVKQLREVHGAWLPPWLATHAARSMEVMSNHWNEHGKPAFDSFLQKASEKTVQTKKWAEPHLETAKTKWMPVAKEKWVTLKKHAKPYVQMVSEKSLEAYQTSSDFVRPHLVNAHQVVDPYFQEAKKLSKPYVDQIATATKPHVEKVRTALKPYTERARHVYGQFLETATTYHQQATISDYLHRHEFTKQFVTKELVWYLASALLVTPFFVLYTLLTETFCTKKKKKTPRSSNTNHGHRRHKRRHADK

SEQ ID NO: 167823 - protein, 258 aa, Zea Mays
MKAQLETTTKVKQLREVHGAWLPPWLATHAARSMEVMSNHWNEHGKPAFDSFLQKASEKTVQTKKWAEPHLETAKTKWMPVAKEKWVTLKKHAKPYVQMVSEKSLEAYQTSSDFVRPHLVNAHQVVDPYFQEAKKLSKPYVDQIATATKPHVEKVRTALKPYTERARHVYGQFLETATTYHQQAQATISDYLHRHEFTKQFVTKELVWYLASALLVTPFFVLYTLLTETFCTKKKKKTPRSSNTNHGHRRHKRRHADK

SEQ ID NO: 167824 - protein, 966 aa, Zea Mays
MFLTGTMGMGIAVALVLNSSRGYCPRPDQYAVSPSPCFTSGIDAASCINYAKEKFLSDCSLLSTDHQTVSVLHTLTSSSRSCSCIQFTVQQTEDIKVARSPPGDFLVTFTHRHHREAAVAARDFLHSNLDFRIRPWQLVALGERHDLYFHVRLCLEGIPPHAWNENIAKRSVARACVLDYVEEDCLSSNKADARCLNLWAWTGNPSDIPKIVWLTITGRSMVIHDNAPPPPGQCGLTFRVLVHIDLVESPSGQGGRLATRSLPWRHGVVDGERGPRDRHDPPPTDHCNGSRRWDREDEDDEDGRRGRRQHKARSWSSRLFRSVSRAPRDRDRDRSEPRRDAHDRGSNTGGRRHHHVRGPCTDGLAHPPGPVSTPHSGPAWQDRGRSRERHSPRRHGHRNRSSPRGLHQRHAPSPAVLLGCSPGSPAGAGEDRWPSPRPPLHRVGGDRCGEDVPQDDHNHSTPPPQTVTSSPGLMSVHAERRFLPGRVYRRRARSAPPEPGQHSPATIMMDAAPGVAVGSETALVTGMETAQQATTVFPELGEPATTTVASFISNHTCPVAPPLLQELHQAPPNLKTKKKQAARATRKSMRLAAIAWPRGNIQERARQVLLKRLGLLPKEGQPSDQATASAALETCINLFKGPLSSVVLQSLMDLCGIIPPQGPAAQSWTTEDHPWKGFDVPCNLADRLLFSASTIVTVGDGKTTKFWHDSWLDGMAPRNLAPHLFELVSRKNKSVAIEINDGNWIRSLRGKITSTVQIEEFVSLWFRLHDFHLQPQVPDSIAWKWNPDGVFTVKSAYNAQFIGSYSHINSDFVWRARAEQKCKIFAWILLQDKLLTANNLATRGWPHQPNCSLCNGPLETGPHLCLHCPFARAVWRQILVWEGLSLLAQADPTHFSSIKDWWEATSSPLPKNQKRDFNGLMIYTLWNIWKERNRRIFENSALTPIQLALKIKEDVCTFKRAMFLQY

SEQ ID NO: 167825 - protein, 429 aa, Zea Mays
MDPHSQRSYLPPHIPDYHTRNYPSNAGPPGPRFFFEQEIVFRMIILNEMVGSIIGKGGSTIRALQSETGACIKILEPVADSDERVVAITARENSDMLHSPAQDAVVRVYSRISEASIDRSSHTPARLLVPSQHIGCLLGKGGSIISEMRKITGANIRIFGNEQIPRCAQRNDEMVQVTGSFQSIQDALLHITGRIRDVILPKPHPSGGMPPYPPVGNIPVHQSRQEQPPPHLHPSGGMPPYPMHPFRPDAPMGHFEMGDHRPPPVHSMEYMGADRMPYLYGVEQGGPRPFLEQPSPRTCPPEAPRTNSEVPRNMSDAVPATDFRKGPVAIENQVATPTGTTEVIIPCNYIGFVCGNNGSEIEEIEKMSGASITVHDPKAGDANSKVVICGDPRRNKEGTEPDSCLHILWSVSNIIDDLITVQYHRRLCS

SEQ ID NO: 167826 - protein, 500 aa, Zea Mays
MEVVSTPAGAGAAASSSSSSSSSTPSPSTRRPTTTLRLLCPSSRVATLRPSRDLHVDHPPVGDEAVLVISGPDTPAAAVRAWEHVVGHRVEGDEAMGGEEEEREVTGAVGCRMLAAGWQVGCVLGKGGKTVERMRQECGAQIRVFRNREQLPPWAPPGDELIHNSDMLHSPAQDAVVRVYSRISEASIDRSSHTPARLLVPSQHIGCLLGKGGSIISEMRKITGANIRIFGNEQIPRCAQRNDEMVQVTGSFQSIQDALLHITGRIRDVILPKPHPSGGMPPYPPVGNIPVHQSRQEQPPPHLHPSGGMPPYPMHPFRPDAPMGHFEMGDHRPPPVHSMEYMGADRMPYLYGVEQGGPRPFLEQPSPRTCPPEAPRTNSEVPRNMSDAVPATDFRKGPVAIENQVATPTGTTEVIIPCNYIGFVCGNNGSEIEEIEKMSGASITVHDPKAGDANSKVVICGDPRRNKEGTEPDSCLHILWSVSNIIDDLITVQYHRRLCS

SEQ ID NO: 167827 - protein, 480 aa, Zea Mays
MSLSIGSFSQVRKALLAVSTCLQDNPRPDTHNIPIGRPFGLPGSGTGCPPGMDPHSQRSYLPPHIPDYHTRNYPSNAGPPGPRFFFEQEIVFRMIILNEMVGSIIGKGGSTIRALQSETGACIKILEPVADSDERVVAITARENSDMLHSPAQDAVVRVYSRISEASIDRSSHTPARLLVPSQHIGCLLGKGGSIISEMRKITGANIRIFGNEQIPRCAQRNDEMVQVTGSFQSIQDALLHITGRIRDVILPKPHPSGGMPPYPPVGNIPVHQSRQEQPPPHLHPSGGMPPYPMHPFRPDAPMGHFEMGDHRPPPVHSMEYMGADRMPYLYGVEQGGPRPFLEQPSPRTCPPEAPRTNSEVPRNMSDAVPATDFRKGPVAIENQVATPTGTTEVIIPCNYIGFVCGNNGSEIEEIEKMSGASITVHDPKAGDANSKVVICGDPRRNKEGTEPDSCLHILWSVSNIIDDLITVQYHRRLCS

SEQ ID NO: 167828 - protein, 539 aa, Zea Mays
MEVVSTPAGAGAAASSSSSSSSSTPSPSTRRPTTTLRLLCPSSRVATLRPSRDLHVDHPPVGDEAVLVISGPDTPAAAVRAWEHVVGHRVEGDEAMGGEEEEREVTGAVGCRMLAAGWQVGCVLGKGGKTVERMRQECGAQIRVFRNREQLPPWAPPGDELIHISGSFSQVRKALLAVSTCLQDNPRPDTHNIPIGRPFGLPGSGTGCPPGMDPHSQRSYLPPHIPDYHTRNYPSNAGPPGPRFFFEQEIVFRMIILNEMVGSIIGKGGSTIRALQSETGACIKILEPVADSDERVVAITARENSDMLHSPAQDAVVRVYSRISEASIDRSSHTPARLLVPSQHIGCLLGKGGSIISEMRKITGANIRIFGNEQIPRCAQRNDEMVQVTGSFQSIQDALLHITGRIRDVILPKPHPSGGMPPYPPVGNIPVHQSRQEQPPPHLHPSGGMPPYPMHPFRPDAPMGHFEMGDHRPPPVHSMEYMGADRMPYLYGVEQGGPRPFLEQPSPRTCPPEVSCMHLFLDKLIRWGITGGLMFTTYF

SEQ ID NO: 167829 - protein, 478 aa, Zea Mays
MISGSFSQVRKALLAVSTCLQDNPRPDTHNIPIGRPFGLPGSGTGCPPGMDPHSQRSYLPPHIPDYHTRNYPSNAGPPGPRFFFEQEIVFRMIILNEMVGSIIGKGGSTIRALQSETGACIKILEPVADSDERVVAITARENSDMLHSPAQDAVVRVYSRISEASIDRSSHTPARLLVPSQHIGCLLGKGGSIISEMRKITGANIRIFGNEQIPRCAQRNDEMVQVTGSFQSIQDALLHITGRIRDVILPKPHPSGGMPPYPPVGNIPVHQSRQEQPPPHLHPSGGMPPYPMHPFRPDAPMGHFEMGDHRPPPVHSMEYMGADRMPYLYGVEQGGPRPFLEQPSPRTCPPEAPRTNSEVPRNMSDAVPATDFRKGPVAIENQVATPTGTTEVIIPCNYIGFVCGNNGSEIEEIEKMSGASITVHDPKAGDANSKVVICGDPRRNKEGTEPDSCLHILWSVSNIIDDLITVQYHRRLCS

SEQ ID NO: 167830 - protein, 208 aa, Zea Mays
MSTAVAEARPRYGFPGSGKGGSGGGGGGHGKEADMAAVGKRRSDGFFIEEVAEEEVLTDTSSVGAPSPSGSSIGENSSSEAGGDDVDEEVESKLKEDDALDCLDALEDSLPVKASRASTPASPGRSPASPRGTRARRTTPTPTTWSAASCRRRTAERTSGTRGHCHPLDSAVLGCGGGTGRMAASGASDPRGPSRCPISTAALRGSSD

SEQ ID NO: 167831 - protein, 733 aa, Zea Mays
MEPDDEALKVARGPPHQRRGISYSQPLTRDAASARRAALRKHSLDDEHILPASHSLNYPLHHDPSGMVPMVYHPPLPPHQHHPSASYSSNTRRSAGGLSEGSMTLERAMSEYGGGHGSLPEFVGAGGGKGIFRVPLRAAMHPGRPPPLEVRPHPLRETQAGSFLRSLAAEPQRRQLWAGAESGIRVWSLDEVFAEWGAGARRGDEESAPFREGMPAPPALCVVVDRANRLLWTGHKDGRIRSWRMDLDAAATAPAPPAAGAGDGGGSVGGSSHGGASNNAPVFREALTWQAYGRTPVLSMVVTSYGEIWSGSEGGMIKVWPYDAIAKSLSLSPEEKHMAALLVERAYIDLRNHCTVGNVCSLPASDVKYMLADHSRAKVWTVTSMTFALWDARTRELLKVFGMDGQVDSAKLETPVMPEQPMEEEINPNPKAKPSKKDKSQGSLNFFQKSRNALIGAADAVRRVATKGTFVEDNRRTGAVAQAMDGTIWSGCTNGAIILWDGNGNRVQEFHHHTSSVQCIKALGERVWVGYASGMIQVMDAEGNFIAGWTGHSCPVIRMAIGGSYIYTLAHHGGIRGWPLTSPGPLDDIIRTELSNKELSYTRMEKINIMVGSWNVAQGKASAESLRSWLGSVASDVGLVVVGLQEVEMGAGFLAISAAKETVGLEGSANGQWWIDNIGKALDEGTSFHRVGSRQLAALLIAAWARKSLKPYVGDVEAAAVPCGLGRAIGNKD

SEQ ID NO: 167832 - protein, 94 aa, Zea Mays
MAVPLLTQKIVKKRVKQFKRPHLDRYKCLKPSWRRPKGIDSRVRRKFKGCTLMPNIGYGSDKKTRHYLPNKFKKFVVHNVSELELLLMHNRTTL

SEQ ID NO: 167833 - protein, 157 aa, Zea Mays
MAENDYLLSGGLEGIGSTGKKCEVARRRNGLDTNKRKKAKKDGGPTGRELNIGQASFHSEPSNASNQFIPDQLMQGHYVLDHNFGPGSSQNLHDNLNQFDQASSAPTLQQQPFTGNGQLTQGYPGDMHALQFVEPTPQIDHQNGDEGQSSIPVWDFL

SEQ ID NO: 167834 - protein, 59 aa, Zea Mays
MWESGRVVSRRLVARPPPQPTTTTMRGWSFTRAERTGVGGLARRAGGHYQVDMKRGQGR

SEQ ID NO: 167835 - protein, 455 aa, Zea Mays
MIRTLVSLMRTLDPMPEERTILMKLLYYDDVTPEDYEPPFFKCCADNEAISIWNKNPLKMEVGNVNSKHLVLALKVKSVLDPCDDDNVNSEGDGMTVDNESDHDDDFSDTEVHPPKADHYIIAPNEGKDKDQDTGTISEDDTQDTAHEEELTSQVKEWICSRDSGTINVSDVLSNFPDISMELVEDIMDRLLKDGILSRASKDGYTVNQKADPKTPHIKKEAIMPDVSPTNVTKHNNGDLLYMKALYHALPMDYVTIAKLQGKLDGEASQNTVRKLIDKMVQDGYVKNSANRRLGKAVIHSESTNKRLLEIKKILEVNEGEKMAIDTNTEHPEPEHKDLLRVYEVGDGSTMGCLHSIGSDLTRTRELPELQQNVSMQSGQEASTVGKDSSRTPTSVRELAVPVCSLESGVLGKRIKRSLTGGNEMQSTQDKRSRKASMVKEAILQHVKCQNPQAQ

SEQ ID NO: 167836 - protein, 610 aa, Zea Mays
MAQKTKEAEITEQDSLLLTRNLLRIAIYNISYIRGLFHEKYFSDKSVPALEMKIKKLMPMDAESRRLIDWMEKGVYDALQKKYLKTLLFCICEKEEGPMIEEYAFSFSYPNTSTEEVAMNMSRTGSKKGSTTFTSNASEVTPDQMRSSACKMIRTLVSLMRTLDPMPEERTILMKLLYYDDVTPEDYEPPFFKCCADNEAISIWNKNPLKMEVGNVNSKHLVLALKVKSVLDPCDDDNVNSEGDGMTVDNESDHDDDFSDTEVHPPKADHYIIAPNEGKDKDQDTGTISEDDTQDTAHEEELTSQVKEWICSRDSGTINVSDVLSNFPDISMELVEDIMDRLLKDGILSRASKDGYTVNQKADPKTPHIKKEAIMPDVSPTNVTKHNNGDLLYMKALYHALPMDYVTIAKLQGKLDGEASQNTVRKLIDKMVQDGYVKNSANRRLGKAVIHSESTNKRLLEIKKILEVNEGEKMVTYHAIDTNTEHPEPEHKDLLRVYEVGDGSTMGCLHSIGSDLTRTRELPELQQNVSMQSGQEASTVGKDSSRTPTSVRELAVPVCSLESGVLGKRIKRSLTGGNEMQSTQDKRSRKASMVKEAILQHVKCQNPQAQ

SEQ ID NO: 167837 - protein, 353 aa, Zea Mays
MAQKTKEAEITEQDSLLLTRNLLRIAIYNISYIRGLFHEKYFSDKSVPALEMKIKKLMPMDAESRRLIDWMEKGVYDALQKKYLKTLLFCICEKEEGPMIEEYAFSFSYPNTSTEEVAMNMSRTGSKKGSTTFTSNASEVTPDQMRSSACKMIRTLVSLMRTLDPMPEERTILMKLLYYDDVTPEDYEPPFFKCCADNEAISIWNKNPLKMEVGNVNSKHLVLALKSVLDPCDDDNVNSEGDGMTVDNESDHDDDFSDTEVHPPKADHYIIAPNEGKDKDQDTGTISEDDTQDTAHEEELTSQVKEWICSRDSGTINVSDVLSNFPDISMELVEGNAGKGSVCWNQPFFSRSC

SEQ ID NO: 167838 - protein, 331 aa, Zea Mays
MEGKDKDQDTGTISEDDTQDTAHEEELTSQVKEWICSRDSGTINVSDVLSNFPDISMELVEDIMDRLLKDGILSRASKDGYTVNQKADPKTPHIKKEAIMPDVSPTNVTKHNNGDLLYMKALYHALPMDYVTIAKLQGKLDGEASQNTVRKLIDKMVQDGYVKNSANRRLGKAVIHSESTNKRLLEIKKILEVNEGEKMAIDTNTEHPEPEHKDLLRVYEVGDGSTMGCLHSIGSDLTRTRELPELQQNVSMQSGQEASTVGKDSSRTPTSVRELAVPVCSLESGVLGKRIKRSLTGGNEMQSTQDKRSRKASMVKEAILQHVKCQNPQAQ

SEQ ID NO: 167839 - protein, 433 aa, Zea Mays
MSPKPAKPTPATEFEYCELCRHHHDHGRRHRYIVKHRRNLDAALTCFRSKLSDLRRAFLPGSPSSQPPRTRLWCPFCSIDLVDLDSRSAGNNAIYHMASSEHLKGVKDFLWKHGGRMDQVVSLRISEDVLAKWEKGPECLSTGTKKGTEELIGPSLKQIKDIQNEYACDSLDSFAQNNIPSFSNTASYVVMPLQNSTNGAYGSISTACHGASSSGSASHSAPYGTVGLPITPWGSAETHKLQGALSTNWFHSSGHQSTVFVNGASQSLSCSDHMLPLRVQQSHTGGNLSNGSKANVHTGAPPPWLKANEHDPKNLSLKSCGLSSRKGKLRKLNPNRVGAAWAERRRAEMEMEKQGEIVPATSDSSWLPNFGSVWQSGTRKESRKEFEKSHKIHDTKSDHDLSLEIKPYISKRMRVGAEKASDKAEELGSHLPQ

SEQ ID NO: 167840 - protein, 399 aa, Zea Mays
MSPKPAKPTPATEFEYCELCRHHHDHGRRHRYIVKHRRNLDAALTCFRSKLSDLRRAFLPGSPSSQPPRTRLWCPFCSIDLVDLDSRSAGNNAIYHMASSEHLKGVKDFLWKHGGRMDQVVSLRISEDVLAKWEKGPECLSTGTKKGTEELIGPSLKQIKAMGHMALLVQRVMELPVLEVLHILLHMELSACPSHLGDRPKHISCRVHCLQTGFTAVVLKQKSTVFVNGASQSLSCSDHMLPLRVQQSHTGGNLSNGSKANVHTGAPPPWLKANEHDPKNLSLKSCGLSSRKGKLRKLNPNRVGAAWAERRRAEMEMEKQGEIVPATSDSSWLPNFGSVWQSGTRKESRKEFEKSHKIHDTKSDHDLSLEIKPYISKRMRVGAEKASDKAEELGSHLPQ

SEQ ID NO: 167841 - protein, 440 aa, Zea Mays
MSPKPAKPTPATEFEYCELCRHHHDHGRRHRYIVKHRRNLDAALTCFRSKLSDLRRAFLPGSPSSQPPRTRLWCPFCSIDLVDLDSRSAGNNAIYHMASSEHLKGVKDFLWKHGGRMDQVVSLRISEDVLAKFQWEKGPECLSTGTKKGTEELIGPSLKQIKDIQNEYACDSLDSFAQNNIPSFSNTASYVVMPLQNSTNGAYGSISTACHGASSSGSASHSAPYGTVGLPITPWGSAETHKLQGALSTNWFHSSGTETKGHQSTVFVNGASQSLSCSDHMLPLRVQQSHTGGNLSNGSKANVHTGAPPPWLKANEHDPKNLSLKSCGLSSRKGKLRKLNPNRVGAAWAERRRAEMEMEKQGEIVPATSDSSWLPNFGSVWQSGTRKESRKEFEKSHKIHDTKSDHDLSLEIKPYISKRMRVGAEKASDKAEELGSHLPQ

SEQ ID NO: 167842 - protein, 347 aa, Zea Mays
MDWDLKMPVSWDLPDLEHDAMPPPPPVSAASTAAASGIAAAAAAPSSATAPSRAECSVDLKLGGLGEFGAADGTATKEPAAATAAPSASPMKRPRLGPGGAGGAQCPSCAVDGCKADLSKCRDYHRRHKVCEAHSKTPVVVVAGREMRFCQQCSRFHLLLEFDEAKRSCRKRLDGHNRRRRKPQPDTMNSGSFMTSQQGTRFSSFPAPRPEPSWSGVIKSEDSSYYTHHPVLSNRPHVAGTSTSPAYSKEGRRFPFLQDGDQVSFSASVRRLPGAGLVRRLRRRPCRGHRRVRLPPQRGERAVQHSPSAELRRRPRDELPRHIPRRRRGLLRRDVPFAPVLVAVAYR

SEQ ID NO: 167843 - protein, 353 aa, Zea Mays
MDWDLKMPVSWDLPDLEHDAMPPPPPVSAASTAAASGIAAAAAAPSSATAPSRAECSVDLKLGGLGEFGAADGTATKEPAAATAAPSASPMKRPRLGPGGAGGAQCPSCAVDGCKADLSKCRDYHRRHKVCEAHSKTPVVVVAGREMRFCQQCSRFHLLLEFDEAKRSCRKRLDGHNRRRRKPQPDTMNSGSFMTSQQGLFSSAGTRFSSFPAPRPEPSWSGVIKSEDSSYYTHHPVLSNRPHVAGTSTSPAYSKEGRRFPFLQDGDQVSFSASVRRLPGAGLVRRLRRRPCRGHRRVRLPPQRGERAVQHSPSAELRRRPRDELPRHIPRRRRGLLRRDVPFAPVLVAVAYR

SEQ ID NO: 167844 - protein, 166 aa, Zea Mays
MNSGSFMTSQQGLFSSAGTRFSSFPAPRPEPSWSGVIKSEDSSYYTHHPVLSNRPHVAGTSTSPAYSKEGRRFPFLQDGDQVSFSASVRRLPGAGLVRRLRRRPCRGHRRVRLPPQRGERAVQHSPSAELRRRPRDELPRHIPRRRRGLLRRDVPFAPVLVAVAYR

SEQ ID NO: 167845 - protein, 236 aa, Zea Mays
MNSGSFMTSQQGTRFSSFPAPRPEPSWSGVIKSEDSSYYTHHPVLSNRPHVAGTSTSPAYSKEGRRFPFLQDGDQVSFSASGAGTLEVSTVCQPLLKTTAAVAPPPPESSKMLAPVLDSDCALSLLSSPANSSSVDVSRMVQPAERIPMAQPLVPGLQHHQFGGSPVPDWFAGSGAVPAAGTGGFACPHSVESEQFNTVLVPSSDGGHEMNYHGIFHVGGEGSSDGTSPSLPFSWQ

SEQ ID NO: 167846 - protein, 119 aa, Zea Mays
MRPASDAHQSRLLYELCALLLTVLRASPDDGAVARPLLPRHVTPAGVASMLLGASMALMLCGSVTFMLGFFLMPWVVGLGFLFLFVGFITNLSGIWRDIILWPSVACSASDSPKEAPSP

SEQ ID NO: 167847 - protein, 86 aa, Zea Mays
MNTRGICFPSLHPCRREAKYKVRLPRRSTEAGSCWSSSHCQPIFSFLDNPSFTCDTAASCQVLNGFVLCLGGYGILACTYGKEGRV

SEQ ID NO: 167848 - protein, 807 aa, Zea Mays
MLEWFEGLGVEMEISDMSFSVSTELGASGSRCEWGSRNGISGLLAQKSNALSPSFWRMIREILKFKNDALRYLEDHENNPDMDRNETLGQFIRSHGYSQFFQEAYLTPICACIWSCPSQGVLGFSAFFVLSFCRNHHLLQLFGRPQWLTVKGRSHSYVHKVREELESMGCQIKTSCEIKSVSSSEGGFRVTVFDGSEETYDRIIFGVHAPDALKILGAEATHEELRILGAFQYVYSDIYLHSDKSLMPRSLSAWSSWNFLGTTSKGVCVTYWLNLLQNIESTSRPFLVTLNPPHVPDHVFLKWYTSHPVPSVAAAKASLELHHIQGNRGIWFCGAYQGYGFHEDGLKAGKAAAQDLLGKESDLLVNPKQMIPSWSEAGARLLVTRFLGQYVSVGNLVLLEEGGTMFSFGEVGKKCHVKSVLRVHDPMFYWKVATEADLGLADAYINGYFSFVDKREGLLNLFLILIANRDANKSSSSAAGKRGWWTPLLLTAGVASAKYFLRHIARRNSVSQTRQNISQHYDLSNEFFSLFLDPSMTYSCAIFKTEDQSLEAAQLQKVCLLIDKAKVERDHHVLEIGCGWGSLAIQLVKQTGCKYTGITLSVEQLKYAQRKVKEAGLEDHISFMLCDYRQIPTQRKYDRIISCEMIEGVGHEYMDDFFGCCESLLAQDGIFVLQFISIPEERYEEYRRSSDFIKEYIFPGGCLPSLARITSAMSAASRLCIEHLENIGYHYYPTLIQWRDNFMANKDAILALGFDEKFIRIWEYYFIYCAAGFKSRTLGNYQIVFSRPGNDKLGDSGIHSLSKLSGS

SEQ ID NO: 167849 - protein, 345 aa, Zea Mays
MLEWFEGLGVEMEISDMSFSVSTELGASGSRCEWGSRNGISGLLAQKSNALSPSFWRMIREILKFKNDALRYLEDHENNPDMDRNETLGQFIRSHGYSQFFQEAYLTPICACIWSCPSQGVLGFSAFFVLSFCRNHHLLQLFGRPQWLTVKGRSHSYVHKVREELESMGCQIKTSCEIKSVSSSEGGFRVTVFDGSEETYDRIIFGVHAPDALKILGAEATHEELRILGAFQYVYSDIYLHSDKSLMPRSLSAWSSWNFLGTTSKGVCVTYWLNLLQTTSFLNGTLATLSHLWLPQRLLLSFITFKETEEFGFVGHTKVMVSMKMDSRLGKLQLKICLVRRVTFW

SEQ ID NO: 167850 - protein, 77 aa, Zea Mays
MISELPSENGPNYHLESECLPLERMILNPFYVALHIPFIAQEMRESFIHREDSGLCSIEVHLILICLSCPTIHGAHI

SEQ ID NO: 167851 - protein, 227 aa, Zea Mays
MLGAARRQLGSGPMLGQVLRRLRPAVAAEVARGYSAAAKEMTVRDALNSALDEEMSADPSVFLMGEEVGEYQGAYKISKGLLDRYGPDRVLDTPITEAGFTGIGVGAAYHGLRPIIEFMTFNFSMQAIDHIINSAAKSNYMSAGQISVPIVFRGPNGAAAGVGAQHSQDLRFSHHTLQKMPEACSKLLSGTLILLFSWKMNCFMENLSQFLLKCLILVFAYRLAKLR

SEQ ID NO: 167852 - protein, 270 aa, Zea Mays
MLGAARRQLGSGPMLGQVLRRLRPAVAAEVARGYSAAAKEMTVRDALNSALDEEMSADPSVFLMGEEVGEYQGAYKISKGLLDRYGPDRVLDTPITEAGFTGIGVGAAYHGLRPIIEFMTFNFSMQAIDHIINSAAKSNYMSAGQISVPIVFRGPNGAAAGVGAQHSQCYAAWFAHVPGLKVLTPYSSEDARGLLKAAIRDPDPVIFLENELLYGESFPVSAEVLDSSFCLPIGKAKIEREGKDVTITAFSKMVGYALQRYCPRKESVLR

SEQ ID NO: 167853 - protein, 377 aa, Zea Mays
MLGSLLSSNTLIISSAHLRKRITLLRMKMMTITMAVMMESYLLIMEKIRKLRNLGFFNRSKEEYSSVPHERQRIVSQSAPLFPEKKLNTEERIKDLRRSATRKLNTYVLPTPNDVGATSQRASGNPTSEPLESKGAFHSSPLHSSADIRDLGDSNLPSPTRLSNVQSVLKDSNTNKTETRKVLPVGDLALPSYHDLKTSDNKKVKRGSFSGPIASRPRSTENIDVISAAPRHSSAHQPVHMRVSPGNSPPPISSPKIKELHELPRPPVNTSKNIAFPSLVAHSAPLAPNPASLTPKVQDHFRTKQTLQRTASPLPTPPPGSIARSFSIPSRGISDSKETEDQHKGAARMSLSSLPSAQTFLEDRQPLSSAAGSVSKT

SEQ ID NO: 167854 - protein, 505 aa, Zea Mays
MRVHVLNTITTPSLSLLNELQTVEEMKHQCDEKKELYEFMVNTQKEKGRSKNAKGDNGASEQLKQAQEDYQEEATLFLFRLKSLKQGQFRSLFTQAARHHAAQLNLFRKGVKSLEAVEPHVRLAAEQQHIDHQFSALEEEDYLVEDENDDDYNGSHDGELSFDYGENKEVEESGNASRNHTEGFFNRSKEEYSSVPHERQRIVSQSAPLFPEKKLNTEERIKDLRRSATRKLNTYVLPTPNDVGATSQRASGNPTSEPLESKGAFHSSPLHSSADIRDLGDSNLPSPTRLSNVQSVLKDSNTNKTETRKVLPVGDLALPSYHDLKTSDNKKVKRGSFSGPIASRPRSTENIDVISAAPRHSSAHQPVHMRVSPGNSPPPISSPKIKELHELPRPPVNTSKNIAFPSLVAHSAPLAPNPASLTPKVQDHFRTKQTLQRTASPLPTPPPGSIARSFSIPSRGISDSKETEDQHKGAARMSLSSLPSAQTFLEDRQPLSSAAGSVSKT

SEQ ID NO: 167855 - protein, 539 aa, Zea Mays
MKSSLRKLRGFALQRQEQRVDRDRGRGHATAAATAADELLAAAQDMADMRSCYDNLLSVAAAIANSAYEFSEALQEMGTCLLKRVTPNKDGINDKVLLLLGKSQFELRKLLDSYRVHVLNTITTPSLSLLNELQTVEEMKHQCDEKKELYEFMVNTQKEKGRSKNAKGDNGASEQLKQAQEDYQEEATLFLFRLKSLKQGQFRSLFTQAARHHAAQGFFNRSKEEYSSVPHERQRIVSQSAPLFPEKKLNTEERIKDLRRSATRKLNTYVLPTPNDVGATSQRASGNPTSEPLESKGAFHSSPLHSSADIRDLGDSNLPSPTRLSNVQSVLKDSNTNKTETRKVLPVGDLALPSYHDLKTSDNKKVKRGSFSGPIASRPRSTENIDVISAAPRHSSAHQPVHMRVSPGNSPPPISSPKIKELHELPRPPVNTSKNIAFPSLVAHSAPLAPNPASLTPKVQDHFRTKQTLQRTASPLPTPPPGSIARSFSIPSRGISDSKETEDQHKGAARMSLSSLPSAQTFLEDRQPLSSAAGSVSKT

SEQ ID NO: 167856 - protein, 567 aa, Zea Mays
MDPSFRFDPDSSDDEAAGAPPRGGPVQSPWEFSSYAESVAAEHARRRTTSIDEKISLLRQERGNPVVPDDSGSDVSGSGEDDSDDEEIEGESGDEEDELEIEGSGDEEAIGDREGDEDGGDEKGGGELGEEDDAHEEEDTVDQNDTSGPVDPSNFFSSSDRASFHANSFLELNLSRPLVRACEALGYQKPTPIQAACIPLALTGRDICGSAITGSGKTAAFSLPVLERLLFRPKRVPAIRVLILTPTRELAAQIHSMVEKLAQFTDIRCCLIVGGLSTKIQEVALRSMPDIVVATPGRIIDHLRNSLSVGLEDLAVVILDEADRLLELGFSAEIQELIRMCPKRRQTMLFSATMTEEIDELVKLSLNKPVRLEADPSLKRPATLTEEVVRIRRARESNHGTKQSAHRLKIIFGLSGMKAAELHGNLTQAQRLEALELFKKKEVDFLIATDVAARGIDIVGVQTVINFACPRDVKTYLHRVGRTARAGREGYAVTFVTDDDRCLLKAIAKKAGSQLKSRIVAEKPVAECARLIEQLEGQISIIIREERVEREARKAEMEIAKSRASEF

SEQ ID NO: 167857 - protein, 583 aa, Zea Mays
MDPSFRFDPDSSDDEAAGAPPRGGPVQSPWEFSSYAESVAAEHARRRTTSIDEKISLLRQERGNPVVPDDSGSDVSGSGEDDSDDEEIEGESGDEEDELEIEGSGDEEAIGDREGDEDGGDEKGGGELGEEDDAHEEEDTVDQNDTSGPVDPSNFFSSSDRASFHANSFLELNLSRPLVRACEALGYQKPTPIQAACIPLALTGRDICGSAITGSGKTAAFSLPVLERLLFRPKRVPAIRVLILTPTRELAAQIHSMVEKLAQFTDIRCCLIVGGLSTKIQEVALRSMPDIVVATPGRIIDHLRNSLSVGLEDLAVVILDEADRLLELGFSAEIQELIRMCPKRRQTMLFSATMTEEIDELVKLSLNKPVRLEADPSLKRPATLTEEVVRIRRARESNQEAVLLALCLKTFKRSVIIFSGTKQSAHRLKIIFGLSGMKAAELHGNLTQAQRLEALELFKKKEVDFLIATDVAARGIDIVGVQTVINFACPRDVKTYLHRVGRTARAGREGYAVTFVTDDDRCLLKAIAKKAGSQLKSRIVAEKPVAECARLIEQLEGQISIIIREERVEREARKAEMEIAKKI

SEQ ID NO: 167858 - protein, 110 aa, Zea Mays
MLEDEDDEKTKENDRGKQPMKGQSLVDAAYRKAKSLKAASKRAPGARKGKKEKNERQHSEKAPNRHEEMRDLFQNDMSEWKQGRSSKKNNKFAPKKSRNSFKSKARYKRK

SEQ ID NO: 167859 - protein, 75 aa, Zea Mays
MTFVIVTVFSLPAVLNIVFSWHHATPPPPTHTHKENQHIHPPKKKRNTHTIGSDDEVIATYSILNVDPYSFYNQK

SEQ ID NO: 167860 - protein, 84 aa, Zea Mays
MLVLCPSSAQYKCMHVEDYSDQTGTKEASPGLNRHISVLISSDGLIPDSSRHLKCLCKKKLHFRWCEWAFRTSENRLIIPWRLH

SEQ ID NO: 167861 - protein, 89 aa, Zea Mays
MEIALKLFQAEHHILPRTSTEASICATAINNSCRFVFFFQQGIKGEVHCLLHYVRSALLYTLKAILCLIFRFVVKYTVLSQASFTFFSE

SEQ ID NO: 167862 - protein, 318 aa, Zea Mays
MKRYTYDPSVSHVQELFEAAKAANDLNAIAAILGKYPYHPESLLTFAELFKYSGEHQSSADAVEKCLFALECAWHPLFSPLQGNYQLKFNHDTNKPLFTALFSHMKNLDRRGCHRSALEVCKFLLSLDFDDPKGSLFCIDYFALRSQQYKWLEQFAEEYQCDNSLWLFPNFSFSLATARFYLECDAASEGSDDADKSTSLDLMKQALMLHPMVLRKIVDKAPLKDSSWTQILRNVFFGSAKPGSPSLEHMINIYVERHYIMWRFPELQNLLKEAALLVIESLKQDNREALDWACVRKEAFSSDKNETATIYGRSRNVA

SEQ ID NO: 167863 - protein, 162 aa, Zea Mays
MELSTPVGSSLARTATMALVSPSFKITNQMCARGMPLECQFPHRLPSVACSMLLNTQPSQRTNHKDCGLLQVQCTENLMQSPVSFSDFSVSVCAQEDGLIKLQVNVSGTMTDSIFEKVFTKNVAAAQPLPGFRRMKGDTERSCSTLNRAIKSEERNNQENYK

SEQ ID NO: 167864 - protein, 160 aa, Zea Mays
MELSTPVGSSLARTATMALVSPSFKITNQMCARGMPLECQFPHRLPSVACSMLLNTQPSQRTNHKDCGLLQVQCTENLMQSPVSFSDFSVSVCAQEDGLIKVNVSGTMTDSIFEKVFTKNVAAAQPLPGFRRMKGDTERSCSTLNRAIKSEERNNQENYK

SEQ ID NO: 167865 - protein, 163 aa, Zea Mays
MELSTPVGSSLARTATMALVSPSFKITNQMCARGMPLECQFPHRLPSVACSMLLNTQPSQRTNHKDCGLLQVQCTENLMQSPVSFSDFSVSVCAQEDGLIKLQVNVSGTMTDSIFEKVFTKNVAAAQPLPGFRRMKGGILLKLLQPQISVHHLTILNCLKLCM

SEQ ID NO: 167866 - protein, 133 aa, Zea Mays
MCARGMPLECQFPHRLPSVACSMLLNTQPSQRTNHKDCGLLQVQCTENLMQSPVSFSDFSVSVCAQEDGLIKLQVNVSGTMTDSIFEKVFTKNVAAAQPLPGFRRMKGDTERSCSTLNRAIKSEERNNQENYK

SEQ ID NO: 167867 - protein, 127 aa, Zea Mays
MCPPYSAMTEWQHIVLSADKMDLVFETVQQVHDVPFGSFFEVHCRWSVKTISSSLCSLNISAGAHFKKWCIMQSKIKSGAVDELKKEVKEMLDFAQGYILKVRSPDQENSNLAQQDNMAPDAVSGDQ

SEQ ID NO: 167868 - protein, 525 aa, Zea Mays
MATAEPGPSPPAPKPTCAVTFGRSTLLGRYLAAALAASGRWSAVAILDPSPTSPSPPPGPPASHIVYHHDVDFSDPARLVSALAGAAAVFHVDATTAAASGSDGSFLSLHRLAVEGTRRLLAACRAAGVGRVVYTGSADVVAAVARDVINADEDSAPYPDKFGNAMSELRAQVEMMVLGADGVDGVRTCVLRPSNLFGPGDSSLVRFVAGYARSPLGKFVIGSGSNMSDFTYVENVAHANICAEQALSSNAASVAGKPFFVTNDEPMETWEFMNCMMEAMGCQRPRINLPAKMLLFAALFSKMIHHRLGFQMLSTPLLHPDTIYFLSCTRTFNTSRARRLLGYHPIVSLEDGIMRTLGSFSELADNLGLSRKQGSCGSSKADKLLGSGTAADILLWRDEKRTFSFVTVLFLLFYWFLLSDRTFVSSAAKFLLVLSLALFIHGVLPSEVFGFTVEKVTSDHFEVSHSALRNSLMCVASAWNGSFHKLRLLAEGICISVQHQTNAELSVQIFDGTCTGILVHCLHCL

SEQ ID NO: 167869 - protein, 260 aa, Zea Mays
MATAEPGPSPPAPKPTCAVTFGRSTLLGRYLAAALAASGRWSAVAILDPSPTSPSPPPGPPASHIVYHHDVDFSDPARLVSALAGAAAVFHVDATTAAASGSDGSFLSLHRLAVEGTRRLLAACRAAGVGRVVYTGSADVVAAVARDVINADEDSAPYPDKFGNAMSELRAQVEMMVLGADGVDGVRTCVLRPSNLFGPGDSSLVRFVAGYARSPLGKFVIGSGSNMSDFTYVENVAHANICAEQALSSNAASVAGKVHF

SEQ ID NO: 167870 - protein, 409 aa, Zea Mays
MATAEPGPSPPAPKPTCAVTFGRSTLLGRYLAAALAASGRWSAVAILDPSPTSPSPPPGPPASHIVYHHDVDFSDPARLVSALAGAAAVFHVDATTAAASGSDGSFLSLHRLAVEGTRRLLAACRAAGVGRVVYTGSADVVAAVARDVINADEDSAPYPDKFGNAMSELRAQVEMMVLGADGVDGVRTCVLRPSNLFGPGDSSLVRFVAGYARSPLGKFVIGSGSNMSDFTYVENVAHANICAEQALSSNAASVAGKPFFVTNDEPMETWEFMNCMMEAMGCQRPRINLPAKMLLFAALFSKMIHHRLGFQMLSTPLLHPDTIYFLSCTRTFNTSRARRLLGYHPIVSLEDGIMRTLGSFSELADNLGLSRKQGSCGSSKADKLLGSGTGLVLQSRRSHLIILKYHTQH

SEQ ID NO: 167871 - protein, 366 aa, Zea Mays
MATAEPGPSPPAPKPTCAVTFGRSTLLGRYLAAALAASGRWSAVAILDPSPTSPSPPPGPPASHIVYHHDVDFSDPARLVSALAGAAAVFHVDATTAAASGSDGSFLSLHRLAVEGTRRLLAACRAAGVGRVVYTGSADVVAAVARDVINADEDSAPYPDKFVIGSGSNMSDFTYVENVAHANICAEQALSSNAASVAGKPFFVTNDEPMETWEFMNCMMEAMGCQRPRINLPAKMLLFAALFSKMIHHRLGFQMLSTPLLHPDTIYFLSCTRTFNTSRARRLLGYHPIVSLEDGIMRTLGSFSELADNLGLSRKQGSCGSSKADKLLGSGTGICISVQHQTNAELSVQIFDGTCTGILVHCLHCL

SEQ ID NO: 167872 - protein, 78 aa, Zea Mays
MKPAMPMPPTLAATTLLPLPSRRHSFSLPLSLSSLSIAHLSPPPLPKPRHQEFAPEEAQPGGSAAAWLVVVEDRGRGG

SEQ ID NO: 167873 - protein, 238 aa, Zea Mays
MASTWRAKTVGPAVPSAYLDNRLPDDTSYGFHLYTPMTETTKAWLDARPARSVVYASLGSIAKPDAAQTAEMAEGLYGSGKAFLWVVRASESAKLPENFAGRTTEERGLVVTWSPQLEVLAHPAVGCFVTHCGWNSTMEALGAGVPMVAMPQWSDQTMNAKYIEDVWRVGVRVRPDGRGVVRKEELERCVREVMEGERSLDYIRNAAGWKEKARSAMSEGGSSDKNVLDFLGALGLKK

SEQ ID NO: 167874 - protein, 289 aa, Zea Mays
MVQTLISVEGIEINAVNRAGETAFAIADKQGNEELVNILREVGGGTAKEQVNPPNPAKQLKQTVSDIRHDVQSQMKQTRQTKMQFQKIKKRIQKLHIGGLNNAINSNTVVAVLIATVAFAAIFQLPGNFLEDMTQAPDPDMTLGQALIASDPAFIIFLVFDALALFISLAVVVVQTSLIVVEQKAKKKMVFVINKLMWLACLCISAAFIALTYVVVGRDDEWLAWCTMAIGTVTMVATVGSMCYCVVAHRMEEKSLRKIRRTSMSQSWSISIDSEAELMNSEYKKMYAL

SEQ ID NO: 167875 - protein, 68 aa, Zea Mays
MAHGRERSVMETCAGIELRRGSPQATYSSAGHHFLLPAGYVQHFYCCCSKSNSNKLPIFFLIYINKVF

SEQ ID NO: 167876 - protein, 335 aa, Zea Mays
MRGREPARAPVSDSLFFPLKTRKNLPGDATKRAGPHRPNLTESTSIPVPTPTAEHQPRRKVGRNARDVCPRRMRRAAVAATTTTTRMAAEEMRRASASTATAEMPASPAPAQAGSRWARVWPRALRWIPTSTDRIIAAEKRLLTIVKTGYVQERVNIGSAPPGSKVRWFRSASDEPRFINTVTFDSKENAPTLVMVHGYGASQGFFFRNFDALASRFRVIAIDQLGWGGSSRPDFTCKSTEETEAWFIDSFEEWRKAKNLSNFILLGHSFGGYVAAKYALKHPEHVQQLILVGPAGFSSETEHSSEWLTKFRATWKGMLMNRLWESNFTPQRVIR

SEQ ID NO: 167877 - protein, 345 aa, Zea Mays
MECNGREKATSLFRRVPETNVISWTAMIGGLARNGCADEALALFIVMLAHEHIHPDDFTFGSVLHACATAASLASGRMVHCRAFRSGFAAYLYVANSLMDMYAKCGDVEGGTNVFGAIVNKDLVSWNTMLFGFAINGWANEALVVYDSMKSHEVCPDEVTFAGLLTACNHSGLLEHGESFFESMVSVHGIQPKPEHLSCILDMYARSGNITKAMEMLDLYSETIRAHNSDIREALLSACSLEHLNFRVARKAMEDMVATKSAGDVGYVMLSNLFCAAGQWNQAEQVRIAMAEHGIKKTPGCSWIEVQGAVKVFASGAQDLDHSGSVLDVISLLDEEMTNSMYFDL

SEQ ID NO: 167878 - protein, 419 aa, Zea Mays
MDEDWSTDPAHRRRRLLLPTSCQTQTQNPPQTQPPLPMDLASQYNRRFAPSLFLPPMAPRLASSSGFSVFSNYQSPPTLVPTAAGAGSHLARSLPKLPLFSMDSLGLLPYSTNPAAGAAVPRSLSSPGGSEQQVPSASGLPPRGAGHRRSRSDFLVGFSRPNQLSLPMTPAAGEYRSREASVLEELFRSYRDPNLSSSGDNNSERNDHLGRQLTGQGAWSPGDSSDNDAESWAASGSAAAGTSASHSHTRHCRSLSVDSIMGNLNFGGLGQVSLRLPPPSPVAGAGGSLSRAGSGASGGAVATASSQPANGEFSESEMKKIMANDRLAELALVDPRRVKRILANRISAAKSKERKVKYMGELERKVRVLQMETSTLSSKAASSQRECEALRILNNEMKIRLQAMEQQAQLKDAPETNCW

SEQ ID NO: 167879 - protein, 671 aa, Zea Mays
MSPALAAAVEPMAVDDSASKKAKRKQLKAAAAAAAAEAEEEAASAKKKEKKEKKRKAKEPSPPLPSAASSGEEKSSTSSEETAPTAKKAKKDKTKKNVEVSSSASDDDGEITAGSDEDPADPNALTNFRISEPLRQSLRSKGIKALFPIQATTFDLVLDGSDLVGRARTGQGKTLAFVLPILESLVNGANKASRRTEHGRTPSVLVLLPTRELANQVHADFEFYGATFGLSACCVYGGSPYRPQEMALRRGVDIVVGTPGRIKDFIVKGTLNLKCLKFRVLDEADEMLNMGFVDDVELILGKVEDATKVQTLLFSATLPDWVNKLSMRFLKVDRKTVDLVGNEKLKASASVKHLALPCNKAARAQLIPDIIRCYSHGGRTIIFTETKDSASELSGLIPGSRALHGDVVQAQREVILAGFRSGKFQVLVATNVAARGLDINDVQLIIQCEPPRDVEAYIHRSGRTGRAGNTGVAVMLYEPRYKYSVSRLERESGVKFEHISAPQPTDVAQSAGSEAADAIASVSDSVIPVFRQQAEQLLSSSTLSAADLLAKALAKAVGYTDIKKRSLLSSMEDYATLHLQTGRQMWSPGFAFTILKRFMPEEKLADVKGATLTADGTGVVFDVPAADVEDYIQASENAAQVTIDEVQQLPPLQEKQQQQSRGGGNRFNRRN

SEQ ID NO: 167880 - protein, 682 aa, Zea Mays
MSPALAAAVEPMAVDDSASKKAKRKQLKAAAAAAAAEAEEEAASAKKKEKKEKKRKAKEPSPPLPSAASSGEEKSSTSSEETAPTAKKAKKDKTKKNVEVSSSASDDDGEITAGSDEDPADPNALTNFRISEPLRQSLRSKGIKALFPIQATTFDLVLDGSDLVGRARTGQGKTLAFVLPILESLVNGANKASRRTEHGRTPSVLVLLPTRELANQVHADFEFYGATFGLSACCVYGGSPYRPQEMALRRGVDIVVGTPGRIKDFIVKGTLNLKCLKFRVLDEADEMLNMGFVDDVELILGKVEDATKVQTLLFSATLPDWVNKLSMRFLKVDRKTVDLVGNEKLKASASVKHLALPCNKAARAQLIPDIIRCYSHGGRTIIFTETKDSASELSGLIPGSRALHGDVVQAQREVILAGFRSGKFQVLVATNVAARGLDINDVQLIIQCEPPRDVEAYIHRSGRTGRAGNTGVAVMLYEPRYKYSVSRLERESGVKFEHISAPQPTDVAQSAGSEAADAIASVSDSVIPVFRQQAEQLLSSSTLSAADLLAKALAKAVGYTDIKKRSLLSSMEDYATLHLQTGRQMWSPGFAFTILKRFMPEEKLADVKGATLTADGTGVVFDVPAADVEDYIQASENAAQVTIDEVQQLPPLQEKQQQQSRGNSGGGRFGRGGGGNRFNRRN

SEQ ID NO: 167881 - protein, 230 aa, Zea Mays
MLYEPRYKYSVSRLERESGVKFEHISAPQPTDVAQSAGSEAADAIASVSDSVIPVFRQQAEQLLSSSTLSAADLLAKALAKAVGYTDIKKRSLLSSMEDYATLHLQTGRQMWSPGFAFTILKRFMPEEKLADVKGATLTADGTGVVFDVPAADVEDYIQASENAAQVTIDEVQQLPPLQEKQQQQSRGNSGGGRFGRGGGGRFSGGGRGGGFGGGGRGRGGGGGRGRRRQ

SEQ ID NO: 167882 - protein, 303 aa, Zea Mays
MLIGPNAPISFESKYRASHMAHVYDFYKPDLASEYPVVDGKLSQTCYLMALDSCYRQFCNKYEKIAGKQFSICDAEYFVFHSPYNKLVQKSFARLYYNDFLRNCSSVDDDAKEKLQSFSNLTGEESYQSRDLEKASQQVAKHLHDIKVQPSTLLPKQIGNMYTASLYAALASVLYNKHDSLNGQRIVMFSYGSGLTSTMFSLRLNNGQHPFSLSNIASVLDVTEKLQSRHETLPEKFVETLKLMEHRYGAKDFETSRDTSLLQPGTFYLTKVDSMYRRFYSQKLSEETGGGKTKCCNGLANGH

SEQ ID NO: 167883 - protein, 326 aa, Zea Mays
MDRKDVGILAMDIYFPPSCVQQEALEAHDGASKGKYTIGLGQDCMAFCSEVEDVISMSLTVVNSLLKKYKIDPKLIGRLEVGSETVIDKSKSIKTWLMQIFEESGNSDIEGVDSSNACYGGTAALLNCVNWVESNSWDGRYGLVVCTDSAVYAEGPARPTGGAAAIAMLIGPNAPISFESKYRASHMAHVYDFYKPDLASEYPVVDGKLSQTCYLMALDSCYRQFCNKYEKIAGKQFSICDAEYFVFHSPYNKLVQKSFARLYYNDFLRNCSSVDDDAKEKLQSFSNLTGEESYQSRDLEKASQQVAKHLHDIKVQPSTLLPKQIG

SEQ ID NO: 167884 - protein, 467 aa, Zea Mays
MDRKDVGILAMDIYFPPSCVQQEALEAHDGASKGKYTIGLGQDCMAFCSEVEDVISMSLTVVNSLLKKYKIDPKLIGRLEVGSETVIDKSKSIKTWLMQIFEESGNSDIEGVDSSNACYGGTAALLNCVNWVESNSWDGRYGLVVCTDSAVYAEGPARPTGGAAAIAMLIGPNAPISFESKYRASHMAHVYDFYKPDLASEYPVVDGKLSQTCYLMALDSCYRQFCNKYEKIAGKQFSICDAEYFVFHSPYNKKSFARLYYNDFLRNCSSVDDDAKEKLQSFSNLTGEESYQSRDLEKASQQVAKHLHDIKVQPSTLLPKQIGNMYTASLYAALASVLYNKHDSLNGQRIVMFSYGSGLTSTMFSLRLNNGQHPFSLSNIASVLDVTEKLQSRHETLPEKFVETLKLMEHRYGAKDFETSRDTSLLQPGTFYLTKVDSMYRRFYSQKLSEETGGGKTKCCNGLANGH

SEQ ID NO: 167885 - protein, 354 aa, Zea Mays
MGLMGGIVATCWEALEAHDGASKGKYTIGLGQDCMAFCSEVEDVISMSLTVVNSLLKKYKIDPKLIGRLEVGSETVIDKSKSIKTWLMQIFEESGNSDIEGVDSSNACYGGTAALLNCVNWVESNSWDGRYGLVVCTDSAVYAEGPARPTGGAAAIAMLIGPNAPISFESKYRASHMAHVYDFYKPDLASEYPVVDGKLSQTCYLMALDSCYRQFCNKYEKIAGKQFSICDAEYFVFHSPYNKLVQKSFARLYYNDFLRNCSSVDDDAKEKLQSFSNLTGEESYQSRDLEKASQQVAKHLHDIKVQPSTLLPKQIEWAKNCDVLLRQWFDIHYVFIEAKQWPASLQPIKHCFSS

SEQ ID NO: 167886 - protein, 457 aa, Zea Mays
MGGIVATCWEALEAHDGASKGKYTIGLGQDCMAFCSEVEDVISMSLTVVNSLLKKYKIDPKLIGRLEVGSETVIDKSKSIKTWLMQIFEESGNSDIEGVDSSNACYGGTAALLNCVNWVESNSWDGRYGLVVCTDSAVYAEGPARPTGGAAAIAMLIGPNAPISFESKYRASHMAHVYDFYKPDLASEYPVVDGKLSQTCYLMALDSCYRQFCNKYEKIAGKQFSICDAEYFVFHSPYNKLVQKSFARLYYNDFLRNCSSVDDDAKEKLQSFSNLTGEESYQSRDLEKASQQVAKHLHDIKVQPSTLLPKQIGNMYTASLYAALASVLYNKHDSLNGQRIVMFSYGSGLTSTMFSLRLNNGQHPFSLSNIASVLDVTEKLQSRHETLPEKFVETLKLMEHRYGAKDFETSRDTSLLQPGTFYLTKVDSMYRRFYSQKLSEETGGGKTKCCNGLANGH

SEQ ID NO: 167887 - protein, 339 aa, Zea Mays
MGVGGSFWDLLKPCARHEGAGYLRGRRVAVDLSFWVVSHTTAIRARLPRARSPHLRTTFFRTLSLFAKMGAFPVFVVDGEPSPLKSQARAARFFRGSGMDLAALPVTEAESSAAAAPVKKRNAAFTRAVEECVELLEYLGMPVLRANGEAEALCAQLNSEGHVDACITADSDAFLYGAKTVVKVLRSNCKEPFECYHIADIESGLGLKRKQMVAMALLIGSDHDLHGVPGFGLETALRFVQLFDEDEILDKLHEIGRGVYPFVEGFDNAHIDDLPSSSTKSPVVKLPHCSQCGHPGSKKNHSKDGCNYCLVDSLENCMEKPTGFKCECPSCDEVGFIFI

SEQ ID NO: 167888 - protein, 385 aa, Zea Mays
MGVGGSFWDLLKPCARHEGAGYLRGRRVAVDLSFWVVSHTTAIRARLPRARSPHLRTTFFRTLSLFAKMGAFPVFVVDGEPSPLKSQARAARFFRGSGMDLAALPVTEAESSAAAAPVKKRNAAFTRAVEECVELLEYLGMPVLRANGEAEALCAQLNSEGHVDACITADSDAFLYGAKTVVKVLRSNCKEPFECYHIADIESGLGLKRKQMVAMALLIGSDHDLHGVPGFGLETALRFVQLFDEDEILDKLHEIGRGVYPFVEGFDNAHIDDLPSSSTKSPVVKLPHCSQCGHPGSKKNHSKDGCNYCLVDSLENCMEKPTGFKCECPSCDEARELKEQRRHENWQIKVCKRIAAETNFPNDEIIKLYLSDNNLVEGCSLAYLE

SEQ ID NO: 167889 - protein, 575 aa, Zea Mays
MGVGGSFWDLLKPCARHEGAGYLRGRRVAVDLSFWVVSHTTAIRARLPRARSPHLRTTFFRTLSLFAKMGAFPVFVVDGEPSPLKSQARAARFFRGSGMDLAALPVTEAESSAAAAPVKKRNAAFTRAVEECVELLEYLGMPVLRANGEAEALCAQLNSEGHVDACITADSDAFLYGAKTVVKVLRSNCKEPFECYHIADIESGLGLKRKQMVAMALLIGSDHDLHGVPGFGLETALRFVQLFDEDEILDKLHEIGRGVYPFVEGFDNAHIDDLPSSSTKSPVVKLPHCSQCGHPGSKKNHSKDGCNYCLVDSLENCMEKPTGFKCECPSCDEARELKEQRRHENWQIKVCKRIAAETNFPNDEIIKLYLSDNNLVEEKGVPLLTWNKPDVEALVDLLSYKQNWEPSYIRQSMLPMLSTIYLREVASSPSTPLLLCDQYEFDSIQRIKIKHGHPYYLVKWKRATRGMNSIMSSNKPVMEGETSSEVVLLDEDDDLDAVVCESPELLDEPDVPQVLIDDGCCFVLTDEDIQLVGAAFPKETARFQEEQHGVSSFICGCLIEETSTGVNFVHSSSHI

SEQ ID NO: 167890 - protein, 496 aa, Zea Mays
MQPRGGIKSPWSRRKRKRALSREQWESLFSANGKLRDGGKKFLKKVRSGGIEPSIRSEVWPFLLGVYDLNSSEEERNSVKIKKRKEYEKLRRQCQQILNGYKGNSLKAITEVNNEVCSSLEGTADGSESPCFEDANAIRAPVSLEELKPEQNEVDQPENIPCAVVECIEEDADELAYAYPCIAESESSDSESSDEDDPGRMSVSGEENCDPDPKFIRSTSFKADLFRSSRTPEDFATWQRIIRLDAIRSNSEWIMFSGNQAEVPKERALQSAASVGLKDYDHLEPSMIYHAARLVGLLEAYAVYDPEIGYCQGMSDLLSPIIAVMEEDDEAFWCFVGFMRKARHNFRLDEVGIRRQLKIVSQIIKRKDSHLYRHLQKLQAEDCFFVYRMVVVLFRRELTFEQTVCLWEVMWADQAAIRAGIGRSTWGRIRLRAPPTDDLLLYAIAACVLQRRKLIIEKYSSMDEILRECNSMAGQLDVWRLLDDAHDLVVNLHDKI

SEQ ID NO: 167891 - protein, 296 aa, Zea Mays
MSVSGEENCDPDPKFIRSTSFKADLFRSSRTPEDFATWQRIIRLDAIRSNSEWIMFSGNQAEVPKERALQSAASVGLKDYDHLEPSMIYHAARLVGLLEAYAVYDPEIGYCQGMSDLLSPIIAVMEEDDEAFWCFVGFMRKARHNFRLDEVGIRRQLKIVSQIIKRKDSHLYRHLQKLQAEDCFFVYRMVVVLFRRELTFEQTVCLWEVMWADQAAIRAGIGRSTWGRIRLRAPPTDDLLLYAIAACVLQRRKLIIEKYSSMDEILRECNSMAGQLDVWRLLDDAHDLVVNLHDKI

SEQ ID NO: 167892 - protein, 56 aa, Zea Mays
MRCEDAGRGYTGKRKRLRWVQLHTQRTAIMSASVSLSSAGSESRTSVKSTTAGGAE

SEQ ID NO: 167893 - protein, 93 aa, Zea Mays
MQNTVANPSTAAAAAAAGNGGVQASGAGGERPEDASKQNLAQVTSSIQKTLGLLHQLNLTVSSFNSASQLPLLQRLAYGSIFLRSLNKLSLRT

SEQ ID NO: 167894 - protein, 111 aa, Zea Mays
MRLWRSSTRCRNSPRGATSRCLWSLIDDGKNPDEFTRDVLNSCIVKNQITKGKTDAFKGLRKHLLEELEQAFPEDVEAYREIRATSAAEAKRLAQSQGTLPNGDVKVKAEH

SEQ ID NO: 167895 - protein, 163 aa, Zea Mays
MRTICDVCESAPAVLFCAADEAALCRPCDEKVHMCNKLASRHVRVGLADPNKLARCDICENSPAFFYCEIDGTSLCLSCDMTVHVGGKRTHGRYLLLRQRVEEATISFQEINRAIWMTCLWRSKILKTRESKTRPRSKWQTTITSMIQSLMAIAMARVTLIRK

SEQ ID NO: 167896 - protein, 172 aa, Zea Mays
MCNKLASRHVRVGLADPNKLARCDICENSPAFFYCEIDGTSLCLSCDMTVHVGGKRTHGRYLLLRQRVEFPGDKPGHMDDVPMEIKDPENQREQNTPKEQMANHHNVNDPVSDGNCDGQGNIDSKMIDLNMRPARTHGQGSNSQTQGVDLSVNNHDSPGVVPTSNSERDAIK

SEQ ID NO: 167897 - protein, 95 aa, Zea Mays
MDDVPMEIKDPENQREQNTPKEQMANHHNVNDPVSDGNCDGQGNIDSKMIDLNMRPARTHGQGSNSQTQGVDLSVNNHDSPGVVPTSNSERDAIK

SEQ ID NO: 167898 - protein, 165 aa, Zea Mays
MVVGASSVSGAAASGGTSGTAPPRKGKSCKGCLYYSSVLKSRGYNPICVGIPRSIPQVPNYVVDEPKEDATAQGHDLRRFRYGCAGYSIFVNRDGQGGEGEGKTLLPYCRGLELLVDSRLVERKPSAAEQAPAHVTKDAATTRSHQQGQQRPANLSRQEFLERKV

SEQ ID NO: 167899 - protein, 607 aa, Zea Mays
MAALLGLFFLLLLQLGPSSCSNVYIAYMGERSPELRPALVRDAHHGMLAALLGSEQAARDAILYSYRHGFSGFAATLTDSQAARLADSPGVVRVVRNRVLDLHTTRSWDFMRVMSPSHSAGILSNSRLGEDSIIGVLDTGIWPESASFRDDGIGEVPRRWKGRCVAGDRFNASNCNRKIIGAKWYIRGYEAEYGKMNTTDILAAFDDAIHDGVDVLSVSLGQAPPLPAYVDDVLSIGSFHAVARGIAVVCSAGNSGPYSETVINSAPWIVTVAAGTIDRTFLAKIALGNNSTYAGQTLYSGAHPGRSMSLVYAEDIASNDADDTDARSCTAGSLNSTLAKGKVVLCFQTRAQRSASVAVETVRKARGVGVIFAQFLTKDIASSFDVPCVQVDYQVGTVILAYTTSMRNPTVQFGSAKTVLGEVIGPEVAYFSSRGPSSLSPSVLKPDIAAPGVNILAAWTPAAAVSSAIGSVSFKIDSGTSMSCPHISGVVALLRSLHPNWSPAAVKSALVTTASTTRMGLGSCPRQHRTARRTRSTTEVVTWIRTELRTPVSCTTWGRLTTCASFAPWATTSRPSAPWLSSVRLRPASTRPRRSWTSTCHPSPSPS

SEQ ID NO: 167900 - protein, 659 aa, Zea Mays
MRVMSPSHSAGILSNSRLGEDSIIGVLDTGIWPESASFRDDGIGEVPRRWKGRCVAGDRFNASNCNRKIIGAKWYIRGYEAEYGKMNTTDIYEFMSARDAVGHGTHTASTAAGAPVADASFRGLASGVARGGAPRARLAVYKVCWATGDCTSADILAAFDDAIHDGVDVLSVSLGQAPPLPAYVDDVLSIGSFHAVARGIAVVCSAGNSGPYSETVINSAPWIVTVAAGTIDRTFLAKIALGNNSTYAGQTLYSGAHPGRSMSLVYAEDIASNDADDTDARSCTAGSLNSTLAKGKVVLCFQTRAQRSASVAVETVRKARGVGVIFAQFLTKDIASSFDVPCVQVDYQVGTVILAYTTSMRNPTVQFGSAKTVLGEVIGPEVAYFSSRGPSSLSPSVLKPDIAAPGVNILAAWTPAAAVSSAIGSVSFKIDSGTSMSCPHISGVVALLRSLHPNWSPAAVKSALVTTASVHDTYGFGIVSEAAPYSQANPFDYGGGHVDPNRAAYPGLVYDMGASDYVRFLCSMGYNVSAISSVAQQRETETCQHAPKTQLDLNLPSIAVPELRGRLTVSRTVTNVGSALSEYRARVEAPPGVDVSVRPSLLAFNSTVRRLAFKVTFRAKLVKVQGRYTFGSLTWEDGVHAVRIPLVVRTMVGRFYANS

SEQ ID NO: 167901 - protein, 296 aa, Zea Mays
MIDDERRGSSAEDGLHAPRPHAQAHGARHGGAAEGQVPAGEEHHEGRPKAATQARVVWRRLGVARVHECQRRRLRLAGVAHFGGELLDRPAARAGRPRQPARRAPWPATPPPRLAGALATPPARRHAAPRAPPPPPRGTSACRGGAPRRPVCDGSPGTRGLAAAWRGEGPRMSTTPPGRRWRAPRPTPAPRPRRATAARAGRPRRLAQRAPWPATPPPRRGGAPAAIPALDCLTVVGLDQNRWCGWGTEATSVDGDGADGERRRPAWTAMVRMGNGGGGVDNERRRRQGGDKTLLA

SEQ ID NO: 167902 - protein, 80 aa, Zea Mays
MVQLEKQQSVLVNDYIGPLKILHRPFFFLSCQDCLYLKKSKHHKECIPVSTSTRSTPPPPLNLTLCNYFICFIQLLSILA

SEQ ID NO: 167903 - protein, 231 aa, Zea Mays
MRGAKRPLSVVTSWVRRQPPKVKAFLAVVTGMAALVVIRFIVHDHDNLFVAAEAAHALGIGVLIYKLTKEKTCAGLSLKSQDLTALFLAVRLYCSFVMEYDIHTILDSATLVATLFVIYMIRFKLRSTYMVDKDNFALYYVVLPCAGLALLVHPSTSHNIVNRISWAFCVYLEAVSVLPQLRLMQNTKIVEPFTAHYVFALGVARFLSCAHWVLQKQQILQCRFWIRVAVC

SEQ ID NO: 167904 - protein, 175 aa, Zea Mays
MEYDIHTILDSATLVATLFVIYMIRFKLRSTYMVDKDNFALYYVVLPCAGLALLVHPSTSHNIVNRISWAFCVYLEAVSVLPQLRLMQNTKIVEPFTAHYVFALGVARFLSCAHWVLQVLDTRGRLLTALGYGLWPSMVLFSEIVQTFILADFCYYYVKSLVGGQLVLRLPSGVV

SEQ ID NO: 167905 - protein, 80 aa, Zea Mays
MGLTSGTTAASLCFKQKHKGTSYIHARRSGNNPLVNLKFCPGFLLTGFIGPAAYMVLVPFGRLMIHKTCQLYYIVSYSFY

SEQ ID NO: 167906 - protein, 536 aa, Zea Mays
MPPATSVLPRLRFPVNSLLLCCTAIASFHSKEEEVEAKMMQQMQQEQWNAAAAGLLRPTKSAPCSPIKPAAAAAMLRTHSDSFHVAHKVPVGDTPYVRAKRVQLVDKDPEKAIALFWSAINAGDRVDSALKDMAIVMKQQNRAEEAIEAIKSLRSRCSDQAQESLDNILLDLYKRCGRLDDQISLLKHKLQRIHQGHAFNGKRTKTARSQGRKFQGNLGWALMQKENYTEAEGAYRRALLIGPDNNKMCNLGICLMKQGRVLEAKDVLKQVRPAGVDGLRGADSHLKAYERAQEMLRDLETKLVGRPRADQLDTNWLYDALLLGSSSSIWQPQPCIDHLLPPPAPASIPALAPAPRDHFADENAGLSKKLAALQANMLNVDAQPFYSLRVPPLAAKPHNTLPQQKPHSTLPQQQQQKKKPAPVHDPLGNLKRTRSSNCMDKAGAVVDKAQSIDENSGRRKSLSAEDRWPELPDHSAFDEALVADILGPVFDDKPTAAGTNGHGKLPASCDTSPAAKEKISKRLRIFQDITKTVNNF

SEQ ID NO: 167907 - protein, 530 aa, Zea Mays
MTVRAAAVLVATAALALLLPGWAAAEWSLTKKGSVVTYDGRSLMIDGKRDLFFSGAIHYPRSPPEMWPKLIERAKEGGLNTIETYIFWNAHEPEPGKYNFEGRFDLIKYLKMIQEHDMYAIVRIGPFIQAEWNHGGLPYWLREIDHIIFRANNDPYKKEMEKFVRFIVQKLKDAELFASQGGPIILTQIENEYGNIKKDHATDGDKYLEWAAQMALSTQTGVPWIMCKQSSAPGEVIPTCNGRHCGDTWTLRDKNKPMLWTENWTQQFRAYGDQVAMRSAEDIAYAVLRFFAKGGSLVNYYMYHGGTNFGRTGASYVLTGYYDEAPMDEYGMYKEPKFGHLRDLHNVIRSYQKAFLWGQHSSEILGHGYEAHIFELPEEKLCLSFLSNNNTGEDGTVIFRGDKHYVPSRSVSILAGCKNVVYNTKRVFVQHSERSFHTSDVTSKNNQWEMFSETIPKYRDTKVRTKEPLEQYNQTKDDTDYLWYTTSFRLESDDLPFRNDIRPVLQVKSSAHAMMGFANDAFDARAETSR

SEQ ID NO: 167908 - protein, 624 aa, Zea Mays
MALSTQTGVPWIMCKQSSAPGEVIPTCNGRHCGDTWTLRDKNKPMLWTENWTQQFRAYGDQVAMRSAEDIAYAVLRFFAKGGSLVNYYMYHGGTNFGRTGASYVLTGYYDEAPMDEYGMYKEPKFGHLRDLHNVIRSYQKAFLWGQHSSEILGHGYEAHIFELPEEKLCLSFLSNNNTGEDGTVIFRGDKHYVPSRSVSILAGCKNVVYNTKRVFVQHSERSFHTSDVTSKNNQWEMFSETIPKYRDTKVRTKEPLEQYNQTKDDTDYLWYTTSFRLESDDLPFRNDIRPVLQVKSSAHAMMGFANDAFVGCARGNKQVKGFMFEKPVDLKVGVNHVVLLSSTMGMKDSGGELAEVKGGIQECLIQGLNTGTLDLQVNGWGHKAALEGEYKEIYSEKGLGKVQWKPAENDRAATWYKRYFDEPDGDDPVVLDMSSMSKGMIFVNGEGVGRYWVSYRTLAGTPSQAVYHIPRPFLKSKDNLLVIFEEEMGKPDGILVQTVTRDDICLFISEHNPGQIKTWDTDGDKIKLIAEDHSRRGTLTCPPEKTIQEVVFASFGNPDGMCGNFTVGTCHTPNAKQIVEKECLGKPSCMLPVDHTVYGADINCQSTTATLGVQVRCGGGKKGA

SEQ ID NO: 167909 - protein, 554 aa, Zea Mays
MASPAGGESPAKPVLLHGDLDLWILEARLLPNMDMFSEQVRRCLAVCRPPTSCGTNHPPAAARGGGGRQHHHRKIITRGPYVTLSVSGAVVARTAVIPNSQDPVWEERFAVPLAHRAAELEFQVKDNDTFGAQLIGTVTVPADCVVSGTEAEDWFPVKGTNGKPYKPDTALRLRFTFHPIANNPAYRHGIPGDPGHRGIGESYYPLRHGGQVTLYQDAHIREGDLPEIELDDGKTFQHNSCWEDICHAILEAHHMIYIVGWSVYDKVRLVREPSPSRPLPDGGDLTLGDLLKFKSQEGVRVCLLVWDDKTSHDKFFIKTGGVMATHDEETRKFFKHSSVICVLSPRYASNKLSIFKQQVVGTLFTHHQKCVLVDTQARGNKRKVTAFIGGLDLCDGRYDTPKHRLFKDLDTVFQNDYHNPTFSSGAKGPRQPWHDLHCRIDGPAAYDVLTNFEQRWRKATKWRGRFRRVSHWKDDALIKLERISWIISPSPNVPNDHPSLWVSKEEDRENWHVQVFRSIDSGSLKGFPSDCKEASKLVSQHFYFLTSDDGEYTI

SEQ ID NO: 167910 - protein, 446 aa, Zea Mays
MVAMTHLNTGFSKILTQYSKMITITLHFRIDGPAAYDVLTNFEQRWRKATKWRGRFRRVSHWKDDALIKLERISWIISPSPNVPNDHPSLWVSKEEDRENWHVQVFRSIDSGSLKGFPSDCKEASKLNLVCRKNLVIDKSIHTAYVRAIRSAQHFIYIENQYFLGSSYAWPSYVNSGADNLIPIELALKIASKIRAQERFAVYVVIPMWPEGVPTAASVQEILFFQAQTMEMMYTIIADELKSMDNKDMRPEDYLSFFCLGNREEPPSNGSPESEKSTDKSAVGLATKYRRFMIYVHAKGMIVDDEYVILGSANINQRSLAGSRDTEIAMGAYQPHYAWSTKNGHPDGQVYGYRTSLWAEHLGTIDDRFKDPSSLECVRFVNQIAVENWRRYTAEEMSTLQGHLLKYPVKVEADGKISPLPDQECFPDVGGKILGASTSLPDSLTM

SEQ ID NO: 167911 - protein, 832 aa, Zea Mays
MASPAGGESPAKPVLLHGDLDLWILEARLLPNMDMFSEQVRRCLAVCRPPTSCGTNHPPAAARGGGGRQHHHRKIITRGPYVTLSVSGAVVARTAVIPNSQDPVWEERFAVPLAHRAAELEFQVKDNDTFGAQLIGTVTVPADCVVSGTEAEDWFPVKGTNGKPYKPDTALRLRFTFHPIANNPAYRHGIPGDPGHRGIGESYYPLRHGGQVTLYQDAHIREGDLPEIELDDGKTFQHNSCWEDICHAILEAHHMIYIVGWSVYDKVRLVREPSPSRPLPDGGDLTLGDLLKFKSQEGVRVCLLVWDDKTSHDKFFIKTGGVMATHDEETRKFFKHSSVICVLSPRYASNKLSIFKQQVVGTLFTHHQKCVLVDTQARGNKRKVTAFIGGLDLCDGRYDTPKHRLFKDLDTVFQNDYHNPTFSSGAKGPRQPWHDLHCRIDGPAAYDVLTNFEQRWRKATKWRGRFRRVSHWKDDALIKLERISWIISPSPNVPNDHPSLWVSKEEDRENWHVQVFRSIDSGSLKGFPSDCKEASKLNLVCRKNLVIDKSIHTAYVRAIRSAQHFIYIENQYFLGSSYAWPSYVNSGADNLIPIELALKIASKIRAQERFAVYVVIPMWPEGVPTAASVQEILFFQAQTMEMMYTIIADELKSMDNKDMRPEDYLSFFCLGNREEPPSNGSPESEKSTDKSAVGLATKYRRFMIYVHAKGMIVDDEYVILGSANINQRSLAGSRDTEIAMGAYQPHYAWSTKNGHPDGQVYGYRTSLWAEHLGTIDDRFKDPSSLECVRFVNQIAVENWRRYTAEEMSTLQGHLLKYPVKVEADGLKLRTFL

SEQ ID NO: 167912 - protein, 447 aa, Zea Mays
MASPAGGESPAKPVLLHGDLDLWILEARLLPNMDMFSEQVRRCLAVCRPPTSCGTNHPPAAARGGGGRQHHHRKIITRGPYVTLSVSGAVVARTAVIPNSQDPVWEERFAVPLAHRAAELEFQVKDNDTFGAQLIGTVTVPADCVVSGTEAEDWFPVKGTNGKPYKPDTALRLRFTFHPIANNPAYRHGIPGDPGHRGIGESYYPLRHGGQVTLYQDAHIREGDLPEIELDDGKTFQHNSCWEDICHAILEAHHMIYIVGWSVYDKVRLVREPSPSRPLPDGGDLTLGDLLKFKSQEGVRVCLLVWDDKTSHDKFFIKTGGVMATHDEETRKFFKHSSVICVLSPRYASNKLSIFKQQVVGTLFTHHQKCVLVDTQARGNKRKVTAFIGGLDLCDGRYDTPKHRLFKDLDTVFQNDYHNPTFSVQRDPGNHGMIYIAGLMALLPMMS

SEQ ID NO: 167913 - protein, 310 aa, Zea Mays
MQIAENSAADRVEIPTDGASEWEIDVKLLKFGNKVASGSYGDLYRGTYCSQDVAIKVLKPERINADMQREFAQEVYIMRKVRHKNVVQFIGACTKPPNLCIVTEFMSGGSVYDYLHKHKGVFKLPALVGVATDVSKGMSYLHQNNIIHRDLKTANLLMDENGTVKVADFGVARVKAQSGVMTAETGTYRWMAPEVIEHKPYDHKADVFSFGILMWELLTGKIPYEYLTPLQAAVGVVQKGLRPTIPKHTHAKLSELLQKCWQQDPTQRPDFSEILETLQRIAEEVGEEHDGKHKDRTLGGFFSALRGRSH

SEQ ID NO: 167914 - protein, 369 aa, Zea Mays
MHEITFSTIDKPKLLSELTSLLGELGLNIQEAHAFSTNDGYSLDVFVVVGWHDEETEDLVEAVQKEIGRIEETQAWSSSHSWSTPVEKMQIAENSAADRVEIPTDGASEWEIDVKLLKFGNKVASGSYGDLYRGTYCSQDVAIKVLKPERINADMQREFAQEVYIMRKVRHKNVVQFIGACTKPPNLCIVTEFMSGGSVYDYLHKHKGVFKLPALVGVATDVSKVADFGVARVKAQSGVMTAETGTYRWMAPEVIEHKPYDHKADVFSFGILMWELLTGKIPYEYLTPLQAAVGVVQKGLRPTIPKHTHAKLSELLQKCWQQDPTQRPDFSEILETLQRIAEEVGEEHDGKHKDRTLGGFFSALRGRSH

SEQ ID NO: 167915 - protein, 380 aa, Zea Mays
MAVEETAESCGSHAATAASGGGAAGPATSSSSAAAAAQARKQQQQQRHKLEVYTEVLRRLHDAGLPDARAPGFDDELWNHFNRLPARYAMDVNVERAEDVLTHKRLLEQAKDPAHRPAFAVRSVQVSPILDGNQTDSDSNTAGEEVASRLLNRQQSIYPPPAFGSSTNLEALALEASKSHDHDSTSDNGRSLYRPMHEITFSTIDKPKLLSELTSLLGELGLNIQEAHAFSTNDGYSLDVFVVVGWHDEETEDLVEAVQKEIGRIEETQAWSSSHSWSTPVEKMQIAENSAADRVEIPTDGASEWEIDVKLLKFGNKVASGSYGDLYRGTYCSQDVAIKVLKPERINADMQREFAQEVYIMRLLKLLILVLHVLKLNLEL

SEQ ID NO: 167916 - protein, 588 aa, Zea Mays
MAVEETAESCGSHAATAASGGGAAGPATSSSSAAAAAQARKQQQQQRHKLEVYTEVLRRLHDAGLPDARAPGFDDELWNHFNRLPARYAMDVNVERAEDVLTHKRLLEQAKDPAHRPAFAVSPILDGNQTDSDSNTAGEEVASRLLNRQQSIYPPPAFGSSTNLEALALEASKSHDHDSTSDNGRSLYRPMHEITFSTIDKPKLLSELTSLLGELGLNIQEAHAFSTNDGYSLDVFVVVGWHDEETEDLVEAVQKEIGRIEETQAWSSSHSWSTPVEKMQIAENSAADRVEIPTDGASEWEIDVKLLKFGNKVASGSYGDLYRGTYCSQDVAIKVLKPERINADMQREFAQEVYIMRKVRHKNVVQFIGACTKPPNLCIVTEFMSGGSVYDYLHKHKGVFKLPALVGVATDVSKGMSYLHQNNIIHRDLKTANLLMDENGTVKVADFGVARVKAQSGVMTAETGTYRWMAPEVIEHKPYDHKADVFSFGILMWELLTGKIPYEYLTPLQAAVGVVQKGLRPTIPKHTHAKLSELLQKCWQQDPTQRPDFSEILETLQRIAEEVGEEHDGKHKDRTLGGFFSALRGRSH

SEQ ID NO: 167917 - protein, 387 aa, Zea Mays
MAVEETAESCGSHAATAASGGGAAGPATSSSSAAAAAQARKQQQQQRHKLEVYTEVLRRLHDAGLPDARAPGFDDELWNHFNRLPARYAMDVNVERAEDVLTHKRLLEQAKDPAHRPAFAVRSVQVSPILDGNQTDSDSNTAGEEVASRLLNRQQSIYPPPAFGSSTNLEALALEASKSHDHDSTSDNGRSLYRPMHEITFSTIDKPKLLSELTSLLGELGLNIQEAHAFSTNDGYSLDVFVVVGWHDEETEDLVEAVQKEIGRIEETQAWSSSHSWSTPVEKMQIAENSAADRVEIPTDGASEWEIDVKLLKFGNKVASGSYGDLYRGTYCSQDVAIKVLKPERINADMQREFAQEVYIMRKVRHKNVVQFIGACTKPPNLCIVTE

SEQ ID NO: 167918 - protein, 185 aa, Zea Mays
MHEITFSTIDKPKLLSELTSLLGELGLNIQEAHAFSTNDGYSLDVFVVVGWHDEETEDLVEAVQKEIGRIEETQAWSSSHSWSTPVEKMQIAENSAADRVEIPTDGASEWEIDVKLLKFGNKVASGSYGDLYRGTYCSQDVAIKVLKPERINADMQREFAQEVYIMRLLKLLILVLHVLKLNLEL

SEQ ID NO: 167919 - protein, 370 aa, Zea Mays
MAVEETAESCGSHAATAASGGGAAGPATSSSSAAAAAQARKQQQQQRHKLEVYTEVLRRLHDAGLPDARAPGFDDELWNHFNRLPARYAMDVNVERAEDVLTHKRLLEQAKDPAHRPAFAVRSVQVSPILDGNQTDSDSNTAGEEVASRLLNRQQSIYPPPAFGSSTNLEALALEASKSHDHDSTSDNGRSLYRPMHEITFSTIDKPKLLSELTSLLGELGLNIQEAHAFSTNDGYSLDVFVVVGWHDEETEDLVEAVQKEIGRIEETQAWSSSHSWSTPVEKMQIAENSAADRVEIPTDGASEWEIDVKLLKFGNKVASGSYGDLYRGTYCSQDVAIKVLKPERINADMQREFAQEVYIMRIYVRWKCV

SEQ ID NO: 167920 - protein, 205 aa, Zea Mays
MSGGSVYDYLHKHKGVFKLPALVGVATDVSKGMSYLHQNNIIHRDLKTANLLMDENGTVKVADFGVARVKAQSGVMTAETGTYRWMAPEVIEHKPYDHKADVFSFGILMWELLTGKIPYEYLTPLQAAVGVVQKGLRPTIPKHTHAKLSELLQKCWQQDPTQRPDFSEILETLQRIAEEVGEEHDGKHKDRTLGGFFSALRGRSH

SEQ ID NO: 167921 - protein, 196 aa, Zea Mays
MINPKKLAQLARKWQRVKIATKDDDRCCTISPIAGRGHCTVYTVDGSRFEVPLAYLRSVVFSELLRMAAEEFGFTGNGRITLPCDAAVVEYMICLLQRNASEEVEKAFLSSVVMPCQQSSYPTPPVVLHQQFAVCSSYSLEARRQAACRGAVTLPSQSTDATVTGKLRAGHGGLSGARRASTAPPPAVTGDPQTGT

SEQ ID NO: 167922 - protein, 486 aa, Zea Mays
MGCGQSKMEEEYAVRHCRVRSELLALAIRQRYTLADAHHAYAESLRAVGALLHDFLRGVQSLPPPPPEPALRLPQQRKGDGLPAASPPPAMASSSAAAAAPPVAKQVRIAPDDGHIQFSDGDSDSEDGHIKFHSDEEPDPARRRPEVVRSTGAPGPPPPQMGQPYASGGGYAPPPYGPGYGYGYATGPGPGPGPDYGGIGMNGGGGYEPGHGVIQPPPPSVSHEQRLEATNARVHYYSGNGEQQPPPRGYGGGYSYPPQSSRSYNQYAYGGYYGGGSAPAPPADIPSSSGEPAAVPPPPSPPRVSTWEFLDPFGTYESYYEQPTATAAPYSPGRSLKDVREEEGIPDLEDEDMEVVKEAYGDEKHPVKGYMGNGKAAKGEGRSSTGDELPRKSKSSEASGSGSSLEHDVHVVEKSVVGEQVRHSEPRQHVAGLPPTGSEKLYIDDTEVVVEIRTQFERASQSAGEVSKMLEVGKMPYYQKGSGFKV

SEQ ID NO: 167923 - protein, 474 aa, Zea Mays
MGCGQSKMEEEYAVRHCRVRSELLALAIRQRYTLADAHHAYAESLRAVGALLHDFLRGVQSLPPPPPEPALRLPQQRKGDGLPAASPPPAMASSSAAAAAPPVAKQVRIAPDDGHIQFSDGDSDSEDGHIKFHSDEEPDPARRRPEVVRSTGAPGPPPPQMGQPYASGGGYAPPPYGPGYGYGYATGPGPGPGPDYGGIGMNGGGGYEPGHGVIQPPPPSVSHEQRLEATNARVHYYSGNGEQQPPPRGYGGGYSYPPQSSRSYNQYAYGGYYGGGSAPAPPADIPSSSGEPAAVPPPPSPPRVSTWEFLDPFGTYESYYEQPTATAAPYSPGRSLKDVREEEGIPDLEDEDMEVVKEAYGDEKHPVKGYMGNGKAAKGEGRSSTGDELPRKSKSSEASGSGSSLEHDVHVVEKSVVGEQVRHSEPRQHVAGLPPTGSEKLYIDDTEVVVEIRTQFERASQSAGEVSKMLEYEC

SEQ ID NO: 167924 - protein, 556 aa, Zea Mays
MGCGQSKMEEEYAVRHCRVRSELLALAIRQRYTLADAHHAYAESLRAVGALLHDFLRGVQSLPPPPPEPALRLPQQRKGDGLPAASPPPAMASSSAAAAAPPVAKQVRIAPDDGHIQFSDGDSDSEDGHIKFHSDEEPDPARRRPEVVRSTGAPGPPPPQMGQPYASGGGYAPPPYGPGYGYGYATGPGPGPGPDYGGIGMNGGGGYEPGHGVIQPPPPSVSHEQRLEATNARVHYYSGNGEQQPPPRGYGGGYSYPPQSSRSYNQYAYGGYYGGGSAPAPPADIPSSSGEPAAVPPPPSPPRVSTWEFLDPFGTYESYYEQPTATAAPYSPGRSLKDVREEEGIPDLEDEDMEVVKEAYGDEKHPVKGYMGNGKAAKGEGRSSTGDELPRKSKSSEASGSGSSLEHDVHVVEKSVVGEQVRHSEPRQHVAGLPPTGSEKLYIDDTEVVVEIRTQFERASQSAGEVSKMLEVGKMPYYQKGSGFKVSAMIVCGIPTMEEEFLRFEEDKAMGSGNLSSTLQKLYMWEKKLLEEVKVDEDVERYARMPSDTTACHIPS

SEQ ID NO: 167925 - protein, 199 aa, Zea Mays
MPSTSHSHSSCSHGSQSSPSCSVGATEHAQQGIIDLMKSENPVKDSSIQTMQTENTSLYEHFSVHEAPIDLLQDVTEKANGAHHSSRSLSSPNPKQNTDANMRVKATFGSEKVRFRLNPECNFQGLKHELAKRLSIVDTNPLVLKYLDDDSEWVLMTCDADLQECLHVYKLADIQTIKISVHLAVSPATRVTAGHTGLS

SEQ ID NO: 167926 - protein, 520 aa, Zea Mays
MRGFHEACSEHHLLRGEGVAGKALTTNQPCFLPDIGSSTKLEYPLSHHAKIFRLKGAVAIRLRCTRTGIADFVLEFFLPTDCEALEEQKTVLDSLSGTMRSVCQTLRVVTDREMEGEAALEMNELNSFTPPEKDKDELSFGGNSADRRGASWTSLAGTSQQEPELAALRMHGTFSPVGQGPSLSGVQATAEGSKTKRRTKAEKTVSLQVLRQYFAGSLKDAARSLGVCPTTLKRICRQHGITRWPSRKIKKVDHSLRKLQQIIDSVHGAETAFQLNTLYKDLTDTSISSDNNLSGSVTVPPTNQSNLTDFNKHQPHKSSSNMPSTSHSHSSCSHGSQSSPSCSVGATEHAQQGIIDLMKSENPVKDSSIQTMQTENTSLYEHFSVHEAPIDLLQDVTEKANGAHHSSRSLSSPNPKQNTDANMRVKATFGSEKVRFRLNPECNFQGLKHELAKRLSIVDTNPLVLKYLDDDSEWVLMTCDADLQECLHVYKLADIQTIKISVHLAVSPATRVTAGHTGLS

SEQ ID NO: 167927 - protein, 426 aa, Zea Mays
MFVKKKLWTFQFTYPSSNIKQVYKILRHETAMLIYAHMTSWPLLLIVHQFSTASYKDALPEILEVLRAACLTHKLPLAQTWVTCTQQGKRGSRHSDENYRYCISTIDEACFVNEAEMRGFHEACSEHHLLRGEGVAGKALTTNQPCFLPDIGSSTKLEYPLSHHAKIFRLKGAVAIRLRCTRTGIADFVLEFFLPTDCEALEEQKTVLDSLSGTMRSVCQTLRVVTDREMEGEAALEMNELNSFTPPEKDKDELSFGGNSADRRGASWTSLAGTSQQEPELAALRMHGTFSPVGQGPSLSGVQATAEGSKTKRRTKAEKTVSLQVLRQYFAGSLKDAARSLGVCPTTLKRICRQHGITRWPSRKIKKEVSRFLQLTRAISPTSTSTNPTSQVAICHQLHTHTPHAATVLSQAPRVALVQQNMHNRV

SEQ ID NO: 167928 - protein, 803 aa, Zea Mays
MQCVRDELCRAGSEESVTCICMEEGGDPQLPSISVARTTSEGAGAVDLDLLEQLLSGDNGWLEVVSRSPNSVAFPPPSAFFSADATATTVTTTAAPAANASWLIQTGGASTPSVRERFSQALSYIRDTQSDGDVLVQLWVPVNRDDGKLVLTTSGQPFTLDHRSDSLIRFREVSTKYQFPADVRSGESPGLPGRVFIGRLPEWSPDIRCFTSYEYARVTDAKYLDVHGTMGLPVFEKRSYSCLGVIELIMTKQKLNFTSELNTICSALQAVNLRSTEVSSIPRKKFSTASYKDALPEILEVLRAACLTHKLPLAQTWVTCTQQGKRGSRHSDENYRLKGAVAIRLRCTRTGIADFVLEFFLPTDCEALEEQKTVLDSLSGTMRSVCQTLRVVTDREMEGEAALEMNELNSFTPPEKDKDELSFGGNSADRRGASWTSLAGTSQQEPELAALRMHGTFSPVGQGPSLSGVQATAEGSKTKRRTKAEKTVSLQVLRQYFAGSLKDAARSLGVCPTTLKRICRQHGITRWPSRKIKKVDHSLRKLQQIIDSVHGAETAFQLNTLYKDLTDTSISSDNNLSGSVTVPPTNQSNLTDFNKHQPHKSSSNMPSTSHSHSSCSHGSQSSPSCSVGATEHAQQGIIDLMKSENPVKDSSIQTMQTENTSLYEHFSVHEAPIDLLQDVTEKANGAHHSSRSLSSPNPKQNTDANMRVKATFGSEKVRFRLNPECNFQGLKHELAKRLSIVDTNPLVLKYLDDDSEWVLMTCDADLQECLHVYKLADIQTIKISVHLAVSPATRVTAGHTGLS

SEQ ID NO: 167929 - protein, 1027 aa, Zea Mays
MDKQSDGQGVERVAEEKQLDEKELERKLKKDQKAKEKEEKKLKAKQKEAARLQAQATSDGTKKTEKKLRKKAVEDENPEDFIDPDTPNGQKKLLAPQMAKQYSPSAVERSWYAWWESSGYFGADSASTKPPFVIVLPPPNVTGALHIGHALTVAIEDAMIRWRRMSGYNALWVPGVDHAGIATQVVVEKKLMRERKLTRHDIGREKFVSEVLKWKDQYGGTILNQLRRLGASLDWSREAFTMDEQRSKAVTEAFVRLHKEGLIYRDYRLVNWDCTLRTAISDIEVDHIDLKEETMLKVPGYANPVQFGVLISFAYPLEEGLGEIVVATTRIETMLGDTAIAVHPEDERYKHLHGRYAVHPFNGRRLKIICDAELVDPTFGTGAVKITPAHDPNDFEVGKRHNLEFINIFTDDGKINSNGGAKFDGMPRFTARVAVIEALKEKGLYKDTKKNEMSLGVCSRTNDVVEPMIKPQWFVNCNHMAKAGLDAVRSKKIEIIPQQYEQDWYRWLENIRDWCVSRQLWWGHRVPAWYVTLEDDLDKNLGSANDRWIVARNESDANLEAQKKYAGKKLRLDQDPDVLDTWFSSGLFPLTVLARMVMMGMQLGGDVPFQKVYLHPMIRDAHGRKMSKSLGNVVDPLEVINGMSLDGLLKRLEEGNLDPNELNIARDGKKKDFPDGIAECGTDALRFALISYTSQSDRINLDIKRVVGYRQWCNKLWNAIRFAMGKLGDHYIPPATVDVSLMPPICKWILSVLSKAVGKTVSSLEAYKLSDATSAIYSWWQYQLCDVFIEAIKPYFFNDSQELESARAASRDTLWICLDTGLRLLHPFMPFVTEELWQRLPQPKDSCRKGSIMISQYPSLVEEWSNGRLENEMDIVLDAVNKIRSLKPPTDSNERRPAFALCRGQEIAATIQCYQSLIVYLSSISHLKILTENDETPADCATAVVNKDLSVYLQLQGALNADAEREKLKKKKDEIQKLQNALAQKMDASGYREKAPQSVQEEDMRKLTALLEQLEVISEAEKKLDAN

SEQ ID NO: 167930 - protein, 930 aa, Zea Mays
MAKQYSPSAVERSWYAWWESSGYFGADSASTKPPFVIVLPPPNVTGALHIGHALTVAIEDAMIRWRRMSGYNALWVPGVDHAGIATQVVVEKKLMRERKLTRHDIGREKFVSEVLKWKDQYGGTILNQLRRLGASLDWSREAFTMDEQRSKAVTEAFVRLHKEGLIYRDYRLVNWDCTLRTAISDIEVDHIDLKEETMLKVPGYANPVQFGVLISFAYPLEEGLGEIVVATTRIETMLGDTAIAVHPEDERYKHLHGRYAVHPFNGRRLKIICDAELVDPTFGTGAVKITPAHDPNDFEVGKRHNLEFINIFTDDGKINSNGGAKFDGMPRFTARVAVIEALKEKGLYKDTKKNEMSLGVCSRTNDVVEPMIKPQWFVNCNHMAKAGLDAVRSKKIEIIPQQYEQDWYRWLENIRDWCVSRQLWWGHRVPAWYVTLEDDLDKNLGSANDRWIVARNESDANLEAQKKYAGKKLRLDQDPDVLDTWFSSGLFPLTVLARMVMMGMQLGGDVPFQKVYLHPMIRDAHGRKMSKSLGNVVDPLEVINGMSLDGLLKRLEEGNLDPNELNIARDGKKKDFPDGIAECGTDALRFALISYTSQSDRINLDIKRVVGYRQWCNKLWNAIRFAMGKLGDHYIPPATVDVSLMPPICKWILSVLSKAVGKTVSSLEAYKLSDATSAIYSWWQYQLCDVFIEAIKPYFFNDSQELESARAASRDTLWICLDTGLRLLHPFMPFVTEELWQRLPQPKDSCRKGSIMISQYPSLVEEWSNGRLENEMDIVLDAVNKIRSLKPPTDSNERRPAFALCRGQEIAATIQCYQSLIVYLSSISHLKILTENDETPADCATAVVNKDLSVYLQLQGALNADAEREKLKKKKDEIQKLQNALAQKMDASGYREKAPQSVQEEDMRKLTALLEQLEVISEAEKKLDAN

SEQ ID NO: 167931 - protein, 75 aa, Zea Mays
MKSRARSGGGDSRLSVRKTKVEKDPNKPKRPPTAFFVFMEEFRKDYKEKHPNVKQVSVIGKAGGDMWKSLSDAFL

SEQ ID NO: 167932 - protein, 105 aa, Zea Mays
MKSRARSGGGDSRLSVRKTKVEKDPNKPKRPPTAFFVFMEEFRKDYKEKHPNVKQVSVEKAPYVSKAEKLKVEYTKKMDAYNNKQSGGGPTLSGDSDKSKSEGDE

SEQ ID NO: 167933 - protein, 133 aa, Zea Mays
MKSRARSGGGDSRLSVRKTKVEKDPNKPKRPPTAFFVFMEEFRKDYKEKHPNVKQVSVIGKAGGDMWKSLSDAEKAPYVSKAEKLKVEYTKKMDAYNNKQSGGGPTLSGDSDKSKSEVNDGDEEVKANPPGDE

SEQ ID NO: 167934 - protein, 103 aa, Zea Mays
MKSRARSGGGDSRLSVRKTKVEKDPNKPKRPPTAFFVFMEEFRKDYKEKHPNVKQVSVIGKAGGDMWKSLSDAEKAPYVSKAEKLKVEYTKKMDAYNNKQGDE

SEQ ID NO: 167935 - protein, 253 aa, Zea Mays
MAGHGDVFPSLNNSGKLDILLAQGKDTEILNHLINNQNEYCMEVTPKTLADVKGGTLISYEGRVQLLEIAQVPDEHFLPNRWVNLKAVKRLVEAEALKMEIIPNPKEVDGVKVLQLETAAGAAIRFFDKAIGINVPRSRFLPVKATSDLLLVQSDLYTLVDGFVIRNPSRANPANPSIELGPEFKKVANFLARFKSIPSIVELDSLKVSGDVWFGSGITLKGKVTITAKSGVKLEVPDGAVFENKDVNGPEDL

SEQ ID NO: 167936 - protein, 210 aa, Zea Mays
MEVTPKTLADVKGGTLISYEGRVQLLEIAQVPDEHFLPNRWVNLKAVKRLVEAEALKMEIIPNPKEVDGVKVLQLETAAGAAIRFFDKAIGINVPRSRFLPVKATSDLLLVQSDLYTLVDGFVIRNPSRANPANPSIELGPEFKKVANFLARFKSIPSIVELDSLKVSGDVWFGSGITLKVTITAKSGVKLEVPDGAVFENKDVNGPEDL

SEQ ID NO: 167937 - protein, 211 aa, Zea Mays
MNTAWRLLQKHWLMLKAVLSSLTKEEFSFWRLPKYLMSMWVNLKAVKRLVEAEALKMEIIPNPKEVDGVKVLQLETAAGAAIRFFDKAIGINVPRSRFLPVKATSDLLLVQSDLYTLVDGFVIRNPSRANPANPSIELGPEFKKVANFLARFKSIPSIVELDSLKVSGDVWFGSGITLKGKVTITAKSGVKLEVPDGAVFENKDVNGPEDL

SEQ ID NO: 167938 - protein, 265 aa, Zea Mays
MEVTPKTLADVKGGTLISYEGRVQLLEIAQVPDEHFLPNRWVNLKAVKRLVEAEALKMEIIPNPKEVDGVKVLQLETAAGAAIRFFDKAIGINVPRSRFLPVKATSDLLLVQSDLYTLVDGFVIRNPSRANPANPSIELGPEFKKVANFLARFKSIPSIVELDSLKVSGDVWFGSGITLKGKVTITAKSGVKLEVPDGAVFENKGRERTPWDISVLTVPQLNAPATKRTISPGGMLYDKGDLSTQVATSTCLVLENIVVEGHIPR

SEQ ID NO: 167939 - protein, 210 aa, Zea Mays
MPAIPTAPAPCPVRFLLARRHSLHISYPSPCSNHQRLPPRLLRLPARPRAAPMSAEARAPASPVAPPAHPTYDLRAVIALALAEDAGDRGDVSCLATIPSDVEAEATFIAKADGVIAGISLADMIFNQVDPSLKVEWFESDGNFVHKGLQFGRVYGCARSIIVAERVVLNFMQRMSGIATLTKAMSDAARPACILETRKTAPGLRLIDKY

SEQ ID NO: 167940 - protein, 196 aa, Zea Mays
MPAIPTAPAPCPVRFLLARRHSLHISYPSPCSNHQRLPPRLLRLPARPRAAPMSAEARAPASPVAPPAHPTYDLRAVIALALAEDAGDRGDVSCLATIPSDVEAEATFIAKADGVIAGISLADMIFNQVDPSLKVEWFESDGNFVHKGLQFGRVYGCARSIIVAERVVLNFMQRMSGIATLTKVISALIYMIKLLL

SEQ ID NO: 167941 - protein, 252 aa, Zea Mays
MIFNQVDPSLKVEWFESDGNFVHKGLQFGRVYGCARSIIVAERVVLNFMQRMSGIATLTKAMSDAARPACILETRKTAPGLRLIDKWAVLIGGGKNHRLGLFDMVMIKDNHISVAGGIANAMRSVDQFLQKEKLTIPVEVETRTIEEVKDLLKYAAENKTSLTRIMLDNMVVPLGNGDLDVSMLKDAVRLINGRFETEASGNVTVDTVKKIGETGVTYISSGALTHSVTALDISLKIDTELALQVGRRTNRA

SEQ ID NO: 167942 - protein, 169 aa, Zea Mays
MGVRHEGHSFIPCFSWRSLHLAQTTWWAQGRNTTDISSLKHMTHSRSRCISSKLGSWGTAMLDKIWALLFFLPSERCNAYVLLSAPHLGAATFEESKETFICAIRCSRARISLLYLSVSFAALRCSKFSSDLMEVSICSLSFFFEVTRAITSIFPASSCFHLACKYSKP

SEQ ID NO: 167943 - protein, 165 aa, Zea Mays
MGVRHEGHSFIPCFSWRSLHLAQTTWWAQGRNTTDISSLKHMTHSRSRCISSKLGSWGTAMLDKIWALLFFLPSERCNAYVLLSAPHLGAATFEESKETFICAIRCSRARISLLYLSVSFAALRCSKFSSDLMEVSICSLSFFFEVTRAITSIFPASSCFHLACT

SEQ ID NO: 167944 - protein, 122 aa, Zea Mays
MAAATAVGGHDRVEAAASSAGAVLAVAVASQRLGQMMMMTMKTMKMKMKMMMMMMMMMMRVGGVMMTTMITMVMMMVTMMTTMKMMTKMKMKRMTTMRKNSHLPRRRSDLLFHGFTSASPCC

SEQ ID NO: 167945 - protein, 1448 aa, Zea Mays
MDVEMLPYGIISTFHCLSVRTSPLNMALLPCVYMQMDGVTLRHLLRPFAAQEAAAAGRVAAAPEQLFASHSTLQSGPPPRVGPSNELLTQVPGNYCTFDLAPDLTRANASNAAGTIDFTRAGPSSSAATLPKYPRHGLPASSSNEQSSFGALFPNRSANGMGIFTCQSSANEGIANVGVQFQDSSVHGLQKLPFKSMTHQHPTLPGDRIRVTCMNVGGEFFVGEAGLFGVICLCHRLRMSVAKFCEHAGGIPEKAGEIVCLENGMSIAQWFKFCIGVGGSIANTRWDWPEWAHMKSSPEEHILKSLASRNSGTGKMGLLSRYGKITGHMNKPAYSNDLSVEGGGHTNVEKLVNRTDETYYRKSVDVHETFTKNSALLQNSAVVNLGPAKNHPVHAFDLNPLTTPSGSPHFEASMGRHYNGNHLAHSHGIHLEKNFDASFCNPMPRFTGVMNHDSRACRPNFSNKTFQDTLSNASNTELKLGQSSYHQSMTTLSPLGQSTMIEFQKPQTHRPPINQNPSPKQATKISKSLSEHNEPSISTGNKKQPLEVVNGMKRSEGDELTDDTSKNSFISLFLSHLERNNTPEPIDDILNSNEHYLPKALDVACGSDHPESATRQIETRVPNDKHSKLASAIVHTKRRSEGISLSVASSGYNPQDASHANSQEHLIHGDSLSHLLPSQPNTGISKISARVSCHANCMSCIHVGNKSHQVAHGEIGVPCFYDKMARGHGTFERVDDCTHRSLRAFTKISCDNGKSCCSSRELLPSFCQNDQPTLGKSICGCCCKIQEDASKLGFIPGHMCRTHFSSDVGPVLANKPTIEGLDEFCACSCSTFTQRSSLCSREYVLQSSCDSCPINGLHCRSCMGHAADSLTKHSLFDPLNTKERGSCCNGRCCYSVVPKCLSSCDFTKHCDVIIDQIGHAAPKDNHQLQMPTRCCTLGENEKLICQCLSNKIAVRNLPQTSHCKDVSEKVMNQPSIAITERLENVSEPSVADDSSSKAVAEKKDAYRDSAVSKGQPNFGFSSGSSSIIVTKFQKSPEFNNVSSTAKHSKHKNLCDEGSRIEKSSASSYVPTSTGCEEPLNSSAKSELGPSRVKRKCNQISEGRRLEETDNEEHCSELLKKTRTLRCSVKGSESDDCTRASSQSSQKGVYQPQNEVNSFSCRVLRTKRKHPIMHLNKHVKQLHRQTKFFEGDEQPDAKGNFLGGLDSYDRKRQVEDMSTLDKTRHHQEGSRAFVRKLPKYVSLNCIVNEPNTNSEGACSGSGGIDSSLIATGITNDNRKSPKIVPLNLVLKKAKRCNAVKLRKTESTHLYEEKSSDCSVNSSDYSIEKYSVDDENCSPQAEYELQDSKRSRYSSNDLRSHVALHKRTSGGTKNRRTSVSLARIKKFGSKSVCYSGSDKDNAVLAHEVNARRYSGRLSSNSPCCVCGISDLEPCNRLIECSKCTKPAMVY

SEQ ID NO: 167946 - protein, 1581 aa, Zea Mays
MKSSPEEHILKSLASRNSGTGKMGLLSRYGKITGHMNKPAYSNDLSVEGGGHTNVEKLVNRTDETYYRKSVDVHETFTKNSALLQNSAVVNLGPAKNHPVHAFDLNPLTTPSGSPHFEASMGRHYNGNHLAHSHGIHLEKNFDASFCNPMPRFTGVMNHDSRACRPNFSNKTFQDTLSNASNTELKLGQSSYHQSMTTLSPLGQSTMIEFQKPQTHRPPINQNPSPKQATKISKSLSEHNEPSISTGNKKQPLEVVNGMKRSEGDELTDDTSKNSFISLFLSHLERNNTPEPIDDILNSNEHYLPKALDVACGSDHPESATRQIETRVPNDKHSKLASAIVHTKRRSEGISLSVASSGYNPQDASHANSQEHLIHGDSLSHLLPSQPNTGISKISARVSCHANCMSCIHVGNKSHQVAHGEIGVPCFYDKMARGHGTFERVDDCTHRSLRAFTKISCDNGKSCCSSRELLPSFCQNDQPTLGKSICGCCCKIQEDASKLGFIPGHMCRTHFSSDVGPVLANKPTIEGLDEFCACSCSTFTQRSSLCSREYVLQSSCDSCPINGLHCRSCMGHAADSLTKHSLFDPLNTKERGSCCNGRCCYSVVPKCLSSCDFTKHCDVIIDQIGHAAPKDNHQLQMPTRCCTLGENEKLICQCLSNKIAVRNLPQTSHCKDVSEKVMNQPSIAITERLENVSEPSVADDSSSKAVAEKKDAYRDSAVSKGQPNFGFSSGSSSIIVTKFQKSPEFNNVSSTAKHSKHKNLCDEGSRIEKSSASSYVPTSTGCEEPLNSSAKSELGPSRVKRKCNQISEGRRLEETDNEEHCSELLKKTRTLRCSVKGSESDDCTRASSQSSQKGVYQPQNEVNSFSCRVLRTKRKHPIMHLNKHVKQLHRQTKFFEGDEQPDAKGNFLGGLDSYDRKRQVEDMSTLDKTRHHQEGSRAFVRKLPKYVSLNCIVNEPNTNSEGACSGSGGIDSSLIATGITNDNRKSPKIVPLNLVLKKAKRCNAVKLRKTESTHLYEEKSSDCSVNSSDYSIEKYSVDDENCSPQAEYELQDSKRSRYSSNDLRSHVALHKRTSGVIGEDDSLGLTDVEINCLSISSSSNGTKNRRTSVSLARIKKFGSKSVCYSGSDKDNAVLAHEVNARRYSGRLSSNSPCCVCGISDLEPCNRLIECSKCYIKVHQACYGVLKVPRGQWFCRPCKNNTMDTVCVLCGYGGGAMTRALKTKNILKSLLQGLMNLERSEYYVDSLGNASSECTSLQNPVDSAHGDNIMNAKNITSNSWTSGKYYSSLLGPQPMQWVHMVCGLWTPGTKCPNDTTMSAFDVSGASPAKRNTACSICDRTGGSFVKCRAVNCLVFFHAWCAHQRGLLQSEPEGEHNENIGFYGRCVSHAIVFSSHVNPKKEYFRNNNWTCARTEGFKGRKGEGFSDSSHKKYEEYSGEFGVSQEQINAWLRINGSKPCGRGQVVEYVGEIVGQRVADRREIEYQSGKRQQYKSACYFFKIDREHIIDATRKGGIARFVNHSCQPNCVAKIISVRNEKKVMFFAERHINPGEEITYDYHFNREDEGQRILCFCRSRYCRRYLN

SEQ ID NO: 167947 - protein, 1464 aa, Zea Mays
MDVEMLPYGIISTFHCLSVRTSPLNMALLPCVYMQMDGVTLRHLLRPFAAQEAAAAGRVAAAPEQLFASHSTLQSGPPPRVGPSNELLTQVPGNYCTFDLAPDLTRANASNAAGTIDFTRAGPSSSAATLPKYPRHGLPASSSNEQSSFGALFPNRSANGMGIFTCQSSANEGIANVGVQFQDSSVHGLQKLPFKSMTHQHPTLPGDRIRVTCMNVGGEFFVGEAGLFGVICLCHRLRMSVAKFCEHAGGIPEKAGEIVCLENGMSIAQWFKFCIGARGHGTFERVDDCTHRSLRAFTKISCDNGKSCCSSRELLPSFCQNDQPTLGKSICGCCCKIQEDASKLGFIPGHMCRTHFSSDVGPVLANKPTIEGLDEFCACSCSTFTQRSSLCSREYVLQSSCDSCPINGLHCRSCMGHAADSLTKHSLFDPLNTKERGSCCNGRCCYSVVPKCLSSCDFTKHCDVIIDQIGHAAPKDNHQLQMPTRCCTLGENEKLICQCLSNKIAVRNLPQTSHCKDVSEKVMNQPSIAITERLENVSEPSVADDSSSKAVAEKKDAYRDSAVSKGQPNFGFSSGSSSIIVTKFQKSPEFNNVSSTAKHSKHKNLCDEGSRIEKSSASSYVPTSTGCEEPLNSSAKSELGPSRVKRKCNQISEGRRLEETDNEEHCSELLKKTRTLRCSVKGSESDDCTRASSQSSQKGVYQPQNEVNSFSCRVLRTKRKHPIMHLNKHVKQLHRQTKFFEGDEQPDAKGNFLGGLDSYDRKRQVEDMSTLDKTRHHQEGSRAFVRKLPKYVSLNCIVNEPNTNSEGACSGSGGIDSSLIATGITNDNRKSPKIVPLNLVLKKAKRCNAVKLRKTESTHLYEEKSSDCSVNSSDYSIEKYSVDDENCSPQAEYELQDSKRSRYSSNDLRSHVALHKRTSGVIGEDDSLGLTDVEINCLSISSSSNGTKNRRTSVSLARIKKFGSKSVCYSGSDKDNAVLAHEVNARRYSGRLSSNSPCCVCGISDLEPCNRLIECSKCYIKVHQACYGVLKVPRGQWFCRPCKNNTMDTVCVLCGYGGGAMTRALKTKNILKSLLQGLMNLERSEYYVDSLGNASSECTSLQNPVDSAHGDNIMNAKNITSNSWTSGKYYSSLLGPQPMQWVHMVCGLWTPGTKCPNDTTMSAFDVSGASPAKRNTACSICDRTGGSFVKCRAVNCLVFFHAWCAHQRGLLQSEPEGEHNENIGFYGRCVSHAIVFSSHVNPKKEYFRNNNWTCARTEGFKGRKGEGFSDSSHKKYEEYSGEFGVSQEQINAWLRINGSKPCGRGQKEYIHYKQLKGWKHLVVYKSGIHGLGLYTSVFIPRGSMVVEYVGEIVGQRVADRREIEYQSGKRQQYKSACYFFKIDREHIIDATRKGGIARFVNHSCQPNCVAKIISVRNEKKVMFFAERHINPGEEITYDYHFNREDEGQRILCFCRSRYCRRYLN

SEQ ID NO: 167948 - protein, 1596 aa, Zea Mays
MKSSPEEHILKSLASRNSGTGKMGLLSRYGKITGHMNKPAYSNDLSVEGGGHTNVEKLVNRTDETYYRKSVDVHETFTKNSALLQNSAVVNLGPAKNHPVHAFDLNPLTTPSGSPHFEASMGRHYNGNHLAHSHGIHLEKNFDASFCNPMPRFTGVMNHDSRACRPNFSNKTFQDTLSNASNTELKLGQSSYHQSMTTLSPLGQSTMIEFQKPQTHRPPINQNPSPKQATKISKSLSEHNEPSISTGNKKQPLEVVNGMKRSEGDELTDDTSKNSFISLFLSHLERNNTPEPIDDILNSNEHYLPKALDVACGSDHPESATRQIETRVPNDKHSKLASAIVHTKRRSEGISLSVASSGYNPQDASHANSQEHLIHGDSLSHLLPSQPNTGISKISARVSCHANCMSCIHVGNKSHQVAHGEIGVPCFYDKMARGHGTFERVDDCTHRSLRAFTKISCDNGKSCCSSRELLPSFCQNDQPTLGKSICGCCCKIQEDASKLGFIPGHMCRTHFSSDVGPVLANKPTIEGLDEFCACSCSTFTQRSSLCSREYVLQSSCDSCPINGLHCRSCMGHAADSLTKHSLFDPLNTKERGSCCNGRCCYSVVPKCLSSCDFTKHCDVIIDQIGHAAPKDNHQLQMPTRCCTLGENEKLICQCLSNKIAVRNLPQTSHCKDVSEKVMNQPSIAITERLENVSEPSVADDSSSKAVAEKKDAYRDSAVSKGQPNFGFSSGSSSIIVTKFQKSPEFNNVSSTAKHSKHKNLCDEGSRIEKSSASSYVPTSTGCEEPLNSSAKSELGPSRVKRKCNQISEGRRLEETDNEEHCSELLKKTRTLRCSVKGSESDDCTRASSQSSQKGVYQPQNEVNSFSCRVLRTKRKHPIMHLNKHVKQLHRQTKFFEGDEQPDAKGNFLGGLDSYDRKRQVEDMSTLDKTRHHQEGSRAFVRKLPKYVSLNCIVNEPNTNSEGACSGSGGIDSSLIATGITNDNRKSPKIVPLNLVLKKAKRCNAVKLRKTESTHLYEEKSSDCSVNSSDYSIEKYSVDDENCSPQAEYELQDSKRSRYSSNDLRSHVALHKRTSGGTKNRRTSVSLARIKKFGSKSVCYSGSDKDNAVLAHEVNARRLRYSGRLSSNSPCCVCGISDLEPCNRLIECSKCYIKVHQACYGVLKVPRGQWFCRPCKNNTMDTVCVLCGYGGGAMTRALKTKNILKSLLQGLMNLERSEYYVDSLGNASSECTSLQNPVDSAHGDNIMNAKNITSNSWTSGKYYSSLLGPQPMQWVHMVCGLWTPGTKCPNDTTMSAFDVSGASPAKRNTACSICDRTGGSFVKCRAVNCLVFFHAWCAHQRGLLQSEPEGEHNENIGFYGRCVSHAIVFSSHVNPKKEYFRNNNWTCARTEGFKGRKGEGFSDSSHKKYEEYSGEFGVSQEQINAWLRINGSKPCGRGQKEYIHYKQLKGWKHLVVYKSGIHGLGLYTSVFIPRGSMVVEYVGEIVGQRVADRREIEYQSGKRQQYKSACYFFKIDREHIIDATRKGGIARFVNHSCQPNCVAKIISVRNEKKVMFFAERHINPGEEITYDYHFNREDEGQRILCFCRSRYCRRYLN

SEQ ID NO: 167949 - protein, 1864 aa, Zea Mays
MDVEMLPYGIISTFHCLSVRTSPLNMALLPCVYMQMDGVTLRHLLRPFAAQEAAAAGRVAAAPEQLFASHSTLQSGPPPRVGPSNELLTQVPGNYCTFDLAPDLTRANASNAAGTIDFTRAGPSSSAATLPKYPRHGLPASSSNEQSSFGALFPNRSANGMGIFTCQSSANEGIANVGVQFQDSSVHGLQKLPFKSMTHQHPTLPGDRIRVTCMNVGGEFFVGEAGLFGVICLCHRLRMSVAKFCEHAGGIPEKAGEIVCLENGMSIAQWFKFCIGVGGSIANTRWDWPEWAHMKSSPEEHILKSLASRNSGTGKMGLLSRYGKITGHMNKPAYSNDLSVEGGGHTNVEKLVNRTDETYYRKSVDVHETFTKNSALLQNSAVVNLGPAKNHPVHAFDLNPLTTPSGSPHFEASMGRHYNGNHLAHSHGIHLEKNFDASFCNPMPRFTGVMNHDSRACRPNFSNKTFQDTLSNASNTELKLGQSSYHQSMTTLSPLGQSTMIEFQKPQTHRPPINQNPSPKQATKISKSLSEHNEPSISTGNKKQPLEVVNGMKRSEGDELTDDTSKNSFISLFLSHLERNNTPEPIDDILNSNEHYLPKALDVACGSDHPESATRQIETRVPNDKHSKLASAIVHTKRRSEGISLSVASSGYNPQDASHANSQEHLIHGDSLSHLLPSQPNTGISKISARVSCHANCMSCIHVGNKSHQVAHGEIGVPCFYDKMARGHGTFERVDDCTHRSLRAFTKISCDNGKSCCSSRELLPSFCQNDQPTLGKSICGCCCKIQEDASKLGFIPGHMCRTHFSSDVGPVLANKPTIEGLDEFCACSCSTFTQRSSLCSREYVLQSSCDSCPINGLHCRSCMGHAADSLTKHSLFDPLNTKERGSCCNGRCCYSVVPKCLSSCDFTKHCDVIIDQIGHAAPKDNHQLQMPTRCCTLGENEKLICQCLSNKIAVRNLPQTSHCKDVSEKVMNQPSIAITERLENVSEPSVADDSSSKAVAEKKDAYRDSAVSKGQPNFGFSSGSSSIIVTKFQKSPEFNNVSSTAKHSKHKNLCDEGSRIEKSSASSYVPTSTGCEEPLNSSAKSELGPSRVKRKCNQISEGRRLEETDNEEHCSELLKKTRTLRCSVKGSESDDCTRASSQSSQKGVYQPQNEVNSFSCRVLRTKRKHPIMHLNKHVKQLHRQTKFFEGDEQPDAKGNFLGGLDSYDRKRQVEDMSTLDKTRHHQEGSRAFVRKLPKYVSLNCIVNEPNTNSEGACSGSGGIDSSLIATGITNDNRKSPKIVPLNLVLKKAKRCNAVKLRKTESTHLYEEKSSDCSVNSSDYSIEKYSVDDENCSPQAEYELQDSKRSRYSSNDLRSHVALHKRTSGGTKNRRTSVSLARIKKFGSKSVCYSGSDKDNAVLAHEVNARRYSGRLSSNSPCCVCGISDLEPCNRLIECSKPCKNNTMDTVCVLCGYGGGAMTRALKTKNILKSLLQGLMNLERSEYYVDSLGNASSECTSLQNPVDSAHGDNIMNAKNITSNSWTSGKYYSSLLGPQPMQWVHMVCGLWTPGTKCPNDTTMSAFDVSGASPAKRNTACSICDRTGGSFVKCRAVNCLVFFHAWCAHQRGLLQSEPEGEHNENIGFYGRCVSHAIVFSSHVNPKKEYFRNNNWTCARTEGFKGRKGEGFSDSSHKKYEEYSGEFGVSQEQINAWLRINGSKPCGRGQKEYIHYKQLKGWKHLVVYKSGIHGLGLYTSVFIPRGSMVVEYVGEIVGQRVADRREIEYQSGKRQQYKSACYFFKIDREHIIDATRKGGIARFVNHSCQPNCVAKIISVRNEKKVMFFAERHINPGEEITYDYHFNREDEGQRILCFCRSRYCRRYLN

SEQ ID NO: 167950 - protein, 1619 aa, Zea Mays
MKSSPEEHILKSLASRNSGTGKMGLLSRYGKITGHMNKPAYSNDLSVEGGGHTNVEKLVNRTDETYYRKSVDVHETFTKNSALLQNSAVVNLGPAKNHPVHAFDLNPLTTPSGSPHFEASMGRHYNGNHLAHSHGIHLEKNFDASFCNPMPRFTGVMNHDSRACRPNFSNKTFQDTLSNASNTELKLGQSSYHQSMTTLSPLGQSTMIEFQKPQTHRPPINQNPSPKQATKISKSLSEHNEPSISTGNKKQPLEVVNGMKRSEGDELTDDTSKNSFISLFLSHLERNNTPEPIDDILNSNEHYLPKALDVACGSDHPESATRQIETRVPNDKHSKLASAIVHTKRRSEGISLSVASSGYNPQDASHANSQEHLIHGDSLSHLLPSQPNTGISKISARVSCHANCMSCIHVGNKSHQVAHGEIGVPCFYDKMARGHGTFERVDDCTHRSLRAFTKISCDNGKSCCSSRELLPSFCQNDQPTLGKSICGCCCKIQEDASKLGFIPGHMCRTHFSSDVGPVLANKPTIEGLDEFCACSCSTFTQRSSLCSREYVLQSSCDSCPINGLHCRSCMGHAADSLTKHSLFDPLNTKERGSCCNGRCCYSVVPKCLSSCDFTKHCDVIIDQIGHAAPKDNHQLQMPTRCCTLGENEKLICQCLSNKIAVRNLPQTSHCKDVSEKVMNQPSIAITERLENVSEPSVADDSSSKAVAEKKDAYRDSAVSKGQPNFGFSSGSSSIIVTKFQKSPEFNNVSSTAKHSKHKNLCDEGSRIEKSSASSYVPTSTGCEEPLNSSAKSELGPSRVKRKCNQISEGRRLEETDNEEHCSELLKKTRTLRCSVKGSESDDCTRASSQSSQKGVYQPQNEVNSFSCRVLRTKRKHPIMHLNKHVKQLHRQTKFFEGDEQPDAKGNFLGGLDSYDRKRQVEDMSTLDKTRHHQEGSRAFVRKLPKYVSLNCIVNEPNTNSEGACSGSGGIDSSLIATGITNDNRKSPKIVPLNLVLKKAKRCNAVKLRKTESTHLYEEKSSDCSVNSSDYSIEKYSVDDENCSPQAEYELQDSKRSRYSSNDLRSHVALHKRTSGVIGEDDSLGLTDVEINCLSISSSSNGTKNRRTSVSLARIKKFGSKSVCYSGSDKDNAVLAHEVNARRYSGRLSSNSPCCVCGISDLEPCNRLIECSKCYIKVHQACYGVLKVPRGQWFCRPCKNNTMDTVCVLCGYGGGAMTRALKTKNILKSLLQGLMNLERSEYYVDSLGNASSECTSLQNPVDSAHGDNIMNAKNITSNSWTSGKYYSSLLGPQPMQWVHMVCGLWTPGTKCPNDTTMSAFDVSGASPAKRNTACSICDRTGGSFVKCRAVNCLVFFHAWCAHQRGLLQSEPEGEHNENIGFYGRCVSHAIVFSSHVNPKKEYFRNNNWTCARTEGFKGRKGEGFSDSSHKKYEEYSGEFGVSQEQINAWLRINGSKPCGRGQKEYIHYKQLKGWKHLVVYKSGIHGLGLYTSVFIPRGSMVVEYVGEIVGQRVADRREIEYQSGKRQQYKSACYFFKIDREHIIDATRKGGIARFVNHSCQPNCVAKIISVRNEKKVMFFAERHINPGEEITYDYHFNREDEGQRILCFCRSRYCRRYLN

SEQ ID NO: 167951 - protein, 1415 aa, Zea Mays
MDGVTLRHLLRPFAAQEAAAAGRVAAAPEQLFASHSTLQSGPPPRVGPSNELLTQVPGNYCTFDLAPDLTRANASNAAGTIDFTRAGPSSSAATLPKYPRHGLPASSSNEQSSFGALFPNRSANGMGIFTCQSSANEGIANVGVQFQDSSVHGLQKLPFKSMTHQHPTLPGDRIRVTCMNVGGEFFVGEAGLFGVICLCHRLRMSVAKFCEHAGGIPEKAGEIVCLENGMSIAQWFKFCIGVGGSIANTRWDWPEWAHMKSSPEEHILKSLASRNSGTGKMGLLSRYGKITGHMNKPAYSNDLSVEGGGHTNVEKLVNRTDETYYRKSVDVHETFTKNSALLQNSAVVNLGPAKNHPVHAFDLNPLTTPSGSPHFEASMGRHYNGNHLAHSHGIHLEKNFDASFCNPMPRFTGVMNHDSRACRPNFSNKTFQDTLSNASNTELKLGQSSYHQSMTTLSPLGQSTMIEFQKPQTHRPPINQNPSPKQATKISKSLSEHNEPSISTGNKKQPLEVVNGMKRSEGDELTDDTSKNSFISLFLSHLERNNTPEPIDDILNSNEHYLPKALDVACGSDHPESATRQIETRVPNDKHSKLASAIVHTKRRSEGISLSVASSGYNPQDASHANSQEHLIHGDSLSHLLPSQPNTGISKISARVSCHANCMSCIHVGNKSHQVAHGEIGVPCFYDKMARGHGTFERVDDCTHRSLRAFTKISCDNGKSCCSSRELLPSFCQNDQPTLGKSICGCCCKIQEDASKLGFIPGHMCRTHFSSDVGPVLANKPTIEGLDEFCACSCSTFTQRSSLCSREYVLQSSCDSCPINGLHCRSCMGHAADSLTKHSLFDPLNTKERGSCCNGRCCYSVVPKCLSSCDFTKHCDVIIDQIGHAAPKDNHQLQMPTRCCTLGENEKLICQCLSNKIAVRNLPQTSHCKDVSEKVMNQPSIAITERLENVSEPSVADDSSSKAVAEKKDAYRDSAVSKGQPNFGFSSGSSSIIVTKFQKSPEFNNVSSTAKHSKHKNLCDEGSRIEKSSASSYVPTSTGCEEPLNSSAKSELGPSRVKRKCNQISEGRRLEETDNEEHCSELLKKTRTLRCSVKGSESDDCTRASSQSSQKGVYQPQNEVNSFSCRVLRTKRKHPIMHLNKHVKQLHRQTKFFEGDEQPDAKGNFLGGLDSYDRKRQVEDMSTLDKTRHHQEGSRAFVRKLPKYVSLNCIVNEPNTNSEGACSGSGGIDSSLIATGITNDNRKSPKIVPLNLVLKKAKRCNAVKLRKTESTHLYEEKSSDCSVNSSDYSIEKYSVDDENCSPQAEYELQDSKRSRYSSNDLRSHVALHKRTSGGTKNRRTSVSLARIKKFGSKSVCYSGSDKDNAVLAHEVNARRYSGRLSSNSPCCVCGISDLEPCNRLIECSAPSLLWCTKSS

SEQ ID NO: 167952 - protein, 1033 aa, Zea Mays
MEGAAVSSLTIALEKQSRLLRAICDRLSAQDAPWASLESATTEHLDAVEAAAATRVGAPESWRPHVELRYEEPVTADNWGGLFEHSGVITAEVGSSPEEVITDDWGDLFCRGVDSDEQLCDSLHSASIRSLEEAFAREDPIPSRADLGIQLSATTERLDAVEAAVATHVDALESWRLRVEARASVHLCGFFDGTDVTKLPTTCSTSGLTTKLAMAHYGSHLPGDKGGSAASWQPVRSLALAVHVESQCQQASSACGTPAMASMGKMSVGDLTEADLKGKHIFVCAEIHEPPDENQNSTNDILSTSCDTAVDQRRTECLGSTGRRLGCQPATPRECMLSVIPGSATAVDVVKRCQRLFPLADSTGAFDATVAARVTQMAVSSPARNTTPTGSSPESTACWFPCDNKSSKQLQRGGPLLDGSDGASFRVGMQLRQLSGCYQCHMVVVPVSGSVSMRATICPWLDCGDVFVRQESLQLHQSIRHAVSGLGTMATNGRAHDVEGKEEYDSVARLTRLLMSHQDLTALPWYDNKDAFNTFYNKTGSSKQVARAIFINPEHGLYPEIFHLEQLILGKEDTTNNFSRGYHTIGKGMVLVANNFGNDLLTRRSEIKQPWPPPQELACLGLNIMVADTSAPGVRMPRWPPPPRPPSPTPGRQVLSSRTVSHGRAIAVAPVGPLKPRNSGPLPGSRAMDGLPDADAAPLAAAPPQKRDEWSESGIARLLEAYEAKWLLRNRAKLKWSDWVDIAREVSVHCADDAAAAGKPPGGVGSSAKTPNQCKNKVESMKKRYRAETAAVARAGPAAAGPSWRFFARMDGLLKGPPVGPDQVQQQQALTNSRIDLRAPAKPEAEAEADFAAQLRDAVPGAFTDLMNMDANGAVPDKAEKADNSMQKESGPADSDANVSSPRSKVANEDVEEVEDKVWDRPKKRKSTDFDIAKSIELLASSFLKVEQARMEMYRETERMRVEAEIKKGEMELKRTEIMAKTHLQIARLFARKLKQSSGKNGGSSSVTAEVDTLTKKGENGALMKTLPCDVTK

SEQ ID NO: 167953 - protein, 427 aa, Zea Mays
MEDGVSTYTVDEALVSMGFGKFHAFVLAYSGMAKISEAMEMMLLSFVGQSVQAEWGLSAHEESLITSVVFVGMLVGAYAWGIVSDNYGRRQGLPHFFHWLLEFDYECSNPSIFFETLWSVAHCSMVGFNFTAIVTGGAGLLSAFAPNYLSLIVLRFMVGVGLGGGPVLGSWFLEFIPAPNRGTWMVMFSAFWTVGTIMEASLAWAVMPAFGWRWLLALSSLPSFALLLFYPVTLESPRYLCMKGRIAEAVHVLETMSRVNCVSLPSGRLVSGHRVELHDIGDSSETAQLVTSNKNNTADRGSKSEIGGLSAILKLLSPNLIRSTLLLWTVFLGHAFLYYGLVLLTSELNHGNRICGSEEGAEVTTTAHIHDENLYRNVFITSFGGMCVSAIWSTSHFSETVSWEFLIFRATMMQRSLVFSCRLPLLT

SEQ ID NO: 167954 - protein, 54 aa, Zea Mays
MAIIDQGFKGHFQQDQKHWQCHHFGILQLNEQKKYHINELVITSAFELCAVPNG

SEQ ID NO: 167955 - protein, 57 aa, Zea Mays
MQLMLCTLTVRNYIGTPFDASISRVFWNLSNIMLRTSTNSSRYISQLQRKGKVCLHV

SEQ ID NO: 167956 - protein, 1457 aa, Zea Mays
MSSVAGDPEPDSVKLDRISALLTTMNNRLNAHDQRIARTEKFQSGDEGDHEPQGSPDRRRHGGTKEGSFSGGRGNGPRRHDSSGPREPNLNFSHYDGESDPLPWLNKCEGFFRGYRTLQEDKVWMASLHLDGTAAQWYYQLERDLGIITWPRFVEFTNMRFGPPIRSNALGELKELHRTGTVEEYQRQFLALLCRCDNLTRQHQIDLFTAGLGQPLSSDVEMQHPANLQTAMSLARAFERRSAEAARAIYPSTPRQPSRPRPPSTTPAPTTEEPQRPRVRRLSAEEIADKRAKGQCYFCPEKFSRDHKCAARGGVFCLSLDDAAPEDDDITEEVCISLNALTGVPAGDTIRLRVKIQGEELTALVDSDSTHSFINQGVAHRLGLAITHRPGLVVTVANGQQLHSPGICAAMPLAIQDQTFSIDCYALALEGFDVVLGVHWLKTLGPITWDFTARSMAFWHHDRAVMWRGIGGEEVSLAALTATRDLMNSLLQDFTDLFAEPRGLPPARRHDHHIHLLPGTAPIAVRPYRYPQLLKDEIERQCQEMLAQGIIRETTSPFSSPVLLVKKHDGTWRFCVDFRALNDKTVKNKFPIPVVDELLDELSGACFFTKIDLRSGYHQVRMHPEDIAKTAFRTHHGHFEFLVMPFGLTNAPATFQALMNTILKPFLRRFVLVFFDDILIYSSSWETHVQQVRMVFQLLRANCLFIKQSKCFFGEPTVAYLGHIISKEGVAMDPSKVAAVEAWPQPRTARALRGFLGLTGYYRKFIAGYGAVAEPLTALLKGAAFSWTSQATSAFQALKKALVSAPLLRLPDFSKRFYVDCDASGSGFGAVLHQGEGAVAYFSRAVAPHHAKLPAYERELIGLVKAVRNWRPYLWGRSFTVRTDHRSLKYILDQRLTTIPQHTWVTKLFGYDLDVVYRPGKQNAAADALSRRDEEAFSIHALSTTSFAVFDAIRQELLADPRAQEIRAQLASGTAPAGWTEVDGLLLFQGKAYVPDSSPLWPQLLENAHTAGHEGIQKTLYRLRLSFFNSHSSRLVREYVKGCGVCQRNKTEHLHPAGLLQPLPVPSSVWSDIAMDFVEGFPKVGGKSVILTVVDRFSKYAHFIPLSHPYSATVVAKAFFDEIVRLHGFPCSIVSDRDPVFTSTFWTELFRLAGVTLLLSSAFHPQTDGQSEVTNRIITMYLRCLAGDRPRSWLQWLPWAEFCYNSSFQTAIGVSPFQVVYGRPPPTLLQFEQGAAKVAAVEAQLRDRDEFLAEIRDRLLLAQEVMRAQHDKKHREVVFAVGDWVWLRLHHRTAVGITPARATKLGPKYFGPYEVLEQIGSVAYRLRLPAAARIHNVFHVALLKPFVGTPPVGDPVQLPSLVHGRVVPKPLKIIRARLNHGVWELLVHWDGQTAVDASWISLEEFKKEYPVFQLEDELFQGEGGSVVDSFFYRNTYGRRHKKGTSTNKATELEELEE

SEQ ID NO: 167957 - protein, 160 aa, Zea Mays
MERAASVISSLLGGGGGSGAQAATVKSVLVYPIKSCRGISVPQAPITATGFRWDRQWMLVNSKGRACTQRVEPKLALVEVQMPPEAFAEDWHPTPDDHMVIRAPGMEPLKVPLSVECATISDVSVWEWTGAAYDEGAEAAEWFSTFLGCPTRLVRFNEVF

SEQ ID NO: 167958 - protein, 162 aa, Zea Mays
MERAASVISSLLGGGGGSGAQAATVKSVLVYPIKSCRGISVPQAPITATGFRWDRQWMLVNSKGRACTQRVEPKLALVEVQMPPEAFAEDWHPTPDDHMVIRAPGMEPLKVPLSVECATISDVSVWEWTGAAYDEGAEAAEWFSTFLGCPTRLVRFNEGPYN

SEQ ID NO: 167959 - protein, 308 aa, Zea Mays
MERAASVISSLLGGGGGSGAQAATVKSVLVYPIKSCRGISVPQAPITATGFRWDRQWMLVNSKGRACTQRVEPKLALVEVQMPPEAFAEDWHPTPDDHMVIRAPGMEPLKVPLSVECATISDVSVWEWTGAAYDEGAEAAEWFSTFLGCPTRLVRFNEETRLTDPDYARGYKTMFSDGFPYLIVSQGSLDALNEILKEPIPINRFRPNILVEGCHPYAEDMWKSVKINKLTFQGVKLCGRCKVPTINQDTGIPSPTEPTETLQTYRSGEVLLRSHKNKRQVYFGQNAVCKESLSANGEGRIVKVGDPV

SEQ ID NO: 167960 - protein, 318 aa, Zea Mays
MERAASVISSLLGGGGGSGAQAATVKSVLVYPIKSCRGISVPQAPITATGFRWDRQWMLVNSKGRACTQRVEPKLALVEVQMPPEAFAEDWHPTPDDHMVIRAPGMEPLKVPLSVECATISDVSVWEWTGAAYDEGAEAAEWFSTFLGCPTRLVRFNEDSETRLTDPDYARGYKTMFSDGFPYLIVSQGSLDALNEILKEPIPINRFRPNILVEGCHPYAEDMWKSVKINKLTFQGVKLCGRCKVPTINQDTGIPSPTEPTETLQTYRSGEVLLRSHKNKRQSARNLCQQMGKEGSSRSGIQFRPCSFTSDCTRNHSG

SEQ ID NO: 167961 - protein, 318 aa, Zea Mays
MAMEKAASSLLGGGGGEPAATVKSIFIYPIKSCRGLAVSQALIISTGFRWDRQWVVVNGKGRAYTQRVEPKLALVQVELPPEAFAEDWQPTPYDHLVIRAPGMDTLKIPLAAEHTTIDDVSVWEWSGSAYDEGAEVSEWFSTYFGKPSRLVRFKEASETRPTDPDYAQGYKIMFTDCFPFLIASQGSLDALNEILKEPVPMNRFRPNILVDGCHPYSEDLWKTIKINNLTFLGVKLCNRCKVPTINQEDGVPGTEPTETLQTFRSDQVLRPSHKNKRQVYFGQNLVCKESLSGEGKVIKVGDPVYVVQAFASSNEAPA

SEQ ID NO: 167962 - protein, 301 aa, Zea Mays
MAMEKAASFLSSLLGGGGGEPAATVKSIFIYPIKSCRGLAVSQAPITSTGFRWDRQWVVVNAKGRAYTQRVEPKLALVQVELPPEAFAENWQPTPDDHLVIRAPGMDTLKIPLITEHTTIDDVSVWEWSGSAYDEGAEASEWFSTYFGKPSRLVRFKEASETRPTDPDYAQGYKIMFTDCFPFLIASQGSLDALNEILKEPVPMNRFRPNILVDGCHPYSEDLWKTIKINNLTFLGVKLCNRCKTFRSDQVLRPSHKNKRQVYFGQNLVCKESLSGEGKVIKVGDPVYVVQAFASSNEAPA

SEQ ID NO: 167963 - protein, 253 aa, Zea Mays
MAMEKAASFLSSLLGGGGGEPAATVKSIFIYPIKAPGMDTLKIPLITEHTTIDDVSVWEWSGSAYDEGAEASEWFSTYFGKPSRLVRFKEASETRPTDPDYAQGYKIMFTDCFPFLIASQGSLDALNEILKEPVPMNRFRPNILVDGCHPYSEDLWKTIKINNLTFLGVKLCNRCKVPTINQEDGVPGTEPTETLQTFRSDQVLRPSHKNKRQVYFGQNLVCKESLSGEGKVIKVGDPVYVVQAFASSNEAPA

SEQ ID NO: 167964 - protein, 650 aa, Zea Mays
MVLVRNDYSLSASDLGKHLFNWTRTSFSVKYNHPDIPCIRSEGLPLALPDSRSANVIVLKEGTPFISIHGSDALEPVQTPRKLPNTAGKSDIVLDDSQNQTYDGARSHVISADSEATETPTRNTYVWLFSFFPIFLVIGYLLSLTSASKSCRQFVIQLIKPFTRDKKSVDIRGRSEGSPKRRKTRKKDGLVNSPETLTASDKECSETGGSTEAPMENSALKDALGGRHIGKLYVSNKEIGRGSNGTVVFEGSYDGRQVAVKRLLRSHNDIAEKETQNLIISDHDPNIVRLYGCDYDSDFVYISLERCHCSLADLIQKHSYLSSGESVSNNEASFSIKSKISNVKGMDVELWTHDGLPSAQLLKLMRDVVAGLVHLHDLGIIHRDLKPQNVLISAGGPIRAKLSDMGISKHLQDDMTSVSHHGTGFGSSGWRAPEQLRHGRQTRAMDLFSLGCLIFYCITKGKHPFGEYYERDVNIANNRFDLFMVDYIPEAVHLISHLLQPNPEARPTAVYVMHHPLFWSPELRLSFLRDTSDRIEKTSETDLINTLESIGSLAFGGKWGEKLDAALVTDMGRYRKYNFGSIRDLLRYIRNKSGHYRELSDDLKGILGSLPEGFDRYFASRFPKLLIEVYKVLWVHCKDEEAFSKYFKGS

SEQ ID NO: 167965 - protein, 741 aa, Zea Mays
MNGTELWEVYNGNTVRLPWKLEEFVARSPYIRDSVVTIGSKVSTVFVVDSDSGEIIYRHSIPAVLNELEGPGIEGTPSKLNARTNYDSDNIMVLVRNDYSLSASDLGKHLFNWTRTSFSVKYNHPDIPCIRSEGLPLALPDSRSANVIVLKEGTPFISIHGSDALEPVQTPRKLPNTAGKSDIVLDDSQNQTYDGARSHVISADSEATETPTRNTYVWLFSFFPIFLVIGYLLSLTSASKSCRQFVIQLIKPFTRDKKSVDIRGRSEGSPKRRKTRKKDGLVNSPETLTASDKECSETGGSTEAPMENSALKDALGGRHIGKLYVSNKEIGRGSNGTVVFEGSYDGRQVAVKRLLRSHNDIAEKETQNLIISDHDPNIVRLYGCDYDSDFVYISLERCHCSLADLIQKHSYLSSGESVSNNEASFSIKSKISNVKGMDVELWTHDGLPSAQLLKLMRDVVAGLVHLHDLGIIHRDLKPQNVLISAGGPIRAKLSDMGISKHLQDDMTSVSHHGTGFGSSGWRAPEQLRHGRQTRAMDLFSLGCLIFYCITKGKHPFGEYYERDVNIANNRFDLFMVDYIPEAVHLISHLLQPNPEARPTAVYVMHHPLFWSPELRLSFLRDTSDRIEKTSETDLINTLESIGSLAFGGKWGEKLDAALVTDMGRYRKYNFGSIRDLLRYIRNKSGHYRELSDDLKGILGSLPEGFDRYFASRFPKLLIEVYKVLWVHCKDEEAFSKYFKGS

SEQ ID NO: 167966 - protein, 905 aa, Zea Mays
MRSLRRVLIPLVLLAGLVFRVDDGGGAFLPPPPPALPAPPPRLALNGEAAPEDDGAAVSRSTEIVAAEARSTEFVAPARPKKQSFRELLVRPQPARHEPASLVTDEAKAESSSVLQFWDNGTIQLVDKLSQSPLWEITTGPPLSDQINTAESGLNYLIYPFNENKNMNGTELWEVYNGNTVRLPWKLEEFVARSPYIRDSVVTIGSKVSTVFVVDSDSGEIIYRHSIPAVLNELEGPGIEGTPSKLNARTNYDSDNIMVLVRNDYSLSASDLGKHLFNWTRTSFSVKYNHPDIPCIRSEGLPLALPDSRSANVIVLKEGTPFISIHGSDALEPVQTPRKLPNTAGKSDIVLDDSQNQTYDGARSHVISADSEATETPTRNTYVWLFSFFPIFLVIGYLLSLTSASKSCRQFVIQLIKPFTRDKKSVDIRGRSEGSPKRRKTRKKDGLVNSPETLTASDKECSETGGSTEAPMENSALKDALGGRHIGKLYVSNKEIGRGSNGTVVFEGSYDGRQVAVKRLLRSHNDIAEKETQNLIISDHDPNIVRLYGCDYDSDFVYISLERCHCSLADLIQKHSYLSSGESVSNNEASFSIKSKISNVKGMDVELWTHDGLPSAQLLKLMRDVVAGLVHLHDLGIIHRDLKPQNVLISAGGPIRAKLSDMGISKHLQDDMTSVSHHGFGSSGWRAPEQLRHGRQTRAMDLFSLGCLIFYCITKGKHPFGEYYERDVNIANNRFDLFMVDYIPEAVHLISHLLQPNPEARPTAVYVMHHPLFWSPELRLSFLRDTSDRIEKTSETDLINTLESIGSLAFGGKWGEKLDAALVTDMGRYRKYNFGSIRDLLRYIRNKSGHYRELSDDLKGILGSLPEGFDRYFASRFPKLLIEVYKVLWVHCKDEEAFSKYFKGS

SEQ ID NO: 167967 - protein, 194 aa, Zea Mays
MDPEDTTPPAPSQGDAETTPPPVLEVAAGEDSLASGGEAAERAHEEEELAREVMELGLQNEYLRSQIAGVRPAGDADEVPGLVRGWKEQVERMSREVQEQRLTREATEKALEHVNVAYAEADGKVQELTAKLAQAEQKMEKELKERDDKYLELETKLQRLLKRAKQRIQDIQKLIWKLGLMKLIRRLSRLLLCN

SEQ ID NO: 167968 - protein, 155 aa, Zea Mays
MSQVSNNDHQSQGPVKDTMSVELAEQQILLLARQQAQREEELAQSQRHILALQQEIEELERENRLHDQQEAMLKTELRNMERSQKREGIDMTYLKNVILKLLETGEVGALLPVVGTLLQFSPDEFVKGKSCYGKAASYDYDYCAHDVGKSENAHQ

SEQ ID NO: 167969 - protein, 150 aa, Zea Mays
MSQVSNNDHQSQGPVKDTMSVELAEQQILLLARQQAQREEELAQSQRHILALQQEIEELERENRLHDQQEAMLKTELRNMERSQKREGIDMTYLKNVILKLLETAQEVPARCPFECGLFTSYCSVRWHNHTEFVLCKILVLRHCPRRSAV

SEQ ID NO: 167970 - protein, 77 aa, Zea Mays
MGMRQQGGLQQHKCTWTQLWGGEVGALLPVVGTLLQFSPDELKKCQQGVLSSVVSSQATAVSDGTTTQNSFFARFSF

SEQ ID NO: 167971 - protein, 281 aa, Zea Mays
MRGHDTPPTYVCMNAALSPTARGPRRTSAARIWASSPAGTAVKLATRTATWVGSKRQGPAAPVYGYALCSIRPPDSIRYEYAFVISPPAQPLLHSFCATARVVAVDQLLLAEVDELPRGEEVGALHRARRAERPARPARALRLDARDGALVAPVEAGRQTGHLLLRGRRGGRHATHEPLDVPAGAQAREARLELLPREVGEGRDPVARRRVQRLVRRRAGQVGREHAQPTRILLGPGVPPPVPPHERCELRLREQTRARAGAGTLRRHLPDEFVVGGRAGE

SEQ ID NO: 167972 - protein, 121 aa, Zea Mays
MGRRWQSSLEAMEKNVSISVSLEGNISSIPNSIVNDSKTLMENGVDTSFINHAAKEWTEMRRQWVGHQAEVPRKAPQEPVISWSATYDDLLSTSERFPQRIPLSEMVDFLVDIWHEEGLYG

SEQ ID NO: 167973 - protein, 66 aa, Zea Mays
MDTINEVTRQLTAGNMKWLIATEDWTLEDFPFLWHDKTLLVLDLIYVSILSVFVNNTFIENISIFL

SEQ ID NO: 167974 - protein, 51 aa, Zea Mays
MKWLIATEDWTLEDFPFLWHDKTLLVLDLIYVSILSVFVNNTFIENISIFL

SEQ ID NO: 167975 - protein, 60 aa, Zea Mays
MKGHNPNVQKVAAQLVEFNQEIRRDHSLVKKGRQGQVMGVCECVCVNIEASEGCPDVLHP

SEQ ID NO: 167976 - protein, 659 aa, Zea Mays
MTDWVYMPWVTPSANPVRFVVRSPPPSCCQSRLGNRIVRESSMKGRLLLLLWAWAAATWVSVSAVTRLGRGVAGEQPLSRIAVERVVLAVNDAAYVKASPLVLGHKGENSEWADVEFFHPNPSDDDWIGVFSPANFSDAICEAENTGTPVLCTAPIKFANFENDGYNKTGKGYLKLQLINQREDFSFALFSGGLSKPKLISVSNKVAFANPKAPVYPRLAQGKSWNEMTVTWTSGYDITEAVPFVEWGEKGGRRLLAPAGTLTFDRNSMCGSPARTVGWRHPGYIHTSFLKDLWPDSPYTYRLGHRLMNGTRVWSKSYSFKASPYPGQDSLQRVVVFGDMGKAEADGSNEFSDFQPGSLNTTYQIIRDLEDIDMVVHIGDICYADGYLSQWDQFTAQIEPIASRVPYMIGLGNHERDWPGTGSFYGNLDSGGECGVPAQTVFYTPAENRAKFWYATDYGMFRFCIANTEEDWRPGTEQYKFIEQCLSSVDRQKQPWLIFLAHRVLGYSSCTYYESEGTFEEPMGREALQELWQKYKVDIAFYGHVHSYERTCPVYQSQCVVDGSDHYSGPFQATTHVVVGGAGASILDSEFTTSKIQWSHFTDFDHGFVKLTALNHSSLLFEYKKSRDGNVYDHFTISRDYRDILACSIDNCPRSTLAS

SEQ ID NO: 167977 - protein, 281 aa, Zea Mays
MTDWVYMPWVTPSANPVRFVVRSPPPSCCQSRLGNRIVRESSMKGRLLLLLWAWAAATWVSVSAVTRLGRGVAGEQPLSRIAVERVVLAVNDAAYVKASPLVLGHKGENSEWADVEFFHPNPSDDDWIGVFSPANFSDAICEAENTGTPVLCTAPIKYQFANFENDGYNKTGKGYLKLQLINQREDFSFALFSGGLSKPKLISVSNKVAFANPKAPVYPRLAQGKSWNEMTVTWTSGYDITEAVPFVEWGEKGGRRLLAPAGTLTFDRNSMCGILTGLAIG

SEQ ID NO: 167978 - protein, 352 aa, Zea Mays
MNGTRVWSKSYSFKASPYPGQDSLQRVVVFGDMGKAEADGSNEFSDFQPGSLNTTYQIIRDLEDIDMVVHIGDICYADGYLSQWDQFTAQIEPIASRVPYMIGLGNHERDWPGTGSFYGNLDSGGECGVPAQTVFYTPAENRAKFWYATDYGMFRFCIANTEEDWRPGTEQYKFIEQCLSSVDRQKQPWLIFLAHRVLGYSSCTYYESEGTFEEPMGREALQELWQKYKVDIAFYGHVHSYERTCPVYQSQCVVDGSDHYSGPFQATTHVVVGGAGASILDSEFTTSKIQWSHFTDFDHGFVKLTALNHSSLLFEYKKSRDGNVYDHFTISRDYRDILACSIDNCPRSTLAS

SEQ ID NO: 167979 - protein, 355 aa, Zea Mays
MNGTRVWSKSYSFKASPYPGQDSLQRVVVFGDMGKAEADGSNEFSDFQPGSLNTTYQIIRDLEDIDMVVHIGDICYADGYLSQWDQFTAQIEPIASRVPYMIAVTMRGIGLALVHSTGTLTPVESAASLPKLCSTLQLRTVQNSGTRRTTACSGSASQTRKRTGGRGPSSTSSSSNACRRSTGRSSRGSSSSRTAFSATPPAPTTNRRARSRSPWGGKRCRSSGRSTRWTSPSMATSTATKGHARSTSLSASSMDPTTTAARSRRRRTSLSAAQEPAFSILSSPPRRSSGATSPTSTTGSSSSRPSTIPPCCSSTRRAATATCMTISQSHATTGTSSLAPSTTAPGAHWLPEVPQ

SEQ ID NO: 167980 - protein, 268 aa, Zea Mays
MATCLSGISSLHRSNRLLQGGNHERDWPGTGSFYGNLDSGGECGVPAQTVFYTPAENRAKFWYATDYGMFRFCIANTEEDWRPGTEQYKFIEQCLSSVDRQKQPWLIFLAHRVLGYSSCTYYESEGTFEEPMGREALQELWQKYKVDIAFYGHVHSYERTCPVYQSQCVVDGSDHYSGPFQATTHVVVGGAGASILDSEFTTSKIQWSHFTDFDHGFVKLTALNHSSLLFEYKKSRDGNVYDHFTISRDYRDILACSIDNCPRSTLAS

SEQ ID NO: 167981 - protein, 169 aa, Zea Mays
MEGDATGADGGGGGGSGERSSFVIGLIENRAKEVGVAAFDLRSASLHLSQYIETSCSYHNTNTLLHFYDPMVVIVPPNKTAADGMVGVSELIDKHYPANKKVTMARGCFDDTKGAVIVRSLSARDPSALGLDTYCKQYYLCLAAATATIKWIESEKGVFITNHSLSAKI

SEQ ID NO: 167982 - protein, 629 aa, Zea Mays
MSIDSTSVQTLEIIDPLHTELWGTSNKKKSLFQMLKTTKTTGGSRLLKANLLQPLKDIQTINARLDCLDELMSNEELFFGLTQGLRKFPKESDKVLCHFCFKPKKVTDKVLKPANGRKSQMLISDIIVLKTALDAIPFLSKVLKGAKSFLLHNIYQTVCENPKYANMRKRIGDVIDEDVVHSRAPFVACTQQCFAVKAGIDGLLDVARRSFCDTSEAIHNLAKKYRDDYNMPNLKITYNIRQGFYFIIPQKDITDRLPNKFIQVVRHGKNLHCSSLELASLNVRNKSSAAECFSRTELCLEGLIDKIRGDIAILTLLAEVLCLLDMIVNSFAHTISTKPVDRYTRPEFTDDGPMAINAGRHPILETLHTNFVPNNIFLSEASNMVLVMGPNMSGKSTYLQQICLIVILAQIGCYVPAQFASLRVLDRIFTRIGNGDNVENNSSTFMTEMKETAFIMQNVSSRSLVVVDELGRATSSSDGLAIAWSCCEYLLSVKAYTVFATHMERLSELSTMYPNVKILHFEVDLRNDRLDFKFCLKDGIRRVPHYGLLLARVAGIPTSVIDTSTSITSQITEQEMTRMNANCEEYWSLQMTYQVVQRLICLKYSNHGDDYIREALQNLKESYSAGRLT

SEQ ID NO: 167983 - protein, 544 aa, Zea Mays
MEGDATGADGGGGGGSGERSSFVIGLIENRAKEVGVAAFDLRSASLHLSQYIETSCSYHNTNTLLHFYDPMVVIVPPNKTAADGMVGVSELIDKHYPANKKVTMARGCFDDTKGAVIVRSLSARDPSALGLDTYCKQYYLCLAAATATIKWIESEKGVFITNHSLSVTFNGSFDHMSIDSTSVQTLEIIDPLHTELWGTSNKKKSLFQMLKTTKTTGGSRLLKANLLQPLKDIQTINARLDCLDELMSNEELFFGLTQGLRKFPKESDKVLCHFCFKPKKVTDKVLKPANGRKSQMLISDIIVLKTALDAIPFLSKVLKGAKSFLLHNIYQTVCENPKYANMRKRIGDVIDEDVVHSRAPFVACTQQCFAVKAGIDGLLDVARRSFCDTSEAIHNLAKKYRDDYNMPNLKITYNIRQGFYFIIPQKDITDRLPNKFIQVVRHGKNLHCSSLELASLNVRNKSSAAECFSRTELCLEGLIDKIRGDIAILTLLAEVLCLLDMIVNSFAHTISTKPVDRYTRPEFTGIKRRISTKHPQLNSGQYLK

SEQ ID NO: 167984 - protein, 111 aa, Zea Mays
MVGVSELIDKHYPANKKVTMARGCFDDTKGAVIVRSLSARDPSALGLDTYCKQYYLCLAAATATIKWLGLVSNCSNGYWSIKVIKWVKEESHLWCRAGASGLDSILSAPAH

SEQ ID NO: 167985 - protein, 125 aa, Zea Mays
MVVIVPPNKTAADGMVGVSELIDKHYPANKKVTMARGCFDDTKGAVIVRSLSARDPSALGLDTYCKQYYLCLAAATATIKWLGLVSNCSNGYWSIKVIKWVKEESHLWCRAGASGLDSILSAPAH

SEQ ID NO: 167986 - protein, 248 aa, Zea Mays
MEGDATGADGGGGGGSGERSSFVIGLIENRAKEVGVAAFDLRSASLHLSQYIETSCSYHNTNTLLHFYDPMVVIVPPNKTAADGMVGVSELIDKHYPANKKVTMARGCFDDTKGAVIVRSLSARDPSALGLDTYCKQYYLCLAAATATIKWIESEKGVFITNHSLSVTFNGSFDHMSIDSTSVQTLEIIDPLHTELWGTSNKKKSLFQMLKTTKTTGGSRLLKANLLQPLKDIQTINARLDCLNWRCH

SEQ ID NO: 167987 - protein, 293 aa, Zea Mays
MRKRIGDVIDEDVVHSRAPFVACTQQCFAVKAGIDGLLDVARRSFCDTSEAIHNLAKKYRDDYNMPNLKITYNIRQGFYFIIPQKDITDRLPNKFIQVVRHGKNLHCSSLELASLNVRNKSSAAECFSRTELCLEGLIDKIRGDIAILTLLAEVLCLLDMIVNSFAHTISTKPVDRYTRPEFTDDGPMAINAGRHPILETLHTNFVPNNIFLSEASNMVLVMGPNMSGKSTYLQQICLIVILAQIGCYVPAQFASLRVLDRIFTRIGNGDNVENNSSTDSLDLFYMISRFLGR

SEQ ID NO: 167988 - protein, 226 aa, Zea Mays
MRKRIGDVIDEDVVHSRAPFVACTQQCFAVKAGIDGLLDVARRSFCDTSEAIHNLAKKYRDDYNMPNLKITYNIRQGFYFIIPQKDITDRLPNKFIQVVRHGKNLHCSSLELASLNVRNKSSAAECFSRTELCLEGLIDKIRGDIAILTLLAEVLCLLDMIVNSFAHTISTKPVDRYTRPEFTDDGPMAINAGRHPILETLHTNFVPNNIFLSEASNMVLVMGPNM

SEQ ID NO: 167989 - protein, 622 aa, Zea Mays
MEGDATGADGGGGGGSGERSSFVIGLIENRAKEVGVAAFDLRSASLHLSQYIETSCSYHNTNTLLHFYDPMVVIVPPNKTAADGMVGVSELIDKHYPANKKVTMARGCFDDTKGAVIVRSLSARDPSALGLDTYCKQYYLCLAAATATIKWIESEKGVFITNHSLSVTFNGSFDHMSIDSTSVQTLEIIDPLHTELWGTSNKKKSLFQMLKTTKTTGGSRLLKANLLQPLKDIQTINARLDCLDELMSNEELFFGLTQGLRKFPKESDKVLCHFCFKPKKVTDKVLKPANGRKSQMLISDIIVLKTALDAIPFLSKVLKGAKSFLLHNIYQTVCENPKYANMRKRIGDVIDEDVVHSRAPFVACTQQCFAVKAGIDGLLDVARRSFCDTSEAIHNLAKKYRDDYNMPNLKITYNIRQGFYFIIPQKDITDRLPNKFIQVVRHGKNLHCSSLELASLNVRNKSSAAECFSRTELCLEGLIDKIRGDIAILTLLAEVLCLLDMIVNSFAHTISTKPVDRYTRPEFTDDGPMAINAGRHPILETLHTNFVPNNIFLSEASNMVLVMGPNMSGKSTYLQQICLIVILAQIGCYVPAQFASLRVLDRIFTRIGNGDNVENNSSTVCL

SEQ ID NO: 167990 - protein, 479 aa, Zea Mays
MEGDATGADGGGGGGSGERSSFVIGLIENRAKEVGVAAFDLRSASLHLSQYIETSCSYHNTNTLLHFYDPMVVIVPPNKTAADGMVGVSELIDKHYPANKKVTMARGCFDDTKGAVIVRSLSARDPSALGLDTYCKQYYLCLAAATATIKWIESEKGVFITNHSLSVTFNGSFDHMSIDSTSVQTLEIIDPLHTELWGTSNKKKSLFQMLKTTKTTGGSRLLKANLLQPLKDIQTINARLDCLDELMSNEELFFGLTQGLRKFPKESDKVLCHFCFKPKKVTDKVLKPANGRKSQMLISDIIVLKTALDAIPFLSKVLKGAKSFLLHNIYQTVCENPKYANMRKRIGDVIDEDVVHSRAPFVACTQQCFAVKAGIDGLLDVARRSFCDTSEAIHNLAKKYRDDYNMPNLKITYNIRQGFYFIIPQKDITDRLPNKFIQVVRHGKNLHCSSLELASGLLTKSEETLLSLHCSPKYYVFWT

SEQ ID NO: 167991 - protein, 696 aa, Zea Mays
MEGDATGADGGGGGGSGERSSFVIGLIENRAKEVGVAAFDLRSASLHLSQYIETSCSYHNTNTLLHFYDPMVVIVPPNKTAADGMVGVSELIDKHYPANKKVTMARGCFDDTKGAVIVRSLSARDPSALGLDTYCKQYYLCLAAATATIKWIESEKGVFITNHSLSVTFNGSFDHMSIDSTSVQTLEIIDPLHTELWGTSNKKKSLFQMLKTTKTTGGSRLLKANLLQPLKDIQTINARLDCLDELMSNEELFFGLTQGLRKFPKESDKVLCHFCFKPKKVTDKVLKPANGRKSQMLISDIIVLKTALDAIPFLSKVLKGAKSFLLHNIYQTVCENPKYANMRKRIGDVIDEDVVHSRAPFVACTQQCFAVKAGIDGLLDVARRSFCDTSEAIHNLAKKYRDDYNMPNLKITYNIRQGFYFIIPQKDITDRLPNKFIQVVRHGKNLHCSSLELASLNVRNKSSAAECFSRTELCLEGLIDKIRGDIAILTLLAEVLCLLDMIVNSFAHTISTKPVDRYTRPEFTDDGPMAINAGRHPILETLHTNFVPNNIFLSEASNMVLVMGPNMSGKSTYLQQICLIVILAQIGCYVPAQFASLRVLDRIFTRIGNGDNVENNSSTFMTEMKETAFIMQNVSSRSLVVVDELGRATSSSDGLAIAWSCCEYLLSVKAIHCFCHAHGTLVRTFNNVSKCEDPPF

SEQ ID NO: 167992 - protein, 304 aa, Zea Mays
MIVNSFAHTISTKPVDRYTRPEFTDDGPMAINAGRHPILETLHTNFVPNNIFLSEASNMVLVMGPNMSGKSTYLQQICLIVILAQIGCYVPAQFASLRVLDRIFTRIGNGDNVENNSSTFMTEMKETAFIMQNVSSRSLVVVDELGRATSSSDGLAIAWSCCEYLLSVKAYTVFATHMERLSELSTMYPNVKILHFEVDLRNDRLDFKFCLKDGIRRVPHYGLLLARVAGIPTSVIDTSTSITSQITEQEMTRMNANCEEYWSLQMTYQVVQRLICLKYSNHGDDYIREALQNLKESYSAGRLT

SEQ ID NO: 167993 - protein, 112 aa, Zea Mays
MMVQWQSMLDDTLFLRPCILILFLTIYFSLKHLIWFLSWGQICEWSGKSTYLQQICLIVILAQIGCYVPAQFASLRVLDRIFTRIGNGDNVENNSSTDSLDLFYMISRFLGR

SEQ ID NO: 167994 - protein, 184 aa, Zea Mays
MTEMKETAFIMQNVSSRSLVVVDELGRATSSSDGLAIAWSCCEYLLSVKAYTVFATHMERLSELSTMYPNVKILHFEVDLRNDRLDFKFCLKDGIRRVPHYGLLLARVAGIPTSVIDTSTSITSQITEQEMTRMNANCEEYWSLQMTYQVVQRLICLKYSNHGDDYIREALQNLKESYSAGRLT

SEQ ID NO: 167995 - protein, 200 aa, Zea Mays
MNVYVVGLNKVNKPTLPLAFGEFSMPTAVLLVVAFLVMSISIGIRSKSAPLMCALLVCFLLGSAYSIDVPLLRWKRHAFLAAFCIIFVRAVVVQLAFFAHMQCLMVLFAATCSEEALGTYKVHRLCINILMTAYAAAILVGASSTNLYQKIVIVSGHGLLASTLWQRAQQFDIENKDCITQFYMFIWKLFYAEYFLIPFV

SEQ ID NO: 167996 - protein, 156 aa, Zea Mays
MPTTTTRRDYRLQPRCFSSPRSRPMAKRLAGADKEVLVEVVRFTHKSGLRGCDGGWKDFLAQNDRKFGASVSDPRKRSRDVLFAFLQTFPKDFQKKHLMPLVRREPPEDNAGDWHTNRKDAACLLSVLPTTHNIWNHNRHYFGVYPASERAWTILR

SEQ ID NO: 167997 - protein, 206 aa, Zea Mays
MYERLCSRAEQDNLLKVNKPTLPLAFGEFSMPTAVLLVVAFLVMSISIGIRSKSAPLMCALLVCFLLGSAYSIDVPLLRWKRHAFLAAFCIIFVRAVVVQLAFFAHMQCLMVLFAATCSEEALGTYKVHRLCINILMTAYAAAILVGASSTNLYQKIVIVSGHGLLASTLWQRAQQFDIENKDCITQFYMFIWKLFYAEYFLIPFV

SEQ ID NO: 167998 - protein, 387 aa, Zea Mays
MPTTTTRRDYRLQPRCFSSPRSRPMAKRLAGADKEVLVEVVRFTHKSGLRGCDGGWKDFLAQNDRKFGASVSDPRKRSRDVLFAFLQTFPKDFQKVGHSFASSDFSSACPVSLPAIVVETLDATSPTRATGRQRRHSSVPKVSCWAAAHHQHNSNPQQFQAIGIRIAKTLHAFYQFCRPHTIFGTIIGITSVSILPVKEPGRFYVDSYMGISRGFGRRIMYERLCSRAEQVSDNLLKVNKPTLPLAFGEFSMPTAVLLVVAFLVMSISIGIRSKSAPLMCALLVCFLLGSAYSIDVPLLRWKRHAFLAAFCIIFVRAVVVQLAFFAHMQQHVLKRPLAPTRSVVFATCFMCCFAAVIALFKDIPDVDGDRDFGIQSMTVRLGPTESA

SEQ ID NO: 167999 - protein, 118 aa, Zea Mays
MPTTTTRRDYRLQPRCFSSPRSRPMAKRLAGADKEVLVEVVRFTHKSGLRGCDGGWKDFLAQNDRKFGASVSDPRKRSRDVLFAFLQTFPKDFQKKHLMPLVRREPPEDNAGIPQSPK

SEQ ID NO: 168000 - protein, 219 aa, Zea Mays
MGISRGFGRRIMYERLCSRAEQVSDNLLKVNKPTLPLAFGEFSMPTAVLLVVAFLVMSISIGIRSKSAPLMCALLVCFLLGSAYSIDVPLLRWKRHAFLAAFCIIFVRAVVVQLAFFAHMQCLMVLFAATCSEEALGTYKVHRLCINILMTAYAAAILVGASSTNLYQKIVIVSGHGLLASTLWQRAQQFDIENKDCITQFYMFIWKLFYAEYFLIPFV

SEQ ID NO: 168001 - protein, 158 aa, Zea Mays
MGISRGFGRRIMYERLCSRAEQVSDNLLKVNKPTLPLAFGEFSMPTAVLLVVAFLVMSISIGIRSKSAPLMCALLVCFLLGSAYSIDVPLLRWKRHAFLAAFCIIFVRAVVVQLAFFAHMQQHVLKRPLAPTRSVVFATCFMCCFAAVIALFKTLGYS

SEQ ID NO: 168002 - protein, 161 aa, Zea Mays
MPLAEPPQWRRKATDFFSTSSVKLKQAGQSAGDNIADVAGKVGSAVKSRWVVFQEARQQQQQQRPPHETVQERIITAAATTGLLFRKGISETKEKVAVGKVKVEEAAKKTADKSKSILNNIERWQKVCDLEFCYLVTQFDLFFVYNADSHFCLFVPGSRKH

SEQ ID NO: 168003 - protein, 711 aa, Zea Mays
MPSSRRTTGRGGAGAGAGGAGAGDAGGGDGDRVPRFMGNNRDHNPRELRSWARRTGFHPSAFFSGESNSSFASSAAPQPPPPPPPASSRRPPRPPPERDPDPDAEDDLDPAPGRGRGRRPRRRIDLRGELQIPPGFGREEAVPGSAEPDARRGGARGDATRRNGGVERGQAPANAGRNGNGALADADARKKAEDAEAKRKAEEAEARRKKEDEERDAELAAYYQEQWANEDEGAAGAAAAAAETAPLYEASGLRCGVTENPGWAPLIFYGIQHYLSIAGSLVFVPLILVPTMGGSDEDTATVISTMLLISGLTTILHTFLGSRLPLIQGSSFVYLAPALVIANSEEFRNLSDNYLRKISLFGNHIFLVYAVPLSVAIVWAYSFFLTAGGAYNFKGCSSNIPSSNILLDSCRRHLETMRRCRTDVSSAWRTAAWVRIPYPFQWGPPTFHSKTGIIMIIVSLVASVDSLSSYHAASLLVNLSPPTRGVVSRAIGLEGISSFIAGVWGTGTGSITLTENIHTLETTKMASRRALQLGAAVLVVCSFFGKIGALLASIPLALAASVLCFTWALIVALGLSTLRYTQAASSRNLIIVGFTLFISLSIPAYFQQYEPSSNLILPSYLLPYAAASSGPVRTASSGLNYAVNALLSINVVVALLVALILDNTVPGSRQERGVYVWTDPKSLEVDPATLEPYRLPEKISCWFRWAKCVGM

SEQ ID NO: 168004 - protein, 530 aa, Zea Mays
MAVAPLIFYGIQHYLSIAGSLVFVPLILVPTMGGSDEDTATVISTMLLISGLTTILHTFLGSRLPLIQGSSFVYLAPALVIANSEEFRNLSDNKFKHIMRELQGAILVGSVFQIILGYTGLMSLFLRLINPVVVAPTIAAVGLAFFSYGFPQAGSCVEISMPLILLVLLCTLYLRKISLFGNHIFLVYAVPLSVAIVWAYSFFLTAGGAYNFKGCSSNIPSSNILLDSCRRHLETMRRCRTDVSSAWRTAAWVRIPYPFQWGPPTFHSKTGIIMIIVSLVASVDSLSSYHAASLLVNLSPPTRGVVSRAIGLEGISSFIAGVWGTGTGSITLTENIHTLETTKMASRRALQLGAAVLVVCSFFGKIGALLASIPLALAASVLCFTWALIVALGLSTLRYTQAASSRNLIIVGFTLFISLSIPAYFQQYEPSSNLILPSYLLPYAAASSGPVRTASSGLNYAVNALLSINVVVALLVALILDNTVPGSRQERGVYVWTDPKSLEVDPATLEPYRLPEKISCWFRWAKCVGM

SEQ ID NO: 168005 - protein, 529 aa, Zea Mays
MAVAPLIFYGIQHYLSIAGSLVFVPLILVPTMGGSDDTATVISTMLLISGLTTILHTFLGSRLPLIQGSSFVYLAPALVIANSEEFRNLSDNKFKHIMRELQGAILVGSVFQIILGYTGLMSLFLRLINPVVVAPTIAAVGLAFFSYGFPQAGSCVEISMPLILLVLLCTLYLRKISLFGNHIFLVYAVPLSVAIVWAYSFFLTAGGAYNFKGCSSNIPSSNILLDSCRRHLETMRRCRTDVSSAWRTAAWVRIPYPFQWGPPTFHSKTGIIMIIVSLVASVDSLSSYHAASLLVNLSPPTRGVVSRAIGLEGISSFIAGVWGTGTGSITLTENIHTLETTKMASRRALQLGAAVLVVCSFFGKIGALLASIPLALAASVLCFTWALIVALGLSTLRYTQAASSRNLIIVGFTLFISLSIPAYFQQYEPSSNLILPSYLLPYAAASSGPVRTASSGLNYAVNALLSINVVVALLVALILDNTVPGSRQERGVYVWTDPKSLEVDPATLEPYRLPEKISCWFRWAKCVGM

SEQ ID NO: 168006 - protein, 185 aa, Zea Mays
MEKSPRSIPIGSGPARADTRKDVAEAAEGSRRTGIVDTSNIDYGTSRLRPRHRLCRTHGPAQRYNRVWDGLLDAIRHMQLSADELRKLSRHNHVPEYLDMLHKNCLVNAMSDVTEIAKGLDIMSRDLEEVLIGPQPLLEDYEALGMYDDFKTNVHCDCTEQCGSDEDNSSFDSDEIPDRRMKGSV

SEQ ID NO: 168007 - protein, 1242 aa, Zea Mays
MKERSSLCESAADGNWGLKYKRKRSKLTVSPSNENEATSPTSDSPMSHGSTKKKLKHDTNISPSAKKIRGHDGYFFECVECDLGGNLLCCDSCPRVYHLECLNPPLKRLPPGKWQCPRCRPKKGSLKMLGNAEVGTSKHEKSTRTYAGTTSGSPPSHTKVSFKTRNSTQDKTGSKEQGKQSSGGTMMGGDPNNEVEKKNTLILHLKKHSMKELSENAKPLKSKFVGEPSEEKIVKHGSVLKLKKHSDRMDLSPNKSKSRGQNSQRESKRPGTKKLKYSMSDDDSVSSSEPSTSLDNNEPPPKRKPSDGKAPSSSTKKGKKKVKFIEKRHSEEQCVVGDKTTTSQEDQQVDRILGCRLQTNKINPLSHASFKQFESANLQVEDMALPLASAGIPNKSHDGTESSRNGTVEDICADESANHSGHSLEMQKDRNSKSHENESCKREQGNNILSICFVDETSIMKDDQVGRENVAASKKGEDATYDLPAEKDDTKLPVTRADAMTRTNQEHTDESKQHGKIKQITDKDYNDAGYEFLIKWVGKSNIHNTWVSESEVKILAKRKLENYKTKYGTSLINICKEQWCQPQRVIALRASVDEVEEALIKWCGLSYDECTWERLDEPTLMKYSHLVTQFKNFECQALDKDVVKDYANTRNRHELNVLADQPKELKGGMLFPHQLEALNWLRKCWHKSKNVILADEMGLGKTVSACAFLSSLCCEFKINLPCLVLVPLSTMPNWMAEFASWAPHLNVVEYHGSARSRSIIRQYEWHAGDSSQIGKTKRSYKLNVLLTTYEMVLVDAAYLRSVSWEVLVVDEGHRLKNSSSKLFSLLNSLSFQHRVLLTGTPLQNNIGEMYNLLNFLQPTSFPSLSSFEEKFNDLTTAEKVEELKKLVAPHMLRRLKKDAMQNIPPKTERMVPVELTSIQAEYYRAMLTKNYQVLRNIGKGGAHQSLLNIVMQLRKVCNHPYLIHGTEPESGSPEFLHEMRIKASAKLTLLHSMLKILHKEGHRVLIFSQMTKLLDILEDYLTLEFGPKTFERVDGSVSVAERQAAIARFNQDKTRFVFLLSTRSCGLGINLATADTVIIYDSDFNPHADIQAMNRAHRIGQSNRLLVYRLVVRASVEERILQLAKKKLMLDQLFVNKSESQKEVEDIIRWGTEELFGSSDSVDGKDSNEASGSVADVEFKHRRKTGGLGDVYEDKCIGGSTKLVWDENAILKLLDRSNLPSSVAESTDGDLDNDMLGTVKSQ

SEQ ID NO: 168008 - protein, 966 aa, Zea Mays
MALPLASAGIPNKSHDGTESSRNGTVEDICADESANHSGHSLEMQKDRNSKSHENESCKREQGNNILSICFVDETSIMKDDQVGRENVAASKKGEDATYDLPAEKDDTKLPVTRADAMTRTNQEHTDESKQHGKIKQITDKDYNDAGYEFLIKWVGKSNIHNTWVSESEVKILAKRKLENYKTKYGTSLINICKEQWCQPQRVIALRASVDEVEEALIKWCGLSYDECTWERLDEPTLMKYSHLVTQFKNFECQALDKDVVKDYANTRNRHELNVLADQPKELKGGMLFPHQLEALNWLRKCWHKSKNVILADEMGLGKTVSACAFLSSLCCEFKINLPCLVLVPLSTMPNWMAEFASWAPHLNVVEYHGSARSRSIIRQYEWHAGDSSQIGKTKRSYKLNVLLTTYEMVLVDAAYLRSVSWEVLVVDEGHRLKNSSSKLFSLLNSLSFQHRVLLTGTPLQNNIGEMYNLLNFLQPTSFPSLSSFEEKFNDLTTAEKVEELKKLVAPHMLRRLKKDAMQNIPPKTERMVPVELTSIQAEYYRAMLTKNYQVLRNIGKGGAHQSLLNIVMQLRKVCNHPYLIHGTEPESGSPEFLHEMRIKASAKLTLLHSMLKILHKEGHRVLIFSQMTKLLDILEDYLTLEFGPKTFERVDGSVSVAERQAAIARFNQDKTRFVFLLSTRSCGLGINLATADTVIIYDSDFNPHADIQAMNRAHRIGQSNRLLVYRLVVRASVEERILQLAKKKLMLDQLFVNKSESQKEVEDIIRWGTEELFGSSDSVDGKDSNEASGSVADVEFKHRRKTGGLGDVYEDKCIGGSTKLVWDENAILKLLDRSNLPSSVAESTDGDLDNDMLGTVKSIDWNDELNDHPGTNEDIAPIDNDGSELASESKQGATNRLEENEWDKLLRVRWEQYQIEEEASLGRGKRLRKAVSYRETFATLPNEALSEGSDEGDEPKREYTAAGLV

SEQ ID NO: 168009 - protein, 2212 aa, Zea Mays
MSFWGPARYGKFLYVSGASVLKMKERSSLCESAADGNWGLKYKRKRSKLTVSPSNENEATSPTSDSPMSHGSTKKKLKHDTNISPSAKKIRGHDGYFFECVECDLGGNLLCCDSCPRVYHLECLNPPLKRLPPGKWQCPRCRPKKGSLKMLGNAEVGTSKHEKSTRTYAGTTSGSPPSHTKVSFKTRNSTQDKTGSKEQGKQSSGGTMMGGDPNNEVEKKNTLILHLKKHSMKELSENAKPLKSKFVGEPSEEKIVKHGSVLKLKKHSDRMDLSPNKSKSRGQNSQRESKRPGTKKLKYSMSDDDSVSSSEPSTSLDNNEPPPKRKPSDGKAPSSSTKKGKKKVKFIEKRHSEEQCVVGDKTTTSQEDQQVDRILGCRLQTNKINPLSHASFKQFESANLQVEDMALPLASAGIPNKSHDGTESSRNGTVEDICADESANHSGHSLEMQKDRNSKSHENESCKREQGNNILSICFVDETSIMKDDQVGRENVAASKKGEDATYDLPAEKDDTKLPVTRADAMTRTNQEHTDESKQHGKIKQITDKDYNDAGYEFLIKWVGKSNIHNTWVSESEVKILAKRKLENYKTKYGTSLINICKEQWCQPQRVIALRASVDEVEEALIKWCGLSYDECTWERLDEPTLMKYSHLVTQFKNFECQALDKDVVKDYANTRNRHELNVLADQPKELKGGMLFPHQLEALNWLRKCWHKSKNVILADEMGLGKTVSACAFLSSLCCEFKINLPCLVLVPLSTMPNWMAEFASWAPHLNVVEYHGSARSRSIIRQYEWHAGDSSQIGKTKRSYKLNVLLTTYEMVLVDAAYLRSVSWEVLVVDEGHRLKNSSSKLFSLLNSLSFQHRVLLTGTPLQNNIGEMYNLLNFLQPTSFPSLSSFEEKFNDLTTAEKVEELKKLVAPHMLRRLKKDAMQNIPPKTERMVPVELTSIQAEYYRAMLTKNYQVLRNIGKGGAHQSLLNIVMQLRKVCNHPYLIHGTEPESGSPEFLHEMRIKASAKLTLLHSMLKILHKEGHRVLIFSQMTKLLDILEDYLTLEFGPKTFERVDGSVSVAERQAAIARFNQDKTRFVFLLSTRSCGLGINLATADTVIIYDSDFNPHADIQAMNRAHRIGQSNRLLVYRLVVRASVEERILQLAKKKLMLDQLFVNKSESQKEVEDIIRWGTEELFGSSDSVDGKDSNEASGSVADVEFKHRRKTGGLGDVYEDKCIGGSTKLVWDENAILKLLDRSNLPSSVAESTDGDLDNDMLGTVKSIDWNDELNDHPGTNEDIAPIDNDGSELASESKQGATNRLEENEWDKLLRVRWEQYQIEEEASLGRGKRLRKAVSYRETFATLPNEALSEGSDEGDEPKREYTAAGLVLKEKYGKLRARQKERIAQRHIIKNYAVDNLEEFMTPYISIANEPAENPLIIVEDPSSSQLCGAKCFSESTGEMRQSSKKSRRYSEIPQDLYARIPDNAASSKDNSKATDVFNPGTPNHLLPVLGLCAPNADQVNSYKNSICAPSIKEHKRASGDVVNKQLSTPADHSNELRNEVQSASDKVIFPGASEEALRRISNMIPDNYFPFSHIPPISGKAVDPVEYIGASNASFQGKLGLPNFSLEDNTPLKHIKPIPDIFPYLSLGAHKDYIRSSVPELPDSSLLPNFMADIAGTSKQKSFMSGPLPGLGLSPGQPIHLTMPDNHKKVLDNIMMRAQYASNKFLKKRSKLDYWSEDELDALWIGVRRHGRGNWDAMLRDPKLKFLNNRTSEELASRWILEEQKIIDEPMSAATRRSNSTAFPGISDAMMSRALNESNLSKMRMEQPKLQSHVTDIQLGSSDILSRFPHVEAPNYINSGEGGPPQIPWQDFKHRSSYGGDFPGGAFDKLEKPDVGLIPPFMPNPFMTDSIDSLPINRKNNSSIPRSEIRSSSRENILFSGVSDGQINLLHEMQRHVRSGKQPIEIKLNHIDHSNPQLGNASDLGGLKSNKLPHWLQEAVRAPASSKPPERGLPATVSAIAQSMCLLLGEQEPSIPPFLILGTPLSPPKDPRINSKKRKLRKAHQSTSHVGDCIATQAPPSVKASAAPLAVDCNDGAPSLNLNSALLSSSAVSKKLDELPPTFKESNQTMDGSEAVAGKLEAPEIGCQVTGSSPVDDKARESSGSPVKDTPDAGVRLQGSDNSAMAFSALPLEAPVTSSRAEPVACDGSDMKEDIPLDAESNGNLEER

SEQ ID NO: 168010 - protein, 1277 aa, Zea Mays
MSFWGPARYGKFLYVSGASVLKMKERSSLCESAADGNWGLKYKRKRSKLTVSPSNENEATSPTSDSPMSHGSTKKKLKHDTNISPSAKKIRGHDGYFFECVECDLGGNLLCCDSCPRVYHLECLNPPLKRLPPGKWQCPRCRPKKGSLKMLGNAEVGTSKHEKSTRTYAGTTSGSPPSHTKVSFKTRNSTQDKTGSKEQGKQSSGGTMMGGDPNNEVEKKNTLILHLKKHSMKELSENAKPLKSKFVGEPSEEKIVKHGSVLKLKKHSDRMDLSPNKSKSRGQNSQRESKRPGTKKLKYSMSDDDSVSSSEPSTSLDNNEPPPKRKPSDGKAPSSSTKKGKKKVKFIEKRHSEEQCVVGDKTTTSQEDQQVDRILGCRLQTNKINPLSHASFKQFESANLQVEDMALPLASAGIPNKSHDGTESSRNGTVEDICADESANHSGHSLEMQKDRNSKSHENESCKREQGNNILSICFVDETSIMKDDQVGRENVAASKKGEDATYDLPAEKDDTKLPVTRADAMTRTNQEHTDESKQHGKIKQITDKDYNDAGYEFLIKWVGKSNIHNTWVSESEVKILAKRKLENYKTKYGTSLINICKEQWCQPQRVIALRASVDEVEEALIKWCGLSYDECTWERLDEPTLMKYSHLVTQFKNFECQALDKDVVKDYANTRNRHELNVLADQPKELKGGMLFPHQLEALNWLRKCWHKSKNVILADEMGLGKTVSACAFLSSLCCEFKINLPCLVLVPLSTMPNWMAEFASWAPHLNVVEYHGSARSRSIIRQYEWHAGDSSQIGKTKRSYKLNVLLTTYEMVLVDAAYLRSVSWEVLVVDEGHRLKNSSSKLFSLLNSLSFQHRVLLTGTPLQNNIGEMYNLLNFLQPTSFPSLSSFEEKFNDLTTAEKVEELKKLVAPHMLRRLKKDAMQNIPPKTERMVPVELTSIQAEYYRAMLTKNYQVLRNIGKGGAHQSLLNIVMQLRKVCNHPYLIHGTEPESGSPEFLHEMRIKASAKLTLLHSMLKILHKEGHRVLIFSQMTKLLDILEDYLTLEFGPKTFERVDGSVSVAERQAAIARFNQDKTRFVFLLSTRSCGLGINLATADTVIIYDSDFNPHADIQAMNRAHRIGQSNRLLVYRLVVRASVEERILQLAKKKLMLDQLFVNKSESQKEVEDIIRWGTEELFGSSDSVDGKDSNEASGSVADVEFKHRRKTGGLGDVYEDKCIGGSTKLVWDENAILKLLDRSNLPSSVAESTDGDLDNDMLGTVKMGAISNRGGGISWSR

SEQ ID NO: 168011 - protein, 975 aa, Zea Mays
MMGGDPNNEVEKKNTLILHLKKHSMKELSENAKPLKSKFVGEPSEEKIVKHGSVLKLKKHSDRMDLSPNKSKSRGQNSQRESKRPGTKKLKYSMSDDDSVSSSEPSTSLDNNEPPPKRKPSDGKAPSSSTKKGKKKVKFIEKRHSEEQCVVGDKTTTSQEDQQVDRILGCRLQTNKINPLSHASFKQFESANLQVEDMALPLASAGIPNKSHDGTESSRNGTVEDICADESANHSGHSLEMQKDRNSKSHENESCKREQGNNILSICFVDETSIMKDDQVGRENVAASKKGEDATYDLPAEKDDTKLPVTRADAMTRTNQEHTDESKQHGKIKQITDKDYNDAGYEFLIKWVGKSNIHNTWVSESEVKILAKRKLENYKTKYGTSLINICKEQWCQPQRVIALRASVDEVEEALIKWCGLSYDECTWERLDEPTLMKYSHLVTQFKNFECQALDKDVVKDYANTRNRHELNVLADQPKELKGGMLFPHQLEALNWLRKCWHKSKNVILADEMGLGKTVSACAFLSSLCCEFKINLPCLVLVPLSTMPNWMAEFASWAPHLNVVEYHGSARSRSIIRQYEWHAGDSSQIGKTKRSYKLNVLLTTYEMVLVDAAYLRSVSWEVLVVDEGHRLKNSSSKLFSLLNSLSFQHRVLLTGTPLQNNIGEMYNLLNFLQPTSFPSLSSFEEKFNDLTTAEKVEELKKLVAPHMLRRLKKDAMQNIPPKTERMVPVELTSIQAEYYRAMLTKNYQVLRNIGKGGAHQSLLNIVMQLRKVCNHPYLIHGTEPESGSPEFLHEMRIKASAKLTLLHSMLKILHKEGHRVLIFSQMTKLLDILEDYLTLEFGPKTFERVDGSVSVAERQAAIARFNQDKTRFVFLLSTRSCGLGINLATADTVIIYDSDFNPHADIQAMNRAHRIGQSNRLLVYRLVNHRKKWKISFAGVQKNSLGVVTVWMVKIAMKPQVLLLMLNLSIEEKPVA

SEQ ID NO: 168012 - protein, 329 aa, Zea Mays
MLGNAEVGTSKHEKSTRTYAGTTSGSPPSHTKVSFKTRNSTQDKTGSKEQGKQSSGGTMMGGDPNNEVEKKNTLILHLKKHSMKELSENAKPLKSKFVGEPSEEKIVKHGSVLKLKKHSDRMDLSPNKSKSRGQNSQRESKRPGTKKLKYSMSDDDSVSSSEPSTSLDNNEPPPKRKPSDGKAPSSSTKKGKKKVKFIEKRHSEEQCVVGDKTTTSQEDQQSIDWNDELNDHPGTNEDIAPIDNDGSELASESKQGATNRLEENEWDKLLRVRWEQYQIEEEASLGRGKRLRKAVSYRETFATLPNEALSEGSDEGDEPKREYTAAGLV

SEQ ID NO: 168013 - protein, 185 aa, Zea Mays
MYATNIHLCHLKCRFEATIGIDFLSKTMYLEDRTVRLQLWDTAGQERFRSLIPSYIRDSSVAVIVFDVASRQSFLNTSKWIEEVRTERGSDVIIVLVGNKTDLVDKRQVSIEEGEGKAKDLGVMFIETSAKAGFNIKALFRKIAAALPGMETLSSAKQEDMVDVNLRSGNANSSQSQAQAGGCSC

SEQ ID NO: 168014 - protein, 1220 aa, Zea Mays
MATQPPSTATAAVDLYETASQPDAPAAGDAYTFLEFNTQGDDFDYPDFPELSQPPPRSTPLTSSIPGAGTSSSSWPAPPPPPSDAASPEPDLTSQDVHTPPASSSSPSPRSASKARPSAAADGLASGVVALNFEDPVGTGAVEDGYDYSKGDFVEHACRYCGIHNPACVARCNVPSCRKWFCNSRGNTSGSHIVNHLVRAKHKEVCLHKDSPLGETILECYNCGCRNVPSEQEQLRARQISAQQINKVEELWKTNPDASLEDLEKPGVDDEPQPVVLKYEDAYQYQNVFAPLIKLEADYDKMMKESQSKDNVTVRWDIGLNKKRVAYFVFPKEDNELRLVPGDELRLRYPGDSSHPTWQSVGHVIKLTAQEEVALELRASQGVPTELNVGFSVDFVWKSTSFDRMQGAMKTFAVDETSVSGYIYHHLLGHEVEHQIIRNTLPRRFGAPGLPELNASQVLAVKSVLQKPVSLIQGPPGTGKTVTSAAIVYHMAKQGQGQVLVCAPSNVAVDQLAEKISSTGLKVVRLCAKSREAVSSPVEHLTLHYQVRHLDTSEKSELHKLQQLKDEQGELSSSDEKKYKALKRATEREILQSADVICCTCVGAGDPRLSNFRFRQVLIDESTQATEPECLIPLVLGVKQVVLVGDHCQLGPVIMCKKAARAGLAQSLFERLVILGVKPFRLQVQYRMHPCLSEFPSNCFYEGTLQNGVTVNERQSSGIDFPWPVPNRPMFFYVQMGQEEISASGTSYLNRTEAANVEKIVTTFLRSGVVPSQIGVITPYEGQRAYIVNYMARNGSLRQQLYKEIEVASVDSFQGREKDYIILSCVRSNEHQGIGFLNDPRRLNVALTRARYGIVILGNPKVLSKQPLWNSLLTHYKEHECLVEGPLNNLKQSMVQFQKPKKIYNDRRLFLGGGQGVMHGTNFGAGASSQAADKRSGRGKEGQSFAPYGPPNGVHKPGVHPVGYAVPRMPFPPFPGAPHSQPYAIPTRGLHGPLGAVPPVHQPGSRNFGSARSNTGGPIGGHLAHQQNSQQAMGSIGSNFNYTGMENPSSQPSGGAQMSQTGLMTQVPVQGLSQTFRDGFSIGGMSQDFFVDDFKSQGSHVPYNIAEFSTQASQGGYGVEFTQAPQSGYSGNYMNQNSHPGYSHIGTTNDIVSQDHMAHGSHGMFTQAGYNDPSQDESSQIHYGMAAAGPLQSQGMMNPLYSQSYAHYNTQPQSLQPPPQ

SEQ ID NO: 168015 - protein, 1043 aa, Zea Mays
MATQPPSTATAAVDLYETASQPDAPAAGDAYTFLEFNTQGDDFDYPDFPELSQPPPRSTPLTSSIPGAGTSSSSWPAPPPPPSDAASPEPDLTSQDVHTPPASSSSPSPRSASKARPSAAADGLASGVVALNFEDPVGTGAVEDGYDYSKGDFVEHACRYCGIHNPACVARCNVPSCRKWFCNSRGNTSGSHIVNHLVRAKHKEVCLHKDSPLGETILECYNCGCRNVFLLGFISAKAENVVVLLCREPCLSVNALKDMNWDLSQWCPLIDDRCFLSWLVKVPSEQEQLRARQISAQQINKVEELWKTNPDASLEDLEKPGVDDEPQPVVLKYEDAYQYQNVFAPLIKLEADYDKMMKESQSKDNVTVRWDIGLNKKRVAYFVFPKEDNELRLVPGDELRLRYPGDSSHPTWQSVGHVIKLTAQEEVALELRASQGVPTELNVGFSVDFVWKSTSFDRMQGAMKTFAVDETSVSGYIYHHLLGHEVEHQIIRNTLPRRFGAPGLPELNASQVLAVKSVLQKPVSLIQGPPGTGKTVTSAAIVYHMAKQGQGQVLVCAPSNVAVDQLAEKISSTGLKVVRLCAKSREAVSSPVEHLTLHYQVRHLDTSEKSELHKLQQLKDEQGELSSSDEKKYKALKRATEREILQSADVICCTCVGAGDPRLSNFRFRQVLIDESTQATEPECLIPLVLGVKQVVLVGDHCQLGPVIMCKKAARAGLAQSLFERLVILGVKPFRLQVQYRMHPCLSEFPSNCFYEGTLQNGVTVNERQSSGIDFPWPVPNRPMFFYVQMGQEEISASGTSYLNRTEAANVEKIVTTFLRSGVVPSQIGVITPYEGQRAYIVNYMARNGSLRQQLYKEIEVASVDSFQGREKDYIILSCVRSNEHQGIGFLNDPRRLNVALTRARYGIVILGNPKVLSKQPLWNSLLTHYKEHECLVEGPLNNLKQSMVQFQKPKKIYNDRRLFLGGGQGVMHGTNFGAGASSQAADKRSGRGKAWCAPGWLCCTTYAFSSISWGSTFSTIRNSNPGFAWAPWSCSTGASTWK

SEQ ID NO: 168016 - protein, 816 aa, Zea Mays
MQGAMKTFAVDETSVSGYIYHHLLGHEVEHQIIRNTLPRRFGAPGLPELNASQVLAVKSVLQKPVSLIQGPPGTGKTVTSAAIVYHMAKQGQGQVLVCAPSNVAVDQLAEKISSTGLKVVRLCAKSREAVSSPVEHLTLHYQVRHLDTSEKSELHKLQQLKDEQGELSSSDEKKYKALKRATEREILQSADVICCTCVGAGDPRLSNFRFRQVLIDESTQATEPECLIPLVLGVKQVVLVGDHCQLGPVIMCKKAARAGLAQSLFERLVILGVKPFRLQVQYRMHPCLSEFPSNCFYEGTLQNGVTVNERQSSGIDFPWPVPNRPMFFYVQMGQEEISASGTSYLNRTEAANVEKIVTTFLRSGVVPSQIGVITPYEGQRAYIVNYMARNGSLRQQLYKEIEVASVDSFQGREKDYIILSCVRSNEHQGIGFLNDPRRLNVALTRARYGIVILGNPKVLSKQPLWNSLLTHYKEHECLVEGPLNNLKQSMVQFQKPKKIYNDRRLFLGGGQGVMHGTNFGAGASSQAADKRSGRGKEGQSFAPYGPPNGVHKPGVHPVGYAVPRMPFPPFPGAPHSQPYAIPTRGLHGPLGAVPPVHQPGSRNFGSARSNTGGPIGGHLAHQQNSQQAMGSIGSNFNYTGMENPSSQPSGGAQMSQTGLMTQVPVQGLSQTFRDGFSIGGMSQDFFVDDFKSQGSHVPYNIAEFSTQASQGGYGVEFTQAPQSGYSGNYMNQNSHPGYSHIGTTNDIVSQDHMAHGSHGMFTQAGYNDPSQDESSQIHYGMAAAGPLQSQGMMNPLYSQSYAHYNTQPQSLQPPPQ

SEQ ID NO: 168017 - protein, 503 aa, Zea Mays
MSHWKEKENAPPLPLYPSGASNPSHLLPCKRPLQSPSPCPPLRRPLVDITGNALEQRGGYGYTTPLPNASRPCGFLLHDDEDDMNEAFLREVDAICEERARSTARKEEKEKEKEKEKKPAEEHKGTGGVALMAAAGTIDAAGTETATLDDAFWEEVSAICEECDAQSAAKSQERTKEEGSLVLSCDDASLPPAISITAEGGEFEDAFWEINAVMEEHNAKAHAKYQEGLKGMEEKDGLLALCGDHDPSVSPVISVAMGGGALVDALLGEVDAAVHDGHADMSAAKGQVEQQDMELEKEEDEACAPKKYNEYLHSLNDRQKEAACNDVAVPLMIVAGPGSGKTSTMVGRVLTLLKEGIPPPNILAMTFTTAAASEMRERIGTVVGKAVAKDIAISTFHSFCLQLCRTHAEKLGRTSEFIIYGHGQQRRALIETERLLENDKNNGVGDTTKQYDGDIKNSFKDKAKKWQKFITQAKASGRTPEDYEKKGDLTGCTKSVRICGGQL

SEQ ID NO: 168018 - protein, 1180 aa, Zea Mays
MSHWKEKENAPPLPLYPSGASNPSHLLPCKRPLQSPSPCPPLRRPLVDITGNALEQRGGYGYTTPLPNASRPCGFLLHDDEDDMNEAFLREVDAICEERARSTARKEEKEKEKEKEKKPAEEHKGTGGVALMAAAGTIDAAGTETATLDDAFWEEVSAICEECDAQSAAKSQERTKEEGSLVLSCDDASLPPAISITAEGGEFEDAFWEINAVMEEHNAKAHAKYQEGLKGMEEKDGLLALCGDHDPSVSPVISVAMGGGALVDALLGEVDAAVHDGHADMSAAKGQVEQQDMELEKEEDEACAPKKYNEYLHSLNDRQKEAACNDVAVPLMIVAGPGSGKTSTMVGRVLTLLKEGIPPPNILAMTFTTAAASEMRERIGTVVGKAVAKDIAISTFHSFCLQLCRTHAEKLGRTSEFIIYGHGQQRRALIETERLLENDKNNGVGDTTKQYDGDIKNSFKDKAKKWQKFITQAKASGRTPEDYEKKGDLTGASVLRHYNEILRSCNALDYHDFINSSITLLTNFPEVYKECQDMWRAIVVDEFQDTSAMQYCLLKILASHNHITIVGDEDQSIFSFNGADVSGFDSFRKDFPDHKEIRLSKNYRSTRAIVEAATALIQNNTKRHHPRLVETDNPSGCKITVKECHSEDSQCAFVIDKIIEITSGTAEGCNFGNIAVLYRRQITGKAFQVSFRNRKIPFNIHGVAFYRKKVIKAIMAILRTTLPGCDDGPWRQAFKALLPGDKEEKKKIIYHVQKISLARTCSFLTAASDIFSAKVSGTFKRAQITQGRKVLSTLDSLSKLVEKEQSVSVIISSAGDMLPQKYLLEKRAVVDVDNGKLLNEDSDIRSVLQFLMDDVSDFLSTHFSSSMERSKTDEKGCASTLKAFIDYISLRETENFRSRKEENKNSITLTTIHQSKGLEWDVVFIVQANDSEIPLLHEYNGSVKEAGSTLEEERRLLYVAMTRARKKLYILHVTIDSNRQLLQPSRFLREIPDHLLEVQGEEPLRKMPERPSGDVPFDDSEVDTSIGKPIMGPNEASSYPEQAQACLANDFLRRFDIDDRSVVSHIFHHWGKKQAFQNPKRLLEKISFVIDERLRGKGYKRKDVLRKLKSFLSGDEALGYAQYVIKWEQIPIEKRNHLIRERQEHFQKQRIENSMGSSEPTAKQPMLLSIRKLNRIRPCL

SEQ ID NO: 168019 - protein, 434 aa, Zea Mays
MMVLGVKPSRPFYPVTKKKRRRAQITQGRKVLSTLDSLSKLVEKEQSVSVIISSAGDMLPQKYLLEKRAVVDVDNGKLLNEDSDIRSVLQFLMDDVSDFLSTHFSSSMERSKTDEKGCASTLKAFIDYISLRETENFRSRKEENKNSITLTTIHQSKGLEWDVVFIVQANDSEIPLLHEYNGSVKEAGSTLEEERRLLYVAMTRARKKLYILHVTIDSNRQLLQPSRFLREIPDHLLEVQGEEPLRKMPERPSGDVPFDDSEVDTSIGKPIMGPNEASSYPEQAQACLANDFLRRFDIDDRSVVSHIFHHWGKKQAFQNPKRLLEKISFVIDERLRGKGYKRKDVLRKLKSFLSGDEALGYAQYVIKWEQIPIEKRNHLIRERQEHFQKQRIENSMGSSEPTAKQISYLRSLGCTITPTSRLHASHLIEKYKSL

SEQ ID NO: 168020 - protein, 961 aa, Zea Mays
MSHWKEKENAPPLPLYPSGASNPSHLLPCKRPLQSPSPCPPLRRPLVDITGNALEQRGGYGYTTPLPNASRPCGFLLHDDEDDMNEAFLREVDAICEERARSTARKEEKEKEKEKEKKPAEEHKGTGGVALMAAAGTIDAAGTETATLDDAFWEEVSAICEECDAQSAAKSQERTKEEGSLVLSCDDASLPPAISITAEGGEFEDAFWEINAVMEEHNAKAHAKYQEGLKGMEEKDGLLALCGDHDPSVSPVISVAMGGGALVDALLGEVDAAVHDGHADMSAAKGQVEQQDMELEKEEDEACAPKKYNEYLHSLNDRQKEAACNDVAVPLMIVAGPGSGKTSTMVGRVLTLLKEGIPPPNILAMTFTTAAASEMRERIGTVVGKAVAKDIAISTFHSFCLQLCRTHAEKLGRTSEFIIYGHGQQRRALIETERLLENDKNNGVGDTTKQYDGDIKNSFKDKAKKWQKFITQAKASGRTPEDYEKKGDLTGASVLRHYNEILRSCNALDYHDFINSSITLLTNFPEVYKECQDMWRAIVVDEFQDTSAMQYCLLKILASHNHITIVGDEDQSIFSFNGADVSGFDSFRKDFPDHKEIRLSKNYRSTRAIVEAATALIQNNTKRHHPRLVETDNPSGCKITVKECHSEDSQCAFVIDKIIEITSGTAEGCNFGNIAVLYRRQITGKAFQVSFRNRKIPFNIHGVAFYRKKVIKAIMAILRTTLPGCDDGPWRQAFKALLPGDKEEKKKIIYHVQKISLARTCSFLTAASDIFSAKVSGTFKRAQITQGRKVLSTLDSLSKLVEKEQSVSVIISSAGDMLPQKYLLEKRAVVDVDNGKLLNEDSDIRSVLQFLMDDVSDFLSTHFSSSMERSKTDEKGCASTLKAFIDYISLRETENFRSRKEENKNSITLTTIHQSKGLEWDVVFIVQVFLYSSGRACIYKYSAIYVVLGRQCGSVWHLIAD

SEQ ID NO: 168021 - protein, 725 aa, Zea Mays
MDRRSWLWRRKSTDKSPGETETSASEKITDEQDSAKSSPNSTRSPEITSKELEDDNDVKVKVLSERLSSVVLDVRAKDDLVKQHSKVAEEAVLGWEKAEKEISSLKAQLSAATAKNSALEDRLVHLDGALKECVRQLRRAKDEQDQTVQDALARQARQWESHKADLELRIVELTARLEAKSERSVVGATDGDTRSSRLAALEKENSALKLQLLAKTEELELRTIEKELNRRAAETASKQQLEGIRKVAKLQAECRRLQAAAQRRASSVNVELRRSPSSACVESLTDCQSDCSDSWASALVTELDQFKKDKSGASTRTASLVAADIDVMDDFLEMEKLASANGSSKGDAVEDASGQVEKALHEAQRELRTCRRRVMVAEERSAELQRQLNHANGDKHAMEAEAEAAEAKGRELEGKLELARADIAGLLDKGRILEERLESEKALTLELAAKYQDMETLEAEKRELNAQLETSRSEAKKLSDKIALMERKLEVEKALSIRLATKCHGVDALEAKKKGVELELESAREEIASLRNKASSLELQVMEEKASSAGLAMRCQELEELRSQLVSSNSRIVELNEKVKTLEDVIEKQRPVTAELESQLQSRHDEISSLKEDISLLQKKLESQKNLSSAYISALGASETEKKELATRFELGEKEAEELRGKTSLLEEQIHEERARSSEFAVKCRKMEEQFSRRSLLGHQPVKSSAIKDIQIRKKGCRVSNVFVF

SEQ ID NO: 168022 - protein, 765 aa, Zea Mays
MFDCLLFWLLDQDSAKSSPNSTRSPEITSKELEDDNDVKVKVLSERLSSVVLDVRAKDDLVKQHSKVAEEAVLGWEKAEKEISSLKAQLSAATAKNSALEDRLVHLDGALKECVRQLRRAKDEQDQTVQDALARQARQWESHKADLELRIVELTARLEAKSERSVVGATDGDTRSSRLAALEKENSALKLQLLAKTEELELRTIEKELNRRAAETASKQQLEGIRKVAKLQAECRRLQAAAQRRASSVNVELRRSPSSACVESLTDCQSDCSDSWASALVTELDQFKKDKSGASTRTASLVAADIDVMDDFLEMEKLASANGSSKGDAVEDASGQVEKALHEAQRELRTCRRRVMVAEERSAELQRQLNHANGDKHAMEAEAEAAEAKGRELEGKLELARADIAGLLDKGRILEERLESEKALTLELAAKYQDMETLEAEKRELNAQLETSRSEAKKLSDKIALMERKLEVEKALSIRLATKCHGVDALEAKKKGVELELESAREEIASLRNKASSLELQVMEEKASSAGLAMRCQELEELRSQLVSSNSRIVELNEKVKTLEDVIEKQRPVTAELESQLQSRHDEISSLKEDISLLQKKLESQKNLSSAYISALGASETEKKELATRFELGEKEAEELRGKTSLLEEQIHEERARSSEFAVKCRKMEEQFSRRSLLGHQPVKSSAIKDIQIRKETELAKAAGKLADCQKTIASLSSQLKSLADFDEFLPETETSGADSADAWDGDLKLLHPASYPTQIGCLAVT

SEQ ID NO: 168023 - protein, 87 aa, Zea Mays
MRIGGPRPAACALWDGRQSWHQREHELRPAQVNAAEAAAQLKLGEQMGMKREQERKKGCTTGTVQQPLSEGPGELVPKVTMEVCSWD

SEQ ID NO: 168024 - protein, 79 aa, Zea Mays
MKMEVELRAVHEMRAELAQVRMDIQNLGAMRQELMGQVQGLTQDLAQSAEDLHKVSALQAETQEIKHETQHLRCGETSS

SEQ ID NO: 168025 - protein, 132 aa, Zea Mays
MHLLFYALQFWVYERSMKMEVELRAVHEMRAELAQVRMDIQNLGAMRQELMGQVQGLTQDLAQSAEDLHKVSALQAETQEIKHETQHLRSGIELEKKGYAQSYEQGQDMQIFLFISVASFYRTRRRTAHLIY

SEQ ID NO: 168026 - protein, 107 aa, Zea Mays
MARRHLPLSCSRAATIRLLHFTTSSRHTTSSATTTTTATLPACHPATPDIFQESPPPHLRHFVGHGHNGTDVPMPHCHPSRMWWHRWRSGLARRWTRRMCCLRRTSG

SEQ ID NO: 168027 - protein, 176 aa, Zea Mays
MRAACKLAARVLDFAGTLVKPSITTNEIDAAVHNMIIEAGAYPSPLGYHGFPKSICTSVNECVCHGVPDSTQLQNGDIINIDVNVFLNGYHGGTSRTFACGQVDDSIKHFLNAAEECLEKGISICRDGVNYRKIGKKISKLAYFYGYYVVERFVGHGIGTMYHSEPLILHHGGYHF

SEQ ID NO: 168028 - protein, 1002 aa, Zea Mays
MQYNAPDTIYFRQAHSIQELARKKFQELRDEGIPTENPIKSEQKSRPNFCSGEQVKKPVLRYLDDDLDFLSRKDQDKRSNSNNVNDDMSFNGHVKKTLSKNAPDQSCLLQKERINKPISRNSEDNLSSSFHKKQRKKLISRHSEDDLNCPSGRDRARKVISKNSENDENSPFHKHQVKKSAPQRSIDGLSFQEKHIKKPIDGNGEDPGFSSCKRRIEDPFCTNVEDASFSSTKRLSEKPMSEKPISINKEEDLDHCHQESSKKPSCRVEQDDHGYSCDEEAVKKPGCMDSHDAQGSDISAATIASVGDGSNGLSMPQPNNSEPTGCTVANGVIDKDISSPLDEIRSEKTDDILAKPSYKTIVVDENRRKTYDASEGQSPMESDPVFDVFSAEPKELVNVGLDAEHSYAYARSLARFAGSFGAQGWRIASDRIRQALPADVKYGRGWVGEYEPPLLPILVVNDQPRYLKSSETNRQRNASLPRDNERLRSTETNNPKDMRRMTTDNNVVGVPGQLDSPEFKPRLFGVSNELQHRSTGTLSLHENHRVSGNVAKTKRTTNEKTRKGTSSSSARPREMQLQKGASSGALDNLASNKMAGQPRPFLQPPESNRTQPMRKIDSSKNKIPIEMAPQQVECAKGAASGVHDTPLSDGQPKHFFQSQAAASSGVHDMHSSNGQPKHYFQSQAAASSDMHAMPSSNGQPKHYFKSHAAVSSVVHDMPSSNGQPKQIFQSQAVASSGGHDMPSNGQSKPLFQSQEATILQPKNEATWVYHGRPGDGKVGTSNKSRPSTSIGFINKNHQSVNAATFAMNLNGQKIVSDHAKSAGTTAMPVQVNIPNRGLDAPRNMFSAFPAAVRENHSIPPAPMAQSWISFGATTENKPTIVSPTSLDNNCGWKMPFANVQPSDDTKINAVPQLFRHPVQVARENSVQSKGLVIFPQLVQPDFARSQGQPQWQGLVPHMQQKPGKDVLRPDLNIGFPSPRSPPARQSSGINLEAQQPDLALQL

SEQ ID NO: 168029 - protein, 602 aa, Zea Mays
MHRAAASPLRHSLRRLSSCSAATPLVWAARFFVPCSESRLPAFTSSRFLRSAAAAPCRCCSGAAITERPASAWRGVATMADGSSRFGHVLTSLPKPGGGEYGKYYSLPALNDRRIERLPYSIRYLLESAIRNCDGFQITEKDVENIIDWENTAPKLVEIPFKPARVLLQDFTGVPAIVDLASMRDAMARLGDDPGKIDPLIPVDLVIDHSVQADVVRSENALQANMQREFDRNKERFAFLRWGSVAFNNMLIVPPGSGIVHQVNLEYLGRVVFNTDGILYLDSVLGTDSHTTMIDGMGVAGWGVGGIEAEATMLGQPMSMVLPSVVGFKLSGKLRDGVTATDLVLTVTHILRKHGVVGKFVEFYGEGMSELAVANRATIANMSPEYGATMGFFPVDHVTLGYLKLTGRSDEKVEMVEAYLRANNMFVDYNETQTERVYSSYLELDLADVEPCVSGPKRPHDHVALKDMKSDWHSCLGNKVGFKGFGVPKEQHDKFVKFTFHGQPAEIRHGSIVIAAITSCTNTSNPSVMLGAGLVAKKACELGLESCARIRGSDQISAEKYLDHLGFNLIGYGCTTCIGNSGELDEDVAKAVTDNGNLLLIN

SEQ ID NO: 168030 - protein, 577 aa, Zea Mays
MHRAAASPLRHSLRRLSSCSAATPLVWAARFFVPCSESRLPAFTSSRFLRSAAAAPCRCCSGAAITERPASAWRGVATMADGSSRFGHVLTSLPKPGGGEYGKYYSLPALNDRRIERLPYSIRYLLESAIRNCDGFQITEKDVENIIDWENTAPKLVEIPFKPARVLLQDFTGVPAIVDLASMRDAMARLGDDPGKIDPLIPVDLVIDHSVQADVVRSENALQANMQREFDRNKERFAFLRWGSVAFNNMLIVPPGSGIVHQVNLEYLGRVVFNTDGILYLDSVLGTDSHTTMIDGMGVAGWGVGGIEAEATMLGQPMSMVLPSVVGFKLSGKLRDGVTATDLVLTVTHILRKHGVVGKFVEFYGEGMSELAVANRATIANMSPEYGATMGFFPVDHVTLGYLKLTGRSDEKVEMVEAYLRANNMFVDYNETQTERVYSSYLELDLADVEPCVSGPKRPHDHVALKDMKSDWHSCLGNKVGFKGFGVPKEQHDKFVKFTFHGQPAEIRHGSIVIAAITSCTNTSNPSVMLGAGLVAKKACELGLEVNPWIKTSLAPGSGAVTKYLLKRYHCGCSTLR

SEQ ID NO: 168031 - protein, 982 aa, Zea Mays
MHRAAASPLRHSLRRLSSCSAATPLVWAARFFVPCSESRLPAFTSSRFLRSAAAAPCRCCSGAAITERPASAWRGVATMADGSSRFGHVLTSLPKPGGGEYGKYYSLPALNDRRIERLPYSIRYLLESAIRNCDGFQITEKDVENIIDWENTAPKLVEIPFKPARVLLQDFTGVPAIVDLASMRDAMARLGDDPGKIDPLIPVDLVIDHSVQADVVRSENALQANMQREFDRNKERFAFLRWGSVAFNNMLIVPPGSGIVHQVNLEYLGRVVFNTDGILYLDSVLGTDSHTTMIDGMGVAGWGVGGIEAEATMLGQPMSMVLPSVVGFKLSGKLRDGVTATDLVLTVTHILRKHGVVGKFVEFYGEGMSELAVANRATIANMSPEYGATMGFFPVDHVTLGYLKLTGRSDEKVEMVEAYLRANNMFVDYNEFQTQTERVYSSYLELDLADVEPCVSGPKRPHDHVALKDMKSDWHSCLGNKVGFKGFGVPKEQHDKFVKFTFHGQPAEIRHGSIVIAAITSCTNTSNPSVMLGAGLVAKKACELGLEVNPWIKTSLAPGSGAVTKYLLKSGLQKYLDHLGFNLIGYGCTTCIGNSGELDEDVAKAVTDNDIIAAAVLSGNRNFEGRIHALVRANYLASPPLVVAYALAGTVYIDFETEPIGKGKDGTDVYFKDIWPSNEEIAEVEQSSVLPDMFRSTYEAITQGNPMWNQLSVPKADRFPWDPSSTYIHDPPFFKDITPTPPGPCSIENAYCLLKFGDSITTDHISPAGSIPRDSPAGKYLLERGVQPKDFNSYGSRRGNDEVMARGTFANIRIVNRLLNGEVGPKTIHVPTNEKLFVFDAAMRYKADGHHTIVLAGEEYGSGSSRDWAAKGPMLLGVKAVIAKSFERIHRSNLVGMGVLPLCFKPGEDADSLGLTGHERYTIRLPTNVSEIQPGQDVQVLSDTGKSFTCKLRIDTMVELAYFDHGGILHYVLRNLVRQQQQ

SEQ ID NO: 168032 - protein, 668 aa, Zea Mays
MLGQPMSMVLPSVVGFKLSGKLRDGVTATDLVLTVTHILRKHGVVGKFVEFYGEGMSELAVANRATIANMSPEYGATMGFFPVDHVTLGYLKLTGRSDEKVEMVEAYLRANNMFVDYNETQTERVYSSYLELDLADVEPCVSGPKRPHDHVALKDMKSDWHSCLGNKVGFKGFGVPKEQHDKFVKFTFHGQPAEIRHGSIVIAAITSCTNTSNPSVMLGAGLVAKKACELGLEVNPWIKTSLAPGSGAVTKYLLKSGLQKYLDHLGFNLIGYGCTTCIGNSGELDEDVAKAVTDNDIIAAAVLSGNRNFEGRIHALVRANYLASPPLVVAYALAGTVYIDFETEPIGKGKDGTDVYFKDIWPSNEEIAEVEQSSVLPDMFRSTYEAITQGNPMWNQLSVPKADRFPWDPSSTYIHDPPFFKDITPTPPGPCSIENAYCLLKFGDSITTDHISPAGSIPRDSPAGKYLLERGVQPKDFNSYGSRRGNDEVMARGTFANIRIVNRLLNGEVGPKTIHVPTNEKLFVFDAAMRYKADGHHTIVLAGEEYGSGSSRDWAAKGPMLLGVKAVIAKSFERIHRSNLVGMGVLPLCFKPGEDADSLGLTGHERYTIRLPTNVSEIQPGQDVQVLSDTGKSFTCKLRIDTMVELAYFDHGGILHYVLRNLVRQQQQ

SEQ ID NO: 168033 - protein, 568 aa, Zea Mays
MHRAAASPLRHSLRRLSSCSAATPLVWAARFFVPCSESRLPAFTSSRFLRSAAAAPCRCCSGAAITERPASAWRGVATMADGSSRFGHVLTSLPKPGGGEYGKYYSLPALNDRRIERLPYSIRYLLESAIRNCDGFQITEKDVENIIDWENTAPKLVEIPFKPARVLLQDFTGVPAIVDLASMRDAMARLGDDPGKIDPLIPVDLVIDHSVQADVVRSENALQANMQREFDRNKERFAFLRWGSVAFNNMLIVPPGSGIVHQVNLEYLGRVVFNTDGILYLDSVLGTDSHTTMIDGMGVAGWGVGGIEAEATMLGQPMSMVLPSVVGFKLSGKLRDGVTATDLVLTVTHILRKHGVVGKFVEFYGEGMSELAVANRATIANMSPEYGATMGFFPVDHVTLGYLKLTGRSDEKVEMVEAYLRANNMFVDYNETQTERVYSSYLELDLADVEPCVSGPKRPHDHVALKDMKSDWHSCLGNKVGFKGFGVPKEQHDKFVKFTFHGQPAEIRHGSIVIAAITSCTNTSNPSVMLGAGLVAKKACELGLEVNPWIKTSLAPGSGAVTKYLLKR

SEQ ID NO: 168034 - protein, 798 aa, Zea Mays
MRDAMARLGDDPGKIDPLIPVDLVIDHSVQADVVRSENALQANMQREFDRNKERFAFLRWGSVAFNNMLIVPPGSGIVHQVNLEYLGRVVFNTDGILYLDSVLGTDSHTTMIDGMGVAGWGVGGIEAEATMLGQPMSMVLPSVVGFKLSGKLRDGVTATDLVLTVTHILRKHGVVGKFVEFYGEGMSELAVANRATIANMSPEYGATMGFFPVDHVTLGYLKLTGRSDEKVEMVEAYLRANNMFVDYNETQTERVYSSYLELDLADVEPCVSGPKRPHDHVALKDMKSDWHSCLGNKVGFKGFGVPKEQHDKFVKFTFHGQPAEIRHGSIVIAAITSCTNTSNPSVMLGAGLVAKKACELGLEVNPWIKTSLAPGSGAVTKYLLKSGLQKYLDHLGFNLIGYGCTTCIGNSGELDEDVAKAVTDNDIIAAAVLSGNRNFEGRIHALVRANYLASPPLVVAYALAGTVYIDFETEPIGKGKDGTDVYFKDIWPSNEEIAEVEQSSVLPDMFRSTYEAITQGNPMWNQLSVPKADRFPWDPSSTYIHDPPFFKDITPTPPGPCSIENAYCLLKFGDSITTDHISPAGSIPRDSPAGKYLLERGVQPKDFNSYGSRRGNDEVMARGTFANIRIVNRLLNGEVGPKTIHVPTNEKLFVFDAAMRYKADGHHTIVLAGEEYGSGSSRDWAAKGPMLLGVKAVIAKSFERIHRSNLVGMGVLPLCFKPGEDADSLGLTGHERYTIRLPTNVSEIQPGQDVQVLSDTGKSFTCKLRIDTMVELAYFDHGGILHYVLRNLVRQQQQ

SEQ ID NO: 168035 - protein, 585 aa, Zea Mays
MHRAAASPLRHSLRRLSSCSAATPLVWAARFFVPCSESRLPAFTSSRFLRSAAAAPCRCCSGAAITERPASAWRGVATMADGSSRFGHVLTSLPKPGGGEYGKYYSLPALNDRRIERLPYSIRYLLESAIRNCDGFQITEKDVENIIDWENTAPKLVEIPFKPARVLLQDFTGVPAIVDLASMRDAMARLGDDPGKIDPLIPVDLVIDHSVQADVVRSENALQANMQREFDRNKERFAFLRWGSVAFNNMLIVPPGSGIVHQVNLEYLGRVVFNTDGILYLDSVLGTDSHTTMIDGMGVAGWGVGGIEAEATMLGQPMSMVLPSVVGFKLSGKLRDGVTATDLVLTVTHILRKHGVVGKFVEFYGEGMSELAVANRATIANMSPEYGATMGFFPVDHVTLGYLKLTGRSDEKVEMVEAYLRANNMFVDYNEFQTQTERVYSSYLELDLADVEPCVSGPKRPHDHVALKDMKSDWHSCLGNKVGFKGFGVPKEQHDKFVKFTFHGQPAEIRHGSIVIAAITSCTNTSNPSVMLGAGLVAKKACELGLESCARIRGSDQISAEKWLAKVFRSSRFQLNWIWLHNMHW

SEQ ID NO: 168036 - protein, 313 aa, Zea Mays
MYNMNTSSINAASSWSIMKEEFTFQAHDRPFNNCHASTIVEVEKEIFLVSYFGGSIEGAPDVKIWTQRYSDGYWHPPVVADEENATAMWNPVLFQLPSHELLLFYKIGEHPQNWSGAMKRSLNGGMSWLEREQLPPGILGPIKNKPFLLDDGRLLCGTSVESWNSWGAWLEVAADNVTEDAGRTWSKYGPIFIQGEKLGVIQPVPYQTTNGSIRMLLRSHQTIGSVCMADSYDGGLRWSFARKSVLPNPNSGIDGIKMKDGRVALAYNTVSRGTLKVAVSTDDGLSWQEVVTLENAEGWEFSYPAVIQTQGRP

SEQ ID NO: 168037 - protein, 147 aa, Zea Mays
MYNMNTSSINAASSWSIMKEEFTFQAHDRPFNNCHASTIVEVEKEIFLVSYFGGSIEGAPDVKIWTQRYSDGYWHPPVVADEENATAMWNPVLFQLPSHELLLFYKIGEHPQNWSGAMKRSLNGGMSWLEREQLPPGILGPIKNKDS

SEQ ID NO: 168038 - protein, 362 aa, Zea Mays
MRLQYAWNAIPFILLFCAISTNKIFSNNKPFSFTIASARSLLQIDPNSGLVQDKVKVGQILEEDTQNIVNMTMNVSSGWSIVKEELILPARGAPFNSCHASTIVQIEEDNFLVAYFGGSREGAPDVKIWLQRYSDGHWHPPVVADEQDGVPMWNPVLFQLPSRELLLFYKIGQEVQKWSGAMKRSLDGGVTWSPREQLPPGILGPIKNKPFLLEDGRLLCGSSVESWNSWGAWLEVTKDAGWTWRKYGPICIKGQPLGVIQPVPYRTDDGTIRVLLRSFETIGHVCMADSIDEGVTWSYVRETELPNPNSGIDGVKMKDGRVLLAYNTFSRGTLKLAVSLNDGDSWDEVMTLEDTKACCSST

SEQ ID NO: 168039 - protein, 567 aa, Zea Mays
MMGRTGDGRRRDVDGRLEALLSGAGGEEPWLRRVALATALELRLLAPLAAPAVVVYMLIIVMSSTTQIVCGQLGNVQLAAASLGNNGIQVFAYGIMLGMGSAVETLCGQAYGAEKYEMLGVYLQRSTVLLTATGVPLAAVYALSEPLLLLLGQSPEIAGAAAEFAYGLVPQIFAYAANFPIQKFLQAQSIVAPSAYILAASFALHVPLSWLAVYGLGLGLLGASLTLSLTWWVLVLGQFAYIVWSPRCRATWTGFTWAAFADLPGFAGLSAASAVMLALEVWYFQVLILLAGMLPDPQIALDSLTVCTSIQSWVFMISVGFNAAASVRVGNELGAGNPRSAAFSAWVVTALSAFVSGIAGLVTFLLRDKLSYIFTGGEAVSRAVADLCPLLVGTIVLCGIQPVLSEFRPDTHPNSSGTTVLHKLIRWRTDLFGLLIFEPSHYTATGSFTFSDAFVLFFFPLVLNFLLTGRRRVMKGVAVGCGWQAMVAYINVECYYFIGVPLGVLLGFKFGFGIKGLWGGMIGGTLIQTLALIWITLRTDWNKEVEEARKRLDKWDDTRQPLVASKE

SEQ ID NO: 168040 - protein, 309 aa, Zea Mays
MQPLHQPPMNGQHGPPPPQGSGVPTASQQQAPPPSYYQQQQQQQQGPPPQYYQQGPPQPWAQQQQYAPPPPQYPPQMQQYAPPPQYAPPPQQYAQPPQYAQPPQYGTTPGSGEVRTLWIGDLQYWMDENYLHYNAFAPVAQQIASVKIIRNKQTGHSEGYGFIEFYSQAAAEHTLMNFNGQMMPNIEMAFKLNWASASTGDKRGDNGSDHAIFVGDLAPDVTDSMLEDVFRANYPSVRGAKVVVDRITGRPKGYGFVHFGDLNEQARAMTEMNGMMLSTRKMRIGAAASKKNTDAQQTYATNGCHAICI

SEQ ID NO: 168041 - protein, 324 aa, Zea Mays
MQPLHQPPMNGQHGPPPPQGSGVPTASQQQAPPPSYYQQQQQQQQGPPPQYYQQGPPQPWAQQQQYAPPPPQYPPQMQQYAPPPQYAPPPQQYAQPPQYAQPPQYGTTPGSGEVRTLWIGDLQYWMDENYLHYNAFAPVAQQIASVKIIRNKQTGHSEGYGFIEFYSQAAAEHTLMNFNGQMMPNIEMAFKLNWASASTGDKRGDNGSDHAIFVGDLAPDVTDSMLEDVFRANYPSVRGAKVVVDRITGRPKGYGFVHFGDLNEQARAMTEMNGMMLSTRKMRIGAAASKKNTDAQQTYATNGAYQSSQGNCSENDPNNTTVMC

SEQ ID NO: 168042 - protein, 440 aa, Zea Mays
MQPLHQPPMNGQHGPPPPQGSGVPTASQQQAPPPSYYQQQQQQQQGPPPQYYQQGPPQPWAQQQQYAPPPPQYPPQMQQYAPPPQQYAPPPQQQYAAPPQQQYAAPPPQYAPPPPQYAPPPQQYAQPPQYAQPPQYGTTPGSGEVRTLWIGDLQYWMDENYLHYNAFAPVAQQIASVKIIRNKQTGHSEGYGFIEFYSQAAAEHTLMNFNGQMMPNIEMAFKLNWASASTGDKRGDNGSDHAIFVGDLAPDVTDSMLEDVFRANYPSVRGAKVVVDRITGRPKGYGFVHFGDLNEQARAMTEMNGMMLSTRKMRIGAAASKKNTDAQQTYATNGAYQSSQGNCSENDPNNTTVFVGGLDSNVDEEYLRQIFTPYGEISYVKIPVGKHCGFVQFTSRSCAEEAIQMLNGSQIGGQKARLSWGRSTQNRQHDANSQYNGNNY

SEQ ID NO: 168043 - protein, 134 aa, Zea Mays
MNFNGQMMPNIEMAFKLNWASASTGDKRGDNGSDHAIFVGDLAPDVTDSMLEDVFRANYPSVRGAKVVVDRITGRPKGYGFVHFGDLNEQARAMTEMNGMMLSTRKMRIGAAASKKNTDAQQTYATNGCHAICI

SEQ ID NO: 168044 - protein, 344 aa, Zea Mays
METRTSLDNNVDRDDLQRKIVRPPANLLVFEGDVLDSEASELDSYLLSTCDFYGDFLLLDPCDAPSVFDFLQGKHSGKENSVARQGSPAPSKSQANVFTSPNARSAGTGCKAASGKVLGGLDSTQKNPDQPSTQETSPDDKHWSDPVEPNFTDDVEKPHPDDIGDPVGDYSDDEDPWKPLNPHEPGSLKIRPYRRVKGSLRGVIGTLRKKTLTSIFPVAKMVGVIIPEHAKSFEAQQSQQEEHYGSQSPPRFEKYLASFEFGEENSNVFGDLKDDNGSDIGINFDYNDPDMPNDIDVDPDVPTYPDEIIAATPKGTHGTQDDRDTRESLDDLCRSHLVRFLMVL

SEQ ID NO: 168045 - protein, 663 aa, Zea Mays
MDSGGGEGGSTGGRFPILQANRDPESNWEVDVAKSLEQYLLKICSGEVSGEDESHSVNFAEAALLLQGSVQVYSRKVEYLYSLVLHAIEFLSHKKQDQQENVTAQSNQSDPSTIPSEDYIFMGLDDVLMETRTSLDNNVDRDDLQRKIVRPPANLLVFEGDVLDSEASELDSYLLSTCDFYGDFLLLDPCDAPSVFDFLQGKHSGKENSVARQGSPAPSKSQANVFTSPNARSAGTGCKAASGKVLGGLDSTQKNPDQPSTQETSPDDKHWSDPVEPNFTDDVEKPHPDDIGDPVGDYSDDEDPWKPLNPHEPGSLKIRPYRRVKGSLRGVIGTLRKKTLTSIFPVAKMVGVIIPEHAKSFEAQQSQQEEHYGSQSPPRFEKYLASFEFGEENSNVFGDLKDDNGSDIGINFDYNDPDMPNDIDVDPDVPTYPDEIIAATPKGTHGTQDDRDTRESLDDLCRSHLNALLASIAEVEKQSEMDARVSTWKERIEIALEEQDKNPPFDIGSYGEQILDALSSRTDSTGTASFSEIVCGRPKYEVARTFSALLQLVNSRSVYLDKGQATNELVCYTAENPFHVRLISPNRRPEMEAHFARKRVKSPLRNAGKGGESSLARHECPKKPLHKNGKIQVKTAIRLTPDGKRRRSGGFIGRQRLLCNQLP

SEQ ID NO: 168046 - protein, 564 aa, Zea Mays
MDSGGGEGGSTGGRFPILQANRDPESNWEVDVAKSLEQYLLKICSGEVSGEDESHSVNFAEAALLLQGSVQVYSRKVEYLYSLVLHAIEFLSHKKQDQQENVTAQSNQSDPSTIPSEDYIFMGLDDVLMETRTSLDNNVDRDDLQRKIVRPPANLLVFEGDVLDSEASELDSYLLSTCDFYGDFLLLDPCDAPSVFDFLQGKHSGKENSVARQGSPAPSKSQANVFTSPNARSAGTGCKAASGKVLGGLDSTQKNPDQPSTQETSPDDKHWSDPVEPNFTDDVEKPHPDDIGDPVGDYSDDEDPWKPLNPHEPGSLKIRPYRRVKGSLRGVIGTLRKKTLTSIFPVAKMVGVIIPEHAKSFEAQQSQQEEHYGSQSPPRFEKYLASFEFGEENSNVFGDLKDDNGSDIGINFDYNDPDMPNDIDVDPDVPTYPDEIIAATPKGTHGTQDDRDTRESLDDLCRSHLNALLASIAEVEKQSEMDARVSTWKERIEIALEEQDKNPPFDIGSYGEQILDALSSRTDSTGTASFSEIVCGRPKYEVARTFSALLQLQKCLSGQRTSHE

SEQ ID NO: 168047 - protein, 81 aa, Zea Mays
MPHRGIFLLSCVGLCFLCSQMLLLIHKYTILGSLCVYKIVYIRLLPIPLLYLLNISNFAHYFKLRSATVQYFSKQYFYMAC

SEQ ID NO: 168048 - protein, 80 aa, Zea Mays
MEDFYVTILYGLLLVAGGVAGYMKRGSAASLVAGGGFGAALLLAGALSAWAFAHGRGGAAAIFATVLQIGTLLSLPSSLN

SEQ ID NO: 168049 - protein, 628 aa, Zea Mays
MGAIAAIISQYEWKQVIAIYVDDDYGRGGITALGDALAKRKCKISYKAKLPPGAAKTTIEDILMQVNDMESRVYVIHVNPDSGLNVFSAAKSLGMMSSGYVWIATDWLSAVIDSSVHGIPDVMELTQGVLVLRQHIADSDIQHAFLSKWNNLTRNGSSYFMHAYDSVWLVAHAVERFLREGNAMSFSADPKLQAKKGSSLQLDSLRIFNSGDKLLEKVWSANFSGVSGPVQFTLDRDLVHPAYDILNIGGTGLRTIGYWSNSSGLSAVAPENLSSSARDSSANNVQLRGVIWPGQTSEKPRGWVFSHHGMPMRIGVPLRTSYKEFVMQDDGPDGVKGFAVDVFKAAISLLPYPVSCKFVLFGDGLKNPSYSELVQKVSENELTSGIQGLDSLISSSSAIGYQVGSFSRNYLVDELSIAESRLVALNSPSDYARALELGSGNGGVAAIIDELPYVEIFLSKYCKFKTVGQVFTKSGWGFAFPRDSPLAEDLSTAILALSENGKLQKMHDEWLSGTECSADNGAGPSNSLSLSSFWGLFLICGLACFLALVIFFLRIFCQYSRYSNQVEAQFAEPRVLNRPARLTTIKSLISFVDKKEEEVKNALKKRPNGTGQQHPSTPNAEEQPTLPP

SEQ ID NO: 168050 - protein, 675 aa, Zea Mays
MMSSGYVWIATDWLSAVIDSSVHGIPDVMELTQGVLVLRQHIADSDIQHAFLSKWNNLTRNGSSYFMHAYDSVWLVAHAVERFLREGNAMSFSADPKLQAKKGSSLQLDSLRIFNSGDKLLEKVWSANFSGVSGPVQFTLDRDLVHPAYDILNIGGTGLRTIGYWSNSSGLSAVAPENLSSSARDSSANNVQLRGVIWPGQTSEKPRGWVFSHHGMPMRIGVPLRTSYKEFVMQDDGPDGVKGFAVDVFKAAISLLPYPVSCKFVLFGDGLKNPSYSELVQKVSENYFDAAVGDIAIVTNRTRLVDFTQPYIESGLIIVAPARVIESNAWAFLKPFTFQMWCVLVVIFLFVGAVVWILEHRSNTEFRGPPSQQIMTVCWFSFSTMFFAHRENTVSALGRFVLLIWLFAVLIINSSYTANLTSLLTVQELTSGIQGLDSLISSSSAIGYQVGSFSRNYLVDELSIAESRLVALNSPSDYARALELGSGNGGVAAIIDELPYVEIFLSKYCKFKTVGQVFTKSGWGFAFPRDSPLAEDLSTAILALSENGKLQKMHDEWLSGTECSADNGAGPSNSLSLSSFWGLFLICGLACFLALVIFFLRIFCQYSRYSNQVEAQFAEPRVLNRPARLTTIKSLISFVDKKEEEVKNALKKRPNGTGQQHPSTPNAEEQPTLPP

SEQ ID NO: 168051 - protein, 606 aa, Zea Mays
MMSSGYVWIATDWLSAVIDSSVHGIPDVMELTQGVLVLRQHIADSDIQHAFLSKWNNLTRNGSSYFMHAYDSVWLVAHAVERFLREGNAMSFSADPKLQAKKGSSLQLDSLRIFNSGDKLLEKVWSANFSGVSGPVQFTLDRDLVHPAYDILNIGGTGLRTIGYWSNSSGLSAVAPENLSSSARDSSANNVQLRGVIWPGQTSEKPRGWVFSHHGMPMRIGVPLRTSYKEFVMQDDGPDGVKGFAVDVFKAAISLLPYPVSCKFVLFGDGLKNPSYSELVQKVSENYFDAAVGDIAIVTNRTRLVDFTQPYIESGLIIVAPARVIESNAWAFLKPFTFQMWCVLVVIFLFVGAVVWILEHRSNTEFRGPPSQQIMTVCWFSFSTMFFAHRENTVSALGRFVLLIWLFAVLIINSSYTANLTSLLTVQELTSGIQGLDSLISSSSAIGYQVGSFSRNYLVDELSIAESRLVALNSPSDYARALELGSGNGGVAAIIDELPYVEIFLSKYCKFKTVGQVFTKSGWGFRLPSRRGLVDGNPGAIGERQAPEDARRVVERDGVQCRQRGWAVELLEPVELLGPLPHMRPRMLPRPRDFLPPDILPVQQIQ

SEQ ID NO: 168052 - protein, 394 aa, Zea Mays
MLVTCWEQLNITKTVRKYSIDRNLVPTGSEFHPGPIPILNKHGDDVEEDHVDGAFSLSSRNFDSFSHQYPVLVVNFYAPWCYWSNRLKPSWEKTAKIMRERYDPEMDGRILLGKVDCTEEVELCRRNHIQGYPSIRVFRKGSDIKENQGHHDHESYYGERDTESLVAAMETYVANIPKEAHALEDKSNKTVDPAKRPAPMASGCRIEGFVRVKRVPGSVVISARSGSHSFDPSQINVSHYVTQFSFGKRLSPRMLHEFIRLTPYLRGYHDRLAGQSYTVKHGEVNANVTIEHYLQVVKTELVTQRSSKELKVLEEYEYTAHSSLVHSFYVPVVKFHFEPSPMQVLVTEVPKSFSHFITNVCAIIGGVFTVAGILDSIFHNTLRMVKKIELGKNI

SEQ ID NO: 168053 - protein, 297 aa, Zea Mays
MRERYDPEMDGRILLGKVDCTEEVELCRRNHIQGYPSIRVFRKGSDIKENQGHHDHESYYGERDTESLVAAMETYVANIPKEAHALEDKSNKTVDPAKRPAPMASGCRIEGFVRVKRVPGSVVISARSGSHSFDPSQINVSHYVTQFSFGKRLSPRMLHEFIRLTPYLRGYHDRLAGQSYTVKHGEVNANVTIEHYLQVVKTELVTQRSSKELKVLEEYEYTAHSSLVHSFYVPVVKFHFEPSPMQVLVTEVPKSFSHFITNVCAIIGGVFTVAGILDSIFHNTLRMVKKIELGKNI

SEQ ID NO: 168054 - protein, 307 aa, Zea Mays
MIKWGLSSGTPADSYYEVRSDCTDGVPKSKFKIKAGKTLSARKWQAAFSPDGCLDIASVLSRIQRGGVHPTVRGEVWEFLLGCFDPRSTFDEREEIRQIRRIQYARWKEDCRQMDSHVGSGKVITAPLITEDGRPIKDPLVLLEATSDTNTSGDAPTTSINGNEVDESAERITDKQIIEWKLTLHQIGLDVLRTDRTMVFYENKENLSKLWDILAVYAWIDKDVGYCQGMSDLCSPMIVLLNDEADAFWCFEKLMRRLRGNFRCTDQSVGVANQLQHLASIIQVLDPKLHDHLGVKYHLETPYTSGR

SEQ ID NO: 168055 - protein, 423 aa, Zea Mays
MIKWGLSSGTPADSYYEVRSDCTDGVPKSKFKIKAGKTLSARKWQAAFSPDGCLDIASVLSRIQRGGVHPTVRGEVWEFLLGCFDPRSTFDEREEIRQIRRIQYARWKEDCRQMDSHVGSGDAPTTSINGNEVDESAERITDKQIIEWKLTLHQIGLDVLRTDRTMVFYENKENLSKLWDILAVYAWIDKDVGYCQGMSDLCSPMIVLLNDEADAFWCFEKLMRRLRGNFRCTDQSVGVANQLQHLASIIQVLDPKLHDHLETLGGGDYLFAFRMFMVLFRREVSFGDSLYLWEMMWALEYDPDIFFAACEEQGAVNKNKVSKSKLKGLRHFGKWDNKDKDKDKEDAKNGAEDGEDGPVPISVFMVASVLKEKREKLLQEARGLDDLIRILNDVNGNLDAKKACAGALKLHKKYLKKVQEKKP

SEQ ID NO: 168056 - protein, 358 aa, Zea Mays
MIGCAKPLAAPLQAWARPPSPAGRRLPPSFCAPDTSPALTRAVESPGQSQSDDAPPPRSGEAERDAAAGKAIYIVSDGTGWTAEHSVNAALGQFENCLADRGCAVNTHLFSLIDDMDRLIEVIKQAAKEGALVLYTLADPSMAEATKKACDFWGVPCTDVLRPTVEAIASHIGVAPSGIPRSSPSRNGRLSEDYFQRIDAIDFTIKQDDGALPQNLYRADIVLAGVSRTGKTPLSIYLAQKGYKVANVPIVMGVDLPKSLFEINQDKVFGLTINPAILQAIRKTRAKTLGFDGRQSNYAEMDHVRQELVHANQIFAQNPSWPVIAVTGKAIEETAAVILGILHDRKQKCSMPRISKRY

SEQ ID NO: 168057 - protein, 293 aa, Zea Mays
MILAALLLLLSFPKQLAGSQSVCSSANIVYMQSSTYMSNLNALAGALFAKVTSSNSHSAHGTAGTGSDMIYGAVLCRGDMIPGAACAKRLKEVLDAAMDNPANSSCSSQKDITLFDDGYLVQLRFSDQDFISNFRDSQECVVRANLNPPLLGDVSEQFHSLVSKLMTKLTDAAVKNMGRYETGQGWLTEKSQTVYGLVQCQEDMLKGTCQDCLSSAMAKREQMVDQMGGAILGVGCSLWYQTEVQFFAGTPALSLNMPTPSKFWIWVMLGSFSVVVSISWLLVHIWIKTERKR

SEQ ID NO: 168058 - protein, 946 aa, Zea Mays
MSVSMKDLDPAFRGSGQKDGLEIWRIENFKPIPAPASSYGKFFMGDSYIILKTTALKNGSLRHDIHYWIGKDTSQDEAGTAAILTVELDAALGGRAVQYREIQGNETEKFLSYFRPCIMPQPGGVASGFNHVEVNEQDYKTHLYVCHGKHVVHVNEVPFARSSLNHDDIFILDTKSKIFQFSGSNSSIQERAKALEVVQYIKDTFHEGKCEIASVEDGRMMADAEAGEFWGFFGGFAPLPRRAPAEGNEKHDETAFKLLCFDQGKLEPVDCQSLAHELLETNKCYFLDCGAELYVWMGRITSLMERKGASEAAEKLLSDSNRTRTHIIKVIEGFETVTFKSKFKEWPQTPELKLSSEDGRGKVAALLKRQGLNVKGLMKAAPTQEEPQSYIDSTGNLQVWRVNDKDKVQLSPSDQSKFYTGDCYIFQYTYPGDDKEECLIGTWFGKKSIEEDRVIAVSLASKMVESAKFQAVQARFYEGKEPIQFFVIFQSFQVFKGGLSSGYKRFIAENGIDDESYSEDGLALFRIQGSGPENMQAIQVEPVASSLNSSYCYILHNGNTVFTWAGNLTTALDQELMERQLDVIKPNTQSRSQKEGSETDQFWSLLGGKSEYSGQKMVRELESDPHLFSCILSKGNLKVKEIHHFTQDDLMTEDVFILDCHTSIFVWVGQQVDVKGRLQALDAGEKFIVLDFLMENLARETPVFTVMEGNEPPFFTRFFTWDSAKSLMHGNSYQRKLAIVKGGGAPALDKPKRRTTVYSGRSTTQDKSQRSRSMSFSPERVRVRGRSPAFTALAANFESSSNRNLSTPPPVVKKLYPKSVTPDPSNTASKSPAIAALAGSLDHPSQTPALEFMKGGSESEKPKQEGDGKEGVDTVATRVESLTINEDVKENEPEDDEGLPIYLYERLKTTAADPVTEIDVTRRETYLSSTEFKEKFGINCSSTFLA

SEQ ID NO: 168059 - protein, 405 aa, Zea Mays
MLLSQTHSLGHKRKGQKRTSFGVYWGANLSTQAKKWCENSKVTPIFSHASCRKVIKNVDFVVLGKLSTLTVQIHTDLVLLFSLLMFLICRVHEGNLKVKEIHHFTQDDLMTEDVFILDCHTSIFVWVGQQVDVKGRLQALDAGEKFIVLDFLMENLARETPVFTVMEGNEPPFFTRFFTWDSAKSLMHGNSYQRKLAIVKGGGAPALDKPKRRTTVYSGRSTTQDKSQRSRSMSFSPERVRVRGRSPAFTALAANFESSSNRNLSTPPPVVKKLYPKSVTPDPSNTASKSPAIAALAGSLDHPSQTPALEFMKGGSESEKPKQEGDGKEGVDTVATRVESLTINEDVKENEPEDDEGLPIYLYERLKTTAADPVTEIDVTRRETYLSSTEFKEKFGINCSSTFLA

SEQ ID NO: 168060 - protein, 547 aa, Zea Mays
MLLLAGVLFSTEKYKAMKQKNSCPILDHASCHSQEEWHLDSTMLRSMSRITRPTYMSAMGSMLFMLTRFPLLDHPLIMMTYLFWIRSPKFSSSVAQTHPFKSEQKLLKLCSTSKIHFMRASVKLHLLDGRMMADAEAGEFWGFFGGFAPLPRRAPAEGNEKHDETAFKLLCFDQGKLEPVDCQSLAHELLETNKCYFLDCGAELYVWMGRITSLMERKGASEAAEKLLSDSNRTRTHIIKVIEGFETVTFKSKFKEWPQTPELKLSSEDGRGKVAALLKRQGLNVKGLMKAAPTQEEPQSYIDSTGNLQVWRVNDKDKVQLSPSDQSKFYTGDCYIFQYTYPGDDKEECLIGTWFGKKSIEEDRVIAVSLASKMVESAKFQAVQARFYEGKEPIQFFVIFQSFQVFKGGLSSGYKRFIAENGIDDESYSEDGLALFRIQGSGPENMQAIQVEPVASSLNSSYCYILHNGNTVFTWAGNLTTALDQELMERQLDVIKPNTQSRSQKEGSETDQFWSLLGGKSEYSGQKMVRELESDPHLFSCILSKGN

SEQ ID NO: 168061 - protein, 547 aa, Zea Mays
MSVSMKDLDPAFRGSGQKDGLEIWRIENFKPIPAPASSYGKFFMGDSYIILKTTALKNGSLRHDIHYWIGKDTSQDEAGTAAILTVELDAALGGRAVQYREIQGNETEKFLSYFRPCIMPQPGGVASGFNHVEVNEQDYKTHLYVCHGKHVVHVNEVPFARSSLNHDDIFILDTKSKIFQFSGSNSSIQERAKALEVVQYIKDTFHEGKCEIASVEDGRMMADAEAGEFWGFFGGFAPLPRRAPAEGNEKHDETAFKLLCFDQGKLEPVDCQSLAHELLETNKCYFLDCGAELYVWMGRITSLMERKGASEAAEKLLSDSNRTRTHIIKVIEGFETVTFKSKFKEWPQTPELKLSSEDGRGKVAALLKRQGLNVKGLMKAAPTQEEPQSYIDSTGNLQVWRVNDKDKVQLSPSDQSKFYTGDCYIFQYTYPGDDKEECLIGTWFGKKSIEEDRVIAVSLASKMVESAKFQAVQARFYEGKEPIQFFVIFQSFQVFKGGLSSGYKRFIAENGIDDESYSEDGLALFRIQGSGPENMQAIQVEPVSFFP

SEQ ID NO: 168062 - protein, 504 aa, Zea Mays
MGDSYIILKTTALKNGSLRHDIHYWIGKDTSQDEAGTAAILTVELDAALGGRAVQYREIQGNETEKFLSYFRPCIMPQPGGVASGFNHVEVNEQDYKTHLYVCHGKHVVHVNEVPFARSSLNHDDIFILDTKSKIFQFSGSNSSIQERAKALEVVQYIKDTFHEGKCEIASVEDGRMMADAEAGEFWGFFGGFAPLPRRAPAEGNEKHDETAFKLLCFDQGKLEPVDCQSLAHELLETNKCYFLDCGAELYVWMGRITSLMERKGASEAAEKLLSDSNRTRTHIIKVIEGFETVTFKSKFKEWPQTPELKLSSEDGRGKVAALLKRQGLNVKGLMKAAPTQEEPQSYIDSTGNLQVWRVNDKDKVQLSPSDQSKFYTGDCYIFQYTYPGDDKEECLIGTWFGKKSIEEDRVIAVSLASKMVESAKFQAVQARFYEGKEPIQFFVIFQSFQVFKGGLSSGYKRFIAENGIDDESYSEDGLALFRIQGSGPENMQAIQVEPVSFFP

SEQ ID NO: 168063 - protein, 112 aa, Zea Mays
MPAPRRQRHPRWLPLRRLHRRGLPRNGESVPVPQGGLLYRSQLQCRTCRDSHLRDWRHLPTEHTDTSHGFGIGTSSNWICLAFLLAISRMAQPEKRQLDVKTQELIPYLILN

SEQ ID NO: 168064 - protein, 180 aa, Zea Mays
MKNPWLLFLAPFLLAVSSSLPHTAAVPLRFPAAGRSPVQCIGDGVYAANSTYQANLRRVAALLLAEVSASPGQFYYTTHAVGYWPNRLLASSLCRRRDVNGTHVGYPCADCIAGAFLEMERACPYRREAFYIDRNCSVELAEIRIFGTGGIFRIPPLFYLEMRMLATCLPRRNGKCCILA

SEQ ID NO: 168065 - protein, 461 aa, Zea Mays
MALARLLGTAFLLLLFSHAEAAGEVGVNYGTVANDLPNPASVVQLLKQNGITMVKIYDANANALTSLANTGIKAMVMMPNANLARAASDPTYAAQWVQDNVMPYYPATQINAVAVGNEVFDDPSVDKMDLVPAMTNVQAGLAGLGVAGDIKVSSPIKFDALQVSWPPSSGRFRDDIAQPVMKPMLDLLQRTGSYLTINAYPFFSYYSDPRSISLDYALGNSNPGVSDDKANLRYDNLLDAQVDATHYAMEALGVSTVDAYVGESGWPTKGVVGGKIPPAARRLLGAAEGSARRLLDTGDDAGSPASIPNARAYNNNLINRMLSGRTGTPHRPNANMDVYIFALFNENDKGSNGADDVEQNFGLFYPNETKVYEFSFQGGGGPPGPSSDSWCVGNAAAGGKALQDALDYACGHGADCSAIQPTGSCYEPNTVLAHASYAFNSYYKKNNRAAGTCDFNGAASV

SEQ ID NO: 168066 - protein, 53 aa, Zea Mays
MDDACYVLTSRSRSVYRISYWGGHKMYSILYGKTLIKSGTCKEKKPRVLLTSS

SEQ ID NO: 168067 - protein, 591 aa, Zea Mays
MLTASPSSQVKPQQWGTCGVSVASTPALLPPPAAGRLVAVDTRRRTRTVASAALGPVATEPAERSPVPQPPPLSSDEETVLRLGNYVPVFVMLPLEVVTTENDLEDAGKLREQLRRLRGAGVDGVMVDVWWGAVEGAGPALYEWRAYRDLFRVVQGEGLKLQAIMSFHACGGNVGDDAVSIPLPRWVREVGEADPDVFYTSSSGARNQECLSIGVDDEPLFHGRTAIQLYADFMKSFRENMADFLDSGLIVDIEVGLGPAGELRYPSYPETQGWVFPGIGQFQYLEADFKAAAAEAGHPDWELPDDAGEINDTPEDTGFFAAERGTYLTEQGRFFLTWYSRKLIQHGDRVLDEANKAFLGCKVKLAAKVSGIHWWYRHPSHAAELTSGYYNLGGRDGYAPIARMLARHDGAVLNFTCAEMRNSEQAEEALSAPEQLVQQVLSAGWREGVEVACENALSRYDRRGYNQMLLNARPNGVGLSGAGAGAARRRVAAVTFLRLSDELLASNNFRIFRTFVRKMHADLDYCPDADRYGRPLKPLERSAPEMPMERLLEATAPAPAFPFDPETDMSVGGGLAEAVDWVLDKIAWLFG

SEQ ID NO: 168068 - protein, 423 aa, Zea Mays
MRQRSRTWSHESRQPSPGVVRTQLASGYPTASYEFRPEKRLRELREDPQSMVKQLLTKCAEALSEERIEEFLNLVQQARGVVSITGEPIQRLGAYLLEGLVARHANSGTNIYRALKCREPESNELLSYMKILYNICPYLKFGYMAANGAIAEALRNEDRIHIIDFQIAQGTQWITLIQALAARPGGPPHVRITGIDDPVSEYARGEGLDLVGKMLKSMSEEFRIPLEFTPLPGIYATQVTKEMLDIRSGEALAVNFTLQLHHTPDESVDVNNPRDGLLRMVKGLSPKVTTLVEQESHTNTTPFLMRFTETLDYYSAMFESIDTNLPRDNKERINVEQHCLAKDIVNIIACEGKDRVERHELLGKWRSRLTMAGFRPYPLSSYVNSVIRKLLACYSDKYTLEEKDGAMLLGWKNRKLISASAWH

SEQ ID NO: 168069 - protein, 388 aa, Zea Mays
MSKKKAVTTMTLKDFHGGSIPSELPLPSAPGVTPRPADRTVASASPVAAAVARPRVPVASPAAAAAAAAMPSFLTNPSRIGRHFDEDERTPFEPTTPRRPAPSPTSFAPAPVVAPTRSGPGNAWGPKKEASSAPSPVGHAPASAGDQIWSATRIAQASAVEKVISGRWHPPKPTSPPAPVSVPVLETPVAPPEIERPRSVGVRELDSGVERGAAPVRPASHEGRIGEGRAGEVPERPKLKLLPRSKPIEDPEQRPTYVEAKQVHQVQVTAGLMKAEDNHDLHQNARATETGVLGADAESRVAERPRLNLKPRSYVTGQSDEIAVKESFMTLNASVTQFSMLAALLWSLEPYMFKDKNNTNYALQVTNHTWKSFSEVYGANNLIFHSIN

SEQ ID NO: 168070 - protein, 488 aa, Zea Mays
MSKKKAVTTMTLKDFHGGSIPSELPLPSAPGVTPRPADRTVASASPVAAAVARPRVPVASPAAAAAAAAMPSFLTNPSRIGRHFDEDERTPFEPTTPRRPAPSPTSFAPAPVVAPTRSGPGNAWGPKKEASSAPSPVGHAPASAGDQIWSATRIAQASAVEKVISGRWHPPKPTSPPAPVSVPVLETPVAPPEIERPRSVGVRELDSGVERGAAPVRPASHEGRIGEGRAGEVPERPKLKLLPRSKPIEDPEQRPTYVEAKQVHQVQVTAGLMKAEDNHDLHQNARATETGVLGADAESRVAERPRLNLKPRSYVTGQSDEIAVKESFMTLNASVTQFSMLAALLWSLEPYMFKDKNNTNYALQGHLSLVVLAPGNKFSKNVEWMFWPVISRRLHQLAGLKANLQRLSRRLKLCPLTLLLKDMRVLQLVIEAQGMVIRKIISGILTGLMHIGLLVERTTGGLLEIWRSHRSNHAQSLRPGVSRWSLQS

SEQ ID NO: 168071 - protein, 330 aa, Zea Mays
MSKKKAVTTMTLKDFHGGSIPSELPLPSAPGVTPRPADRTVASASPVAAAVARPRVPVASPAAAAAAAAMPSFLTNPSRIGRHFDEDERTPFEPTTPRRPAPSPTSFAPAPVVAPTRSGPGNAWGPKKEASSAPSPVGHAPASAGDQIWSATRIAQASAVEKVISGRWHPPKPTSPPAPVSVPVLETPVAPPEIERPRSVGVRELDSGVERGAAPVRPASHEGRIGEGRAGEVPERPKLKLLPRSKPIEDPEQRPTYVEAKQVHQVQVTAGLMKAEDNHDLHQNARATETGVLGADAESRVAERPRLNLKPRSYVTGQSDEIAVKERYVL

SEQ ID NO: 168072 - protein, 200 aa, Zea Mays
MPSLFGGARPREQVLKERGVDVLASDLEKTSPVGRPKGEFAKVEQKVEAMSINPSVERHESFAAGHRGPRNGDKKDHKWNTDRADAYRLTRREDNRRVARDMEKPQEQPRPEPETWRKPVEPPKLEVATPRFGKAATALELAQAFSTSMSDTAPQSRLTSAPSPRVPPSPGASRDQSGFSRLTDSRTLHSGPSQRKINGY

SEQ ID NO: 168073 - protein, 151 aa, Zea Mays
MSINPSVERHESFAAGHRGPRNGDKKDHKWNTDRADAYRLTRREDNRRVARDMEKPQEQPRPEPETWRKPVEPPKLEVATPRFGKAATALELAQAFSTSMSDTAPQSRLTSAPSPRVPPSPGASRDQSGFSRLTDSRTLHSGPSQRKINGY

SEQ ID NO: 168074 - protein, 679 aa, Zea Mays
MPRRRRTRSSEELKAEDFVDSVLNFGGEEDGEEEKQEAGGDGQPAAEFKSKNLEAERKRRGKLNRNILALRAVVPNITKMSKESTLSDAIDLIKRLQNQVLELQRQLADPPGEAWEKQGSASCSESFTATENMPYQGQIELVPLGPCKYHLRIFCKKAGVFTKVLEALCSYNAQVTSLNTITFYGYAESVFTIEVKGEQDVVMVELRSLLSNIVEGRHADGAWTALVMDRAELTTEQVLKRDIPWEHYMSTKLISGTCLQLLRRYDHKPESQRAPLLEEDGPAYVRVFLNILWSISKEETVEYVLALIDEMLATNPKRAALFYDQSLSGEDIYEPFLRLLWKGNWFVQEKSCKILTAIISARPKLRNGTLPNGDASNSKSKLTSTHDVLRGLVNWLCSQLRNPTHPSCSIPTSIHCLSTSLREPYVRTLFVQADGIKLLIPLISPAATQQSIQLLYETCLCIWLLSFYDAAVDYLSTTRVMPRLVEVVKGSTKEKVVRVAVLSFCNLLAKGAFAAQMIDLGLPQIVQNLKAQAWTDEDLLDALNQLEVGLKENLKKLSSFDKYKQQVLLGHLDWSPMHKDPSFWRENINNFEENDFQILRVLMTIIDTSSDTTALAVACYDLSQFLQYHPSGRIVVADLKAKDRVMKLMNHENTEVQKNALLCVQRLFLGAKYASFLRA

SEQ ID NO: 168075 - protein, 402 aa, Zea Mays
MDRAELTTEQVLKRDIPWEHYMSTKLISGTCLQLLRRYDHKPESQRAPLLEEVLLYFDYSARPKLRNGTLPNGDASNSKSKLTSTHDVLRGLVNWLCSQLRNPTHPSCSIPTSIHCLSTSLREPYVRTLFVQADGIKLLIPLISPAATQQSIQLLYETCLCIWLLSFYDAAVDYLSTTRVMPRLVEVVKGSTKEKVVRVAVLSFCNLLAKGAFAAQMIDLGLPQIVQNLKAQAWTDEDLLDALNQLEVGLKENLKKLSSFDKYKQQVLLGHLDWSPMHKDPSFWRENINNFEENDFQILRVLMTIIDTSSDTTALAVACYDLSQFLQYHPSGRIVVADLKAKDRVMKLMNHENTEVQKNALLCVQRLFLGDLDPENSWPFLKMAVKKTLKILVHYILLLFDF

SEQ ID NO: 168076 - protein, 471 aa, Zea Mays
MQRKKEVLKRDIPWEHYMSTKLISGTCLQLLRRYDHKPESQRAPLLEEDGPAYVRVFLNILWSISKEETVEYVLALIDEMLATNPKRAALFYDQSLSGEDIYEPFLRLLWKGNWFVQEKSCKILTAIISARPKLRNGTLPNGDASNSKSKLTSTHDVLRGLVNWLCSQLRNPTHPSCSIPTSIHCLSTSLREPYVRTLFVQADGIKLLIPLISPAATQQSIQLLYETCLCIWLLSFYDAAVDYLSTTRVMPRLVEVVKGSTKEKVVRVAVLSFCNLLAKGAFAAQMIDLGLPQIVQNLKAQAWTDEDLLDALNQLEVGLKENLKKLSSFDKYKQQVLLGHLDWSPMHKDPSFWRENINNFEENDFQILRVLMTIIDTSSDTTALAVACYDLSQFLQYHPSGRIVVADLKAKDRVMKLMNHENTEVQKNALLCVQRLFLGDLDPENSWPFLKMAVKKTLKILVHYILLLFDF

SEQ ID NO: 168077 - protein, 101 aa, Zea Mays
MLPLVTNICFAGLNKRTTSEGLKEAFSKFGQVIEARVITDRISGYSRGFGFVKYATVQEAGEAIKGMDGKFLDSWVIFAETPHNHHNKEHQLMIEVAIHGR

SEQ ID NO: 168078 - protein, 1643 aa, Zea Mays
MNGLPQFPARTSSAPPNLDEQKRNQVLVEELKVTPTPVQPTPKQQLLQQHPHPLQKQQHQLPQLSHQPQQPQQQSTRKETVGSSQPNSINPHTTSQLKRDVHPSPSVPNVTSVRPTVQQMPGVQMPIPFHHQPAQVSLQFGGHGAQLQPQVVPSSFQMSMGLTGSSTPQVPQQLYAPTLQHHQLQQQAMMHPGQGMGYVPSVAHQFPQLGSIPMNIASQYPQQQPNKPAAARKAIVKITHPDTHEELKLDKRMDSSGQRAAPSIAQQSQPGVNYAPHLGFFHQPPNSYNQSGMYYSTTASVNQVATGSSGPRYNYPVTQSAQAMTYISPSAAPPVSGQSQYTVKPHPMGLLSEKSGTHVTISAPPAKSDPPKLHAAGDAASSLKKDNEVVSGITVLNKPTLERESNDPLVTVKHSTVISPSLPIHGEKPQTLVTSSPVANSVSPVTGADGKSKEPIQRSGSFKDSKKNVTKKDVRNSYEPPNPTSFVEDKVQTVKVGDGDLQETKKLNNELDLTNSSSAPTVPLAVSTENADSTAVTTADVPGTDTSSRRPSSEGTGEPGVESFTVSAVECDESKRTHKVVKDPSKDNISSDATKHELPKECAVDSTEQASAVTSNTDDSYAAPLVTNQEQLLKGSASEKQAVMNNSSMNSDTSAHFFDGNDVGVTTSGTSEPTAQTSNDEGDSDISPETDLAVYNVPLGSSELQLKSESRANDQQPAAPTVSVRPVSREKPSTKSTAGKKKKKKEMLAKADAAGSSDLYNAYKGPEEKSEVVGTVEGADNSSTVDTTHVLSDELEKDPSTSADDCKKKVELDDWEDAADMSTPKQPSDSGNQASITQVLDSDVTEANSRKKYSRDFLLTLQHHYTGLPFGFQMNEAVNAIMNNLAGKSYVADREPHPSPGRGLDRPTSRDRRGAAMADDRWTRAGVPLSPGRDVHMDLPNGPSVINYRGGPGGNHGVLRNPRSQSSNQYGGGLLAGPMQSVGPQVPRSGSDADRWQQKGLMPSPGTPVQAMHKAERKYVIGKVSDEEEAKQRQLKAILNKLTPQNFEKLFEQVKEVNIDSVATLTGVISQIFDKALMEPTFCEMYANFCFHLAGALPDFSEDNEKITFKRLLLNKCQEEFERGEREEAEADKTEEEGEIKQTKEEREEKRIRARRRMLGNIRLIGELYKKRMLTERIMHECIKKLFGNHDDPDEENIEALCKLMSTIGDMIDHVKAKEHMDAYFSMMQIMSTNQKLSSRVRFMLRDSIDLRRNKWQQRRKVEGPKKIEEVHRDAAQERHAQSSRLGRGPAVSSVPRRAHPMDYGPRGPSASASSSSQQGSIRGMPPHSRGSQDIRHDERHQFDNRTVLPQRVVKDEAITLGPQGGLARGMSIRGQPPVSNTEIPSVIDHRRIVSSSNGYNSAADWTSSSGREDSNSRLPDRTSGRIPASSQSAVTSQRPASQEGRSRSKSYSEDELREKSVLTIREYYSAKDEKEVVLCIEELNAPNFYPFLVSLWVNDSFERKDMERELLAKLLVSLCSGRHNLLSKQQLSDGLSNVLASLEDNLSDAPRATEYLGRLLARFVEESILLLQEVGKLIQESGEEPGYLIQGGIAADILGAVLDSIKSDKGNSFLDEIKTTSSLKLVDFRPQHLKRSKLDAFM

SEQ ID NO: 168079 - protein, 504 aa, Zea Mays
MPPRRGRGKGKGRAKPRAKPTEPEPESDPELDEAAKSEIEAGDAEAGEESSAESEDSKEDESESDTESMDAEASEEAGENGTEEMDAEPEAKAVEAKAETVATEAEAKPDASDEEAGETGSDREADGKGADPKAKAEESDGEDEEGATAVTDGDSEEEAAETGGESEEDGGDSDTEGDAEESPPSPPRRSRRRKRAATPDDEAEETPTPSRRRRRRKSGERGDSPPPLPDHLRCRRSDGKKWRCSGRALPTVSFCEYHYARANKGKKLPADEEVLAVVLQRQKNKRKGRRSINPPTSPQAATSDPQTRDLPNGLMTISPGSSGPAALSTPVKIGVEIPAPIQRCYRSKNAEPLPVGPVKVVPRAMSVTKTARTCHCCGMKKAARVANCKNCDKNFCNSCINKWYSKLSRKDIKARCPACRGLCNCKPCSLGNSKGSTPKEPPKVERKILSIKISNHQFYKLLPVRLDQEQLDELELEAKIQGTKISNVCVQVAETGQIITVSSR

SEQ ID NO: 168080 - protein, 266 aa, Zea Mays
MQNKLLPSLLTTTTTYKIHVINKAPPRHALQPQPSCIGSSQERIPPAADRQAEREAKEGGGGGAARRRGGGGRGTARAGGALELQRVHGKRHVLLVRAAPRRRAAAAGLRRARGVEHGAQHGGDGGDVGRLVLGQQPREAHQLAVPPQHPPRAVAAGAGDLAAHVPLQLHKLVGASATEEAAGHASRGLGLLINPRLSKLQVVANQLKAFIIEKDTAHCGCPPARMVCPHKCVFKLSRNGPIRWLPGGGIALSQGCFQRERQSSRK

SEQ ID NO: 168081 - protein, 523 aa, Zea Mays
MVVVAVGGGGGGGGWGTWEELVLGGAVLRHGSAAWATVADELRTRSPCTFSPEECEAKFAEIQLRYSACNAWYEELRKQRVAELKRELEKSENSIGSLQSVIQSLSNSKHVDGSSECRTSHTESCPHSENTADTNSSGKETSRDRSSAASFTEEASNSQKSQKVQQCDTDSIQVINPSPDESYPQAQVEKVGPKDGLLWGSRKQRVMRARRTLLKAGDSSGDGEPTSTACIQGEGLSKGCMKNFKTQNLESVVVKKGVKTPKVESDVMNKDLKTLNVGSGIMKKGLKAPKTESDMMKKGVRTSKAESDGMKKGMKIPKVEPDVMDWKTPKAGSDVTKKGLRSPKAECCQPVIESVKLKLAEILNTISTQDDCKMLQHQLDTQRKRARYKKMIRRHMDFRMLHSKIKSGAISGTKELLRDILIFINNVITFYPKTTLEHMAAVELRDFTLGMQGQARFLQGMLLPRKGMARDLAVMSWLIKRLQREMSQPRRGVWVGLQRVGRGLLGHRKIAPSKAGKVALGHR

SEQ ID NO: 168082 - protein, 374 aa, Zea Mays
MKLRLHLLVLCVIIIFLVYNMASFQHKQTSSEAKSHPFDTVTVSDRDAVKLPQKAEVRIGYLPHGIVESNSDMKLKPLWLTTSAQSKKSKQKDHFLIAIAAGINQKKSVDAIMKKFLPENFTAVLFHYDGNVNGWNDLPWSKSVIHIAASNQTKWWFAKRFLHPAVVSMYQYIFLWDEDLEVDNFNPRRYLNIVRSEGLEISQPGLDSKLSEIHHRITVRKNTGTFHRRVSRANKRCLREGPPCSGWVEGMAPVFSKYAWQCVWHLIQGDRTKNIGVVDSEFIVHRGVQTLGGSTITKDGIRGKNAQSLRQKAAQVQKSRGRDPGLDMRTKIRRKSRSELRDFQKRWARAAREDRTWVDPFAHSRRKRRNRNPQ

SEQ ID NO: 168083 - protein, 156 aa, Zea Mays
MKLKPLWLTTSAQSKKSKQKDHFLIAIAAGINQKKSVDAIMKKFLPENFTAVLFHYDGNVNGWNDLPWSKSVIHIAASNQTKWWFAKRFLHPAVVSMYQYIFLWDEDLEVDNFNPRRYLNIVRSEGLEISQPGLDSKLSEIHHRITVRKNTGTFHR

SEQ ID NO: 168084 - protein, 374 aa, Zea Mays
MCYKAYGSGKEDSPLCDVPGFENTRMKLLRHVSFVDCPGHDILMATMLNGAAIMDGALLLIAANESCPQPQTSEHLAAVEIMRLQHIIILQNKIDLIQESAAMNQHEAIQKFIQGTIAEGAPVVPISAQLKYNIDVICEYIVKKIPIPERNFTSPPNMIVIRSFDVNKPGSEVDEIRGGVAGGSILRGVLRVNQKIEVRPGIVMKDENGNIKCTPIYSRIVSLYAEQNELQFAVPGGLIGVGTTMDPTLTRADRLVGQVLGEVGSLPDVYVELEINFFLLRRLLGVRTKGTEKAGKVSKLTKGEILMLNIGSMSTGARVLAVKNDLAKLQLTAPVCTSRGEKVALSRRVEKHWRLIGWGQIQAGTTLEVPPCPL

SEQ ID NO: 168085 - protein, 353 aa, Zea Mays
MAASGSGGNEPSGRPWTATSTWTPGPAGGAVADAVSFETSDDDAEASPAGVVLCHPSADSDRDMTPCPCEVTVSFRGKYEIHRVYVRSTARIYELYHSPDAKGTSKDYLCTVRCGLAVKETQCCGEESMSQWTGSALNSDKREHEAKSVSSASDEDSWVDVKIPESPAGNKTPESQERSVIRTCRENTLPHYEATAEMTDVNPCVSLTVRLLSLQSKTSVHIEEIYIFADPVEPTDDVSVRGPVNMGGSSLLAMLVPGLMQMSKSRNLKIDDSYFSDGSRNQESSKCESFTQEAGPCSTNDSKHTSAGIENGMNSTVGVSASDDKSSQVLSIAGESKVTTYQTRLYWYHFSLK

SEQ ID NO: 168086 - protein, 353 aa, Zea Mays
MSMLLIQKQPLPLSVRPRTTLRQCRLPTTRFSAAAADSASRAAPFAVEDYLVAACHLTPAQALKASKVLSHLKSPSRPDAVLAFLSGLGLSDADIAAAVAYDPKLLCSEVERTLAPRLAELRDLGLSPSQIARLALVDPARFRRPTVVSKLQYYVPLFGSFENLLQALRNNAYLLSSDLERVVKPNVAFLVECGLDACDIAKLSIPVPRLITTNPERVRAMVERAEAVGVPRGTGMFRHALLAVAFLSEEKIKAKAEFLKTTFRWSDAEVGVAVSKLPLVLKHSKDRLRRMSEFLITKDRSYYTAVQMSESAFMDKFICPYKEAAPSLALDYAAACRGEGKTGSHFEPKTIQK

SEQ ID NO: 168087 - protein, 515 aa, Zea Mays
MSMLLIQKQPLPLSVRPRTTLRQCRLPTTRFSAAAADSASRAAPFAVEDYLVAACHLTPAQALKASKVLSHLKSPSRPDAVLAFLSGLGLSDADIAAAVAYDPKLLCSEVERTLAPRLAELRDLGLSPSQIARLALVDPARFRRPTVVSKLQYYVPLFGSFENLLQALRNNAYLLSSDLERVVKPNVAFLVECGLDACDIAKLSIPVPRLITTNPERVRAMVERAEAVGVPRGTGMFRHALLAVAFLSEEKIKAKAEFLKTTFRWSDAEVGVAVSKLPLVLKHSKDRLRRMSEFLITKVGLEPEYIAHRPALLTYSLERRLMPRHYVVNYLKENGLLEQDRSYYTAVQMSESAFMDKFICPYKEAAPSLALDYAAACRGEVDASYDHSHLLGFYSPFLPCRGKLEAILNQRRFRNKTVWEINPLWTSQKHLLSESFVLDYLKVGQTCYLQQGSFGEILKANWRGTPIAVKRILPSLSDDRLVMRRPMQKVFTLKTPQLVHTVVYFQLFCFCYWFV

SEQ ID NO: 168088 - protein, 360 aa, Zea Mays
MSMLLIQKQPLPLSVRPRTTLRQCRLPTTRFSAAAADSASRAAPFAVEDYLVAACHLTPAQALKASKVLSHLKSPSRPDAVLAFLSGLGLSDADIAAAVAYDPKLLCSEVERTLAPRLAELRDLGLSPSQIARLALVDPARFRRPTVVSKLQYYVPLFGSFENLLQALRNNAYLLSSDLERVVKPNVAFLVECGLDACDIAKLSIPVPRLITTNPERVRAMVERAEAVGVPRGTGMFRHALLAVAFLSEEKIKAKAEFLKTTFRWSDAEVGVAVSKLPLVLKHSKDRLRRMSEFLITKENGLLEQDRSYYTAVQMSESAFMDKFICPYKEAAPSLALDYAAACRGEGKTGSHFEPKTIQK

SEQ ID NO: 168089 - protein, 417 aa, Zea Mays
MISFTKWTTVEVVLQIPPAFPVCTYNLTPIDQLQPRMDYKEYFTDVLGVVSVISQVSSVRTRGRQAEVMKRTVTISNARDTGPTVDVVLWGERATAFPAEQVHRDSGSSPQIIIFVGTLVRSYADNVSLSGGSSCKWYINESVPEVNALRASAETNHHPVIWDQGKAAAESTVIAVPEHKKLKDIKYLHPFENKKKEWLVIVKVLKIDSSWWYNACKKCLRTTKPHGDTYKCTNISCDNIGSPTPRMAYASFCKCACFADIAERKVVEANYGKSFHCALSPSTATLLALTYFFLPANSAPGQGSGLTQNKGAAFIREPSLTPESHKVSSSAKCNLQTATHQGANLLLGTEIIASPPNVQTPSGAAYSVLDGSTNKTHKSVTGKRSRTSPSKKVVKKLFRDDGTGDDDAAGSADVDAE

SEQ ID NO: 168090 - protein, 522 aa, Zea Mays
MCRIGWTGTPEFMAPEVYEEEYNELVDIYSFGMCVLEMVTFEYPYSECTHPVQIYKKVISGTKPESLYKVKDPMVRHFVEKCLATASQRLSARELLEDPFLQSDDVVASLDGGNYHVPANYIPQPSYLGHTYSNGSMMSNGFSESIDEDALSEDCEDDDMKGQDGIDLFNENEGELLGNVDITIKGRKSEDGGIFLRLRISDDDGRVRNIYFPFDVEADTALSVATEMVAELDITDHEVTRIADMIDGEVSALVPDWRPGPGIEEAPDTSYCHDCGSIVSSCGSLYAYMSSGRRGCQCAEVHGRFEEITFEADGEQCDLQESAGSSDDGGGPTEHYVKGKESTHVNGLLQMGRRDLSNQLCFSSFQEQSCSSNHYENETNHHTNGFDMKHEVKIAKYKARKMAQLKRAIHPSLDFDNANGVNRMKPSLNKLQSFHIGKNHSFRVPTGDRSPGKVSTDYHSNLNSQLSHSRHPDPGAQRAWHCEVNAAGSSDCMFTARRYYAGAQLPPNLPRTKSVPLHAVDV

SEQ ID NO: 168091 - protein, 481 aa, Zea Mays
MIGAKANAAGPCPEYAEVDPTGRYGRFSDVLGKGASKIVYRAFDEYQGMEVAWNQVKLHDFLQSPEDLERLYCEIHLLKTLKHRNIMKFYTSWVDVSRRNINFITEMFTSGTLRQYRQRHRRVNIWAVKHWCRQILSGLLYLHSHNPPIIHRDLKCDNIFVNGNQGEVKIGDLGLAAILRKSHAVHCVGTPEFMAPEVYEEEYNELVDIYSFGMCVLEMVTFEYPYSECTHPVQIYKKVISGTKPESLYKVKDPMVRHFVEKCLATASQRLSARELLEDPFLQSDDVVASLDGGNYHVPANYIPQPSYLGHTYSNGSMMSNGFSESIDEDALSEDCEDDDMKGQDGIDLFNENEGELLGNVDITIKGRKSEDGGIFLRLRISDDDGRVRNIYFPFDVEADTALSVATEMVAELDITDHEVTRIADMIDGEVSALVPDWRPGPGIEEAPDTSYCHDCGSIVSSCGSLYAYMSSGRRGICRQL

SEQ ID NO: 168092 - protein, 288 aa, Zea Mays
MAPEVYEEEYNELVDIYSFGMCVLEMVTFEYPYSECTHPVQIYKKVISGTKPESLYKVKDPMVRHFVEKCLATASQRLSARELLEDPFLQSDDVVASLDGGNYHVPANYIPQPSYLGHTYSNGSMMSNGFSESIDEDALSEDCEDDDMKGQDGIDLFNENEGELLGNVDITIKGRKSEDGGIFLRLRISDDDGRVRNIYFPFDVEADTALSVATEMVAELDITDHEVTRIADMIDGEVSALVPDWRPGPGIEEAPDTSYCHDCGSIVSSCGSLYAYMSSGRRGICRQL

SEQ ID NO: 168093 - protein, 87 aa, Zea Mays
MMAEITPCWTSFERCSMLSFNQQKRIQLDLALEAKPKFERILNQNSLVKTQVVIICWTFSSSWSQTHIIEGGGGLFLLTGQPSSTYF

SEQ ID NO: 168094 - protein, 108 aa, Zea Mays
MEMELDVAVVKRDDLGNAHGLNLDEFDDVEGQALKMSSTVPKSSNIFWHDCLVGKTDRQKLLNQKGCVVWITGLSGSGKQTLFSLELVCCVLLALLMQLLKNFKLKLR

SEQ ID NO: 168095 - protein, 61 aa, Zea Mays
MMASNHQVNYFSTVVMENLGQGSNFDLRSNGKNYLLSLRVPIHFVLYDCHLPFLSLLLLLL

SEQ ID NO: 168096 - protein, 282 aa, Zea Mays
MWSIQLVHVSTAVVEPYNSVLSTHSLLEHTDVAVLLDNEAIYDICRRSLDIERPTYTNLNRLISQIISSLTTSLRFDGAINVDVTEFQTNLVPYPRIHFMLSSYAPVISAEKAYHEQLSVPEITNAVFEPSSMMAKCDPRHGKYMACCLMYRGDVVPKDVNAAVATIKTKRTVQFVDWCPTGFKCGINYQPPSVVPGGDLAKVQRAVCMISNNTAVAEVFSRIDHKFDLMYAKRAFVHWYVGEGMEEGEFSEAREDLAALEKDYEEVGAEGADDEGDEGDDY

SEQ ID NO: 168097 - protein, 51 aa, Zea Mays
MGHAGAIVAGGKGTAQDKIKALREAGVTVVESPAKIGSTMFEIFKQRGMVE

SEQ ID NO: 168098 - protein, 208 aa, Zea Mays
MYFRDGLMVNMRDNDSSSDAQLDEPLGRVSILSYGSGHMLNDITSSCWFTYLLVFLTDLGLSPGDAAIVMLSGQLADGFTTIFVGELMDRFGHFKLWHAGGSILVAISFSSVFGSCVPCKLMGINTSTLETVGYSTFAAIFNVGWAVTQVAHMSMVNCITSNPTSRVSLVSCRNAFTMVANLSLYGVALVIFTLLQSVNVLVQYRWIA

SEQ ID NO: 168099 - protein, 449 aa, Zea Mays
MVNMRDNDSSSDAQLDEPLGRVSILSYGSGHMLNDITSSCWFTYLLVFLTDLGLSPGDAAIVMLSGQLADGFTTIFVGELMDRFGHFKLWHAGGSILVAISFSSVFGSCVPCKLMGINTSTLETVGYSTFAAIFNVGWAVTQVAHMSMVNCITSNPTSRVSLVSCRNAFTMVANLSLYGVALVIFTLLQSVNVLVQVSISLGSCFVVIFLIGTKEPGSIRHCLDKSPSRISWDYWFKRVLYYQVALVYTLTRLVTNVSQAFLAFYVINDLEMNQSSKALVPAIIYICSLIVSVILQETRWSSWRLKLYFSAGAVLWILSGLGIVLLPSRMHNLMYAISIVIGAANALMTVTSISMEGVLVGEDLNGCAFVYGSLSFVDKVSCGIALYVLESYQGSTKIRSNLGTTSGYSVTRLGLGLVPAACSLLSAIAAYTMELPDTQKGPLVEPLLA

SEQ ID NO: 168100 - protein, 178 aa, Zea Mays
MNQSSKALVPAIIYICSLIVSVILQETRWSSWRLKLYFSAGAVLWILSGLGIVLLPSRMHNLMYAISIVIGAANALMTVTSISMEGVLVGEDLNGCAFVYGSLSFVDKVSCGIALYVLESYQGSTKIRSNLGTTSGYSVTRLGLGLVPAACSLLSAIAAYTMELPDTQKGPLVEPLLA

SEQ ID NO: 168101 - protein, 452 aa, Zea Mays
MVNMRDNDSSSDAQLDEPLGRVSILSYGSGHMLNDITSSCWFTYLLVFLTDLGLSPGDAAIVMLSGQLADGFTTIFVGELMDRFGHFKLWHAGGSILVAISFSSVFGSCVPCKLMGINTSTLETVGYSTFAAIFNVGWAVTQVAHIITFMDIFYMLLRSMVNCITSNPTSRVSLVANLSLYGVALVIFTLLQSVNVLVQVSISLGSCFVVIFLIGTKEPGSIRHCLDKSPSRISWDYWFKRVLYYQVALVYTLTRLVTNVSQAFLAFYVINDLEMNQSSKALVPAIIYICSLIVSVILQETRWSSWRLKLYFSAGAVLWILSGLGIVLLPSRMHNLMYAISIVIGAANALMTVTSISMEGVLVGEDLNGCAFVYGSLSFVDKVSCGIALYVLESYQGSTKIRSNLGTTSGYSVTRLGLGLVPAACSLLSAIAAYTMELPDTQKGPLVEPLLA

SEQ ID NO: 168102 - protein, 251 aa, Zea Mays
MIKNTVATLMVRLHHLPLPRAAPAPTYRCGRHLALAPPLPRLRASAAVMSTAAEQTIADQKRTLRAEVRRALKALSADQRASEDLAIQTTILDSSWFKASKRLCAYISCQQLREVDTSKILAECLPSNPGQEELAKDLYVPRVEDKNRNMRMLKITTMDDLVKNSMNILEPSPVDATGNNREDVLSSLSPVDLFLLPGQAFDRTGRRLGRGGGYYDTFLLKYQELAKEKGWNQPLLVLRRCRGCNEVDWPL

SEQ ID NO: 168103 - protein, 73 aa, Zea Mays
MRRSCGGGCTRGVRGAPSLMCPSSRDRQPGEGMWSIFSADLRASASDFQFIIPVSADNLSIDRVAVRKMLHIK

SEQ ID NO: 168104 - protein, 292 aa, Zea Mays
MAELKRLSESRDLTRIERIGAHSHIRGLGLDSSMEARDASEGMVGQLPARRAAGLILQLIRQGKIAGRAVLLAGQPGTGKTALAMGIAKSLGAETPFASVAASELFSLDLSKTEALTQAFRRAIGVRIKEETEIIEGEVVEILIDRPLSASAAGGSSAAPTGATAAGKSGRLTLKTTDMETVYELGGKMIEALGKEKVQSGDVIALDKASGKVTKLGRSIGRSRDYDAVGPHTKFVKCPDGELQKRKEIVHCVTLHEIDVINSRLTQKSQSGERKEKLILSLVFCSSMKFTC

SEQ ID NO: 168105 - protein, 682 aa, Zea Mays
MDPSDSNSAAGGKTQNVSVPPVEGVAGGGTSYGWVDGGLRGTNIGAGVIDPTKVHSDDLLHVWSMPSTANVSQQEAPRPLEKVNLLAARNERESFQIALRPKVSWATSGIAGSVQIQCTDLCSSSGDRLVVGQSITLRRVVPILGVPDALVPIDPLSPQISIQPGETAAVWVSVNVPCGQPPGLYEGEIFITAVKTELEILSNLVTLALISGLYFFADLISGSSSRTESLPKSEKCRLYRELRSCLDLTGPRDYSSPEEMVQRLTSASTVLRRVLDNPALQDCQENNGFGDMMDEDVINNISVRLKLSLTVWDFTLPVTPSLPAVFGISETVIEDRFCLEHGTEGWYSALDHHFRWLLQYRISPFFCRWGDSMRILAYTCPWPADHPKANEYYSDPRLAAYAVPYAPILSCTDAAKNSLRREVEILKSKPHWSKAYFYLWDEPLNVEQYDMICNISNELRSYAPDVRILTTYYCGPSGSELAPSTFEAFAKVPNVLRPHTQIFCTSEWVLGTREDLVKDIVAELRPDLGEEWWTYVCMGPSDPQPNWHLGMRGTQHRAVMWRVWKEGGTGFLYWGSNCYEKAMIPSAEICFRRGLPPGDGVLFYPGEVFSSSHEPVASTRLERILSGMQDIEYLKLYSSRYGREEGLALIEKTGMYLGPDRYTLDHGPVDVMRGEVYRTCRS

SEQ ID NO: 168106 - protein, 658 aa, Zea Mays
MDPSDSNSAAGGKTQNVSVPPVEGVAGGGTSYGWVDGGLRGTNIGAGVIDPTKVHSDDLLHVWSMPSTANVSQQEAPRPLEKVNLLAARNERESFQIALRPKVSWATSGIAGSVQIQCTDLCSSSGDREDQHSHSSIPMVINVVPGVPDALVPIDPLSPQISIQPGETAAVWVSVNVPCGQPPGLYEGEIFITAVKTELDSRTESLPKSEKCRLYRELRSCLDLTGPRDYSSPEEMVQRLTSASTVLRRVLDNPALQDCQENNGFGDMMDEDVINNISVRLKLSLTVWDFTLPVTPSLPAVFGISETVIEDRFCLEHGTEGWYSALDHHFRWLLQYRISPFFCRWGDSMRILAYTCPWPADHPKANEYYSDPRLAAYAVPYAPILSCTDAAKNSLRREVEILKSKPHWSKAYFYLWDEPLNVEQYDMICNISNELRSYAPDVRILTTYYCGPSGSELAPSTFEAFAKVPNVLRPHTQIFCTSEWVLGTREDLVKDIVAELRPDLGEEWWTYVCMGPSDPQPNWHLGMRGTQHRAVMWRVWKEGGTGFLYWGSNCYEKAMIPSAEICFRRGLPPGDGVLFYPGEVFSSSHEPVASTRLERILSGMQDIEYLKLYSSRYGREEGLALIEKTGMYLGPDRYTLDHGPVDVMRGEVYRTCRS

SEQ ID NO: 168107 - protein, 551 aa, Zea Mays
MKGKVFKLLYAQRFHGQLQVLQGLCRYNAPISAPPQETGVPDALVPIDPLSPQISIQPGETAAVWVSVNVPCGQPPGLYEGEIFITAVKTELDSRTESLPKSEKCRLYRELRSCLDLTGPRDYSSPEEMVQRLTSASTVLRRVLDNPALQDCQENNGFGDMMDEDVINNISVRLKLSLTVWDFTLPVTPSLPAVFGISETVIEDRFCLEHGTEGWYSALDHHFRWLLQYRISPFFCRWGDSMRILAYTCPWPADHPKANEYYSDPRLAAYAVPYAPILSCTDAAKNSLRREVEILKSKPHWSKAYFYLWDEPLNVEQYDMICNISNELRSYAPDVRILTTYYCGPSGSELAPSTFEAFAKVPNVLRPHTQIFCTSEWVLGTREDLVKDIVAELRPDLGEEWWTYVCMGPSDPQPNWHLGMRGTQHRAVMWRVWKEGGTGFLYWGSNCYEKAMIPSAEICFRRGLPPGDGVLFYPGEVFSSSHEPVASTRLERILSGMQDIEYLKLYSSRYGREEGLALIEKTGMYLGPDRYTLDHGPVDVMRGEVYRTCRS

SEQ ID NO: 168108 - protein, 566 aa, Zea Mays
MKGKVFKLLYAQRFHGQLQVLQGLCRYNAPISAPPQETVVGQSITLRRVVPILGVPDALVPIDPLSPQISIQPGETAAVWVSVNVPCGQPPGLYEGEIFITAVKTELDSRTESLPKSEKCRLYRELRSCLDLTGPRDYSSPEEMVQRLTSASTVLRRVLDNPALQDCQENNGFGDMMDEDVINNISVRLKLSLTVWDFTLPVTPSLPAVFGISETVIEDRFCLEHGTEGWYSALDHHFRWLLQYRISPFFCRWGDSMRILAYTCPWPADHPKANEYYSDPRLAAYAVPYAPILSCTDAAKNSLRREVEILKSKPHWSKAYFYLWDEPLNVEQYDMICNISNELRSYAPDVRILTTYYCGPSGSELAPSTFEAFAKVPNVLRPHTQIFCTSEWVLGTREDLVKDIVAELRPDLGEEWWTYVCMGPSDPQPNWHLGMRGTQHRAVMWRVWKEGGTGFLYWGSNCYEKAMIPSAEICFRRGLPPGDGVLFYPGEVFSSSHEPVASTRLERILSGMQDIEYLKLYSSRYGREEGLALIEKTGMYLGPDRYTLDHGPVDVMRGEVYRTCRS

SEQ ID NO: 168109 - protein, 680 aa, Zea Mays
MDPSDSNSAAGGKTQNVSVPPVEGVAGGGTSYGWVDGGLRGTNIGAGVIDPTKVHSDDLLHVWSMPSTANVSQQEAPRPLEKVNLLAARNERESFQIALRPKVSWATSGIAGSVQIQCTDLCSSSGDRLVVGQSITLRRVVPILGVPDALVPIDPLSPQISIQPGETAAVWVSVNVPCGQPPGLYEGEIFITAVKTELDSRTESLPKSEKCRLYRELRSCLDLTGPRDYSSPEEMVQRLTSASTVLRRVLDNPALQDCQENNGFGDMMDEDVINNISVRLKLSLTVWDFTLPVTPSLPAVFGISETVIEDRFCLEHGTEGWYSALDHHFRWLLQYRISPFFCRWGDSMRILAYTCPWPADHPKANEYYSDPRLAAYAVPYAPILSCTDAAKNSLRREVEILKSKPHWSKAYFYLWDEPLNVEQYDMICNISNELRSYAPDVRILTTYYCGATCADLEHPVGVPGCPLSSRAAGPSGSELAPSTFEAFAKVPNVLRPHTQIFCTSEWVLGTREDLVKDIVAELRPDLGEEWWTYVCMGPSDPQPNWHLGMRGTQHRAVMWRVWKEGGTGFLYWGSNCYEKAMIPSAEICFRRGLPPGDGVLFYPGEVFSSSHEPVASTRLERILSGMQDIEYLKLYSSRYGREEGLALIEKTGMYLGPDRYTLDHGPVDVMRGEVYRTCRS

SEQ ID NO: 168110 - protein, 683 aa, Zea Mays
MDPSDSNSAAGGKTQNVSVPPVEGVAGGGTSYGWVDGGLRGTNIGAGVIDPTKVHSDDLLHVWSMPSTANVSQQEAPRPLEKVNLLAARNERESFQIALRPKVSWATSGIAGSVQIQCTDLCSSSGDREDQHSHSSIPMVINVVPGVPDALVPIDPLSPQISIQPGETAAVWVSVNVPCGQPPGLYEGEIFITAVKTELEILSNLVTLALISGLYFFADLISGSSSRTESLPKSEKCRLYRELRSCLDLTGPRDYSSPEEMVQRLTSASTVLRRVLDNPALQDCQENNGFGDMMDEDVINNISVRLKLSLTVWDFTLPVTPSLPAVFGISETVIEDRFCLEHGTEGWYSALDHHFRWLLQYRISPFFCRWGDSMRILAYTCPWPADHPKANEYYSDPRLAAYAVPYAPILSCTDAAKNSLRREVEILKSKPHWSKAYFYLWDEPLNVEQYDMICNISNELRSYAPDVRILTTYYCGPSGSELAPSTFEAFAKVPNVLRPHTQIFCTSEWVLGTREDLVKDIVAELRPDLGEEWWTYVCMGPSDPQPNWHLGMRGTQHRAVMWRVWKEGGTGFLYWGSNCYEKAMIPSAEICFRRGLPPGDGVLFYPGEVFSSSHEPVASTRLERILSGMQDIEYLKLYSSRYGREEGLALIEKTGMYLGPDRYTLDHGPVDVMRGEVYRTCRS

SEQ ID NO: 168111 - protein, 222 aa, Zea Mays
MEQYDGLFPSAYADSSSSLLMPNGSKAQGERPRARRRRRRAAWCGGGELDGGGDPKKRRLSDEQAEMLELSFREERKLETGRKVHLAAELGLDPKQVAVWFQNRRARHKSKLLEEEFAKLKQAHDATILHKCHLENELMRVKDRLVLAEEELARFRSVGSHAISGDGGDAMMGRAVCSGSPSSSFSTGTCQQPGDDDLLYFPDYAYADNSVVDEWFRMYGLM

SEQ ID NO: 168112 - protein, 448 aa, Zea Mays
MRNPSRRPAPPLPTSTGSPMGGSGSPSESMSPEGPFQLWSSLVGLPMLPEGGASSLGRRRVEEGLLGRRDALLLGIVFSAMTPALLAPAGALADEATAGWLVGVGEASGINSVTAFYPEQAAADSNGLYYLEYTLQNPGERRRHIVSAIGMAFNGWYNRLHCDGPATFEYNGRTFPYAFGDVLNGARKGATYSSVIHSEHDRKFPSRGGSGWAETIANEASAPNVADEDDPLYYSDAFYRAFLGAYRSSKNSKFTLTSVDGGTCDLHVFRLPLIAAHKLPAGWAPHACTSSAARGSASRGDTGEPKRPTSFPLRLLVCAASSVPPPHSLASPPSSRPFAAHARKPQSSSWYAPSVAVVSFPRAPHPQPAAISSITSPPARRRPASPLFIRISAFPTLLFLNPAKHRNRREPGAIKKDSLPAKVKNNHRIAAGKASLASPRAEGEAKDR

SEQ ID NO: 168113 - protein, 307 aa, Zea Mays
MDLSADAAPAGAPGAVRAGVRAGAGGPAPAPDARRAAAARIRLLAKHRVGRPRADRRVGRHPGRSCRCCGAPTPWRRRARPPRCSTSRSRTGTAPPSRRRAPSSRSSTRCAPARLPPSRTPRARCSASRASRTTAPPSGPAAPSRRSWRCSPRPPRAARRTRSPRSTASAPRAGTRSARSAPAPSCRSCISSAAAAAGRARRQWWSLGASRASTRAVKPWYRLAGSLRWLRPSRTALPGRRSSPWWRFCRCAPTPRVTVRFLYARAPSRLSLRYRSPALPVPSTRLRLCLATCGSRDKGLAAELEQW

SEQ ID NO: 168114 - protein, 75 aa, Zea Mays
MPSLRSSLGRLGWSPASPRSTSAVRWENPLMGWTSTGDPYANVGEAGLTFNSAESAKAFAEKHGWNYVVGLVFSL

SEQ ID NO: 168115 - protein, 148 aa, Zea Mays
MASPLRRSFPSLGRALLTPAPARMLSAEASDALVEIKPGEIGMVSGIPEEHLRRKVVIYSPARTASQQGSGKVGRWKINFLSTQKWENPLMGWTSTGDPYANVGEAGLTFNSAESAKAFAEKHGWNYVVRKRHTPLLKCSTNPHYYIF

SEQ ID NO: 168116 - protein, 318 aa, Zea Mays
MKGLFKTKPRTPVDIVRQTRECLVHLDLHSGSRSGDAKRDEKMTELSKNIRDMKSILYGNGESEPVTEACVQLTQEFFRENTLRLLIIHLPKLNLETRKDATQVVANLQRQQVSSKIVASEYLESNKDLLDILILGYENMDIALHYGAMLRECIRHQSIARYVLESEHMKKFFDYIQLPNFDIASDASATFKELLTRHKATVAEFLSNNYDWFFEEFNSRLLSSTNYITKRQAIKLLGDMLLDRSNVAVMMRYVSSKDNLMILMNLLRDSSKNIQIEAFHVFKLFAANKNKPPEVVNILVTNRNKLLRFFAGFKIDKV

SEQ ID NO: 168117 - protein, 671 aa, Zea Mays
MAYHREIKKCAASVNFLYYFDAYDLTPIMYFYPYILTVVKHAFRLYSLVADGNNKKICLFPFRRCTQVTQHFSLQIDLDTIEVSNLNRQFLFRQSHVGQSKAKVARDAVLKFRPNININPYHANVKDSHFNVDFFKQFNVVLNGLDNLDARRHVNRLCLAADVPLVESGTTGFLGQVTVHVKGKTECYECQPKPVPKSYPVCTITNTPSKFVHCIVWAKDLLFAKLFGDKKQDNDLNVHSKDDTSSKTDVFERSVDEDLEQYTQRIYDHVFGYNIEVALDNKETWKNRRKPNPIYIRDALPEDAVQQNGRSQDHVNEEQDPSAMVSLGLRNTQEIWSLADNSRVFLEALKLFFDKREKEIGSLIFDKDDQLAVEFVTAAANIRASSFGIPLHSLFEAKGVAGNIVHAVATTNAIIAGLIVIEAIKVLKGDYQDYRMTYCLEHPARKMLLMPVEPFEPSKSCYVCSETPLVLEVNTKTTKLREVIEKVIKGKLGMNLPLIMVGATLVFEDGEDLEEDEIANYALNLEKVLAELPAPVLNGTMVTVEDLHQELKCSINIKHRDEFDEEKEPDRMVLVGWSGPVDKQTTSNGETKSVPSSSNTEDVDGTAEDISATSGMKRKLNEILETKENFDALENLSGVDSSSAQVVEDDNDDGLLMFDEDPRQSKKKRLQ

SEQ ID NO: 168118 - protein, 412 aa, Zea Mays
MYFYPYILTVVKHAFRLYSLVADGNNKKICLFPFRRCTQVTQHFSLQIDLDTIEVSNLNRQFLFRQSHVGQSKAKVARDAVLKFRPNININPYHANVKDSHFNVDFFKQFNVVLNGLDNLDARRHVNRLCLAADVPLVESGTTGFLGQVTVHVKGKTECYECQPKPVPKSYPVCTITNTPSKFVHCIVWAKDLLFAKLFGDKKQDNDLNVHSKDDTSSKTDVFERSVDEDLEQYTQRIYDHVFGYNIEVALDNKETWKNRRKPNPIYIRDALPEDAVQQNGRSQDHVNEEQDPSAMVSLGLRNTQEIWSLADNSRVFLEALKLFFDKREKEIGSLIFDKDDQLAVEFVTAAANIRASSFGIPLHSLFEAKGVAGNIVHAVATTNAIIAGLIVIEAIKVLKGDYQDYRCLRLI

SEQ ID NO: 168119 - protein, 452 aa, Zea Mays
MYFYPYILTVVKHAFRLYSLVADGNNKKICLFPFRRCTQVTQHFSLQIDLDTIEVSNLNRQFLFRQSHVGQSKAKVARDAVLKFRPNININPYHANVKDSHFNVDFFKQFNVVLNGLDNLDARRHVNRLCLAADVPLVESGTTGFLGQVTVHVKGKTECYECQPKPVPKSYPVCTITNTPSKFVHCIVWAKDLLFAKLFGDKKQDNDLNVHSKDDTSSKTDVFERSVDEDLEQYTQRIYDHVFGYNIEVALDNKETWKNRRKPNPIYIRDALPEDAVQQNGRSQDHVNEEQDPSAMVSLGLRNTQEIWSLADNSRVFLEALKLFFDKREKEIGSLIFDKDDQLAVEFVTAAANIRASSFGIPLHSLFEAKGVAGNIVHAVATTNAIIAGLIVIEAIKVLKGDYQDYRMTYCLEHPARKMLLMPVEPFEPSKSCYVCSEAFVTFSLFFGTDMK

SEQ ID NO: 168120 - protein, 582 aa, Zea Mays
MYFYPYILTVVKHAFRLYSLVADGNNKKICLFPFRRCTQVTQHFSLQIDLDTIEVSNLNRQFLFRQSHVGQSKAKVARDAVLKFRPNININPYHANVKDSHFNVDFFKQFNVVLNGLDNLDARRHVNRLCLAADVPLVESGTTGFLGQVTVHVKGKTECYECQPKPVPKSYPVCTITNTPSKFVHCIVWAKDLLFAKLFGDKKQDNDLNVHSKDDTSSKTDVFERSVDEDLEQYTQRIYDHVFGYNIEVALDNKETWKNRRKPNPIYIRDALPEDAVQQNGRSQDHVNEEQDPSAMVSLGLRNTQEIWSLADNSRVFLEALKLFFDKREKEIGSLIFDKDDQLAVEFVTAAANIRASSFGIPLHSLFEAKGVAGNIVHAVATTNAIIAGLIVIEAIKVLKGDYQDYRMTYCLEHPARKMLLMPVEPFEPSKSCYVCSEVLAELPAPVLNGTMVTVEDLHQELKCSINIKHRDEFDEEKEPDRMVLVGWSGPVDKQTTSNGETKSVPSSSNTEDVDGTAEDISATSGMKRKLNEILETKENFDALENLSGVDSSSAQVVEDDNDDGLLMFDEDPRQSKKKRLQ

SEQ ID NO: 168121 - protein, 464 aa, Zea Mays
MYFYPYILTVVKHAFRLYSLVADGNNKKICLFPFRRCTQVTQHFSLQIDLDTIEVSNLNRQFLFRQSHVGQSKAKVARDAVLKFRPNININPYHANVKDSHFNVDFFKQFNVVLNGLDNLDARRHVNRLCLAADVPLVESGTTGFLGQVTVHVKGKTECYECQPKPVPKSYPVCTITNTPSKFVHCIVWAKDLLFAKLFGDKKQDNDLNVHSKDDTSSKTDVFERSVDEDLEQYTQRIYDHVFGYNIEVALDNKETWKNRRKPNPIYIRDALPEDAVQQNGRSQDHVNEEQDPSAMVSLGLRNTQEIWSLADNSRVFLEALKLFFDKREKEIGSLIFDKDDQLAVEFVTAAANIRASSFGIPLHSLFEAKGVAGNIVHAVATTNAIIAGLIVIEAIKVLKGDYQDYRMTYCLEHPARKMLLMPVEPFEPSKSCYVCSETPLVLEVNTKTTKLREVIEKVIKGLG

SEQ ID NO: 168122 - protein, 348 aa, Zea Mays
MVSLGLRNTQEIWSLADNSRVFLEALKLFFDKREKEIGSLIFDKDDQLAVEFVTAAANIRASSFGIPLHSLFEAKGVAGNIVHAVATTNAIIAGLIVIEAIKVLKGDYQDYRMTYCLEHPARKMLLMPVEPFEPSKSCYVCSETPLVLEVNTKTTKLREVIEKVIKGKLGMNLPLIMVGATLVFEDGEDLEEDEIANYALNLEKVLAELPAPVLNGTMVTVEDLHQELKCSINIKHRDEFDEEKEPDRMVLVGWSGPVDKQTTSNGETKSVPSSSNTEDVDGTAEDISATSGMKRKLNEILETKENFDALENLSGVDSSSAQVVEDDNDDGLLMFDEDPRQSKKKRLQ

SEQ ID NO: 168123 - protein, 434 aa, Zea Mays
MGKSKKSKARGGRDDLLDSSDADSVSSSSTALSDLSISYATEHVNSQEFVLDKYIDALYEKRGSTREAALGKLVDAFESFMLHGLVEDKYATLMSQLNNSVKRGSTKEVFLASHSIGLLAITLGVGSSSHEIMEESHPQLCRVLQAWSDASKMISALDCLAVITFVGASDLAETELSLKAMWDVIHPKSGSNVGTVRKPRPPVLAAAVSAWTFLLTTIGSWRINTNIWKEPIAFLSTLLEADDRAVRMAAGEALVLCFELNLLDVSSREDDGVNTGGTAGSKNKLFLDMQALKAKISGLATNLSAEAGGQGADKKKLTDQRDLFQRILDFVKYGDCPEESIKIAGKRDVLRVSSWSELIQLNFLKGFLGKGFLKHVQENGLLQDIFDIKVDKTETLSSTNKKIFRSEEEKGRALKLNKERRLAQVMLMQNALFM

SEQ ID NO: 168124 - protein, 138 aa, Zea Mays
MEAVRASAAWVASRSSHVTVDLQEIEKVVDQIQGDVPKVEWDYEGIHYFDNGPLTVQYLFVLDALNFCFWPDKDLSYDHLASGLKSALEKDKNALDSDRLQNYTGIFLLIGILLGLRVPSLAFSELLLLVQGNASQLL

SEQ ID NO: 168125 - protein, 215 aa, Zea Mays
MEAVRASAAWVASRSSHVTVDLQEIEKVVDQIQGDVPKVEWDYEGIHYFDNGPLTVQYLFVLDALNFCFWPDKDLSYDHLASGLKSALEKDKNALDSDRLQNYTGPQLRQLLNWPRPLPIEEERVRLLHEVGQELKRSFGGQAANLVKSAGNSAATLIELITRHFPGTYSESETGMAHPPTTTVCLHMDLCSACYFGSESQETVMIDELVPHLGI

SEQ ID NO: 168126 - protein, 255 aa, Zea Mays
MEAVRASAAWVASRSSHVTVDLQDKDLSYDHLASGLKSALEKDKNALDSDRLQNYTGPQLRQLLNWPRPLPIEEERVRLLHEELKRSFGGQAANLVKSAGNSAATLIELITRHFPGFRDHSLYKGHQVFLYKRAQIFVADLWGAFKGQNYGEFHDINSITIFADYIVPAVLRELGVLKYGSNLSCSIDSNSEIVPGSEEEVEIRACSIYAVEKMRDLISKKFGKQLLSIDIDLWLWSCGVQNMALSHHRTLSIYY

SEQ ID NO: 168127 - protein, 319 aa, Zea Mays
MEAVRASAAWVASRSSHVTVDLQEIEKVVDQIQGDVPKVEWDYEGIHYFDNGPLTVQYLFVLDALNFCFWPDKDLSYDHLASGLKSALEKDKNALDSDRLQNYTGPQLRQLLNWPRPLPIEEERVRLLHEVGQELKRSFGGQAANLVKSAGNSAATLIELITRHFPGFRDHSLYKGHQVFLYKRAQIFVADLWGAFKGQNYGEFHDINSITIFADYIVPAVLRELGVLKYGSNLSCSIDSNSEIVPGSEEEVEIRACSIYAVEKMRDLISKKFGKQVGASEPVSPDYLRLPFIRHANAVCFLTCILGGPIYKKKKKEIH

SEQ ID NO: 168128 - protein, 60 aa, Zea Mays
MDPPPLRQAVSQEADPAGALVQLAGRCRRLFVLTITVHVGVESFVSLGMHTGARYCRPVP

SEQ ID NO: 168129 - protein, 116 aa, Zea Mays
MAEDAPNAVAEGSQPAASEGSADAALPAAAGAKAAEALLPSLSIWPPSQRTRDAVVRRLVQTLAAPSVLSQRYGAVPEPEAERAAVAVEAEAFAAASKSAAAAAECPASVEEGIEE

SEQ ID NO: 168130 - protein, 135 aa, Zea Mays
MTMMASSTCASSASQVSIEKQLDVVMEMEGQGEEHAWEILLTESENSNFDLDDESLPSADGDELSKTEKTKRSTVGTRVSPSKCKVNRVKRAGCWKYFKVVNVASRKELGVMETKAKCKLCYRSYLYHQGGVLQH

SEQ ID NO: 168131 - protein, 439 aa, Zea Mays
MWGSVQIHPIQFIFFPQAYQGSLEAGVGFSIRMLQTGTFPDDESYNLVVGLLIRQNLVDSSLKYLDLMLKSGYTLSLTVFTDYIRACMRSGRLDTLTSIIEKCKTTDKNKVLCPEWTWCIDIADAAFEANNSKLALFALEYLARWIARGENVKPPVQLSVNEGLVISALSAAGRTYNTDLLNAAWSLLRKSLRQKRAPTPETYLAKIYAHSSIGQLQRAFGTLREFENAYGNSEDIDLELFSPFTSLHPLVVACCKDGFSTLDSVYGQLENLIHADPPYKSLAALNCVVLGCANIWDINRAYETFVAIKEKFDLTPDIHSYNALLCAFGKLKQTGEACNVFQHVLTLGVKPNATTYSLLVDAHLANKDPKAALAIIDEMVDAGFTPSKDTLRKVRRRCSRESDFDSDEKVQSLAKQFNYRMGGENRREMLYSIEYNPVY

SEQ ID NO: 168132 - protein, 407 aa, Zea Mays
MLQTGTFPDDESYNLVVGLLIRQNLVDSSLKYLDLMLKSGYTLSLTVFTDYIRACMRSGRLDTLTSIIEKCKTTDKNKVLCPEWTWCIDIADAAFEANNSKLALFALEYLARWIARGENVKPPVQLSVNEGLVISALSAAGRTYNTDLLNAAWSLLRKSLRQKRAPTPETYLAKIYAHSSIGQLQRAFGTLREFENAYGNSEDIDLELFSPFTSLHPLVVACCKDGFSTLDSVYGQLENLIHADPPYKSLAALNCVVLGCANIWDINRAYETFVAIKEKFDLTPDIHSYNALLCAFGKLKQTGEACNVFQHVLTLGVKPNATTYSLLVDAHLANKDPKAALAIIDEMVDAGFTPSKDTLRKVRRRCSRESDFDSDEKVQSLAKQFNYRMGGENRREMLYSIEYNPVY

SEQ ID NO: 168133 - protein, 513 aa, Zea Mays
MAAVAAATSHLLRHHRNPHLLLLRAAISSSRALPQQPELSPDPTAGTPDLAGAAPLPPNPSTGSPFYTQNWRNPAAANPPSSLLPTVVAGSPFGAQHFMAAFYDAPDVTGLKETFAKYMAEQRWEDMKHLFDHWVRSLDAATGKPNHPDVDLFNHYLRANLMTRALPHEMLDLADHMLEFELQPNAASYNLVLKSMVASQETEGAEKLIERMLQTGTFPDDESYNLVVGLLIRQNLVDSSLKYLDLMLKSGYTLSLTVFTDYIRACMRSGRLDTLTSIIEKCKTTDKNKVLCPEWTWCIDIADAAFEANNSKLALFALEYLARWIARGENVKPPVQLSVNEGLVISALSAAGRTYNTDLLNAAWSLLRKSLRQKRAPTPETYLAKIYAHSSIGQLQRAFGTLREFENAYGNSEDIDLELFSPFTSLHPLVVACCKDGFSTLDSVYGQLENLIHADPPYKSLAALNCVVLGCANIWDINRAYETFVAIKEKFDLTPDIHSYNALLCAFGKLKQR

SEQ ID NO: 168134 - protein, 127 aa, Zea Mays
MAGEGTFPDDESYNLVVGLLIRQNLVDSSLKYLDLMLKSGYTLSLTVFTDYIRACMRSGRLDTLTSIIEKCKTTDKNKVLCPEWTWCIDIADAAFEANNSKLALFALEYLARWIARGVWSVGESDTC

SEQ ID NO: 168135 - protein, 117 aa, Zea Mays
MEALLVTVLLLLLSSTLAAAQWCVCRQDASQAALQKTIDYACGSGADCNSIHETGACYNPNTVPAHCSWAANSYYQNNKAKGATCDFAGTATLTTSDPSSSGCSYPTTSARYVASLN

SEQ ID NO: 168136 - protein, 171 aa, Zea Mays
MTPNSKARFQCLLWCVVSVFCCFHALQSCDTVHFYHPFRVLPVVPYMTFVFQTFRLFGLLLPHHQCKRRGNRDPDHRRHNGRSGRPRDLDARRDRRRHSRHYRHGDCRHYGYRVRRPRTSRHGHSGGGGGGLAPPPRGWAVRCPRRAPPLRHRARVTPSHDLGNNNLLPAC

SEQ ID NO: 168137 - protein, 391 aa, Zea Mays
MAEPAPAPPVTAPLVGLLYDERMCAHATPNGEEHPENPERLRSIWRKLNAAGVASRCVALKAKEAEDKYIASVHSKRHIKLMKEISSTIYDASRNKIARKFNSIYLNKGSSESAVLAAGSVIEVAEKVAAGELSSAIALVRPPGHHAEHDEAMGFCLFNNVAVAANYLLNERPDLGIKKILIVDWDVHHGNGTQKMFYDDPRVLFFSVHRFDYGSFYPSEGDASHCFIGEEAGKGYNINVPWEHGKCGDADYIAAWDHVLLPVTKVFDPDIILVSAGFDAALGDPLGGCCITPNGYALLLTKLLGFAQGRIVMALEGGYNLRSIANSVCACAKVLLGDKFTFNTPEMQPFESTWRVIQAVRNELKTCWPVLSSKLPENVSLRIKPAPSECY

SEQ ID NO: 168138 - protein, 475 aa, Zea Mays
MAEPAPAPPVTAPLVGLLYDERMCAHATPNGEEHPENPERLRSIWRKLNAAGVASRCVALKAKEAEDKYIASVHSKRHIKLMKEISSTIYDASRNKIARKFNSIYLNKGSSESAVLAAGSVIEVAEKVAAGELSSAIALVRPPGHHAEHDEAMGFCLFNNVAVAANYLLNERPDLGIKKILIVDWDVHHGNGTQKMFYDDPRVLFFSVHRFDYGSFYPSEGDASHCFIGEEAGKGYNINVPWEHGKCGDADYIAAWDHVLLPVTKVFDPDIILVSAGFDAALGDPLGGCCITPNGYALLLTKLLGFAQGRIVMALEGGYNLRSIANSVCACAKVLLGDKFTFNTPEMQPFESTWRVIQAVRNELKTCWPVLSSKLPENVSLRIKPAPSELYASDSESDSEDVDELLGTVASVSVIEATGVAISEHLSKMKLDDDSLAVKTNSSCSAAEQHPVDSVKFWIKHVETKISMLYSRREG

SEQ ID NO: 168139 - protein, 270 aa, Zea Mays
MALEGGYNLRSIANSVCACAKVLLGDKFTFNTPEMQPFESTWRVIQAVRNELKTCWPVLSSKLPENVSLRIKPAPSELYASDSESDSEDVDELLGTVASVSVIEATGVAISEHLSKMKLDDDSLAVKTNSSCSAAEQHPVDSVKVHNNASVVLTKKISDLSLEWRSDLSKTDVWYASFGSNMWRPRFLCYIQGGKAEGMNIPCCGSRDTSSPKGTVWKTVPHRLLFGRSSTPCWGTGGVAFLNPEINYNEKSYVCMYKITSMTSCFRRIV

SEQ ID NO: 168140 - protein, 56 aa, Zea Mays
MTCPASDIERYKSGELRLAPPSETYAATLIKGLVEGKQMDADGAASYINAAAARAL

SEQ ID NO: 168141 - protein, 67 aa, Zea Mays
MKMAMMRRGECSNRCPELETCLRKPPRSRGSYENAQKDATVTPVQGECGDQLNFQATRPLRAELVPD

SEQ ID NO: 168142 - protein, 145 aa, Zea Mays
MQHDQKKKVTVFSLISWWSCLPPLPFRIEILVFRVLCQLLQLRAPSEMDFFTEYGEGSRYKIEEVIGKGSYGVVCSALDTHTGEKVAIKKINDIFEHVSDATRILREIKLLRLLRHPDIVEIKHILLPPSRREFRIFTLCLTYGV

SEQ ID NO: 168143 - protein, 135 aa, Zea Mays
MGTPSPEAISRIRNEKARRYLSNMRRKKPIPFTQKFPNADPLALGLLERMLAFEPKDRPSAEEALAHPYFKNIANVDREPSAQAVTKLEFEFERRRVTKDDIRELIYREILEYHPKMLKEFIEGTESSGFMYPSR

SEQ ID NO: 168144 - protein, 140 aa, Zea Mays
MGTPSPEAISRIRNEKARRYLSNMRRKKPIPFTQKFPNADPLALGLLERMLAFEPKDRPSAEEALAHPYFKNIANVDREPSAQAVTKLEFEFERRRVTKDDIRELIYREILEYHPKMLKEFIEGTESSGFMYPRCCCKAW

SEQ ID NO: 168145 - protein, 276 aa, Zea Mays
MGTPSPEAISRIRNEKARRYLSNMRRKKPIPFTQKFPNADPLALGLLERMLAFEPKDRPSAEEALAHPYFKNIANVDREPSAQAVTKLEFEFERRRVTKDDIRELIYREILEYHPKMLKEFIEGTESSGFMYPRPSVVYSDNQSQSTANITEDLSKCIIRENAQKSQQYNASVANKFPSHVPQGAAARPGKAVGSVLQYNLSQASAAEQYEQRRVARHPAVAPNNIPSGSSYPRRNQTCKSETGDTERMDVNQAGQPKSYAANKLPATVDGRGGHW

SEQ ID NO: 168146 - protein, 252 aa, Zea Mays
MRALLHLRLINPCSPRAPRLPATPARALVASFSGAWQAPSGRARARAAPPAVRAMASQQVFRAQQQQQQQFPAQQQESQPGKEHAMDPRPEAIVQDYKAANKLKDKVALVTGGDSGIGRAVCLCFAKEGATVAFTFVRGQEEKDAEETLRALRDVTEADLERVFRTNIFSYFLVSKHAVPRMEPGACIINTSSVNAYKGNKTLLDYTATKGAIVAAQPAEIAPSFVFLASNQDSSYMSGQILHVNGGVIVNS

SEQ ID NO: 168147 - protein, 524 aa, Zea Mays
MSLACHLELREQYTPTPPKGAPRGLLPTPAPRLALPAPPAEQTATPTVMADGHKRLSMQEQEERRRQGLCFNCNERYTRGHNHVCTRIFYINGVELDTADESATGDDPRHEDTGVLPSRRRRGIRRQYGTTAGGRRRRYFRRAHRHGLNTQLHRGSGCATLGANHRVAASTHGNGGQWGTRGLPGRSSPSSGRRGRHGIRRRSLRNALAGYDVVLGTHWMATLGPIVWDFTARTMAFQWEGCDVCWRGVAPPSASTLLAATADDTLIDGLLHAFADVFTEPIGLPPARGREHHIVLKLGSSPVAVRPYRYPAAHKDELERQCAAMIDQGIVRRSDSAFSSPVILVKKPDGSWRFCVDYRALNALTVKDAFSIPVVDELHGARLFTKLDLWSGYHQVRMRQEDVHKTAFRTHDGLYEFLVMPFGLCNAPATFQALMNDVLRTYLRRFVLVFFDNILYTTPHGWTTSGTSTSSSTPCQHRLFVKRSKCSFGVDSIAYLGHVISAVGVAMDPAKVQAIHDWPQPRSA

SEQ ID NO: 168148 - protein, 94 aa, Zea Mays
MKPVSVAEHNNHQPRLHSPTPASATKISIPISSSEAALFGKGRYKVWALAAIALLALWSMFAASVTLRLSSVDLATTFGDASDPLIDELDPLDD

SEQ ID NO: 168149 - protein, 75 aa, Zea Mays
MNFSLHWCKEMEQREKLVRRMWDVYTRTDNHLYLRLLACQSIGLRLSNRRIRIRRSEEQDRYLEGWNWYAEGEER

SEQ ID NO: 168150 - protein, 71 aa, Zea Mays
MEQREKLVRRMWDVYTRTDNHVRLPRFWQEAFEAAYEELAGDDTLTTDAAISEIARMSIHRPEVEQSSNKD

SEQ ID NO: 168151 - protein, 247 aa, Zea Mays
MADKQLSTIVLKVDLECETCYKKIRKVLRTIQDKMNIETISFDEKSNAVTISGPFDSDMVCNRLCCKAGRVIKEMDVKGNEKDAKAEKKEGKGDKEDTKSDRAEKGNKDGKAEAETVEFDLDVDGVASAADAKPGKAMAMPPGMTKADLGPLLEKMMAPGATQSVVVPSIWPASAGFVSGYYGCNPGYEAPPSYYGAGAGAVYGGYYGVPVYDSQGWYYGGGARQQPYYPHQQQHCCEDPNAGCSVM

SEQ ID NO: 168152 - protein, 265 aa, Zea Mays
MGGGEMAGWLKALAYSAGGVAVAGLAALVALQERLVYVPVLPGLARSYPITPARLGLIYEDVWLRAADGVRLHSWFIRHSPSYRGPTILFFQENAGNIAHRLEFVRLMMQRLQCNVFMLSYRGYGESDGYPSQKGITYDAQAALDHLAQRNDIDTTRIVIFGRSLGGAVGAVLAKNNPDKVATLILENTFTSILDMAGIMLPFLRWFIGGSSSKGPKLLNCVVRSPWNTLDIVGEVSFWWFELTFCVSVLCFDYHFLIILVAVEH

SEQ ID NO: 168153 - protein, 237 aa, Zea Mays
MGGGEMAGWLKALAYSAGGVAVAGLAALVALQERLVYVPVLPGLARSYPITPARLGLIYEDVWLRAADGVRLHSWFIRHSPSYRGPTILFFQENAGNIAHRLEFVRLMMQRLQCNVFMLSYRGYGESDGYPSQKGITYDAQAALDHLAQRNDIDTTRIVIFGRSLGGAVGAVLAKNNPDKVATLILENTFTSILDMAGIMLPFLRWFIGGSSSKGPKLLNCVVRSPWNTLDIVGEIC

SEQ ID NO: 168154 - protein, 978 aa, Zea Mays
MDDLEHVILLASDSPAAAAASPSIRAEALAFCARARDESPPSSLLRLCLSGIASSPHAQVHFWCLQSLHDALLRRRLVLPDDLALLRSSLLSLAVSSHAGSPPFLRNKLAQLVALLIRLEYPHVYPSYFIDLLPPAPPQPGPTDMFARVLISLDDDLLSQEYPRNSGEAADAMRVKDSMRAQCVSQIASHWHAAAVTLRTADPAAAAVALDAARRCISWIDVGLVANDVFVPLFFDIAMSPGSASPLAAAAVGCLSGVASKRMDSRAKVGLLRSLLAAQQGLGSPDNGLKMAPLVIAYAAEALECHSRLGPSDADGAAALEMLEEVLPAVFAAAESGNDEDVDSGSVLEFLSGYVSTMKAPSEKQLGHLGRILEVVRVQMSFDPVYRGHLDVLDKIGKEEEDLMAEQRKDLIVLFRSICRVAPAAAQLFISGLIVTALSSAEASVEDVEVALTLFFRLGEAVGEEEIRTGAGLIGQLVPMLLTARFSCHTHRLVALVYLETVTRYMKFMQEHVQYVPHLLGVFLDNRGIHHQNAHVSRRAGYLFMRAVKSLKAKLVPYLDTILQSLQDVLSQFTSMNWPNKDTKFPSSEDGSQIFEAVGLLIGIEEVSPEKQAQFLTALLNPLCHQVESLVMDAKARGLEESSPMAISLQQIIVALNMVSKGFNERLVMVNRPAIGIMFKKTLDVVLQVLVSFPSVRPLRSKVISFLHRMIEILGLSVLPCIPIALRLLLLDNEAKDMVEFLVLVNQIICKFKSSASAILEEIFPTIASRLSAILSQDAFSAGPASNTEEMRELQELQRTLYTFLHAMATHDLSAVLLTPSSREYLETIMQLLLFTSYKHRDILLRKACVQIFVNLVKDWCSNSEDKVPGFRVFMIEKFATNCCLYSVLDKSFDLRDANSLVLFGEIVLAQKIMYERFGGDFIVNFIAKGLSGVHCPPDLAEQYYQKLKGNDIKAFRSFYQSLVERIRPQGNGSLVFR

SEQ ID NO: 168155 - protein, 946 aa, Zea Mays
MDDLEHVILLASDSPAAAAASPSIRAEALAFCARARDESPPSSLLRLCLSGIASSPHAQVHFWCLQSLHDALLRRRLVLPDDLALLRSSLLSLAVSSHAGSPPFLRNKLAQLVALLIRLEYPHVYPSYFIDLLPPAPPQPGPTDMFARVLISLDDDLLSQEYPRNSGEAADAMRVKDSMRAQCVSQIASHWHAAAVTLRTADPAAAAVALDAARRCISWIDVGLVANDVFVPLFFDIAMSPGSASPLAAAAVGCLSGVASKRMDSRAKVGLLRSLLAAQQGLGSPDNGLKMAPLVIAYAAEALECHSRLGPSDADGAAALEMLEEVLPAVFAAAESGNDEDVDSGSVLEFLSGYVSTMKAPSEKQLGHLGRILEVVRVQMSFDPVYRGHLDVLDKIGKEEEDLMAEQRKDLIVLFRSICRVAPAAAQLFISGLIVTALSSAEASVEDVEVALTLFFRLGEAVGEEEIRTGAGLIGQLVPMLLTARFSCHTHRLVALVYLETVTRYMKFMQEHVQYVPHLLGVFLDNRGIHHQNAHVSRRAGYLFMRAVKSLKAKLVPYLDTILQAVGLLIGIEEVSPEKQAQFLTALLNPLCHQVESLVMDAKARGLEESSPMAISLQQIIVALNMVSKGFNERLVMVNRPAIGIMFKKTLDVVLQVLVSFPSVRPLRSKVISFLHRMIEILGLSVLPCIPIALRLLLLDNEAKDMVEFLVLVNQIICKFKSSASAILEEIFPTIASRLSAILSQDAFSAGPASNTEEMRELQELQRTLYTFLHAMATHDLSAVLLTPSSREYLETIMQLLLFTSYKHRDILLRKACVQIFVNLVKDWCSNSEDKVPGFRVFMIEKFATNCCLYSVLDKSFDLRDANSLVLFGEIVLAQKIMYERFGGDFIVNFIAKGLSGVHCPPDLAEQYYQKLKGNDIKAFRSFYQSLVERIRPQGNGSLVFR

SEQ ID NO: 168156 - protein, 946 aa, Zea Mays
MDDLEHVILLASDSPAAAAASPSIRAEALAFCARARDESPPSSLLRLCLSGIASSPHAQVHFWCLQSLHDALLRRRLVLPDDLALLRSSLLSLAVSSHAGSPPFLRNKLAQLVALLIRLEYPHVYPSYFIDLLPPAPPQPGPTDMFARVLISLDDDLLSQEYPRNSGEAADAMRVKDSMRAQCVSQIASHWHAAAVTLRTADPAAAAVALDAARRCISWIDVGLVANDVFVPLFFDIAMSPGSASPLAAAAVGCLSGVASKRMDSRAKVGLLRSLLAAQQGLGSPDNGLKMAPLVIAYAAEALECHSRLGPSDADGAAALEMLEEVLPAVFAAAESGNDEDVDSGSVLEFLSGYVSTMKAPSEKQLGHLGRILEVVRVQMSFDPVYRGHLDVLDKIGKEEEDLMAEQRKDLIVLFRSICRVAPAAAQLFISGLIVTALSSAEASVEDVEVALTLFFRLGEAVGEEEIRTGAGLIGQLVPMLLTARFSCHTHRLVALVYLETVTRYMKFMQEHVQYVPHLLGVFLDNRGIHHQNAHVSRRAGYLFMRAVKSLKAKLVPYLDTILQSLQDVLSQFTSMNWPNKDTKFPSSEDGSQIFEAVGLLIGIEEVSPEKQAQFLTALLNPLCHQVESLVMDAKARGLEESSPMAISLQQIIVALNMVSKGFNERLVMVNRPAIGIMFKKTLDVVLQVLVSFPSVRPLRSKAKDMVEFLVLVNQIICKFKSSASAILEEIFPTIASRLSAILSQDAFSAGPASNTEEMRELQELQRTLYTFLHAMATHDLSAVLLTPSSREYLETIMQLLLFTSYKHRDILLRKACVQIFVNLVKDWCSNSEDKVPGFRVFMIEKFATNCCLYSVLDKSFDLRDANSLVLFGEIVLAQKIMYERFGGDFIVNFIAKGLSGVHCPPDLAEQYYQKLKGNDIKAFRSFYQSLVERIRPQGNGSLVFR

SEQ ID NO: 168157 - protein, 334 aa, Zea Mays
MDAKARGLEESSPMAISLQQIIVALNMVSKGFNERLVMVNRPAIGIMFKKTLDVVLQVLVSFPSVRPLRSKAKDMVEFLVLVNQIICKFKSSASAILEEIFPTIASRLSAILSQDAFSAGPASNTEEMRELQELQRTLYTFLHAMATHDLSAVLLTPSSREYLETIMQLLLFTSYKHRDILLRKACVQIFVNLVKDWCSNSEDKVPGFRVFMIEKFATNCCLYSVLDKSFDLRDANSLVLFGEIVLAQKIMYERFGGDFIVNFIAKGLSGVHCPPDLAEQYYQKLKGNDIKAFRLVVPSMYIELPFLRSEDVLLRHYLYQVWQPWLCPYSLYSI

SEQ ID NO: 168158 - protein, 61 aa, Zea Mays
MDALGSLVDGELRCLRCRRGDGEGPRGHQNFSPMPLLRRGTTSAVVGEYQHPHHCVRSRVT

SEQ ID NO: 168159 - protein, 62 aa, Zea Mays
MDALGSLVDGELRCLRCRRGDGEGPRGHQNFSPMPLLRRGTTSAVVGEYQHPHHWSRTGTVG

SEQ ID NO: 168160 - protein, 639 aa, Zea Mays
MEDFARAVEDGLKLSKRLVLPGGVPPPRPPAGMERTMSSASASGPDPRLLPTAPMAYAVVTDPAAIDTPDVPSYQPYVYGHLDPPALIPLQMKEVDLAVDCALDAAHVTLRARWWLHCITRSRDCDVRLVVPLGEQEQGSILGAEVTVGRRSYNTQVIEVEETLENHAKIESGGLLKPHLFFLTISQVEGGADICATFRWSQKLLYDSGCFSVDIPFHFPYFVNPLPKVFMKREKVQLTANTGFSKEVFLQGTSHPLKVYSGDLSGGVFVQPSILCDYDDRDSFCIFLLPGSGNRKVFRKAVVFVVDTSGSMQGKPLENVKHAVSTALSELVQGDYFNIITFNDELHSFSSCLEQVNDKAIASATDWMNANLVAEGGTDIMHPLSEAMALLSSVHDTLPQIYLITDGSVDDEHNICQTTKTEVTNRGSKSPRISTFGLGSYCNHYFLRMLASVGKGHYNAALETASIENQIVKWFRRASSTIVENISIDAMTHLDEFEVDSEYIPDLSANSPLCVSGKYRGKFPDTVKAKGYLADMKEVLIELKVQQLKEVTLDKVLVTQHIDLMTAKAWLSAAKQLERKVIKLSIQNGVPSEYTDMVLLQTNLDNTGTQKVKQKLKGQKGRDEQQIPLHGLKLGFGNN

SEQ ID NO: 168161 - protein, 728 aa, Zea Mays
MEDFARAVEDGLKLSKRLVLPGGVPPPRPPAGMERTMSSASASGPDPRLLPTAPMAYAVVTDPAAIDTPDVPSYQPYVYGHLDPPALIPLQMKEVDLAVDCALDAAHVTLRARWWLHCITRSRDCDVRLVVPLGEQEQGSILGAEVTVGRRSYNTQVIEVEETLENHAKIESGGLLKPHLFFLTISQVEGGADICATFRWSQKLLYDSGCFSVDIPFHFPYFVNPLPKVFMKREKVQLTANTGFSKEVFLQGTSHPLKEKSRQGDKLFFLHEAIVENWSSKVFNFSYSVYSGDLSGGVFVQPSILCDYDDRDSFCIFLLPGSGNRKVFRKAVVFVVDTSGSMQGKPLENVKHAVSTALSELVQGDYFNIITFNDELHSFSSCLEQVNDKAIASATDWMNANLVAEGGTDIMHPLSEAMALLSSVHDTLPQIYLITDGSVDDEHNICQTTKTEVTNRGSKSPRISTFGLGSYCNHYFLRMLASVGKGHYNAALETASIENQIVKWFRRASSTIVENISIDAMTHLDEFEVDSEYIPDLSANSPLCVSGKYRGKFPDTVKAKGYLADMKEVLIELKVQQLKEVTLDKVLVTQHIDLMTAKAWLSAAKQLERKVGYLVIKLSIQNGVPSEYTDMVLLQTNLDNTGTQKDATRENLVTGFWDVNSAEKIVMLQKGPGCCSRVADCLCCMCCIRACNRMNDQCAILMAQVCAALACLGCYECCAEVCCGGSES

SEQ ID NO: 168162 - protein, 728 aa, Zea Mays
MEDFARAVEDGLKLSKRLVLPGGVPPPRPPAGMERTMSSASASGPDPRLLPTAPMAYAVVTDPAAIDTPDVPSYQPYVYGHLDPPALIPLQMKEVDLAVDCALDAAHVTLRARWWLHCITRSRDCDVRLVVPLGEQEQGSILGAEVTVGRRSYNTQVIEVEETLENHAKIESGGLLKPHLFFLTISQVEGGADICATFRWSQKLLYDSGCFSVDIPFHFPYFVNPLPKVFMKREKVQLTANTGFSKEVFLQGTSHPLKVYSGDLSGGVFVQPSILCDYDDRDSFCIFLLPGSGNRKVFRKAVVFVVDTSGSMQGKPLENVKHAVSTALSELVQGDYFNIITFNDELHSFSSCLEQVNDKAIASATDWMNANLVAEGGTDIMHPLSEAMALLSSVHDTLPQIYLITDGSVDDEHNICQTTKTEVTNRGSKSPRISTFGLGSYCNHYFLRMLASVGKGHYNAALETASIENQIVKWFRRASSTIVENISIDAMTHLDEFEVDSEYIPDLSANSPLCVSGKYRGKFPDTVKAKGYLADMKEVLIELKVQQLKEVTLDKVLVTQHIDLMTAKAWLSAAKQLERKVGYLVIKLSIQNGVPSEYTDMVLLQTNLDNTGTQKDATRENLVTGFWDVNSAEKIVMLQKGPGCCSRVADCLCCMCCIRACNRMNDQCAILMAQDMFVDIQDEKILKHFRGLRTRKINLPRNINSCYNLFFSQVVLFIGLQVRLVHEV

SEQ ID NO: 168163 - protein, 744 aa, Zea Mays
MEDFARAVEDGLKLSKRLVLPGGVPPPRPPAGMERTMSSASASGPDPRLLPTAPMAYAVVTDPAAIDTPDVPSYQPYVYGHLDPPALIPLQMKEVDLAVDCALDAAHVTLRARWWLHCITRSRDCDVRLVVPLGEQEQGSILGAEVTVGRRSYNTQVIEVEETLENHAKIESGGLLKPHLFFLTISQVEGGADICATFRWSQKLLYDSGCFSVDIPFHFPYFVNPLPKVFMKREKVQLTANTGFSKEVFLQGTSHPLKEKSRQGDKLFFLHEAIVENWSSKVFNFSYSVYSGDLSGGVFVQPSILCDYDDRDSFCIFLLPGSGNRKVFRKAVVFVVDTSGSMQGKPLENVKHAVSTALSELVQGDYFNIITFNDELHSFSSCLEQVNDKAIASATDWMNANLVAEGGTDIMHPLSEAMALLSSVHDTLPQIYLITDGSVDDEHNICQTTKTEVTNRGSKSPRISTFGLGSYCNHYFLRMLASVGKGHYNAALETASIENQIVKWFRRASSTIVENISIDAMTHLDEFEVDSEYIPDLSANSPLCVSGKYRGKFPDTVKAKGYLADMKEVLIELKVQQLKEVTLDKVLVTQHIDLMTAKAWLSAAKQLERKVGYLVIKLSIQNGVPSEYTDMVLLQTNLDNTGTQKDATRENLVTGFWDVNSAEKIVMLQKGPGCCSRVADCLCCMCCIRACNRMNDQCAILMAQDMFVDIQDEKILKHFRGLRTRKINLPRNINSWWSFSSACK

SEQ ID NO: 168164 - protein, 1291 aa, Zea Mays
MEDFARAVEDGLKLSKRLVLPGGVPPPRPPAGMERTMSSASASGPDPRLLPTAPMAYAVVTDPAAIDTPDVPSYQPYVYGHLDPPALIPLQMKEVDLAVDCALDAAHVTLRARWWLHCITRSRDCDVRLVVPLGEQEQGSILGAEVTVGRRSYNTQVIEVEETLENHAKIESGGLLKPHLFFLTISQVEGGADICATFRWSQKLLYDSGCFSVDIPFHFPYFVNPLPKVFMKREKVQLTANTGFSKEVFLQGTSHPLKEKSRQGDKLFFLHEAIVENWSSKVFNFSYSVYSGDLSGGVFVQPSILCDYDDRDSFCIFLLPGSGNRKVFRKAVVFVVDTSGSMQGKPLENVKHAVSTALSELVQGDYFNIITFNDELHSFSSCLEQVNDKAIASATDWMNANLVAEGGTDIMHPLSEAMALLSSVHDTLPQIYLITDGSVDDEHNICQTTKTEVTNRGSKSPRISTFGLGSYCNHYFLRMLASVGKGHYNAALETASIENQIVKWFRRASSTIVENISIDAMTHLDEFEVDSEYIPDLSANSPLCVSGKYRGKFPDTVKAKGYLADMKEVLIELKVQQLKEVTLDKVLVTQHIDLMTAKAWLSAAKQLERKVIKLSIQNGVPSEYTDMVLLQTNLDNTGTQKDATRENLVTGFWDVNSAEKIVMLQKGPGCCSRVADCLCCMCCIRACNRMNDQCAILMAQDMFVDIQDEKILKHFRGLRTRKINLPRNINSCYNLFFSQVVLFIGLQAFLPRRIREVRCLIRSIVDYCGNAGSELFELAPMLVSNLGQSMTLLQVYAAVIRIFVESSMFEDALLTYIQAKNIGVDRRLCNFLLKCLVEGNQIMYARSLFDDMKSCGPSPNVCSYSILMSMYTHGERSCLEEAFELLCEMESNGVRPNATTYGTYLYGLCRSRQVTSAWDFLQTLSQSGGPCSNYCFNAVIHGFCCEGQVDKAIEVFHGMKKCGYVPDVHSYSILVDGLCKQGDLLKGYDMLEEMARNGICPNQVSYSSLLHGLCKTGQVALALKIFKNLQDHGFEHDQINYSIILHGCCQHLDLKAISDLWFDMIHHNIAPDVYNYTSLIYALCRHRNLQDALGVFELMLENGLSPNIVTCTILVDSFSKQGLVGEAFLFLDRMHQSLGIVPNLCMYRVMINGLCKTNKYSGVWNVFADMIKRGYVPDVVLYSIIIEGFVKALKLQEALRLYHKMLDEGVKPNIFTYSSLINGLCNDDRLPEAMGLIRDMIGEDLLLDNVLYTSIIACYCRRLNMKAAMEMAQRDGKKRCVARCFCIYLYD

SEQ ID NO: 168165 - protein, 115 aa, Zea Mays
MQLASKGGPVVQNVVLPQPSAPAAAVTDKAVPVPVISLPAAQADAKKPTRTNASDMPIMRKASLHRFLEKRKDRLNANAPYQTSPSDAAPVKKEPESQAWLGLGPNAVKSNLNLS

SEQ ID NO: 168166 - protein, 145 aa, Zea Mays
MAASARPGERATSFAVACSLLSRFVRQNGAAPAQLGLGIKGEVEQQRTPATINLLPGADGEETERRKETMELFPQSAGFGVKDAAAAPSWPARAALWYRTLFCLNPLHLLLLSPTRPCRSPSSACLLLRLMLRSLLAQMPLICQL

SEQ ID NO: 168167 - protein, 168 aa, Zea Mays
MELFPQSAGFGVKDAAAAPREQENKEKPKQLTIFYGGKVLVFDDFPADKAKDLMQLASKGGPVVQNVVLPQPSAPAAAVTDKAVPVPVISLPAAQADAKKPTRTNASDMPIMRKASLHRFLEKRKDRLNANAPYQTSPSDAAPVKKEPESQAWLGLGPNAVKSNLNLS

SEQ ID NO: 168168 - protein, 740 aa, Zea Mays
MEAHAPLDFALFQLSPRRQRCELVVCGNGRTEKIASGSVKPFVAHLRAVEEQASAQPPPPAIRLQLDRPAPWFSKGTLERFVRFVSTPEVLELTSTYDLEMSQLEGARKIYAQGGTGDATSGGTAENVTGSAAAVAADITKKELLRAIDVRLSTLKQDLAAACSRASSAGFNPNSVSELLLFANHFGASRLSEACTKFMSLCQRRHDISPQTAQPAVSSHWKVFDDGNVRGSSSSDMSIDEPQVDLGESNNKSTVGGSGSQVHRLSNSQGLEVAAEQQPKPTIPQAIDKQEAETDASPAPAAGGLSRRLSVKDRINMFESQKKEQTPSSGNSNSAGTGRVVPGRGEHRRVPSGASMEKLVRRWSSVSDMSIDLSNNESVNINDKKDNGTPVVTPTSTDLEANSKAKADVDSNGQKDLVTSHSWPYQKDNVPMDPTTTDLCPPSTLSNTLAPHSDGAGNDMVINSSIESESSFGKEAGVIQGLTRMSNHATSNVSTRNHLKSSAKPVEEGLLKNKDILTSTSLEEHVRMIDKEITAVPHEVLVASEQIPQNDIRGLHTKDIHTESEVTGRKDQPSRSFGKVSGGVNPKPKTSSNSRANVKGSSGRANVKGSSGRDEITFTETEFRDVSLQRNRLPRKAEDVGRKVTGGSDSDSSGRQGTNLSRQSSITIQELNFQARVMGPGKGNQDRHGELQMKANELEKLFAEHKLISSRRGKPTDVQVDSTRTVSENTMKTWKMGGIW

SEQ ID NO: 168169 - protein, 205 aa, Zea Mays
MCTREGMFRQHWMIAPPLSNLEGLMSLDDFDDAEGGSKLERFSRETLDPSLSWKDVEWLKSITSLPILLKGIVTAEDARKAVEAGAAGLIVSNHGARQLDYAPATISALEEVVKAVAGAVPVLVDGGVRRGTDVLKALALGAKAVMVGRPVFFGLAARGEAGARHVIEMLNKELELAMALCGCRSVAEVTRAHVQTEGDRIRALL

SEQ ID NO: 168170 - protein, 193 aa, Zea Mays
MIAPPLSNLEGLMSLDDFDDAEGGSKLERFSRETLDPSLSWKDVEWLKSITSLPILLKGIVTAEDARKAVEAGAAGLIVSNHGARQLDYAPATISALEEVVKAVAGAVPVLVDGGVRRGTDVLKALALGAKAVMVGRPVFFGLAARGEAGARHVIEMLNKELELAMALCGCRSVAEVTRAHVQTEGDRIRALL

SEQ ID NO: 168171 - protein, 184 aa, Zea Mays
MSTSLLGYNMPSPIIVAPTGAHKLANPEGEVATARAAAACNTIMMLSFSSSCRIEEVASSCDAIRFYQLYVYKRRDVSATLVRRAESLGFRAIVLTVDTPVLGRREADIRNKMIAPPLSNLEGLMSLDDFDDAEGGSKLERFSRETLDPSLSWKDVEWLKSITSLPILLKGIVTAEDGSGCGQH

SEQ ID NO: 168172 - protein, 192 aa, Zea Mays
MSTSLLGYNMPSPIIVAPTGAHKLANPEGEVATARAAAACNTIMMLSFSSSCRIEEVASSCDAIRFYQLYVYKRRDVSATLVRRAESLGFRAIVLTVDTPVLGRREADIRNKMIAPPLSNLEGLMSLDDFDDAEGGSKLERFSRETLDPSLSWKDVEWLKSITSLPILLKGIVTAEDGVQEKSCFSNIGMAG

SEQ ID NO: 168173 - protein, 108 aa, Zea Mays
MSTSLLGYNMPSPIIVAPTGAHKLANPEGEVATARAAAACNTIMMLSFSSSCRIEEVYKRRDVSATLVRRAESLGFRAIVLTVDTPVLGRREADIRNKYSACIVNEIS

SEQ ID NO: 168174 - protein, 304 aa, Zea Mays
MHVVPTDDMWKTTNLQGYYRYLNSMFRATLIPKGGNQVNVHGESHVLLYFMKPNKNFRINVFDMIWKEIIHASWNTSKGCVHAPFIMKMIEVVSQTYFQKDSKHVKYTPYWIDPNNPAGRSKRAPTSAEPGASSSSSEEPAPAPPLHPSSSRAAAASRPMSRGDRGKQGGLKALLKKGFNAMFAIYRENSIHTAELVRRTMELDQNFRRHVAGQPLLPVRPYNPPPPMADTLDQWHQQTYGVPFSASDQEISEDEPVTPPAASASVPPTPAASASVPPPPASAPDLGTYFFGDPSGGHGPYGGW

SEQ ID NO: 168175 - protein, 66 aa, Zea Mays
MGTTILSSFYRTSGNLFNNDPAPPPPPSPLAPNTPPYWQPDVPAYPSPYLYLNSTRERCSLRCRTM

SEQ ID NO: 168176 - protein, 381 aa, Zea Mays
MGYSAAARHRRAGADGRPRAARAVPVQIPLRPTRFADAIALCVQVKKYLQSIQLDLIAPILYGSGISGAAAELLAPAGSCNLQPEPEFRPPMWEVLQSLVRQRLVQRANMARTQSHSRRHGEPVTASRDVLVVCSSTGWTDEKHMLYLRLLEETFVHQLHGSGCIFKGLFNCSPRYCRQMKSSKQIVKYTTPGQGCAIVEGGKVKSCIKAEHVESPSCCGNQQDEKVRSLEDNASTTKPMEKATSHARAASPGQASTCYVGKHRHSPSRSAGIKFIYLSDVARFLKENYSCIYSEGSDQNFDEETQGTGESKHEYNPKRLKSADGTRDHQVVNAEAHQVGCLDVSDKNSENFSASSKVLAASLDVEAGSPSGDCKDHGPKG

SEQ ID NO: 168177 - protein, 101 aa, Zea Mays
MMEEGAPDLRELVRLPQGCAIVEGGKVKSCIKAEHVESPSCCGNQQDEKVRSLEDNASTTKPMEKATSHARAASPGQASTCYVGKHRHSPSRSADYEHQIF

SEQ ID NO: 168178 - protein, 177 aa, Zea Mays
MMEEGAPDLRELVRLPDVLVVCSSTGWTDEKHMLYLRLLEETFVHQLHGSGCIFKGLFNCSPRYCRQMKSSKQIVKYTTPGQGCAIVEGGKVKSCIKAEHVESPSCCGNQQDEKVRSLEDNASTTKPMEKATSHARAASPGQASTCYVGKHRHSPSRSAGRGYPLDVLLQMLLHIDL

SEQ ID NO: 168179 - protein, 181 aa, Zea Mays
MMEEGAPDLRELVRLPQGCAIVEGGKVKSCIKAEHVESPSCCGNQQDEKVRSLEDNASTTKPMEKATSHARAASPGQASTCYVGKHRHSPSRSAEGSDQNFDEETQGTGESKHEYNPKRLKSADGTRDHQVVNAEAHQVGCLDVSDKNSENFSASSKVLAASLDVEAGSPSGDCKDHGPKG

SEQ ID NO: 168180 - protein, 162 aa, Zea Mays
MMEEGAPDLRELVRLPDVLVVCSSTGWTDEKHMLYLRLLEETFVHQLHGSGCIFKGLFNCSPRYCRQMKSSKQIVKYTTPGQQGCAIVEGGKVKSCIKAEHVESPSCCGNQQDEKVRSLEDNASTTKPMEKATSHARAASPGQASTCYVGKHRHSPSRSADF

SEQ ID NO: 168181 - protein, 270 aa, Zea Mays
MMEEGAPDLRELVRLPDVLVVCSSTGWTDEKHMLYLRLLEETFVHQLHGSGCIFKGLFNCSPRYCRQMKSSKQIVKYTTPGQQGCAIVEGGKVKSCIKAEHVESPSCCGNQQDEKVRSLEDNASTTKPMEKATSHARAASPGQASTCYVGKHRHSPSRSAGIKFIYLSDVARFLKENYSCIYSEGSDQNFDEETQGTGESKHEYNPKRLKSADGTRDHQVVNAEAHQVGCLDVSDKNSENFSASSKVLAASLDVEAGSPSGDCKDHGPKG

SEQ ID NO: 168182 - protein, 396 aa, Zea Mays
MPPPAPPPPSSWRRWPPAPSASARPSWMRWPTADEATEIQFNFHSINGENAHYGTPTNPCAPDRVPGGSSSGSAVAVAAKLVDFALGTDTGGSVRVPAAYCGIFGLRPSHGLVSTENVIPMSQMFDTVGWFARDLSMLSCVSNVLLPLAADNTIKQPTHVTIPKDCFEILGSLSDQTYQILNASVAKRFGNDAVDNRNLGEFVSANVPTVGKFISDFSRSEAPSVPALSVISYVMRCLQRSEFKANHGEWVKTVKPNLGPGIRERVHEAIASEDGPMEDFHVLKTEFKSALSALIKDDGILAIPTVPGSPPKLRMEAVALENFRARAFSLLSIAGLSGFCQLSIPLGVRHGVPVSVSLVACHGADRFLLSVAQELYGTLKQETKKAWSWSSSDSSL

SEQ ID NO: 168183 - protein, 402 aa, Zea Mays
MAMGLEDGEYGAFMEKFKMLPSQSQHQQQLPLHGLTFAIKDIFDIGGRVTGFGNPDWARTHAPAGATSPVVLAALAAGAISIGKTVMDEMAYSINGENAHYGTPTNPCAPDRVPGGSSSGSAVAVAAKLVDFALGTDTGGSVRVPAAYCGIFGLRPSHGLVSTENVIPMSQMFDTVGSLSDQTYQILNASVAKRFGNDAVDNRNLGEFVSANVPTVGKFISDFSRSEAPSVPALSVISYVMRCLQRSEFKANHGEWVKTVKPNLGPGIRERVHEAIASEDGPMEDFHVLKTEFKSALSALIKDDGILAIPTVPGSPPKLRMEAVALENFRARAFSLLSIAGLSGFCQLSIPLGVRHGVPVSVSLVACHGADRFLLSVAQELYGTLKQETKKAWSWSSSDSSL

SEQ ID NO: 168184 - protein, 297 aa, Zea Mays
MAMGLEDGEYGAFMEKFKMLPSQSQHQQQLPLHGLTFAIKDIFDIGGRVTGFGNPDWARTHAPAGATSPVVLAALAAGAISIGKTVMDEMAYSINGENAHYGTPTNPCAPDRVPGGSSSGSAVAVAAKLVDFALGTDTGGSVRVPAAYCGIFGLRPSHGLVSTENVIPMSQMFDTVGWFARDLSMLSCVSNVLLPLAADNTIKQPTHVTIPKDCFEILGSLSDQTYQILNASVAKRFGNDAVDNRNLGEFVSANVPTVGKFISDFSRSEAPSVPALSVISYVMRCLQRFHLQLIQTM

SEQ ID NO: 168185 - protein, 384 aa, Zea Mays
MEAAAAVLPTLVPSGSAVVSRRSSLATVVPLVVVLLAYLGYLAAAGAILPGKLVDGALLPDSSRLHYRCNGLLSLLLLLGLSAFGVYMGWMSPTVVADMGLELLSVTFIFSVIVSFALYIAGIKSGHKSSSLRPHVSGSFMQDWWFGVQLNPHFMEVDLKFFFVRAGMMAWLFINLSLFAKSYFAGSANLSVILYQFFCAWYIIDYFVHEEFMTSTWDIIAERLGFMLVFGDLVFIPFTFTIQGWWLLKNKVELSLLSGLANLCIFLIGYLVFRGANKQKHVFKKDPKAPIWGKPPKVVGGKLLASGYWGIARHCNYLGDLLLALSFSLPCGVSSVVPYFYPTYLLILLVLRERRDEARCSQKYREIWAEYCKLVPWRILPYVY

SEQ ID NO: 168186 - protein, 217 aa, Zea Mays
MMAWLFINLSLFAKSYFAGSANLSVILYQFFCAWYIIDYFVHEEFMTSTWDIIAERLGFMLVFGDLVFIPFTFTIQGWWLLKNKVELSLLSGLANLCIFLIGYLVFRGANKQKHVFKKDPKAPIWGKPPKVVGGKLLASGYWGIARHCNYLGDLLLALSFSLPCGVSSVVPYFYPTYLLILLVLRERRDEARCSQKYREIWAEYCKLVPWRILPYVY

SEQ ID NO: 168187 - protein, 231 aa, Zea Mays
MTTRNYVPFMTEGSPRRSVVMLWEFKGYVFKIMGGCDKQGFPMKQGVLTSGRVRLLLHRGTPCFRGYGRRNGERRRKSVRGCIVSQDLSVINLVIVKKGENDLPGLTDTEKPRMRGPKRASKIRKLFNLAKDDDVRKYVNTYRRTFTTKNGKKVSKAPKIQRLVTPLTLQRKRARIADKKKRIAKKKSEAAEYQKLLAQRLKEQRDRRSESLAKRRSKLSAAAKASAATSA

SEQ ID NO: 168188 - protein, 199 aa, Zea Mays
MGGCDKQGFPMKQGVLTSGRVRLLLHRGTPCFRGYGRRNGERRRKSVRGCIVSQDLSVINLVIVKKGENDLPGLTDTEKPRMRGPKRASKIRKLFNLAKDDDVRKYVNTYRRTFTTKNGKKVSKAPKIQRLVTPLTLQRKRARIADKKKRIAKKKSEAAEYQKLLAQRLKEQRDRRSESLAKRRSKLSAAAKASAATSA

SEQ ID NO: 168189 - protein, 153 aa, Zea Mays
MSRFGRSGPPPPIRDTYSLLVLNITFRTTADDLFPLFDKYGEIVDIYIPRDRRTGDSRGFAFVRYKYEDEAQKAVDRLDGRLVDGREIMVQFAKYGPNAERINKGRIMEPVPRPRGRSRSRSPRRSCVPLIDKCQCTCHVEHLCAKVIFHLQN

SEQ ID NO: 168190 - protein, 106 aa, Zea Mays
MSRFGRSGPPPPIRDTYSLLVLNITFRTTADDLFPLFDKYGEIVDIYIPRDRRTGDSRGFAFVRYKYEDEAQKAVDRLDGRLVDGREIMVQFAKYGPNAERMLVLQ

SEQ ID NO: 168191 - protein, 252 aa, Zea Mays
MSRFGRSGPPPPIRDTYSLLVLNITFRTTADDLFPLFDKYGEIVDIYIPRDRRTGDSRGFAFVRYKYEDEAQKAVDRLDGRLVDGREIMVQFAKYGPNAERINKGRIMEPVPRPRGRSRSRSPRRRYRDDYRDDYQDRDYRRRSRSQSRDRYARDRYRDRDYRHRSLSRRYSPDDYKKRGRDSLSPARRSPSHSRSRSYTPDDYKRRGKDSSASPASRSPSRSPPRKTPPSPKRSPVRHNDDRSPRSRSPST

SEQ ID NO: 168192 - protein, 150 aa, Zea Mays
MVQFAKYGPNAERINKGRIMEPVPRPRGRSRSRSPRRRYRDDYRDDYQDRDYRRRSRSQSRDRYARDRYRDRDYRHRSLSRSLSPARRSPSHSRSRSYTPDDYKRRGKDSASPASRSPSRSPPRKTPPSPKRSPVRHNDDRSPRSRSPST

SEQ ID NO: 168193 - protein, 224 aa, Zea Mays
MSRFGRSGPPPPIRDTYSLLVLNITFRTTADDLFPLFDKYGEIVDIYIPRDRRTGDSRGFAFVRYKYEDEAQKAVDRLDGRLVDGREIMVQFAKYGPNAERINKGRIMEPVPRPRGRSRSRSPRRRYRDDYRDDYQDRDYRRRSRSQSRDRYARDSLSPARRSPSHSRSRSYTPDDYKRRGKDSASPASRSPSRSPPRKTPPSPKRSPVRHNDDRSPRSRSPST

SEQ ID NO: 168194 - protein, 282 aa, Zea Mays
MTKHTAFAGADGGTTAAAAVTLCAPPRARGARRVAAGSLPELVRRHADLDDWMMRDAVRGVAEHFPTAIVSGRCRDKVFNFVKLAELYYAGSHGMDIKGPTAQSKHTKAKAEAVLCQPASAFLPVIDEAYRALTARTAPIPGATVENNKFCLSVHFRCVQEEKWRALEEQVRSVLKEYPDLRLTKGRKVLEVRPSIKWDKGNAIQFLLECLGFADSNNVFPIYIGDDRTDEDAFKVLRGMGQGIGILVSKIPKETSASYSLREPSEVKEFLHMLVRSKQRRD

SEQ ID NO: 168195 - protein, 297 aa, Zea Mays
MTKHTAFAGADGGTTAAAAVTLCAPPRARGARRVAAGSLPELVRRHADLDDWMEKHPSALAGFESVLAAAEGKQVVMFLDYDGTLSPIVKDPDSAVMSEEMRDAVRGVAEHFPTAIVSGRCRDKVFNFVKLAELYYAGSHGMDIKGPTAQSKHTKAKAEAVLCQPASAFLPVIDEAYRALTARTAPIPGATVENNKFCLSVHFRCVQEELGRNGALWRSRCGRCSRSTRTSGSPRAGRSWRSGRPSSGTRATPFSSCSSVSVLLTVTMSSRYILETIAPTRTRSRCCAAWGRGSESS

SEQ ID NO: 168196 - protein, 298 aa, Zea Mays
MERTNEPPLLALEEMDGLAGVSVAGTRAMEAVGEEKGATVAEEGKMMKEQGEKGVVASTSEAEKEKMVEAKGEKAVAASEAEGGKMVEGQGEKAVATSEAEDVKMVEGKGEKAVATTEAEIGTSEPKDVAGGRLITLKSSDGKVHRASVAAAQLSVILSGMIEEVVTDDEVVIVPLVDGPTLVTVLEYCTKHAEVAAAARGTSAVAFATASKALEAWDRDFLDRLTMDALHDLFVASNFLEIQGLLNAIAQKAADVIKGKTTEQIRDAFNIVNDLTPEQEATAAELRRKYTWDYHPEA

SEQ ID NO: 168197 - protein, 229 aa, Zea Mays
MVRMIQYVGHMLHFINIAVRILSAPALHVSGCKGSCSNIWQRSSYWSTRQSQSKVYPLFIPRKNVCTGGEETSLTESGSSNFGVDSVDSVKKPSFDPKRSNSFNFSGASSHSMERHQYLQRGISLLKTSVTAITTYYYNSLGLDVPSNLSTFEAFAKLLHMLSSSKALRTAFELDIASRSEKQAQQLNRSIWKASSAISSDSSFMDSMHTTIMHSGQPPHELRREPVHW

SEQ ID NO: 168198 - protein, 252 aa, Zea Mays
MASRRGSSSCALCEGSNLPSCCASCVNARLVEYHTRLRMMRSLRDSLHGRIAARLEAKRKTDEQRIWRTSKEQDIMELRNRLTELKRKTAVDKTEVEQASSDLKAKIVPLNLALATLKKRRADAVAMHTNAMKVAQMNLMATTSDCMKMQSKSVKQLCRLFPMRRVIKEGEKKDGYNGPYDSICGVRLPRGLDPHSISSEELSASLGHMLHFINIAVRILSAPALHVSGCKGSCSNIWQRSSYWSTRQSQRW

SEQ ID NO: 168199 - protein, 352 aa, Zea Mays
MHTNAMKVAQMNLMATTSDCMKMQSKSVKQLCRLFPMRRVIKEGEKKDGYNGPYDSICGVRLPRGLDPHSISSEELSASLGHMLHFINIAVRILSAPALHVSGCKGSCSNIWQRSSYWSTRQSQSKVYPLFIPRKNVCTGGEETSLTESGSSNFGVDSVDSVKKPSFDPKRSNSFNFSGASSHSMERHQYLQRGISLLKTSVTAITTYYYNSLGLDVPSNLSTFEAFAKLLHMLSSSKALRTAFELDIASRSEKQAQQLNRSIWKASSAISSDSSFMDSMHTTIMPSTLDNLLMNSDESLYTGKLVKHGGAPDSIFDSWDIVEREVLPPPPSRVEDVAQWEWAMYAGSTKKK

SEQ ID NO: 168200 - protein, 248 aa, Zea Mays
MASRRGSSSCALCEGSNLPSCCASCVNARLVEYHTRLRMMRSLRDSLHGRIAARLEAKRKTDEQRIWRTSKEQDIMELRNRLTELKRKTAVDKTEVEQASSDLKAKIVPLNLALATLKKRRADAVAMHTNAMKVAQMNLMATTSDCMKMQSKSVKQLCRLFPMRRVIKEGEKKDGYNGPYDSICGVRLPRGLDPHSISSEELSASLGLYFALTISFYRSNGYIPSFSYFLNWNFIVLIKIFLTFLYGL

SEQ ID NO: 168201 - protein, 260 aa, Zea Mays
MGEYAAVKTSVWWDIENCHVPRCCDPHLIAQKMSSAVAAAGYTGPITISAYGDPNCVPKHVQHALSSTGIALNHVPAGIKDASDKKILVDMLIWAIDNPPPANYLLISGDRDFSNALHKLVMRRYNILLAQPPNVSQALTAAAKHVWLWKDLVAGEPPLAESPYISSITNGSVDHSNASKNMDSDSSVATPHSSTQGQNSIPCDQQKGGNSKADKQSKVRQPRKNQSDEASVDGLPGSPKGSTASRAKSISAFIILTTKF

SEQ ID NO: 168202 - protein, 610 aa, Zea Mays
MRSRGGGAAAWPEHLAAHARLLKSACPDAFLLTTAMRGYLRACLPLQALLLLRSVLPRAPRLLDNSFSLSLAMQASAALSASVPAMRDLGLGAASLHARALKSGFAAADLFVRTALVEAYAKAGRADLARAAFDEAPRRDVFLCNVMLAAYVTRGEVAEARRVFDGMRERDMVSWNTMIHGYAVNGEVDLAREVFNGMDDRDAFSWSSMMSAYTKGRRSKDALELWREMRAACVNPDCTTMVSVLSACSDMGALAVGAEVHQFVESNGVELDVKLGTALIDMYAKCGDIENSVRVFHSMPVKDVLTWSSMIIGLANHGFGHDALSLFSRMLSEGLQPNEVTFIGVLISCTHLGLVSDGKKYFSSMSVVHGVTPKVQHYGCMVDLLGRSGHIEEAKQLIRDMPFEPDAVIWRALLGACRIYKNVEVAEEAMAKLRVLDPHADGHYVLLSNIYAQANSWEGVAEMRRTLRRERIQRIPGRSSIEWQNTIHEFISGDRSHPRSKEIYKMLGEMMDRLRQAGYKPMTGLVLQDIDEQSKERALAEHSEKLAVAFGLLTTPAGSTLRITKNLRACEDCHSAIKLIALLYERKLIIRDRNRFHHFSEGRCSCKDYW

SEQ ID NO: 168203 - protein, 554 aa, Zea Mays
MLIKEPGLGAREMQYRLEDQFTVTLSYNKVWEGRKLALKELHGTWEDSFKLLWNWKAAVEATCPGSLIEIDCKKVKGQMHFSKMFVALRPCVNGFLMGCRPYLGVDSTHLTGKYLGQLASATAIDGHNWMYPVAYAIFDKETNLNWKWFMTLLKRAIGTPPGLTIHTDACKGLAYGVSQVFGDAAEHRECFRHLMANFRRKYNGEVLKYMWPCAWACTHERHQVLMDKISETCPNAVAYLRYDHPHLWTRAKFNKICKVDYVNNNISECFNNWIKNVKELPAVDLMDMLRVMIMEKIATRQSIANKMQGHILPSVVNDLHEKSRNLRYTITKSGYMKGEVSGASRDGVAWRYGVNLVTQACSCGQWDVTGKPCTHAIAFITSQRNLRIEDYVGECYSVQRFKDAYQFEVYPMGDRLQWPKLDPGFEMRPPKLEGRPAGRPRKKRIKSAGEPGKRGPYQCKRCFQYGHIEKGCKNPVVEPHEDLPDNHLQRKTKKGTKKRKKSEPEQTSTSLVQISPSSSGPMTRRRVAMSPTCSSPSASKQGEAPASSKRRLII

SEQ ID NO: 168204 - protein, 879 aa, Zea Mays
MKQCFAFCALYPKDYHIDVDKLIQLWMANGFISDQENEPAETIGKRIVNELVSRSFFQYEEQTMIGYNSTTFLKIHDLMQEVALSVSEKECACVTDKFITNSELLPSAARHILIQTWSNKRIHGYLYGFMRKLSRPIQTLMFDGSCEDAVVQHLSRHSSLRVLSMPGFWFRFPIKPKHMCHLRFLDVTGSRIKELPYDISILYNLQTLKLSGCRNLIRLPEQMKHMSALRHLYTDGCTRLECMPPDLGQITSLRTITWFVVGSGLSCSSLGELRDLNIGGSLMLKQLENVTGRRNAEAAKLENKKELRQLSLEWTSGKEEEQQCHEVLESLEAHDGLLALEIYSYQGTRFPSWMGMLKNILELRLFDCCKVEQLPPLCQLAELQLLHLKRLGNLRSLCSRCTSSTFGKLKDLKLVDLHVFEGFCKTMHGSTVAFPQLEILHIERCGNLAALTEASHCGGDYTVARSTFPELKRLILEDLCSFERWVAGLLEIEEEHALFPVVEIVVISKCPKLTTVPRAPKVKELVLRDVHEHISLGGIRCMTSLSTLLLDGVKLDVKERWDHPSSVVDMQLWRCSLFFQPRALVMWVCYWQLQDLTIYRCDELVSWPEKVFQSLISLRRLWIGNCKNLIGYAAANVPDQATSGRSELLPHLEYLEIWGCQNLVELFNSSPALKRMEVRECCKLESLYGKQLLDEAASSTDDVTASAHVEEKLSPSSLESLTILDCDRLSEVVNLPSSLRVIDIQGCFKLRFMSGQLDALNTLAITNCPELRSLETCIVDLTSLEILALCGCKSLASLPSAWAGRQEYSSLRQLTIRECPGIKSLPSTLQQRLDNGLLDFTNLDSRRREDRPPRRLLGCLFLLPLFCLVSRAKCCFVSD

SEQ ID NO: 168205 - protein, 242 aa, Zea Mays
MSTAVARPAHGGFRRSGSGKPDPDEADRMMQSANGYLVQEEEEEEHGDEAAARREDEDEAEAVSEASSIGAALSDSSSSIGENSASDKEEEEEVESTAQGLGMMGLATLESLDDALHPILGRGDDRGGGQLRLPEPPHVEVEVYRARHAAREQAVEVVPRVVERRLKRGAHGRGDEPGDRVSAERVDLEAQGREGGRHDGPEPGGHRRAAALRVERHGDVEREMCPWAISKCFGDLVSNTSA

SEQ ID NO: 168206 - protein, 234 aa, Zea Mays
MAAALFSSSLSPRFLALSSPKPAAPAATAFLPFRLPPRAVSAPGRRVFEPVAVAVSSEYKTEGAEQEGEDGSEEFSEDLKLFVGNLPFSVDSAQLAGLFEQAGSVEMVEAFQGRQLRVNCGPPPPRDESTPRAPRGGGGGGGGGFVDSANKVYVGNLAWGVDNSTLENLFSEQGQVLDAKVIYDRDSGRSRGFGFVTYGSAQEVNNAISNLDGIDLDGRQIRVTAAESKPRRQF

SEQ ID NO: 168207 - protein, 157 aa, Zea Mays
MPVLRIFGFGVCTKACIARKPDIGIIPSIQSLAFQGRQLRVNCGPPPPRDESTPRAPRGGGGGGGGGFVDSANKVYVGNLAWGVDNSTLENLFSEQGQVLDAKVIYDRDSGRSRGFGFVTYGSAQEVNNAISNLDGIDLDGRQIRVTAAESKPRRQF

SEQ ID NO: 168208 - protein, 488 aa, Zea Mays
MVEVGDSQVAGYFAEKRFSKRPFFRNGVPTLVAYPANCKSPSCYMRYPGGLFVDSVVDWVATSVVGLPRILYYSKETLGPQFIGKSGNHKVKTIFFSSTGERAAPFVRQAAQEYSSYSSFGFVLWREDESQIWWNSLGVESAPALVFLKGPGTTPFVHHGIFSKSEFIEMMEEHKHHELRQLRSDTSLELGCDARGHSRAGNDAAIWYCVIVAGRPGAELSKKRQILRKAQDKLLGDVDRSAGNVDNSVETSSAATAFKDDRLTFVWLDGEVQKQICAFYLATDYTGACGPRDFGDDNDKPEIFIVRFQRNATYEALKAEKKNNLVDVLQGQHADASQLVARYKGPVEIEEINRWISQIIKDGDTREIPYFTSKVPDLVPEETSKAWNSKSIRSAGKSLKENIGFHFQDYLTHPMIGSTLLMCGCISMGILWFRNNTPTQSTRQEKARKDKAKRPRPKLSTSLFGEPSVPDVDPKDARQWEMSSSDSD

SEQ ID NO: 168209 - protein, 507 aa, Zea Mays
MVHFLKIDLPLLKDSVVSLIDDAFNVLTHESFMSAISEEYPLIILVYSKGSPRCAQFIEYWKQIGTQLDGIVRTAMVEVGDSQVAGYFAEKRFSKRPFFRNGVPTLVAYPANCKSPSCYMRYPGGLFVDSVVDWVATSVVGLPRILYYSKETLGPQFIGKSGNHKVKTIFFSSTGERAAPFVRQAAQEYSSYSSFGFVLWREDESQIWWNSLGVESAPALVFLKGPGTTPFVHHGIFSKSEFIEMMEEHKHHELRQLRSDTSLELGCDARGHSRAGNDAAIWYCVIVAGRPGAELSKKRQILRKAQDKLLGDVDRSAGNVDNSVETSSAATAFKDDRLTFVWLDGEVQKGQHADASQLVARYKGPVEIEEINRWISQIIKDGDTREIPYFTSKVPDLVPEETSKAWNSKSIRSAGKSLKENIGFHFQDYLTHPMIGSTLLMCGCISMGILWFRNNTPTQSTRQEKARKDKAKRPRPKLSTSLFGEPSVPDVDPKDARQWEMSSSDSD

SEQ ID NO: 168210 - protein, 119 aa, Zea Mays
MLSKGNILIGHSLHRDLCALKIDYSQVIDTTYIFKYANLPTTASPSLNSLCKAVLEYLVREEGEPHNCLKDAEAAMNLVLAKLKNEFNDPIEIAASIVTESDFVKLLAHRILVSYYDYG

SEQ ID NO: 168211 - protein, 96 aa, Zea Mays
MQRRDGCRGVRELVHDERPRGAELEEEQQQCVPYDALEGRLEHAASLARTTSFCSVSAARNRRFMAYRSLVEMKWKDLNQEIVGENVIQRKYFNWP

SEQ ID NO: 168212 - protein, 62 aa, Zea Mays
MHSLKFFTNGYSHLSYLFLLSGSKRCLKDSWGKPPPKYLFNNRKSHPQGHEKATNPNSWKVW

SEQ ID NO: 168213 - protein, 264 aa, Zea Mays
MGFIHTKAELKWLNQELTKIWPFVNEAASELIKTSVEPIFEQYKSFILASLHFSKLTLGTVAPQFTGVSILESDDSAIIMELELQWDGNPNIVLDIQTTLGISLPVQVKNIGFTGVLRLIFKPLVSEFPCFGAVCCSLREKSKVEFTLKVIGGEMTAIPGISDAIEGTIRDTIEDTLTWPNRIIVPIVPGDYSDLELKPTGVLEVKLVEARDLKNKDLVGKSDPFALIYIRPLHDKTKKSKTIVSAFSCLRQMNVILTYSSAEQ

SEQ ID NO: 168214 - protein, 178 aa, Zea Mays
MSSIGTGYDLSVTTFSPDGRVFQVEYATKAVDNSGTVVGIKCKDGIVLGVEKLVTSKMMLEGSNRRIHSVHRHSGLAVAGLAADGRQIVSRTKSEAASYEKVYGEPIPVKELADRVASYVHLCTLYWWLRPFGCGVILGGYDRDGPQLYMIEPSGVSYKYFGAALGKGRQAAKTWTSK

SEQ ID NO: 168215 - protein, 207 aa, Zea Mays
MSSIGTGYDLSVTTFSPDGRVFQVEYATKAVDNSGTVVGIKCKDGIVLGVEKLVTSKMMLEGSNRRIHSVHRHSGLAVAGLAADGRQIVSRTKSEAASYDRDGPQLYMIEPSGVSYKYFGAALGKGRQAAKTEIEKLKLSELTCREGIVEVAKIIYGVHDEAKDKAFELELSWICDESNHQHQKVPNELLEHAKAAAQAALEEMDAD

SEQ ID NO: 168216 - protein, 436 aa, Zea Mays
MASPSSCNATGVPFTLLGALITAGPAAWPACVGGGRAFLRDYARRGTNALLWAGLLAVTWLLLLRVAALLRLWALGSRIPGPRALIADPGLASVLRNGGDISGFLSKLHGRYGPVVRLWVGPSQLLVSVVDPTLVKEVLSKAKDKLPLTGRTYNLACGRLALFVSSFQKVKRTRDSLKIFLNERLTVGTGQSSFKIIDAVLNRIDSIMSKDFMDTRSFSQHMAFNIISATLLGDAFFDWSDAAAYEELLMLVAKDGCFWASYTIPPFWRPSYRRYQTLCAKLKILTESVIRKSRYQNSSLHHFDQRSCQKSEGTDPHRSVLDNMMRSHCLHGAAKGPLNLEEETCGNIMGLMLHGISTSANLIGNILTRLVLFPELQDQVCVGSFIFSVANYLSCFLVMLKIMNGFWCFLIQMTTLSWIFLHVNYLNKKESHFVFH

SEQ ID NO: 168217 - protein, 388 aa, Zea Mays
MASPSSCNATGVPFTLLGALITAGPAAWPACVGGGRAFLRDYARRGTNALLWAGLLAVTWLLLLRVAALLRLWALGSRIPGPRALIADPGLASVLRNGGDISGFLSKLHGRYGPVVRLWVGPSQLLVSVVDPTLVKEVLSKAKDKLPLTGRTYNLACGRLALFVSSFQKVKRTRDSLKIFLNERLTVGTGQSSFKIIDAVLNRIDSIMSKDFMDTRSFSQHMAFNIISATLLGDAFFDWSDAAAYEELLMLVAKDGCFWASYTIPPFWRPSYRRYQTLCAKLKILTESVIRKSRYQNSSLHHFDQRSCQKSEGTDPHRSVLDNMMRSHCLHGAAKGPLNLEEETCGNIMGLMLHGISTSANLIGNILTRLVLFPELQDQDASSTCYCM

SEQ ID NO: 168218 - protein, 362 aa, Zea Mays
MSKDFMDTRSFSQHMAFNIISATLLGDAFFDWSDAAAYEELLMLVAKDGCFWASYTIPPFWRPSYRRYQTLCAKLKILTESVIRKSRYQNSSLHHFDQRSCQKSEGTDPHRSVLDNMMRSHCLHGAAKGPLNLEEETCGNIMGLMLHGISTSANLIGNILTRLVLFPELQDQLHEEIVSVCNKSSKVEVDDLLRMQVLLATVCESARLLPAGPLLQRCSLKHDLTLGSGVTVPARSILVVPLHLVQMDASVWGDDADQFNPHRFLKRDIDLGEILGAPKGSTRLNISSECTKAESFLPFGSGSRACVGQKFVVLAISMLIASLLRSYEVQPHPSLSKEMDTTVDSSHLHLPNPKIILTKRRI

SEQ ID NO: 168219 - protein, 85 aa, Zea Mays
MEALPSTRKQIGEREGTCRRLQHAMPQTSLVPGVQLVWLPGHAVRPQRFDELHGWPEYGRVLARVMGGRGSALHRGDVSCSSTIM

SEQ ID NO: 168220 - protein, 97 aa, Zea Mays
MHKTAQAWFTGGTAASSGAAAESQPSLLADWNSYAATRSDASSSSPLPFDIEAAVRSANDTVSGTLSSSSPSPSRSGARSSLPRSSRLRGQPTSSPT

SEQ ID NO: 168221 - protein, 180 aa, Zea Mays
MLGVKRTERVLPTGISLTVVGEAIKDDVGTIRIQRPHKGPFYVSPKSIDQLIMNLGKWAKLYRLASMGFATFGAFLLAKRAIQHFLERKRRHELQKRVLNAAAQRQAREAEGSIGSSDTEPNSKKDQLVLDICVICLEQEYNAVFVPCGHMCCCMACSSHLTNCPLCRRRIDQAVRTFRH

SEQ ID NO: 168222 - protein, 309 aa, Zea Mays
MSFFFRAASRQRPLPQEIARSLKDSLVALDTKTGAKALEDAEKNILTLRHTLAGDGEVEPNQEQARKDLVHCWCILLRQKVDESYCCVQYIENHFDLLDFLVVCYKNLEVALNCGNMLRECIKYPTLAKYILESSSFELFFQYVELSNFDIASDALNTFKDLLTKHEDAVSEFLSSHYEQFFGLYTKLLSSTNYVTRRQSVKFLSEFLLEAPNAQIMKRYILEVHYLNIMMGLLKDSSKNIRICAFHIFKVFVANPNKPREIIQVLVENHREVLKLLHNLPTSKGEDEQLDEERDLIIKEIEKLVRLSV

SEQ ID NO: 168223 - protein, 159 aa, Zea Mays
MSFFFRAASRQRPLPQEIARSLKDSLVALDTKTGAKALEDAEKNILTLRHTLAGDGEVEPNQEQARKDLVHCWCILLRQKVDESYCCVQYIENHFDLLDFLVVCYKNLEVALNCGNMLRECIKYPTLANALSDIYWSQAASSCFSSMLNCQTSILHLML

SEQ ID NO: 168224 - protein, 82 aa, Zea Mays
MQCHQTRSDVANNKRMTEAPFLPRERLFKLQHHFQNMTKHTYLKGRYDVITSVAIPLALAASSMFMIGRGVYNMSHGIGKKE

SEQ ID NO: 168225 - protein, 209 aa, Zea Mays
MMIPWGGVGCCLSAAALYLLGRSSGRDAEVLRSVARAGSMKDLAAILDTASKVLPLVVAVSGRVGSDTPLICQQSGMRGVIVEETAEQHFLKHNDAGSWIQDSAVMLSVSKEVPWYLDDGTGRVYMVGARSAAGLILTVASEVFEESGRTLVRGTLDYLQGLKMLGVKRTERVLPTGISLTVVGYTALLQWALQHLVPSFLQSVQYNIF

SEQ ID NO: 168226 - protein, 227 aa, Zea Mays
MDDGTGRVYMVGARSAAGLILTVASEVFEESGRTLVRGTLDYLQGLKMLGVKRTERVLPTGISLTVVGEAIKDDVGTIRIQRPHKGPFYVSPKSIDQLIMNLGKWAKLYRLASMGFATFGAFLLAKRAIQHFLERKRRHELQKRVLNAAAQRQAREAEGSIGSSDTEPNSKKDQLVLDICVICLEQEYNAVFVPCGHMCCCMACSSHLTNCPLCRRRIDQAVRTFRH

SEQ ID NO: 168227 - protein, 275 aa, Zea Mays
MMIPWGGVGCCLSAAALYLLGRSSGRDAEVLRSVARAGSMKDLAAILDTASKVLPLVVAVSGRVGSDTPLICQQSGMRGVIVEETAEQHFLKHNDAGSWIQDSAVMLSVSKEVPWYLAIKDDVGTIRIQRPHKGPFYVSPKSIDQLIMNLGKWAKLYRLASMGFATFGAFLLAKRAIQHFLERKRRHELQKRVLNAAAQRQAREAEGSIGSSDTEPNSKKDQLVLDICVICLEQEYNAVFVPCGHMCCCMACSSHLTNCPLCRRRIDQAVRTFRH

SEQ ID NO: 168228 - protein, 185 aa, Zea Mays
MMIPWGGVGCCLSAAALYLLGRSSGRDAEVLRSVARAGSMKDLAAILDTASKVLPLVVAVSGRVGSDTPLICQQSGMRGVIVEETAEQHFLKHNDAGSWIQDSAVMLSVSKEVPWYLDDGTGRVYMVGARSAAGLILTVASEVFEESGRTLVRGTLDYLQGLKMLGVKRTERVLPTGISLTVVGY

SEQ ID NO: 168229 - protein, 238 aa, Zea Mays
MLSVSKEVPWYLDDGTGRVYMVGARSAAGLILTVASEVFEESGRTLVRGTLDYLQGLKMLGVKRTERVLPTGISLTVVGEAIKDDVGTIRIQRPHKGPFYVSPKSIDQLIMNLGKWAKLYRLASMGFATFGAFLLAKRAIQHFLERKRRHELQKRVLNAAAQRQAREAEGSIGSSDTEPNSKKDQLVLDICVICLEQEYNAVFVPCGHMCCCMACSSHLTNCPLCRRRIDQAVRTFRH

SEQ ID NO: 168230 - protein, 217 aa, Zea Mays
MSVRPSPTRLMHAAKSGAVVTLRRCSLTSRSAFFLDQFASVQASTELVNLLLGDHRIECDAREPPPEFVNLLSHANPLTLLCLRPLPASSAHCHPLRPIVYREASIPPSPTHSDPPNTPPSSTRWPHPASLPHRRRGAPSPPEDEHEQQKTLRRSPPSRICPSSPLPLCRLAQPRRYVDLIHHQLEFLLGIALELDAFKYCKILLFWLFPCINIILR

SEQ ID NO: 168231 - protein, 908 aa, Zea Mays
MFGSTNPFGQSSTSPFGQTSFGTPQGFGQSSTAANNPFAPKPFGSPTTAFGAQTGSSLFGTTSTGAFGQQQSTPTFGTTSSSQFGSSTPAFGASPTPAFGATSSGSLFGQKPSFGGFGSSSSQSSPFGNTFQQTQPTFGSSTFGSSTPPAFGATAPAFGTTTPAFGTTTAPAFGATTSPAFGSTSTSLFGASSAPMFGSSAFGTSATGFGTSGTTAFGVSSTTPGFGSSSTPSFGTSASAFSFGSSPSFGQTAVSSGSTPFGTTPSPFGAPAPAFGSQTAAPTFGQPQFANQAGGTRIKPYSQTPDVDSATSGTQPAAKLDSISAMPEYKEKSHEELRWEDYQRGDKGGPNTSGTQTLAPSFPSPIQHNTFASTSNPFSTNPFSTNNPFAPKPTTTTSSPFNTSFNNASVASSSLFTSSPGTTMFGQPGVSTLPAPASNSPSLFGNINPAPATSSIFATSVTNNPSPFGTGTSLANTQSAPLFSSAFAQPTSSTPAFSSGSLFGSTNPGSLFTSSGPSLFSTPTFQPSAPAQSSNMFSFQPPIQPASTGGLPFFPNTNQALTGQPTSSLSSMVMQSALVSNPFGMLPAMPQMSIGNGGSSPSVQYGISSLPVAEKPLPSRSLSMAVPRHLSQRRIKLLPRKYNPISDGKVPFFADDEESPATPKADAFFIPRENPRNLVIRPIEQWSSRRETGRQYTAKNVTDSNKYEDASIESERGKSAMSPSSRPPAVENDKQHEARAMAQHANGNGTSVERLLPKLPRADYFTEPSIEELAAKERAEPGYCGRVRDFVVGRHDYGSIKFFGETDVRCLDLESIVEFNDREVIVYKDDSKKPPVGEGLNKAAEVTLLNIKCVNKKTGEPCQGARVERYREMLVKKAEEQGAEFVSFDAVKGEWKFRVKHFSAYGLW

SEQ ID NO: 168232 - protein, 425 aa, Zea Mays
MFGSTNPFGQSSTSPFGQTSFGTPQGFGQSSTAANNPFAPKPFGSPTTAFGAQTGSSLFGTTSTGAFGQQQSTPTFGTTSSSQFGSSTPAFGASPTPAFGATSSGSLFGQKPSFGGFGSSSSQSSPFGNTFQQTQPTFGSSTFGSSTPPAFGATAPAFGTTTPAFGTTTAPAFGATTSPAFGSTSTSLFGASSAPMFGSSAFGTSATGFGTSGTTAFGVSSTTPGFGSSSTPSFGTSASAFSFGSSPSFGQTAVSSGSTPFGTTPSPFGAPAPAFGSQTAAPTFGQPQFANQAGGTRIKPYSQTPDVDSATSGTQPAAKLDSISAMPEYKEKSHEELRWEDYQRGDKGGPNTSGTQTLAPSFPSPIQHNTFASTSVSTLPAPASNSPSLFGNINPAPATSSIFATICSTDIKYTGFLLWEPIWLN

SEQ ID NO: 168233 - protein, 755 aa, Zea Mays
MFGSTNPFGQSSTSPFGQTSFGTPQGFGQSSTAANNPFAPKPFGSPTTAFGAQTGSSLFATTSTGAFGQQQSTPAFGTTSTGAFGQQQSTPTFGTTSSSQFGSSTPAFGASPTPAFGATSSGSQTAAPTFGQPQFANQAGGTRIKPYSQTPDVDSATSGTQPAAKLDSISAMPEYKEKSHEELRWEDYQRGDKGGPNTSGTQTLAPSFPSPIQHNTFASTSNPFSTNPFSTNNPFAPKPTTTTSSPFNTSFNNASVASSSLFTSSPGTTMFGQPGVSTLPAPASNSPSLFGNINPAPATSSIFATSVTNNPSPFGTGTSLANTQSAPLFSSAFAQPTSSTPAFSSGSLFGSTNPGSLFTSSGPSLFSTPTFQPSAPAQSSNMFSFQPPIQPAASTGGLPFFPNTNQALTGQPTSSLSSMVMQSALVSNPFGMLPAMPQMSIGNGGSSPSVQYGISSLPVAEKPLPSRSLSMAVPRHLSQRRIKLLPRKYNPISDGKVPFFADDEESPATPKADAFFIPRENPRNLVIRPIEQWSSRRETGRQYTAKNVTDSNKYEDASIESERGKSAMSPSSRPPAVENDKQHEARAMAQHANGNGTSVERLLPKLPRADYFTEPSIEELAAKERAEPGYCGRVRDFVVGRHDYGSIKFFGETDVRCLDLESIVEFNDREVIVYKDDSKKPPVGEGLNKAAEVTLLNIKCVNKKTGEPCQGARVERYREMLVKKAEEQGAEFVSFDAVKGEWKFRVKHFSAYGLW

SEQ ID NO: 168234 - protein, 811 aa, Zea Mays
MFGSTNRSLFGQKPSFGGFGSSSSQSSPFGNTFQQTQPTFGSSTFGSSTPPAFGATAPAFGTTTPAFGTTTAPAFGATTSPAFGSTSTSLFGASSAPMFGSSAFGTSATGFGTSGTTAFGVSSTTPGFGSSSTPSFGTSASAFSFGSSPSFGQTAVSSGSTPFGTTPSPFGAPAPAFGSQTAAPTFGQPQFANQAGGTRIKPYSQTPDVDSATSGTQPAAKLDSISAMPEYKEKSHEELRWEDYQRGDKGGPNTSGTQTLAPSFPSPIQHNTFASTSNPFSTNPFSTNNPFAPKPTTTTSSPFNTSFNNASVASSSLFTSSPGTTMFGQPGVSTLPAPASNSPSLFGNINPAPATSSIFATSVTNNPSPFGTGTSLANTQSAPLFSSAFAQPTSSTPAFSSGSLFGSTNPGSLFTSSGPSLFSTPTFQPSAPAQSSNMFSFQPPIQPAASTGGLPFFPNTNQALTGQPTSSLSSMVMQSALVSNPFGMLPAMPQMSIGNGGSSPSVQYGISSLPVAEKPLPSRSLSMAVPRHLSQRRIKLLPRKYNPISDGKVPFFADDEESPATPKADAFFIPRENPRNLVIRPIEQWSSRRETGRQYTAKNVTDSNKYEDASIESERGKSAMSPSSRPPAVENDKQHEARAMAQHANGNGTSVERLLPKLPRADYFTEPSIEELAAKERAEPGYCGRVRDFVVGRHDYGSIKFFGETDVRCLDLESIVEFNDREVIVYKDDSKKPPVGEGLNKAAEVTLLNIKCVNKKTGEPCQGARVERYREMLVKKAEEQGAEFVSFDAVKGEWKFRVKHFSAYGLW

SEQ ID NO: 168235 - protein, 556 aa, Zea Mays
MFGSTNPFGQSSTSPFGQTSFGTPQGFGQSSTAANNPFAPKPFGSPTTAFGAQTGSSLFATTSTGAFGQQQSTPAFGTTSTGAFGQQQSTPTFGTTSSSQFGSSTPAFGASPTPAFGATSSGSLFGQKPSFGGFGSSSSQSSPFGNTFQQTQPTFGSSTFGSSTPPAFGATAPAFGTTTPAFGTTTAPAFGATTSPAFGSTSTSLFGASSAPMFGSSAFGTSATGFGTSGTTAFGVSSTTPGFGSSSTPSFGTSASAFSFGSSPSFGQTAVSSGSTPFGTTPSPFGAPAPAFGSQTAAPTFGQPQFANQAGGTRIKPYSQTPDVDSATSGTQPAAKLDSISAMPEYKEKSHEELRWEDYQRGDKGGPNTSGTQTLAPSFPSPIQHNTFASTSNPFSTNPFSTNNPFAPKPTTTTSSPFNTSFNNASVASSSLFTSSPGTTMFGQPGVSTLPAPATFAQPTSSTPAFSSGSLFGSTNPGSLFTSSGPSLFSTPTFQPSAPAQSSNMFSFQPPIQPAASTGGLPFFPNTNQALTGQPYDLLLLFKYTSLFLSYLAISF

SEQ ID NO: 168236 - protein, 603 aa, Zea Mays
MFGSTNPFGQSSTSPFGQTSFGTPQGFGQSSTAANNPFAPKPFGSPTTAFGAQTGSSLFATTSTGAFGQQQSTPAFGTTSTGAFGQQQSTPTFGTTSSSQFGSSTPAFGASPTPAFGATSSGSLFGQKPSFGGFGSSSSQSSPFGNTFQQTQPTFGSSTFGSSTPPAFGATAPAFGTTTPAFGTTTAPAFGATTSPAFGSTSTSLFGASSAPMFGSSAFGTSATGFGTSGTTAFGVSSTTPGFGSSSTPSFGTSASAFSFGSSPSFGQTAVSSGSTPFGTTPSPFGAPAPAFGSQTAAPTFGQPQFANQAGGTRIKPYSQTPDVDSATSGTQPAAKLDSISAMPEYKEKSHEELRWEDYQRGDKGGPNTSGTQTLAPSFPSPIQHNTFASTSNPFSTNPFSTNNPFAPKPTTTTSSPFNTSFNNASVASSSLFTSSPGTTMFGQPGVSTLPAPASNSPSLFGNINPAPATSSIFATSVTNNPSPFGTGTSLANTQSAPLFSSAFAQPTSSTPAFSSGSLFGSTNPGSLFTSSGPSLFSTPTFQPSAPAQSSNMFSFQPPIQPASTGGLPFFPNTNQALTGQPYDLLLLFKYTSLFLSYLAISF

SEQ ID NO: 168237 - protein, 907 aa, Zea Mays
MPDYDSFGQSSTSPFGQTSFGTPQGFGQSSTAANNPFAPKPFGSPTTAFGAQTGSSLFGTTSTGAFGQQQSTPTFGTTSSSQFGSSTPAFGASPTPAFGATSSGSLFGQKPSFGGFGSSSSQSSPFGNTFQQTQPTFGSSTFGSSTPPAFGATAPAFGTTTPAFGTTTAPAFGATTSPAFGSTSTSLFGASSAPMFGSSAFGTSATGFGTSGTTAFGVSSTTPGFGSSSTPSFGTSASAFSFGSSPSFGQTAVSSGSTPFGTTPSPFGAPAPAFGSQTAAPTFGQPQFANQAGGTRIKPYSQTPDVDSATSGTQPAAKLDSISAMPEYKEKSHEELRWEDYQRGDKGGPNTSGTQTLAPSFPSPIQHNTFASTSNPFSTNPFSTNNPFAPKPTTTTSSPFNTSFNNASVASSSLFTSSPGTTMFGQPGVSTLPAPASNSPSLFGNINPAPATSSIFATSVTNNPSPFGTGTSLANTQSAPLFSSAFAQPTSSTPAFSSGSLFGSTNPGSLFTSSGPSLFSTPTFQPSAPAQSSNMFSFQPPIQPASTGGLPFFPNTNQALTGQPTSSLSSMVMQSALVSNPFGMLPAMPQMSIGNGGSSPSVQYGISSLPVAEKPLPSRSLSMAVPRHLSQRRIKLLPRKYNPISDGKVPFFADDEESPATPKADAFFIPRENPRNLVIRPIEQWSSRRETGRQYTAKNVTDSNKYEDASIESERGKSAMSPSSRPPAVENDKQHEARAMAQHANGNGTSVERLLPKLPRADYFTEPSIEELAAKERAEPGYCGRVRDFVVGRHDYGSIKFFGETDVRCLDLESIVEFNDREVIVYKDDSKKPPVGEGLNKAAEVTLLNIKCVNKKTGEPCQGARVERYREMLVKKAEEQGAEFVSFDAVKGEWKFRVKHFSAYGLW

SEQ ID NO: 168238 - protein, 156 aa, Zea Mays
MGAEYPTFADVSRARALLFLADSTPPPAPPSPPPAHGDEFYCCSGSSSSYSAASTRSCSARRGHKRAVPYRGREKAEGRVDRDRQLRRRQPDREEQRRGQRREHRHGRSVRGLHSHVGDMPPGSAGGLCCWREEAEGSRRDHAMVFAAASWAGHRE

SEQ ID NO: 168239 - protein, 1127 aa, Zea Mays
MACIKSAHRAALTALAPDAPYLAAGTMTGAVDLSFSASANIEIFRLDFQSDSTDLPILASAPSPDRFNRLSWSRPGAVEGDSFALGLLAGGLSDGSVAVWNPLSMISSEGKAEDAMVARLEKHTGPVCGLEFSELTPNRLASGAEQGELCIWDLKNPVEPIVYPPLKSVGSHAQAEISCLSWNPKFQHIVASTSSNGMTVVWDLRNQKPLTSFSDSNRRKCSVLQWNPDMSTQLIVASDDDNSPSLRVWDVRKTISPVREFVGHSKGVIAMSWCPYDSSFLLTCSKDNRTICWDTVSGEIISELPASANWNFDLHWYRKIPGVIAASSFDGKIGIYNLEFSGLYATGDAVGAPVRPRAPAPKWLKCPTGASFGFGGKLVSFHPVAPTQGAQTSTSEVHVHNLVIEQSLVSRSTEFEAAIQNGDKSSLRALCEKKSQESLSDEERETWGFLRVMFEDGDFARTKLLAHLGFEPPQAPPASSTDELSQTLADTLNIDHAAVTDNADAQFLIDNGDDFFNNPRPSEASLAEESVSTNGQQIEQEVSGDSVPSDPSIDKSIQHALVVGDYKGAVNQCLASNRMADALVIAHAGGSALWESTRNHYLKNSISPYLKVVSAMVGNDLMSFVSTWPLSSWKETLALLCTFAQKEEWHILCDTLASRLLNVGDTLAATLCYICAGNIDKAVEIWSRTLKSEDGGKTYVDLLQDLMEKTITLALATGQKRFSASLSKLIENYAELLASQGLLKTAMEYLKLLGSDEHSHELAILRDRIACSTEENDNVSSVSESTGTPSPYVTNQPYTTPDHSQNVYQQVPQPYNVPSNTYSEAYPQQGTGAYGYNNAYQPQQPANMFVPPSTPPNTQPGPSHVPVPQQTVKTFTPANPAGLKNPGQYQQPNTLGSQLYTGATNQPYSSGPSAPYPSGPPTTFHQPVAPVQYQSAAPPVSSFGPTTPVPGTVPNQMFPHSAATNSTSRFMPSNNQSFAPRPGLSPVQPSSPTQVQAQPAPPAPPATVQTADTTKVSAELRPVIGTLTRLFDETTKALGGSQATQAKKREIEDNSRKIGALFSKLNSGDISPNVSSKLIQLCSAIDASDFVTAMHLQVLLTTSDWDECNFWLAALKRMIKTRQNFRM

SEQ ID NO: 168240 - protein, 647 aa, Zea Mays
MACIKSAHRAALTALAPDAPYLAAGTMTGAVDLSFSASANIEIFRLDFQSDSTDLPILASAPSPDRFNRLSWSRPGAVEGDSFALGLLAGGLSDGSVAVWNPLSMISSEGKAEDAMVARLEKHTGPVCGLEFSELTPNRLASGAEQGELCIWDLKNPVEPIVYPPLKSVGSHAQAEISCLSWNPKFQHIVASTSSNGMTVVWDLRNQKPLTSFSDSNRRKCSVLQWNPDMSTQLIVASDDDNSPSLRVWDVRKTISPVREFVGHSKGVIAMSWCPYDSSFLLTCSKDNRTICWDTVSGEIISELPASANWNFDLHWYRKIPGVIAASSFDGKIGIYNLEFSGLYATGDAVGAPVRPRAPAPKWLKCPTGASFGFGGKLVSFHPVAPTQGAQTSTSEVHVHNLVIEQSLVSRSTEFEAAIQNGDKSSLRALCEKKSQESLSDEERETWGFLRVMFEDGDFARTKLLAHLGFEPPQAPPASSTDELSQTLADTLNIDHAAVTDNADAQFLIDNGDDFFNNPRPSEASLAEESVSTNGQQIEQEVSGDSVPSDPSIDKSIQHALVVGDYKGAVNQCLASNRMADALVIAHAGGSALWESTRNHYLKNSISPYLKVVSAMVGNDLMSFVSTWPLSSWKETLALLCTASECR

SEQ ID NO: 168241 - protein, 1099 aa, Zea Mays
MACIKSAHRAALTALAPDAPYLAAGTMTGAVDLSFSASANIEIFRLDFQSDSTDLPILASAPSPDRFNRLSWSRPGAVEGDSFALGLLAGGLSDGSVAVWNPLSMISSEGKAEDAMVARLEKHTGPVCGLEFSELTPNRLASGAEQGELCIWDLKNPVEPIVYPPLKSVGSHAQAEISCLSWNPKFQHIVASTSSNGMTVVWDLRNQKPLTSFSDSNRRKCSVLQWNPDMSTQLIVASDDDNSPSLRVWDVRKTISPVREFVGHSKGVIAMSWCPYDSSFLLTCSKDNRTICWDTVSGEIISELPASANWNFDLHWYRKIPGVIAASSFDGKIGIYNLEFSGLYATGDAVGAPVRPRAPAPKWLKCPTGASFGFGGKLVSFHPVAPTQGAQTSTSEVHVHNLVIEQSLVSRSTEFEAAIQNGDKSSLRALCEKKSQESLSDEERETWGFLRVMFEDGDFARTKLLAHLGFEPPQAPPASSTDELSQTLADTLNIDHAAVTDNADAQFLIDNGDDFFNNPRPSEASLAEESVSTNGQQIEQEVSGDSVPSDPSIDKSIQHALVVGDYKGAVNQCLASNRMADALVIAHAGGSALWESTRNHYLKNSISPYLKVVSAMVGNDLMSFVSTWPLSSWKETLALLCTFAQKEEWHILCDTLASRLLNVDGGKTYVDLLQDLMEKTITLALATGQKRFSASLSKLIENYAELLASQGLLKTAMEYLKLLGSDEHSHELAILRDRIACSTEENDNVSSVSESTGTPSPYVTNQPYTTPDHSQNVYQQVPQPYNVPSNTYSEAYPQQGTGAYGYNNAYQPQQPANMFVPPSTPPNTQQQPGPSHVPVPQQTVKTFTPANPAGLKNPGQYQQPNTLGSQLYTGATNQPYSSGPSAPYPSGPPTTFHQPVAPVQYQSAAPPVSSFGPTTPVPGTVPNQMFPHSAATNSTSRFMPSNNQSFAPRPGLSPVQPSSPTQVQAQPAPPAPPATVQTADTTKVSAELRPVIGTLTRLFDETTKALGGSQATQAKKREIEDNSRKIGALFSKLNSGDISPNVSSKLIQLCSAIDASDFVTAMHLQVLLTTSDWDECNFWLAALKRMIKTRQNFRM

SEQ ID NO: 168242 - protein, 899 aa, Zea Mays
MSTQLIVASDDDNSPSLRVWDVRKTISPVREFVGHSKGVIAMSWCPYDSSFLLTCSKDNRTICWDTVSGEIISELPASANWNFDLHWYRKIPGVIAASSFDGKIGIYNLEFSGLYATGDAVGAPVRPRAPAPKWLKCPTGASFGFGGKLVSFHPVAPTQGAQTSTSEVHVHNLVIEQSLVSRSTEFEAAIQNGDKSSLRALCEKKSQESLSDEERETWGFLRVMFEDGDFARTKLLAHLGFEPPQAPPASSTDELSQTLADTLNIDHAAVTDNADAQFLIDNGDDFFNNPRPSEASLAEESVSTNGQQIEQEVSGDSVPSDPSIDKSIQHALVVGDYKGAVNQCLASNRMADALVIAHAGGSALWESTRNHYLKNSISPYLKVVSAMVGNDLMSFVSTWPLSSWKETLALLCTFAQKEEWHILCDTLASRLLNVGDTLAATLCYICAGNIDKAVEIWSRTLKSEDGGKTYVDLLQDLMEKTITLALATGQKRFSASLSKLIENYAELLASQGLLKTAMEYLKLLGSDEHSHELAILRDRIACSTEENDNVSSVSESTGTPSPYVTNQPYTTPDHSQNVYQVPQPYNVPSNTYSEAYPQQGTGAYGYNNAYQPQQPANMFVPPSTPPNTQQQPGPSHVPVPQQTVKTFTPANPAGLKNPGQYQQPNTLGSQLYTGATNQPYSSGPSAPYPSGPPTTFHQPVAPVQYQSAAPPVSSFGPTTPVPGTVPNQMFPHSAATNSTSRFMPSNNQSFAPRPGLSPVQPSSPTQVQAQPAPPAPPATVQTADTTKVSAELRPVIGTLTRLFDETTKALGGSQATQAKKREIEDNSRKIGALFSKLNSGDISPNVSSKLIQLCSAIDASDFVTAMHLQVLLTTSDWDECNFWLAALKRMIKTRQNFRM

SEQ ID NO: 168243 - protein, 1142 aa, Zea Mays
MACIKSAHRAALTALAPDAPYLAAGTMTGAVDLSFSASANIEIFRLDFQSDSTDLPILASAPSPDRFNRLSWSRPGAVEGDSFALGLLAGGLSDGSVAVWNPLSMISSEGKAEDAMVARLEKHTGPVCGLEFSELTPNRLASGAEQGELCIWDLKNPVEPIVYPPLKSVGSHAQAEISCLSWNPKFQHIVASTSSNGMTVVWDLRNQKPLTSFSDSNRRKCSVLQWNPDMSTQLIVASDDDNSPSLRVWDVRKTISPVREFVGHSKGVIAMSWCPYDSSFLLTCSKDNRTICWDTVSGEIISELPASANWNFDLHWYRKIPGVIAASSFDGKIGIYNLEFSGLYATGDAVGAPVRPRAPAPKWLKCPTGASFGFGGKLVSFHPVAPTQGAQTSTSEVHVHNLVIEQSLVSRSTEFEAAIQNGDKSSLRALCEKKSQESLSDEERETWGFLRVMFEDGDFARTKLLAHLGFEPPQAPPASSTDELSQTLADTLNIDHAAVTDNADAQFLIDNGDDFFNNPRPSEASLAEESVSTNGQQIEQEVSGDSVPSDPSIDKSIQHALVVGDYKGAVNQCLASNRMADALVIAHAGGSALWESTRNHYLKNSISPYLKVVSAMVGNDLMSFVSTWPLSSWKETLALLCTFAQKEEWHILCDTLASRLLNVGDTLAATLCYICAGNIDKAVEIWSRTLKSEDGGKTYVDLLQDLMEKTITLALATGQKRFSASLSKLIENYAELLASQGLLKTAMEYLKLLGSDEHSHELAILRDRIACSTEENDNVSSVSESTGTPSPYVTNQPYTTPDHSQNVYQVPQPYNVPSNTYSEAYPQQGTGAYGYNNAYQPQQPANMFVPPSTPPNTQPGPSHVPVPQQTVKTFTPANPAGLKNPGQYQQPNTLGSQLYTGATNQPYSSGPSAPYPSGPPTTFHQPVAPVQYQSAAPPVSSFGPTTPVPGTVPNQMFPHSAATNSTSRFMPSNNQSFAPRPGLSPVQPSSPTQVQAQPAPPAPPATVQTADTTKVSAELRPVIGTLTRLFDETTKALGGSQATQAKKREIEDNSRKIGALFSKLNSGTLNDKRLGRVQLLACGIEADDQDKAEFQNVNLVWPSPAPSYVHTFSRCLPEMIAFAVQRILQHSGCYHAAFALGL

SEQ ID NO: 168244 - protein, 676 aa, Zea Mays
MFEDGDFARTKLLAHLGFEPPQAPPASSTDELSQTLADTLNIDHAAVTDNADAQFLIDNGDDFFNNPRPSEASLAEESVSTNGQQIEQEVSGDSVPSDPSIDKSIQHALVVGDYKGAVNQCLASNRMADALVIAHAGGSALWESTRNHYLKNSISPYLKVVSAMVGNDLMSFVSTWPLSSWKETLALLCTFAQKEEWHILCDTLASRLLNVGDTLAATLCYICAGNIDKAVEIWSRTLKSEDGGKTYVDLLQDLMEKTITLALATGQKRFSASLSKLIENYAELLASQGLLKTAMEYLKLLGSDEHSHELAILRDRIACSTEENDNVSSVSESTGTPSPYVTNQPYTTPDHSQNVYQVPQPYNVPSNTYSEAYPQQGTGAYGYNNAYQPQQPANMFVPPSTPPNTQQQPGPSHVPVPQQTVKTFTPANPAGLKNPGQYQQPNTLGSQLYTGATNQPYSSGPSAPYPSGPPTTFHQPVAPVQYQSAAPPVSSFGPTTPVPGTVPNQMFPHSAATNSTSRFMPSNNQSFAPRPGLSPVQPSSPTQVQAQPAPPAPPATVQTADTTKVSAELRPVIGTLTRLFDETTKALGGSQATQAKKREIEDNSRKIGALFSKLNSGDISPNVSSKLIQLCSAIDASDFVTAMHLQVLLTTSDWDECNFWLAALKRMIKTRQNFRM

SEQ ID NO: 168245 - protein, 282 aa, Zea Mays
MFVPPSTPPNTQQQPGPSHVPVPQQTVKTFTPANPAGLKNPGQYQQPNTLGSQLYTGATNQPYSSGPSAPYPSGPPTTFHQPVAPVQYQSAAPPVSSFGPTTPVPGTVPNQMFPHSAATNSTSRFMPSNNQSFAPRPGLSPVQPSSPTQVQAQPAPPAPPATVQTADTTKVSAELRPVIGTLTRLFDETTKALGGSQATQAKKREIEDNSRKIGALFSKLNSGDISPNVSSKLIQLCSAIDASDFVTAMHLQVLLTTSDWDECNFWLAALKRMIKTRQNFRM

SEQ ID NO: 168246 - protein, 280 aa, Zea Mays
MFVPPSTPPNTQPGPSHVPVPQQTVKTFTPANPAGLKNPGQYQQPNTLGSQLYTGATNQPYSSGPSAPYPSGPPTTFHQPVAPVQYQSAAPPVSSFGPTTPVPGTVPNQMFPHSAATNSTSRFMPSNNQSFAPRPGLSPVQPSSPTQVQAQPAPPAPPATVQTADTTKVSAELRPVIGTLTRLFDETTKALGGSQATQAKKREIEDNSRKIGALFSKLNSGDISPNVSSKLIQLCSAIDASDFVTAMHLQVLLTTSDWDECNFWLAALKRMIKTRQNFRM

SEQ ID NO: 168247 - protein, 197 aa, Zea Mays
MEAADSESVISTFTCPHCQREVPSSNIALHSAHCARNLQKCEHCGDMVARKLMDEHYDENHAPMNCSLCKHTVERELWDLHTGIQCPQRMLACQYCQFELPAVDLFEHQDLCGNRTEYCQSCRKYIRLREWIGHELQFHTILNAASELSRTRAAAEQPVPKPARPATGSLHKQLLLTVAVTGVAVLIGSILYQGKGK

SEQ ID NO: 168248 - protein, 857 aa, Zea Mays
MAASAAAAPGSAERQARGGAASAIGNAVFKSGPLFISSKGIGWKSWKKRWFILTRTSLVFFKNDPSTLPQRSGEVNLTLGGIDLNNSGSVVVREDKRLLTVLFPDGRDGRAFTLKAESSKDLFEWKTSLEEALAQAPNAALLMGHNGIFRNDTTDVYEEAIPNWREKRPTKSLVVGRPILLALEDIDGSPSFLEKALCFLEKHGIKVEGILRQAADVEEVDRRLQEYEQGRTEFAPEEDAHVIGDCVKHVLRELPSSPVPASCCTALLEAFRLDIKESRIKSMRAAISETFPEPTRRLLQRILKMMHTVASHTAENRMTPSAVAACMAPLLLRPLLSGECELEDDFDMSDDSAAQLIAAANAANSAQGIVTTLLEEYESIFNDEHFRCSLSPDSQTGDSGSEESTDDETVDIKDNGFHDAENDVDQELDDAERILNGKLSETSACVHADLHDYKEVNGNDSDAELFVEDNTFEPNVNLNDTPLSRLIENGKKPSNLASSHETPLSVGEILSSLDAGVPLPGRAAEYSKDRLSSKPNGIQQHVKRTNLWGRSNARKGQRSELVDPSSEEELAIQRLEVMKNDLQVRIAKEARSNAILQASLERRKQALHERRVALEQNVSRLQEQLQAERDLRAALEIGLSMYSSQFSSSHSMDSKTKAELEEIALAEADVARLKQKVAELHLQLNQQRQHQYGSSVDANDCPPHLPNHLSQNTVQTGFDRTVAFCNQEKQRNEESLPCTSHWRSIKQHVLSQDSSRPFSRKHSSDTSLSDSMEASTSVLAEGGPLLVNIARTTEQGVEYGRPPTVPSSTLVELTTRLDFFKERRSQLMEQLHSLDLGHGSASHGFPYKSSSPWNNPR

SEQ ID NO: 168249 - protein, 701 aa, Zea Mays
MEYFAMTQQMWREKRPTKSLVVGRPILLALEDIDGSPSFLEKALCFLEKHGIKVEGILRQAADVEEVDRRLQEYEQGRTEFAPEEDAHVIGDCHVLRELPSSPVPASCCTALLEAFRLDIKESRIKSMRAAISETFPEPTRRLLQRILKMMHTVASHTAENRMTPSAVAACMAPLLLRPLLSGECELEDDFDMSDDSAAQLIAAANAANSAQGIVTTLLEEYESIFNDEHFRCSLSPDSQTGDSGSEESTDDETVDIKDNGFHDAENDVDQELDDAERILNGKLSETSACVHADLHDYKEVNGNDSDAELFVEDNTFEPNVNLNDTPLSRLIENGKKPSNLASSHETPLSVGEILSSLDAGVPLPGRAAEYSKDRLSSKPNGIQQHVKRTNLWGRSNARKGQRSELVDPSSEEELAIQRLEVMKNDLQVRIAKEARSNAILQASLERRKQALHERRVALEQNVSRLQEQLQAERDLRAALEIGLSMYSSQFSSSHSMDSKTKAELEEIALAEADVARLKQKVAELHLQLNQQRQHQYGSSVDANDCPPHLPNHLSQNTVQTGFDRTVAFCNQEKQRNEESLPCTSHWRSIKQHVLSQDSSRPFSRKHSSDTSLSDSMEASTSVLAEGGPLLVNIARTTEGVEYGRPPTVPSSTLVELTTRLDFFKERRSQLMEQLHSLDLGHGSASHGFPYKSSSPWNNPR

SEQ ID NO: 168250 - protein, 703 aa, Zea Mays
MEYFAMTQQMWREKRPTKSLVVGRPILLALEDIDGSPSFLEKALCFLEKHGIKVEGILRQAADVEEVDRRLQEYEQGRTEFAPEEDAHVIGDCVKHVLRELPSSPVPASCCTALLEAFRLDIKESRIKSMRAAISETFPEPTRRLLQRILKMMHTVASHTAENRMTPSAVAACMAPLLLRPLLSGECELEDDFDMSDDSAAQLIAAANAANSAQGIVTTLLEEYESIFNDEHFRCSLSPDSQTGDSGSEESTDDETVDIKDNGFHDAENDVDQELDDAERILNGKLSETSACVHADLHDYKEVNGNDSDAELFVEDNTFEPNVNLNDTPLSRLIENGKKPSNLASSHETPLSVGEILSSLDAGVPLPGRAAEYSKDRLSSKPNGIQQHVKRTNLWGRSNARKGQRSELVDPSSEEELAIQRLEVMKNDLQVRIAKEARSNAILQASLERRKQALHERRVALEQNVSRLQEQLQAERDLRAALEIGLSMYSSQFSSSHSMDSKTKAELEEIALAEADVARLKQKVAELHLQLNQQRQHQYGSSVDANDCPPHLPNHLSQNTVQTGFDRTVAFCNQEKQRNEESLPCTSHWRSIKQHVLSQDSSRPFSRKHSSDTSLSDSMEASTSVLAEGGPLLVNIARTTEGVEYGRPPTVPSSTLVELTTRLDFFKERRSQLMEQLHSLDLGHGSASHGFPYKSSSPWNNPR

SEQ ID NO: 168251 - protein, 850 aa, Zea Mays
MAASAAAAPGSAERQARGGAASAIGNAVFKSGPLFISSKGIGWKSWKKRWFILTRTSLVFFKNDPSTLPQRSGEVNLTLGGIDLNNSGSVVVREDKRLLTVLFPDGRDGRAFTLKAESSKDLFEWKTSLEEALAQAPNAALLMGHNGIFRNDTTDVYEEAIPNWREKRPTKSLVVGRPILLALEDIDGSPSFLEKALCFLEKHGIKVEGILRQAADVEEVDRRLQEYEQGRTEFAPEEDAHVIGDCVKHVLRELPSSPVPASCCTALLEAFRLDIKESRIKSMRAAISETFPEPTRRLLQRILKMMHTVASHTAENRMTPSAVAACMAPLLLRPLLSGECELEDDFDMSDDSAAQLIAAANAANSAQGIVTTLLEEYESIFNDEHFRCSLSPDSQTGDSGSEESTDDETVDIKDNGFHDAENDVDQELDDAERILNGKLSETSACVHADLHDYKEVNGNDSDAELFVEDNTFEPNVNLNDTPLSRLIENGKKPSNLASSHETPLSVGEILSSLDAGVPLPGRAAEYSKDRLSSKPNGIQQHVKRTNLWGRSNARKGQRSELVDPSSEEELAIQRLEVMKNDLQARSNAILQASLERRKQALHERRVALEQNVSRLQEQLQAERDLRAALEIGLSMYSSQFSSSHSMDSKTKAELEEIALAEADVARLKQKVAELHLQLNQQRQHQYGSSVDANDCPPHLPNHLSQNTVQTGFDRTVAFCNQEKQRNEESLPCTSHWRSIKQHVLSQDSSRPFSRKHSSDTSLSDSMEASTSVLAEGGPLLVNIARTTEGVEYGRPPTVPSSTLVELTTRLDFFKERRSQLMEQLHSLDLGHGSASHGFPYKSSSPWNNPR

SEQ ID NO: 168252 - protein, 866 aa, Zea Mays
MAASAAAAPGSAERQARGGAASAIGNAVFKSGPLFISSKGIGWKSWKKRWFILTRTSLVFFKNDPSTLPQRSGEVNLTLGGIDLNNSGSVVVREDKRLLTVLFPDGRDGRAFTLKAESSKDLFEWKTSLEEALAQAPNAALLMGHNGIFRNDTTDVYEEAIPNWREKRPTKSLVVGRPILLALEDIDGSPSFLEKALCFLEKHGIKVEGILRQAADVEEVDRRLQEYEQGRTEFAPEEDAHVIGDCVKHVLRELPSSPVPASCCTALLEAFRLDIKESRIKSMRAAISETFPEPTRRLLQRILKMMHTVASHTAENRMTPSAVAACMAPLLLRPLLSGECELEDDFDMSDDSAAQLIAAANAANSAQGIVTTLLEEYESIFNDEHFRCSLSPDSQTGDSGSEESTDDETVDIKDNGFHDAENDVDQELDDAERILNGKLSETSACVHADLHDYKQEVNGNDSDAELFVEDNTFEPNVNLNDTPLSRLIENGKKPSNLASSHETPLSVGEILSSLDAGVPLPGRAAEYSKDRLSSKPNGIQQHVKRTNLWGRSNARKGQRSELVDPSSEEELAIQRLEVMKNDLQVRIAKEARSNAILQASLERRKQALHERRVALEQNVSRLQEQLQAERDLRAALEIGLSMYSSQFSSSHSMDSKTKAELEEIALAEADVARLKQKVAELHLQLNQQRQHQYGSSVDANDCPPHLPNHLSQNTVQTGFDRTVAFCNQEKQRNEESLPCTSHWRSIKQHVLSQDSSRPFSRKHSSDTSLSDSMEASTSVLAEGGPLLVNIARTTEGVEYGRPPTVPSSTLVELTTRLDFFKERRSQLMEQLHSLDLGHGSASHGFPYKSSSPWNNPRRGKCCHFEN

SEQ ID NO: 168253 - protein, 715 aa, Zea Mays
MGHNGIFRNDTTDVYEEAIPNWREKRPTKSLVVGRPILLALEDIDGSPSFLEKALCFLEKHGIKVEGILRQAADVEEVDRRLQEYEQGRTEFAPEEDAHVIGDCVKHVLRELPSSPVPASCCTALLEAFRLDIKESRIKSMRAAISETFPEPTRRLLQRILKMMHTVASHTAENRMTPSAVAACMAPLLLRPLLSGECELEDDFDMSDDSAAQLIAAANAANSAQGIVTTLLEEYESIFNDEHFRCSLSPDSQTGDSGSEESTDDETVDIKDNGFHDAENDVDQELDDAERILNGKLSETSACVHADLHDYKQEVNGNDSDAELFVEDNTFEPNVNLNDTPLSRLIENGKKPSNLASSHETPLSVGEILSSLDAGVPLPGRAAEYSKDRLSSKPNGIQQHVKRTNLWGRSNARKGQRSELVDPSSEEELAIQRLEVMKNDLQVRIAKEARSNAILQASLERRKQALHERRVALEQNVSRLQEQLQAERDLRAALEIGLSMYSSQFSSSHSMDSKTKAELEEIALAEADVARLKQKVAELHLQLNQQRQHQYGSSVDANDCPPHLPNHLSQNTVQTGFDRTVAFCNQEKQRNEESLPCTSHWRSIKQHVLSQDSSRPFSRKHSSDTSLSDSMEASTSVLAEGGPLLVNIARTTEGVEYGRPPTVPSSTLVELTTRLDFFKERRSQLMEQLHSLDLGHGSASHGFPYKSSSPWNNPR

SEQ ID NO: 168254 - protein, 866 aa, Zea Mays
MAASAAAAPGSAERQARGGAASAIGNAVFKSGPLFISSKGIGWKSWKKRWFILTRTSLVFFKNDPSTLPQRSGEVNLTLGGIDLNNSGSVVVREDKRLLTVLFPDGRDGRAFTLKAESSKDLFEWKTSLEEALAQAPNAALLMGHNGIFRNDTTDVYEEAIPNWREKRPTKSLVVGRPILLALEDIDGSPSFLEKALCFLEKHGIKVEGILRQAADVEEVDRRLQEYEQGRTEFAPEEDAHVIGDCVKHVLRELPSSPVPASCCTALLEAFRLDIKESRIKSMRAAISETFPEPTRRLLQRILKMMHTVASHTAENRMTPSAVAACMAPLLLRPLLSGECELEDDFDMSDDSAAQLIAAANAANSAQGIVTTLLEEYESIFNDEHFRCSLSPDSQTGDSGSEESTDDETVDIKDNGFHDAENDVDQELDDAERILNGKLSETSACVHADLHDYKEVNGNDSDAELFVEDNTFEPNVNLNDTPLSRLIENGKKPSNLASSHETPLSVGEILSSLDAGVPLPGRAAEYSKDRLSSKPNGIQQHVKRTNLWGRSNARKGQRSELVDPSSEEELAIQRLEVMKNDLQVRIAKEARSNAILQASLERRKQALHERRVALEQNVSRLQEQLQAERDLRAALEIGLSMYSSQFSSSHSMDSKTKAELEEIALAEADVARLKQKVAELHLQLNQQRQHQYGSSVDANDCPPHLPNHLSQNTVQTGFDRTVAFCNQEKQRNEESLPCTSHWRSIKQHVLSQDSSRPFSRKHSSDTSLSDSMEASTSVLAEGGPLLVNIARTTEQGVEYGRPPTVPSSTLVELTTRLDFFKERRSQLMEQLHSLDLGHGSASHGFPYKSSSPWNNPRRGKCCHFEN

SEQ ID NO: 168255 - protein, 583 aa, Zea Mays
MEYFAMTQQMWREKRPTKSLVVGRPILLALEDIDGSPSFLEKALCFLEKHGIKVEGILRQAADVEEVDRRLQEYEQGRTEFAPEEDAHVIGDCVKHVLRELPSSPVPASCCTALLEAFRLDIKESRIKSMRAAISETFPEPTRRLLQRILKMMHTVASHTAENRMTPSAVAACMAPLLLRPLLSGECELEDDFDMSDDSAAQLIAAANAANSAQGIVTTLLEEYESIFNDEHFRCSLSPDSQTGDSGSEESTDDETVDIKDNGFHDAENDVDQELDDAERILNGKLSETSACVHADLHDYKQEVNGNDSDAELFVEDNTFEPNVNLNDTPLSRLIENGKKPSNLASSHETPLSVGEILSSLDAGVPLPGRAAEYSKDRLSSKPNGIQQHVKRTNLWGRSNARKGQRSELVDPSSEEELAIQRLEVMKNDLQVRIAKEARSNAILQASLERRKQALHERRVALEQNVSRLQEQLQAERDLRAALEIGLSMYSSQFSSSHSMDSKTKAELEEIALAEADVARLKQKVAELHLQLNQQRQHQYGSSLSLDYVPTKSKYLGDTYFSNKCRMFVSSLVVSYSLQVAVC

SEQ ID NO: 168256 - protein, 954 aa, Zea Mays
MTPLSHCSVGNVSLFHIGSYRTTREIQIRRFQGSARYSRVASPSPRRLLQPQTAFHLISIYKRRSWSSPQRPRTLSAATVGTDVTVEDLNPSPSEEASDGNSEAAPDAVDASEQAEASTGQASSARKLGRNIRKSEMPPLNEEDLVPGASFTGKVMSIKPFGVFVDIGAFTEGLVHISRVSDGFVKDISSLFTVGQEVSVRLLEANKETKRISLTMREGDDYVKPQKEMPKAANGGRSATATPKSSPRQTRERQELKETLESKYVPGQSLNGTVKSTTRAGTFVTLPDGSEGFLPREEEALALFTLIGQSAMEIGKQIRVKVLNVAQGQATLTMKGVEDDEDDLKTLNMELKRDWSRGTNAFELAFRRNKEISAFLDQRERTKVPADTSVSAPEAESYQEEAAPEDEESSEELSSVSEVATDVSPPVSDASSQVGIQYSTSVANAAEDQTVGSESSPTISVELSSNGTPDSSIVSSVSETADKPTEPEESSAVEEVLVTASSEAGKEPAADTEAVPALNEKTGAEVAAAAGVAQASTTTATISPTLVKQLREATGAGMMDCKKALAETGGDIDKAQEFLRKKGLAAADKRAGRATAEGRVGSYIHDSRIGVLIEVNCETDFVSRGDIFKELVDDLAMQIAACPQVQYISIDDVPEELVKKETELEMQREDLLSKPEQIRAKIVEGRVKKRLGEFALFEQPFIKNDKVTISEWLKQTIATTGENMKVRRFARYNLGEGLEKKSQDFAAEVAAQTAAKPPPSAPPKEDKPAETTESAEKKPAVAVSASLVKQLRDETGAGMMDCKKALAESDGDLQKAQEFLRKKGLSSADKKSSRLAAEGLVGSYIHDSRIGCMIEVVACPQVDYVSVDDIPESVVGKEKEIEMQREDLQSKPESIREKIVEGRIAKRLGVMALLEQPYIKDDSKTVKDLVKETVASLGENIKVRRFVRYTLGED

SEQ ID NO: 168257 - protein, 421 aa, Zea Mays
MMDCKKALAETGGDIDKAQEFLRKKGLAAADKRAGRATAEGRVGSYIHDSRIGVLIEVNCETDFVSRGDIFKELVDDLAMQIAACPQVQYISIDDVPEELVKKETELEMQREDLLSKPEQIRAKIVEGRVKKRLGEFALFEQPFIKNDKVTISEWLKQTIATTGENMKVRRFARYNLGEGLEKKSQDFAAEVAAQTAAKPPPSAPPKEDKPAETTESAEKKPAVAVSASLVKQLRDETGAGMMDCKKALAESDGDLQKAQEFLRKKGLSSADKKSSRLAAEGLVGSYIHDSRIGCMIEVNSETDFVARNDKFRELVNDLAMQVVACPQVDYVSVDDIPESVVGKEKEIEMQREDLQSKPESIREKIVEGRIAKRLGVMALLEQPYIKDDSKTVKDLVKETVASLGENIKVRRFVRYTLGED

SEQ ID NO: 168258 - protein, 385 aa, Zea Mays
MSGGEKMLLFGSFTEDETKLFQGQPLKSPNKSVSKECERTEIQFGTLNFSVLSLEKVSTSSVVLPAKSANSETSAITKENTCSNEKKAAGSSLPNGRAILANGCPPVNVPANNDLFENVKKTEAVVPPVVPVKSISNPTPQMTLEVHNDGTEPTQSRKLDKEREITENGSPIVDTPIAAAPAEEAVTNLNKKTSQNMPLIPQGLRNTGNICFLNATLQALLSCSPFVHLLQDLRNRSIPKFGYPTLRAFVELISQFDVLDESVNKKKEKATTVAAKPLNPAMFDDVLRNFTPDVPAGITARPRQEDAQEFLSFAMDRVHDELLKLNGNGLDSKEGMVVSSSADDAWETVGRKNKSAIVRTHSFVPSELSAIFGGQLQSVVKAADT

SEQ ID NO: 168259 - protein, 492 aa, Zea Mays
MSGGEKMLLFGSFTEDETKLFQGQPLKSPNKSVSKECERTEIQFGTLNFSVLSLEKVSTSSVVLPAKSANSETSAITKENTCSNEKKAAGSSLPNGRAILANGCPPVNVPANNDLFENVKKTEAVVPPVVPVKSISNPTPQMTLEVHNDGTEPTQSRKLDKEREITENGSPIVDTPIAAAPAEEAVTNLNKKTSQNMPLIPQGLRNTGNICFLNATLQALLSCSPFVHLLQDLRNRSIPKFGYPTLRAFVELISQFDVLDESVNKKKEKATTVAAKPLNPAMFDDVLRNFTPDVPAGITARPRQEDAQEFLSFAMDRVHDELLKLNGNGLDSKEGMVVSSSADDAWETVGRKNKSAIVRTHSFVPSELSAIFGGQLQSVVKAAGNKASATVQPFLLLHLDIFPDAVQTLNDALRLFSTPESLEGYRTTAGKAGLVTARKSFKIHALPKIMILHLKRFSYGNNGSTKIYKPLGFTSELVLSRDLLSSPSQEKI

SEQ ID NO: 168260 - protein, 111 aa, Zea Mays
MADPTERDQFTDDEEEEDYLEDGEQGLGSEDEEGGGAGGKRKRLGNTLGGIGKRGVCYLSRVPPHMNPSHIRQMLSKYGEVLRIYLVPEGQGHHKHTSVKAKAYSEGYVCT

SEQ ID NO: 168261 - protein, 252 aa, Zea Mays
MADPTERDQFTDDEEEEDYLEDGEQGLGSEDEEGGGAGGKRKRLGNTLGGIGKRGVCYLSRVPPHMNPSHIRQMLSKYGEVLRIYLVPEGQGHHKHTSVKAKAYSEGWIEFAKKSVAKRVANLLNGEQIGGKKRSPFYYDIWNIKYLRKFKWDDLVGEMAEKTHIREQKLTLEIAAAKKQRDHYLSNIEKSRALKHIQERRKKKTEGAEASNVPETKTARSIPQKKPVVETDAKTKSTLSKDILAGVFGGSS

SEQ ID NO: 168262 - protein, 158 aa, Zea Mays
MCKYSYQHQQLWIEFAKKSVAKRVANLLNGEQIGGKKRSPFYYDIWNIKYLRKFKWDDLVGEMAEKTHIREQKLTLEIAAAKKQRDHYLSNIEKSRALKHIQERRKKRQKTEGAEASNVPETKTARSIPQKKPVVETDAKTKSTLSKDILAGVFGGSS

SEQ ID NO: 168263 - protein, 1591 aa, Zea Mays
MGDDAELEEGEACACGDDTAFVDPDVALSYIDEKLQDILGHFQKDFEGGVSADNLGSKFGAYGSFLPTYQRSPLPQTRSPPKAGNITSKSPFHQSNEDLSQKPPAVAVSSTPQSNGPVVPFSGDSIKKEIRPSTKSERGSVSHDSYGPSKCSDQNRLKVRIKVGSDNVLARNNAAIYSGLGLDISSPSSNEDSPDGRGSLSPEVNNVPHESPQTILQIMTCFSVPGGFLLSPLPANILQLTKKVVSSSKKWESNVDVENVQESYEGHVAKRVKSDGNKKRLIDAKNSKNKNDISAVMKKEIDMELVAGQKIVSEALKISLLSDPRAMDAKGENRLEEEPAENNLVGIRDARLKERCTKTDSMTVKVEPAKAEVMECLENSSFGSSEMDLSAVKGKSKPKTEKGEATLEDRNTTNDKDLISDRKQKKKIKSGSKYNASNFEGSISNVINEGASAVFHMGKISGLEALPYDTNGENNSKSEVKKMQREQKANVSTSSDFLEEEKHIHSSAAVKERSDMQSKPIHTGKKPKAKSHRDVRDNNFPEGSYGSKEQDSLENKSAFGDPRPKEKPWKFDSEDSDAPGISRKDSSYVKLDKHLATEEQKMHILPPATASTANAAFIHAAPVVIEEHWVCCDICQKWRLLPYEMNPSDLPKKWKCSMLQWLPGMNRCEISEEETTNALNALYVPAPANGIPSVGLPHVASSGLVTSSTPNMNGHIEQSRKRKNVLSDGNFVAEGSHQTQGSGHPMSNQHAPNKSKTHTDGIQYPIDRDSVSKSVDPTIKKQRSKSKHHSSYSDGVDLVERPKKHSKVKSKRDLDRDEYKASKKIRKEERHFDRDRNLGSGLASRDVPDEAKAFPVKSVTSKGSGERSDLSSSKQKNVSHHNHLENSKKARQDYVGFPEDESKEYFHQSDVQRSDLSSKKRIVKKWEESQYNPVAQVSKGAIKETYRDQNLKEAKLMSLNSEELFSMTSSKPPKAQHADQVLFYDGGRTNSELVEDNTHFSGKTGLPEQENSLSDKALDLGKPASDVAYIQTSAVTSSSSKASVSQKKKQTTQAMKTSSIESLSLSPQRNSNIDNVSASHSRVSGKDGSLNANSSTVPAMAKQLNTQVGVAVNDQWSSEPILVGSSRRKSDRDNGQVQLTQGHASDGIHPERGLNEDLQPESGRKDSNIKNSHIPKSSNHLHSGEKNNYNTDGSPMQPGKHLVDPKTPVLDKGDSSMHENKKSANSLQDRNGSTHCPPDGNPLLGLPSGKEKSYLKNNRQDSQKPKPQISPLKESKLDSHSTPLKPNGSKLTPQSRQYNAENGGRHGTAKQAIRSPADTFSPARKDNTSTAYALKEARDLKHKANRLKEEGKELESTRLYFDSALKFLHVASLLEPPSFDGLKQGDAAQSMYSDTAKLCNFVGHAYEKCKKMAAAALAYKCVEVAYLKAAYCKHPTASKDRQVLQAVVQTAPGESPSSSASDIDNLNNNGLSKGPSSKDANSPQVVGNHLLLATRNQPHLMRLLAYTNDVNSAFEATRKSHMAIASASGNHENGVDGLSSVKTVLDFNFRSVNDLLSMKLNIIQQCKSIGLSFELAGQLVQRVIIFLLFLR

SEQ ID NO: 168264 - protein, 1565 aa, Zea Mays
MGDDAELEEGEACACGDDTAFVDPDVALSYIDEKLQDILGHFQKDFEGGVSADNLGSKFGAYGSFLPTYQRSPLPQTRSPPKAGNITSKSPFHQSNEDLSQKPPAVAVSSTPQSNGPVVPFSGDSIKKEIRPSTKSERGSVSHDSYGPSKCSDQNRLKVRIKVGSDNVLARNNAAIYSGLGLDISSPSSNEDSPDGRGSLSPEVNNVPHESPQTILQIMTCFSVPGGFLLSPLPANILQLTKKVVSSSKKWESNVDVENVQESYEGHVAKRVKSDGNKKRLIDAKNSKNKNDISAVMKKEIDMELVAGQKIVSEALKISLLSDPRAMDAKGENRLEEEPAENNLVGIRDARLKERCTKTDSMTVKVEPAKAEVMECLENSSFGSSEMDLSAVKGKSKPKTEKGEATLEDRNTTNDKDLISDRKQKKKIKSGSKYNASNFEGSISNVINEGASAVFHMGKISGLEALPYDTNGENNSKSEVKKMQREQKANVSTSSDFLEEEKHIHSSAAVKERSDMQSKPIHTGKKPKAKSHRDVRDNNFPEGSYGSKEQDSLENKSAFGDPRPKEKPWKFDSEDSDAPGISRKDSSYVKLDKHLATEEQKMHILPPATASTANAAFIHAAPVVIEEHWVCCDICQKWRLLPYEMNPSDLPKKWKCSMLQWLPGMNRCEISEEETTNALNALYVPAPANGIPSVGLPHVASSGLVTSSTPNMNGHIEQSRKRKNVLSDGNFVAEGSHQTQGSGHPMSNQHAPNKSKTHTDGIQYPIDRDSVSKSVDPTIKKQRSKSKHHSSYSDGVDLVERPKKHSKVKSKRDLDRDEYKASKKIRKEERHFDRDRNLGSGLASRDVPDEAKAFPVKSVTSKGSGERSDLSSSKQKNVSHHNHLENSKKARQDYVGFPEDESKEYFHQSDVQRSDLSSKKRIVKKWEESQYNPVAQVSKGAIKETYRDQNLKEAKLMSLNSEELFSMTSSKPPKAQHADQVLFYDGGRTNSELVEDNTHFSGKTGLPEQENSLSDKALDLGKPASDVAYIQTSAVTSSSSKASVSQKKKQTTQAMKTSSIESLSLSPQRNSNIDNVSASHSRVSVNDQWSSEPILVGSSRRKSDRDNGQVQLTQGHASDGIHPERGLNEDLQPESGRKDSNIKNSHIPKSSNHLHSGEKNNYNTDGSPMQPGKHLVDPKTPVLDKGDSSMHENKKSANSLQDRNGSTHCPPDGNPLLGLPSGKEKSYLKNNRQDSQKPKPQISPLKESKLDSHSTPLKPNGSKLTPQSRQYNAENGGRHGTAKQAIRSPADTFSPARKDNTSTAYALKEARDLKHKANRLKEEGKELESTRLYFDSALKFLHVASLLEPPSFDGLKQGDAAQSMYSDTAKLCNFVGHAYEKCKKMAAAALAYKCVEVAYLKAAYCKHPTASKDRQVLQAVVQTAPGESPSSSASDIDNLNNNGLSKGPSSKDANSPQVVGNHLLLATRNQPHLMRLLAYTNDVNSAFEATRKSHMAIASASGNHENGVDGLSSVKTVLDFNFRSVNDLLSSMKLNIIQQCKSIGLSFELAGQLVQRVIIFLLFLR

SEQ ID NO: 168265 - protein, 1459 aa, Zea Mays
MGDDAELEEGEACACGDDTAFVDPDVALSYIDEKLQDILGHFQKDFEGGVSADNLGSKFGAYGSFLPTYQRSPLPQTRSPPKAGNITSKSPFHQSNEDLSQKPPAVAVSSTPQSNGPVVPFSGDSIKKEIRPSTKSERGSVSHDSYGPSKCSDQNRLKVRIKVGSDNVLARNNAAIYSGLGLDISSPSSNEDSPDGRGSLSPEVNNVPHESPQTILQIMTCFSVPGGFLLSPLPANILQLTKKVVSSSKKWESNVDVENVQESYEGHVAKRVKSDGNKKRLIDAKNSKNKNDISAVMKKEIDMELVAGQKIVSEALKISLLSDPRAMDAKGENRLEEEPAENNLVGIRDARLKERCTKTDSMTVKVEPAKAEVMECLENSSFGSSEMDLSAVKGKSKPKTEKGEATLEDRNTTNDKDLISDRKQKKKIKSGSKYNASNFEGSISNVINEGASAVFHMGKISGLEALPYDTNGENNSKSEVKKMQREQKANVSTSSDFLEEEKHIHSSAAVKERSDMQSKPIHTGKKPKAKSHRDVRDNNFPEGSYGSKEQDSLENKSAFGDPRPKEKPWKFDSEDSDAPGISRKDSSYVKLDKHLATEEQKMHILPPATASTANAAFIHAAPVVIEEHWVCCDICQKWRLLPYEMNPSDLPKKWKCSMLQWLPGMNRCEISEEETTNALNALYVPAPANGIPSVGLPHVASSGLVTSSTPNMNGHIEQSRKRKNVLSDGNFVAEGSHQTQGSGHPMSNQHAPNKSKTHTDGIQYPIDRDSVSKSVDPTIKKQRSKSKHHSSYSDGVDLVERPKKHSKVKSKRDLDRDEYKASKKIRKEERHFDRDRNLGSGLASRDVPDEAKAFPVKSVTSKGSGERSDLSSSKQKNVSHHNHLENSKKARQDYVGFPEDESKEYFHQSDVQRSDLSSKKRIVKKWEESQYNPVAQVSKGAIKETYRDQNLKEAKLMSLNSEELFSMTSSKPPKAQHADQVLFYDGGRTNSELVEDNTHFSGKTGLPEQENSLSDKALDLGKPASDVAYIQTSAVTSSSSKASVSQKKKQTTQAMKTSSIESLSLSPQRNSNIDNVSASHSRVSGKDGSLNANSSTVPAMAKQLNTQVGVAVNDQWSSEPILVGSSRRKSDRDNGQVQLTQGHASDGIHPERGLNEDLQPESGRKDSNIKNSHIPKSSNHLHSGEKNNYNTDGSPMQPGKHLVDPKTPVLDKGDSSMHENKKSANSLQDRNGSTHCPPDGNPLLGLPSGKEKSYLKNNRQDSQKPKPQISPLKESKLDSHSTPLKPNGSKLTPQSRQYNAENGGRHGTAKQAIRSPADTFSPARKDNTSTAYALKEARDLKHKANRLKEEGKELESTRLYFDSALKFLHVASLLEPPSFDGLKQGDAAQSMYSDTAKLCNFVGHAYEKCKKMAAAALAYKCVEVAYLKAAYCKHPTASKDRQVLQAVVQTAPGELHFIK

SEQ ID NO: 168266 - protein, 1454 aa, Zea Mays
MGDDAELEEGEACACGDDTAFVDPDVALSYIDEKLQDILGHFQKDFEGGVSADNLGSKFGAYGSFLPTYQRSPLPQTRSPPKAGNITSKSPFHQSNEDLSQKPPAVAVSSTPQSNGPVVPFSGDSIKKEIRPSTKSERGSVSHDSYGPSKCSDQNRLKVRIKVGSDNVLARNNAAIYSGLGLDISSPSSNEDSPDGRGSLSPEVNNVPHESPQTILQIMTCFSVPGGFLLSPLPANILQLTKKVVSSSKKWESNVDVENVQESYEGHVAKRVKSDGNKKRLIDAKNSKNKNDISAVMKKEIDMELVAGQKIVSEALKISLLSDPRAMDAKGENRLEEEPAENNLVGIRDARLKERCTKTDSMTVKVEPAKAEVMECLENSSFGSSEMDLSAVKGKSKPKTEKGEATLEDRNTTNDKDLISDRKQKKKIKSGSKYNASNFEGSISNVINEGASAVFHMGKISGLEALPYDTNGENNSKSEVKKMQREQKANVSTSSDFLEEEKHIHSSAAVKERSDMQSKPIHTGKKPKAKSHRDVRDNNFPEGSYGSKEQDSLENKSAFGDPRPKEKPWKFDSEDSDAPGISRKDSSYVKLDKHLATEEQKMHILPPATASTANAAFIHAAPVVIEEHWVCCDICQKWRLLPYEMNPSDLPKKWKCSMLQWLPGMNRCEISEEETTNALNALYVPAPANGIPSVGLPHVASSGLVTSSTPNMNGHIEQSRKRKNVLSDGNFVAEGSHQTQGSGHPMSNQHAPNKSKTHTDGIQYPIDRDSVSKSVDPTIKKQRSKSKHHSSYSDGVDLVERPKKHSKVKSKRDLDRDEYKASKKIRKEERHFDRDRNLGSGLASRDVPDEAKAFPVKSVTSKGSGERSDLSSSKQKNVSHHNHLENSKKARQDYVGFPEDESKEYFHQSDVQRSDLSSKKRIVKKWEESQYNPVAQVSKGAIKETYRDQNLKEAKLMSLNSEELFSMTSSKPPKAQHADQVLFYDGGRTNSELVEDNTHFSGKTGLPEQENSLSDKALDLGKPASDVAYIQTSAVTSSSSKASVSQKKKQTTQAMKTSSIESLSLSPQRNSNIDNVSASHSRVSGKDGSLNANSSTVPAMAKQLNTQVGVAVNDQWSSEPILVGSSRRKSDRDNGQVQLTQGHASDGIHPERGLNEDLQPESGRKDSNIKNSHIPKSSNHLHSGEKNNYNTDGSPMQPGKHLVDPKTPVLDKGDSSMHENKKSANSLQDRNGSTHCPPDGNPLLGLPSGKEKSYLKNNRQDSQKPKPQISPLKESKLDSHSTPLKPNGSKLTPQSRQYNAENGGRHGTAKQAIRSPADTFSPARKDNTSTAYALKEARDLKHKANRLKEEGKELESTRLYFDSALKFLHVASLLEPPSFDGLKQGDAAQSMYSDTAKLCNFVGHAYEKCKKMAAAALAYKCVEVAYLKAAYCKHPTASKDRQVLQAVVQTAPDK

SEQ ID NO: 168267 - protein, 1590 aa, Zea Mays
MGDDAELEEGEACACGDDTAFVDPDVALSYIDEKLQDILGHFQKDFEGGVSADNLGSKFGAYGSFLPTYQRSPLPQTRSPPKAGNITSKSPFHQSNEDLSQKPPAVAVSSTPQSNGPVVPFSGDSIKKEIRPSTKSERGSVSHDSYGPSKCSDQNRLKVRIKVGSDNVLARNNAAIYSGLGLDISSPSSNEDSPDGRGSLSPEVNNVPHESPQTILQIMTCFSVPGGFLLSPLPANILQLTKKVVSSSKKWESNVDVENVQESYEGHVAKRVKSDGNKKRLIDAKNSKNKNDISAVMKKEIDMELVAGQKIVSEALKISLLSDPRAMDAKGENRLEEEPAENNLVGIRDARLKERCTKTDSMTVKVEPAKAEVMECLENSSFGSSEMDLSAVKGKSKPKTEKGEATLEDRNTTNDKDLISDRKQKKKIKSGSKYNASNFEGSISNVINEGASAVFHMGKISGLEALPYDTNGENNSKSEVKKMQREQKANVSTSSDFLEEEKHIHSSAAVKERSDMQSKPIHTGKKPKAKSHRDVRDNNFPEGSYGSKEQDSLENKSAFGDPRPKEKPWKFDSEDSDAPGISRKDSSYVKLDKHLATEEQKMHILPPATASTANAAFIHAAPVVIEEHWVCCDICQKWRLLPYEMNPSDLPKKWKCSMLQWLPGMNRCEISEEETTNALNALYVPAPANGIPSVGLPHVASSGLVTSSTPNMNGHIEQSRKRKNVLSDGNFVAEGSHQTQGSGHPMSNQHAPNKSKTHTDGIQYPIDRDSVSKSVDPTIKKQRSKSKHHSSYSDGDLVERPKKHSKVKSKRDLDRDEYKASKKIRKEERHFDRDRNLGSGLASRDVPDEAKAFPVKSVTSKGSGERSDLSSSKQKNVSHHNHLENSKKARQDYVGFPEDESKEYFHQSDVQRSDLSSKKRIVKKWEESQYNPVAQVSKGAIKETYRDQNLKEAKLMSLNSEELFSMTSSKPPKAQHADQVLFYDGGRTNSELVEDNTHFSGKTGLPEQENSLSDKALDLGKPASDVAYIQTSAVTSSSSKASVSQKKKQTTQAMKTSSIESLSLSPQRNSNIDNVSASHSRVSGKDGSLNANSSTVPAMAKQLNTQVGVAVNDQWSSEPILVGSSRRKSDRDNGQVQLTQGHASDGIHPERGLNEDLQPESGRKDSNIKNSHIPKSSNHLHSGEKNNYNTDGSPMQPGKHLVDPKTPVLDKGDSSMHENKKSANSLQDRNGSTHCPPDGNPLLGLPSGKEKSYLKNNRQDSQKPKPQISPLKESKLDSHSTPLKPNGSKLTPQSRQYNAENGGRHGTAKQAIRSPADTFSPARKDNTSTAYALKEARDLKHKANRLKEEGKELESTRLYFDSALKFLHVASLLEPPSFDGLKQGDAAQSMYSDTAKLCNFVGHAYEKCKKMAAAALAYKCVEVAYLKAAYCKHPTASKDRQVLQAVVQTAPGESPSSSASDIDNLNNNGLSKGPSSKDANSPQVVGNHLLLATRNQPHLMRLLAYTNDVNSAFEATRKSHMAIASASGNHENGVDGLSSVKTVLDFNFRSVNDLLSMKLNIIQQCKSIGLSFELAGQLVQRVIIFLLFLR

SEQ ID NO: 168268 - protein, 1586 aa, Zea Mays
MGDDAELEEGEACACGDDTAFVDPDVALSYIDEKLQDILGHFQKDFEGGVSADNLGSKFGAYGSFLPTYQRSPLPQTRSPPKAGNITSKSPFHQSNEKPPAVAVSSTPQSNGPVVPFSGDSIKKEIRPSTKSERGSVSHDSYGPSKCSDQNRLKVRIKVGSDNVLARNNAAIYSGLGLDISSPSSNEDSPDGRGSLSPEVNNVPHESPQTILQIMTCFSVPGGFLLSPLPANILQLTKKVVSSSKKWESNVDVENVQESYEGHVAKRVKSDGNKKRLIDAKNSKNKNDISAVMKKEIDMELVAGQKIVSEALKISLLSDPRAMDAKGENRLEEEPAENNLVGIRDARLKERCTKTDSMTVKVEPAKAEVMECLENSSFGSSEMDLSAVKGKSKPKTEKGEATLEDRNTTNDKDLISDRKQKKKIKSGSKYNASNFEGSISNVINEGASAVFHMGKISGLEALPYDTNGENNSKSEVKKMQREQKANVSTSSDFLEEEKHIHSSAAVKERSDMQSKPIHTGKKPKAKSHRDVRDNNFPEGSYGSKEQDSLENKSAFGDPRPKEKPWKFDSEDSDAPGISRKDSSYVKLDKHLATEEQKMHILPPATASTANAAFIHAAPVVIEEHWVCCDICQKWRLLPYEMNPSDLPKKWKCSMLQWLPGMNRCEISEEETTNALNALYVPAPANGIPSVGLPHVASSGLVTSSTPNMNGHIEQSRKRKNVLSDGNFVAEGSHQTQGSGHPMSNQHAPNKSKTHTDGIQYPIDRDSVSKSVDPTIKKQRSKSKHHSSYSDGDLVERPKKHSKVKSKRDLDRDEYKASKKIRKEERHFDRDRNLGSGLASRDVPDEAKAFPVKSVTSKGSGERSDLSSSKQKNVSHHNHLENSKKARQDYVGFPEDESKEYFHQSDVQRSDLSSKKRIVKKWEESQYNPVAQVSKGAIKETYRDQNLKEAKLMSLNSEELFSMTSSKPPKAQHADQVLFYDGGRTNSELVEDNTHFSGKTGLPEQENSLSDKALDLGKPASDVAYIQTSAVTSSSSKASVSQKKKQTTQAMKTSSIESLSLSPQRNSNIDNVSASHSRVSGKDGSLNANSSTVPAMAKQLNTQVGVAVNDQWSSEPILVGSSRRKSDRDNGQVQLTQGHASDGIHPERGLNEDLQPESGRKDSNIKNSHIPKSSNHLHSGEKNNYNTDGSPMQPGKHLVDPKTPVLDKGDSSMHENKKSANSLQDRNGSTHCPPDGNPLLGLPSGKEKSYLKNNRQDSQKPKPQISPLKESKLDSHSTPLKPNGSKLTPQSRQYNAENGGRHGTAKQAIRSPADTFSPARKDNTSTAYALKEARDLKHKANRLKEEGKELESTRLYFDSALKFLHVASLLEPPSFDGLKQGDAAQSMYSDTAKLCNFVGHAYEKCKKMAAAALAYKCVEVAYLKAAYCKHPTASKDRQVLQAVVQTAPGESPSSSASDIDNLNNNGLSKGPSSKDANSPQVVGNHLLLATRNQPHLMRLLAYTNDVNSAFEATRKSHMAIASASGNHENGVDGLSSVKTVLDFNFRSVNDLLSMKLNIIQQCKSIGLSFELAGQLVQRVIIFLLFLR

SEQ ID NO: 168269 - protein, 1090 aa, Zea Mays
MGDDAELEEGEACACGDDTAFVDPDVALSYIDEKLQDILGHFQKDFEGGVSADNLGSKFGAYGSFLPTYQRSPLPQTRSPPKAGNITSKSPFHQSNEDLSQKPPAVAVSSTPQSNGPVVPFSGDSIKKEIRPSTKSERGSVSHDSYGPSKCSDQNRLKVRIKVGSDNVLARNNAAIYSGLGLDISSPSSNEDSPDGRGSLSPEVNNVPHESPQTILQIMTCFSVPGGFLLSPLPANILQLTKKVVSSSKKWESNVDVENVQESYEGHVAKRVKSDGNKKRLIDAKNSKNKNDISAVMKKEIDMELVAGQKIVSEALKISLLSDPRAMDAKGENRLEEEPAENNLVGIRDARLKERCTKTDSMTVKVEPAKAEVMECLENSSFGSSEMDLSAVKGKSKPKTEKGEATLEDRNTTNDKDLISDRKQKKKIKSGSKYNASNFEGSISNVINEGASAVFHMGKISGLEALPYDTNGENNSKSEVKKMQREQKANVSTSSDFLEEEKHIHSSAAVKERSDMQSKPIHTGKKPKAKSHRDVRDNNFPEGSYGSKEQDSLENKSAFGDPRPKEKPWKFDSEDSDAPGISRKDSSYVKLDKHLATEEQKMHILPPATASTANAAFIHAAPVVIEEHWVCCDICQKWRLLPYEMNPSDLPKKWKCSMLQWLPGMNRCEISEEETTNALNALYVPAPANGIPSVGLPHVASSGLVTSSTPNMNGHIEQSRKRKNVLSDGNFVAEGSHQTQGSGHPMSNQHAPNKSKTHTDGIQYPIDRDSVSKSVDPTIKKQRSKSKHHSSYSDGVDLVERPKKHSKVKSKRDLDRDEYKASKKIRKEERHFDRDRNLGSGLASRDVPDEAKAFPVKSVTSKGSGERSDLSSSKQKNVSHHNHLENSKKARQDYVGFPEDESKEYFHQSDVQRSDLSSKKRIVKKWEESQYNPVAQVSKGAIKETYRDQNLKEAKLMSLNSEELFSMTSSKPPKAQHADQVLFYDGGRTNSELVEDNTHFSGKTGLPEQENSLSDKALDLGKPASDVAYIQTSAVTSSSSKASVSQKKKQTTQAMKTSSIESLSLSPQRNSNIDNVSASHSRVSGRRKRA

SEQ ID NO: 168270 - protein, 1561 aa, Zea Mays
MGDDAELEEGEACACGDDTAFVDPDVALSYIDEKLQDILGHFQKDFEGGVSADNLGSKFGAYGSFLPTYQRSPLPQTRSPPKAGNITSKSPFHQSNEKPPAVAVSSTPQSNGPVVPFSGDSIKKEIRPSTKSERGSVSHDSYGPSKCSDQNRLKVRIKVGSDNVLARNNAAIYSGLGLDISSPSSNEDSPDGRGSLSPEVNNVPHESPQTILQIMTCFSVPGGFLLSPLPANILQLTKKVVSSSKKWESNVDVENVQESYEGHVAKRVKSDGNKKRLIDAKNSKNKNDISAVMKKEIDMELVAGQKIVSEALKISLLSDPRAMDAKGENRLEEEPAENNLVGIRDARLKERCTKTDSMTVKVEPAKAEVMECLENSSFGSSEMDLSAVKGKSKPKTEKGEATLEDRNTTNDKDLISDRKQKKKIKSGSKYNASNFEGSISNVINEGASAVFHMGKISGLEALPYDTNGENNSKSEVKKMQREQKANVSTSSDFLEEEKHIHSSAAVKERSDMQSKPIHTGKKPKAKSHRDVRDNNFPEGSYGSKEQDSLENKSAFGDPRPKEKPWKFDSEDSDAPGISRKDSSYVKLDKHLATEEQKMHILPPATASTANAAFIHAAPVVIEEHWVCCDICQKWRLLPYEMNPSDLPKKWKCSMLQWLPGMNRCEISEEETTNALNALYVPAPANGIPSVGLPHVASSGLVTSSTPNMNGHIEQSRKRKNVLSDGNFVAEGSHQTQGSGHPMSNQHAPNKSKTHTDGIQYPIDRDSVSKSVDPTIKKQRSKSKHHSSYSDGVDLVERPKKHSKVKSKRDLDRDEYKASKKIRKEERHFDRDRNLGSGLASRDVPDEAKAFPVKSVTSKGSGERSDLSSSKQKNVSHHNHLENSKKARQDYVGFPEDESKEYFHQSDVQRSDLSSKKRIVKKWEESQYNPVAQVSKGAIKETYRDQNLKEAKLMSLNSEELFSMTSSKPPKAQHADQVLFYDGGRTNSELVEDNTHFSGKTGLPEQENSLSDKALDLGKPASDVAYIQTSAVTSSSSKASVSQKKKQTTQAMKTSSIESLSLSPQRNSNIDNVSASHSRVSVNDQWSSEPILVGSSRRKSDRDNGQVQLTQGHASDGIHPERGLNEDLQPESGRKDSNIKNSHIPKSSNHLHSGEKNNYNTDGSPMQPGKHLVDPKTPVLDKGDSSMHENKKSANSLQDRNGSTHCPPDGNPLLGLPSGKEKSYLKNNRQDSQKPKPQISPLKESKLDSHSTPLKPNGSKLTPQSRQYNAENGGRHGTAKQAIRSPADTFSPARKDNTSTAYALKEARDLKHKANRLKEEGKELESTRLYFDSALKFLHVASLLEPPSFDGLKQGDAAQSMYSDTAKLCNFVGHAYEKCKKMAAAALAYKCVEVAYLKAAYCKHPTASKDRQVLQAVVQTAPGESPSSSASDIDNLNNNGLSKGPSSKDANSPQVVGNHLLLATRNQPHLMRLLAYTNDVNSAFEATRKSHMAIASASGNHENGVDGLSSVKTVLDFNFRSVNDLLSSMKLNIIQQCKSIGLSFELAGQLVQRVIIFLLFLR

SEQ ID NO: 168271 - protein, 126 aa, Zea Mays
MPQHISYVFSPLFFYSYQPSRPCFHCRQRNTTGPACQPADTIEKPQPVDPVAGPTRRSTSKMATETTCAPPVTGPTRRSTSRMATAPPDDPPHPPPAEAGAATPSRSVRTGNCLSGDVMESTILNF

SEQ ID NO: 168272 - protein, 137 aa, Zea Mays
MATETTCAPPVTGPTRRSTSRMATAPPDDPPHPPPAEAGAATPSRSRPSGFEQLDGRVKELTSSQAELLERIQKLKHEVQNWRSNVETQVKTYQNELQDLKKGLDSEVEQLKSAVRSAVQEEKGNLPAQNTDFRDEQ

SEQ ID NO: 168273 - protein, 1033 aa, Zea Mays
MVDTRRSSAAKRRGPSEDSSPSPPTTQADPTTAGLPVEPASPPPSSGSRSGKRAKVARAEDPGAPRGKAVDPAAVDVLDSSVANLQGVARPPAANVAASSAVSNSVGALGVFRLAAPTGFTFTVGSAYSAAFVVPGRRKRNQSVRAIPTGEGTLWKPRPAGGRAEAWGRLISQSSEYPSIPIYTTHFTIGNGGKCDLKLTETSPGPLICKLKHVKRGAALEIYMNKVVHVNGKALDKAAKVTLIGGDEVMFVSLGTHAYIFQQLLEEKASTPSLCSKCVIQQEQYPVVKDKEIVSSLCKTVGEQSYHPSEENMTFGRHQLLKDDLKKAAISASDISESFDNFPYYLSENTKNVLLSSSYVNLCCKESTKWTKDISSLCKRVLLSGPPGSEIYQELLVKALTKSFGAKLLVIDYSLLSGGQPSKSKESKPYKKGDRVRYIGPIQSSGFMFEGQRAPDYGSQGEVRLTFAENGSSKVGVRFDKQIPGGIDLGGSCELDHGLFCSVDSLCLDGPGWEDRAKHSFDVVFEFASEESQQVPVILFLKDVEKICGNNYTYHGLKNKLESFPAGVFIVGSQIQTDARKDKSNNGSPWLKFSYSQAAILDLAFQDSFGRAGEKNKEALKMSKHITKLFPNKVTIESPEDETELSQWKQLLGRDIEILKAKANFLKIQSFLTRHGMECTDLESVVCVKDRNLTSECVDKIVGYALSYQLKDHPIQTPGKDARVVLSGVSLKYGIDLLESIQSGPKKKSTKKSLKDVVTENEFEKRLLPDVIPPDEIGVTFEDIGALENVKETLQELVMLPLQRPELFSKGQLMKPCKGILLFGPPGTGKTMLAKAVATEAGANFINISMSSIASKWFGEGEKYVKAVFSLASKISPSVIFVDEVDGMLGRRENPGEHEAMRKMKNEFMVNWDGLRTKDKERVLVLAATNRPFDLDEAVVRRLPRRLMVNLPDAPNRKKILSVILAKEDLADDVDLEALANLTDGYSGSDLKVGILLRYFFLILFPRFFVLLATPIFAEPVYNCSTSSHKGNS

SEQ ID NO: 168274 - protein, 1055 aa, Zea Mays
MVDTRRSSAAKRRGPSEDSSPSPPTTQADPTTAGLPVEPASPPPSSGSRSGKRAKVAVARAEDPGAPRGKAVDPAAVDVLDSSVANLQGVARPPAANVAASSAVSNSVGRRKRNQSVRAIPTGEGTLWKPRPAGGRAEAWGRLISQSSEYPSIPIYTTHFTIGNGGKCDLKLTETSPGPLICKLKHVKRGAALEIYMNKVVHVNGKALDKAAKVTLIGGDEVMFVSLGTHAYIFQQLLEEKASTPSLCSKCVIQQEQYPVVKDKEIVSSLCKTVGEQSYHPSEENMTFGRHQLLKDDLKKAAISASDISESFDNFPYYLSENTKNVLLSSSYVNLCCKESTKWTKDISSLCKRVLLSGPPGSEIYQELLVKALTKSFGAKLLVIDYSLLSGPSKSKESKPYKKGDRVRYIGPIQSSGFMFEGQRAPDYGSQGEVRLTFAENGSSKVGVRFDKQIPGGIDLGGSCELDHGLFCSVDSLCLDGPGWEDRAKHSFDVVFEFASEESQQVPVILFLKDVEKICGNNYTYHGLKNKLESFPAGVFIVGSQIQTDARKDKSNNGSPWLKFSYSQAAILDLAFQDSFGRAGEKNKEALKMSKHITKLFPNKVTIESPEDETELSQWKQLLGRDIEILKAKANFLKIQSFLTRHGMECTDLESVVCVKDRNLTSECVDKIVGYALSYQLKDHPIQTPGKDARVVLSGVSLKYGIDLLESIQSGPKKKSTKKSLKDVVTENEFEKRLLPDVIPPDEIGVTFEDIGALENVKETLQELVMLPLQRPELFSKGQLMKPCKGILLFGPPGTGKTMLAKAVATEAGANFINISMSSIASKWFGEGEKYVKAVFSLASKISPSVIFVDEVDGMLGRRENPGEHEAMRKMKNEFMVNWDGLRTKDKERVLVLAATNRPFDLDEAVVRRLPRRLMVNLPDAPNRKKILSVILAKEDLADDVDLEALANLTDGYSGSDLKNLCITAAHRPIREILEREKKERTLAEAENRPAPPQCCSGDVRSLKFSDFKHAHEQVCASISSDSKNMNELVQWNDLYGEGGSRHKTPLSYFM

SEQ ID NO: 168275 - protein, 941 aa, Zea Mays
MRIGVLYHIMHEYPSIPIYTTHFTIGNGGKCDLKLTETSPGPLICKLKHVKRGAALEIYMNKVVHVNGKALDKAAKVTLIGGDEVMFVSLGTHAYIFQQLLEEKASTPSLCSKCVIQQEQYPVVKVGMGNPLGTRNPLGYEFGQNFIPVMDKEIVSSLCKTVGEQSYHPSEENMTFGRHQLLKDDLKKAAISASDISESFDNFPYYLSENTKNVLLSSSYVNLCCKESTKWTKDISSLCKRVLLSGPPGSEIYQELLVKALTKSFGAKLLVIDYSLLSGAVLILLMVSSGDRVRYIGPIQSSGFMFEGQRAPDYGSQGEVRLTFAENGSSKVGVRFDKQIPGGIDLGGSCELDHGLFCSVDSLCLDGPGWEDRAKHSFDVVFEFASEESQQVPVILFLKDVEKICGNNYTYHGLKNKLESFPAGVFIVGSQIQTDARKDKSNNGSPWLKFSYSQAAILDLAFQDSFGRAGEKNKEALKMSKHITKLFPNKVTIESPEDETELSQWKQLLGRDIEILKAKANFLKIQSFLTRHGMECTDLESVVCVKDRNLTSECVDKIVGYALSYQLKDHPIQTPGKDARVVLSGVSLKYGIDLLESIQSGPKKKSTKKSLKDVVTENEFEKRLLPDVIPPDEIGVTFEDIGALENVKETLQELVMLPLQRPELFSKGQLMKPCKGILLFGPPGTGKTMLAKAVATEAGANFINISMSSIASKWFGEGEKYVKAVFSLASKISPSVIFVDEVDGMLGRRENPGEHEAMRKMKNEFMVNWDGLRTKDKERVLVLAATNRPFDLDEAVVRRLPRRLMVNLPDAPNRKKILSVILAKEDLADDVDLEALANLTDGYSGSDLKNLCITAAHRPIREILEREKKERTLAEAENRPAPPQCCSGDVRSLKFSDFKHAHEQVCASISSDSKNMNELVQWNDLYGEGGSRHKTPLSYFM

SEQ ID NO: 168276 - protein, 385 aa, Zea Mays
MLGKISQTMGLLGSSSHIAKQQYLTLHFSFGRAGEKNKEALKMSKHITKLFPNKVTIESPEDETELSQWKQLLGRDIEILKAKANFLKIQSFLTRHGMECTDLESVVCVKDRNLTSECVDKIVGYALSYQLKDHPIQTPGKDARVVLSGVSLKYGIDLLESIQSGPKKKSTKKSLKDVVTENEFEKRLLPDVIPPDEIGVTFEDIGALENVKETLQELVMLPLQRPELFSKGQLMKVDGMLGRRENPGEHEAMRKMKNEFMVNWDGLRTKDKERVLVLAATNRPFDLDEAVVRRLPRRLMVNLPDAPNRKKILSVILAKEDLADDVDLEALANLTDGYSGSDLKVGILLRYFFLILFPRFFVLLATPIFAEPVYNCSTSSHKGNS

SEQ ID NO: 168277 - protein, 182 aa, Zea Mays
MLLQNPPKKRVITQDAQVGTHGLICGSPCLDGPIPDDPHSQRLEPRRANRGPFSGEELLDPLLHGGPVAPQAPENGLRRGLPDGSLELVHCDDGIVGCERGGTSAVDRLARAAVGAREESPGDGVEVGRGGREECRDGDVGGCDGGGAGRERGQEVEGFERGLETGSAARRRIRTPRRRRGV

SEQ ID NO: 168278 - protein, 290 aa, Zea Mays
MLRLRFRPAPLSLKLAFTVSLAVSFSVSCCASSSYSSRTSSRSPQAVAADLLSVLAGPRAAARVPAAEASRLRACLRFLAPANPTAQKVSSWSRGGPRKFLLDGCDAGAAEADEMVMWPPAPVLDLARLAVDSGGDPGAIHRALDPTMLPVPDVEGSQKNKCHLTRTPYGRRFANEEINSYFAFLFELIVARAPSVGLNVSLNRYDLFHGHLFLASETGRLGILFHAKEYPAFNKELFPYNLGYCQAGSNVPYDDSMNLRNVLWLAPLPSKETKAWLAPGSAILNTQPCS

SEQ ID NO: 168279 - protein, 285 aa, Zea Mays
MLRLRFRPAPLSLKLAFTVSLAVSFSVSCCASSSYSSRTSSRSPQAVAADLLSVLAGPRAAARVPAAEASRLRACLRFLAPANPTAQKVSSWSRGGPRKFLLDGCDAGAAEADEMVMWPPAPVLDLARLAVDSGGDPGAIHRALDPTMLPVPDVEGSQKNKCHLTRTPYGRRFANEEINSYFAFLFELIVARAPSVGLNVSLNRYDLFHGHLFLASETGRLGILFHAKEYPAFNKELFPYNLGYCQAGSNVPYDDSMNLRNVLWLAPLPSKETKAWSTSCLGRTS

SEQ ID NO: 168280 - protein, 271 aa, Zea Mays
MLRLRFRPAPLSLKLAFTVSLAVSFSVSCCASSSYSSRTSSRSPQAVAADLLSVLAGPRAAARVPAAEASRLRACLRFLAPANPTAQKVSSWSRGGPRKFLLDGCDAGAAEADEMVMWPPAPVLDLARLAVDSGGDPGAIHRALDPTMLPVPDVEGSQKNKCHLTRTPYGRRFANEEINSYFAFLFELIVARAPSVGLNVSLNRYDLFHGHLFLASETGRLGILTKTYISKLKLEDGVACRGKDGTWIFCKLLLVELTTYGVKSSLISRFP

SEQ ID NO: 168281 - protein, 255 aa, Zea Mays
MLRLRFRPAPLSLKLAFTVSLAVSFSVSCCASSSYSSRTSSRSPQAVAADLLSVLAGPRAAARVPAAEASRLRACLRFLAPANPTAQKVSSWSRGGPRKFLLDGCDAGAAEADEMVMWPPAPVLDLARLAVDSGGDPGAIHRALDPTMLPVPDVEGSQKNKCHLTRTPYGRRFANEEINSYFAFLFELIVARAPSVGLNVSLNRYDLFHGHLFLASETGRLGILFHAKEYPAFNKELFPYNLGYCQDLMYHMMIR

SEQ ID NO: 168282 - protein, 377 aa, Zea Mays
MFPIQIPTPAAAGLVRTLTTPPSAFQSTTHAPFLSGVINSAAARSCRKRRYADAHEGASSPRRRRRRRFLLVPNSFLAGRSFALRTLASALHKRRHDAATSSARPSSRRLRLLSPVLFPALRPLSPRVSLATAPRSHRKIHVDDARRAVSTPCRRRRRSSLLPRVRHFRPFALRFLLTPGALSPHRRRKPAEVDMGNLISQLLWKSTRDGVSEAHTKRLDGSPEVVDLTVEPELENNDAVGRMFGDRSVPALGSSKSPEKKATFYEEPHGRRLQESGFKKLKLAELPDPLDNTSKEDLSELFTPLSDKDEREVNALLCSSDDSDKIVVIHTPSNIEITKEKLQCLRPRGWLNDEVINLYIELLKEREKREPNSLLAE

SEQ ID NO: 168283 - protein, 420 aa, Zea Mays
MFPIQIPTPAAAGLVRTLTTPPSAFQSTTHAPFLSGVINSAAARSCRKRRYADAHEGASSPRRRRRRRFLLVPNSFLAGRSFALRTLASALHKRRHDAATSSARPSSRRLRLLSPVLFPALRPLSPRVSLATAPRSHRKIHVDDARRAVSTPCRRRRRSSLLPRVRHFRPFALRFLLTPGALSPHRRRKPAEVDMGNLISQLLWKSTRDGVSEAHTKRLDGSPEVVDLTVEPELENNDAVGRMFGDRSVPALGSSKSPEKKATFYEEPHGRRLQESGFKKLKLAELPDPLDNTSKEDLSELFTPLSDKDEREVNALLCSSDDSDKIVVIHTPSNIEITKEKLQCLRPRGWLNDEVINLYIELLKEREKREPNRFLKCHFFNTFFYKRLTCGIAGYDYQSVRRWTTFKRLGYGLVECEKNL

SEQ ID NO: 168284 - protein, 325 aa, Zea Mays
MFPIQIPTPAAAGLVRTLTTPPSAFQSTTHAPFLSGVINSAAARSCRKRRYADAHEGASSPRRRRRRRFLLVPNSFLAGRSFALRTLASALHKRRHDAATSSARPSSRRLRLLSPVLFPALRPLSPRVSLATAPRSHRKIHVDDARRAVSTPCRRRRRSSLLPRVRHFRPFALRFLLTPGALSPHRRRKPAEVDMGNLISQLLWKSTRDGVSEAHTKRLDGSPEVVDLTVEPELENNDAVGRMFGDRSVPALGSSKSPEKKATFYEEPHGRRLQESGFKKLKLAELPDPLDNTSKEDLSELFTPLSDKDEREVNALLCSSDDRYT

SEQ ID NO: 168285 - protein, 55 aa, Zea Mays
MSLNCRNNIPEVSQCLHRNSLSDPIILKIYVRIGSSKLVRLEFLCILEHLQEGSY

SEQ ID NO: 168286 - protein, 834 aa, Zea Mays
MTKLTSELLRPVVPAAALDEAALLRYLVANVPGFPGPAPALSLTQFGHGQSNPTYCIHASAPGGGQPRRYVLRKKPPGAILQSAHAVEREYQVLKALGDHTDVPVPKVYCLCTDASVIGTPFYIMEYLEGIIYPDSALPGVTPSKRRAIYLSTAKTLAAIHKVDINAIGLQKYGRRDNYCKRQVERWERQYLASTGEGKPARYQRMLDLARWLKEHVPEEDSSPGPGTGLVHGDYRPDNLVFHPTEDRVIGVIDWELSTLGNQMCDVAYSCLPYIIDAAPSARTSYGGFQDTGIPDGIPQLEEYLSIYCSFAARPWPAANWKFYIAFSLFRGASIYAGVYHRWTMGNASGGERAKFAGRVANAMIDCAWDFINRVNVLQELPSKGSQVLGASWQEFHREEESSTSEKNQGKFVPSEKVMQLRKKLIKFIEDHIYPMEAEFYKHAQSTSRWTIHPEEENLKALAKKEGLWNLFIPLDSAARARKLLFEDHSQISLGSSNNLLLGAGLTNLEYGYLCEIMGRSVWAPQIFNCGAPDTGNMEVLLRYGTKEQQKQWLVPLLEGTIRSGFAMTEPQVASSDATNIECSISRQGDFYVINGRKWWTSGAMDPRCKILILMGKTDFSAPKHKQQSMILVDINTPGVQIKRPLLVFGFDDAPHGHAEITFENVRVPVTNILLGEGRGFEIAQGRLGPGRLHHCMRLVGAAERGMNLMVERALNRTAFGKRIAQHGSFLSDLAKCRIELEQARLLVLEAADQLDRHGNKKARGILAMAKVAAPNMALKVLDMAMQVHGAAGVSSDTVLSHLWATARTLRIADGPDEVHLGTIAKLELRRARL

SEQ ID NO: 168287 - protein, 776 aa, Zea Mays
MTKLTSELLRPVVPAAALDEAALLRYLVANVPGFPGPAPALSLTQFGHGQSNPTYCIHASAPGGGQPRRYVLRKKPPGAILQSAHAVEREYQVLKALGDHTDVPVPKVYCLCTDASVIGTPFYIMEYLEGIIYPDSALPGVTPSKRRAIYLSTAKTLAAIHKVDINAIGLQKYGRRDNYCKRQVERWERQYLASTGEGKPARYQRMLDLARWLKEHVPEEDSSPGPGTGLVHGDYRPDNLVFHPTEDRVIGVIDWELSTLGNQMCDVAYSCLPYIIDAAPSARTSYGGFQDTGIPDGIPQLEEYLSIYCSFAARPWPAANWKFYIAFSLFRGASIYAGVYHRWTMGNASGGERAKFAGRVANAMIDCAWDFINRVNVLQELPSKGSQVLGASWQEFHREEESSTSEKNQGKFVPSEKVMQLRKKLIKFIEDHIYPMEAEFYKHAQSTSRWTIHPEEENLKALAKKEGLWNLFIPLDSAARARKLLFEDHSQISLGSSNNLLLGAGLTNLEYGYLCEIMGRSVWAPQIFNCGAPDTGNMEVLLRYGTKEQQKQWLVPLLEGTIRSGFAMTEPQVASSDATNIECSISRQGDFYVINGRKWWTSGAMDPRCKILILMGKTDFSAPKHKQQSMILVDINTPGVQIKRPLLVFGFDDAPHGHAEITFENVRVPVTNILLGEGRGFEIAQGRLGPGRLHHCMRLVGAAERGMNLMVERALNRTAFGKRIAQHGSFLSDLAKCRIELEQARLLVLEAADQLDRHGNKKARGILAMAKLQIWP

SEQ ID NO: 168288 - protein, 470 aa, Zea Mays
MNDAGEAEAQELAPPGASAAAGLQGRAEVDTSTPFKSVREAVDRFGGSAAWSSDLIKRMFALPPSPKKQEGGDELADLEEQTAQLEKELGVKERETLDVLKELESTKKVVADLKLKIQNEGAGAFCIPEESVRGQAELPTAAEEVAEVQPENAETDVVMGALHVQLHQSPGTSVLKGLEQAKANLNRTTSDLAAIRASVESLRNDIAKERILVERSREKVCANTTLIASLEDELNRTAQKLQTLRDLQRRRDDQSDIFIEIKKMTSELEQLRNAASAAKSEAAMLSAEIEQMRASRTESDSLRKLEEARLQVEECKKALQDAQKRVDAANRGKSAVEEALRRCRSTTGHRRRSVHDPPRFKHPAPRSRDSQNMDIVGVSKGPLKPTLSIGQILSMKLMGPDGYDKSVWDDASEASTMSLGHILNRRHAVVYSSDATAQKKFPGKRKKFAFTGLSIFLARQAKRKKEKGSH

SEQ ID NO: 168289 - protein, 1299 aa, Zea Mays
MEAVKASEARRDPPLLRAVELSRVVAEEGAGAELAGILVSNLCFAHNSPSLWKLLGQAVASRLLCPLHVLALLTPRVLPQRRAQPEAYRLYLELLKCHATSSLLAMEAGPNRDKIGKSIAEALQLSKVYGFSGTEFGHVVILFVLAVVNKLIDSILEDCGFPSVMAEGQESVYAIEGPQPMDLDIKRGSTENQNEHREQLRRKNTFMALDVLHMMAADRKIQSFLSLIFLNMPEKFSSLRQRLSSIEAHKVTLETLLPSGHKINDLLINIWRVCKAGYQPNNKHILGVLGNMGSGGSLLGQLTGAGRPACWIIFDIYVENAIDGKHLSVTSAIGIIKEMTKTMQVLNEASWQETFKALWISTLRLVQRAREPLEGPIPHLDARLCMLLALIPLSIAAILQEESDMFGVEGNKILPQRQGLISSLQDLIQYSGLLVPPSSVVNAANAAASKAAIFKANYKAGAGNTSMMDQTDSSMKAAGNMLHLIIEACISRKLIDTSAYLWHGYVVPSRTLKDTALPQESPWLNFMKGSQLSEPLIDALVATPASSVAELDKLYSVATNGSEEEKTAAAKILCGASLVRGWNIQEHVVSMVVKLLSASLPSDSSTSTPGSMSHYLAHMSTLNEILLGVSYGDVIHILSLYGMVPDVAVALMPLCEAFGSIAPPPNHKSTILGETSVYLVFSCAFLCLLRLWKFYRPPQEYCLTGRGGSVKLELTLDYLLLMHNNRIFSNSSAPNRDSYNSMGSVNEVSAQPIYIDSFPKLSAWYFQNQACIASTLSGLCNKNPVHQVANKILNMICRKMNKGGVSSSNLSSTSSSSVSGSSVSASDDSYQRPAVPAWEFLEAVPFVLEAVLTACAHGRLSSRDLTTSLRDLVDFLPASLAAIVSYFSAEITRGIWKPVPMNGTEWPSPGASLHSIEAEVKEILASAGVQINSCYPRGVPPMLPLPMAALVSLTITFKLDRSLEYIQGVIGHALENCAGGSSWPSMPIIGALWTQKVRRWHDFIVLSCMRSPFGRDKDAVAQLIRSCFSSFLQSSSSGSDIIANRGVGALLGDSITDQGLRLPMAPGFVYLRTCRTFHDTYFVSEVILKQVIEWAHKLANGWSFNGPPQLKSGRTPLSCAASMAHQVAMLGGGLLCIAGGPLVVQVLYEDTLPTLLLSAREQSLKDPGPVSSTLQGYAMANMLFYCGSLLWGADRSSPVMKLSFLSRRPRVVRNHMDFIAGVLDGHILLGCDPGTWKAYVSQFMFLVVKFVPSWLPDIKLDTLKKIAAGLRSWHEHDLALSLLERGGPQAISVVVETFL

SEQ ID NO: 168290 - protein, 1181 aa, Zea Mays
MEAVKASEARRDPPLLRAVELSRVVAEEGAGAELAGILVSNLCFAHNSPSLWKLLGQAVASRLLCPLHVLALLTPRVLPQRRAQPEAYRLYLELLKCHATSSLLAMEAGPNRDKPEKFSSLRQRLSSIEAHKVTLETLLPSGHKINDLLINIWRVCKAGYQPNNKHILGVLGNMGSGGSLLGQLTGAGRPACWIIFDIYVENAIDGKHLSVTSAIGIIKEMTKTMQVLNEASWQETFKALWISTLRLVQRAREPLEGPIPHLDARLCMLLALIPLSIAAILQEESDMFGVEGNKILPQRQGLISSLQDLIQYSGLLVPPSSVVNAANAAASKAAIFKANYKAGAGNTSMMDQTDSSMKAAGNMLHLIIEACISRKLIDTSAYLWHGYVVPSRTLKDTALPQESPWLNFMKGSQLSEPLIDALVATPASSVAELDKLYSVATNGSEEEKTAAAKILCGASLVRGWNIQEHVVSMVVKLLSASLPSDSSTSTPGSMSHYLAHMSTLNEILLGVSYGDVIHILSLYGMVPDVAVALMPLCEAFGSIAPPPNHKSTILGETSVYLVFSCAFLCLLRLWKFYRPPQEYCLTGRGGSVKLELTLDYLLLMHNNRIFSNSSAPNRDSYNSMGSVNEVSAQPIYIDSFPKLSAWYFQNQACIASTLSGLCNKNPVHQVANKILNMICRKMNKGGVSSSNLSSTSSSSVSGSSVSASDDSYQRPAVPAWEFLEAVPFVLEAVLTACAHGRLSSRDLTTSLRDLVDFLPASLAAIVSYFSAEITRGIWKPVPMNGTEWPSPGASLHSIEAEVKEILASAGVQINSCYPRGVPPMLPLPMAALVSLTITFKLDRSLEYIQGVIGHALENCAGGSSWPSMPIIGALWTQKVRRWHDFIVLSCMRSPFGRDKDAVAQLIRSCFSSFLQSSSSGSDIIANRGVGALLGDSITDQGLRLPMAPGFVYLRTCRTFHDTYFVSEVILKQVIEWAHKLANGWSFNGPPQLKSGRTPLSCAASMAHQVAMLGGGLLCIAGGPLVVQVLYEDTLPTLLLSAREQSLKDPGPVSSTLQGYAMANMLFYCGSLLWGADRSSPVMKLSFLSRRPRVVRNHMDFIAGVLDGHILLGCDPGTWKAYVSQFMFLVVKFVPSWLPDIKLDTLKKIAAGLRSWHEHDLALSLLERGGPQAISVVVETFL

SEQ ID NO: 168291 - protein, 950 aa, Zea Mays
MGSGGSLLGQLTGAGRPACWIIFDIYVENAIDGKHLSVTSAIGIIKEMTKTMQVLNEASWQETFKALWISTLRLVQRAREPLEGPIPHLDARLCMLLALIPLSIAAILQEESDMFGVEGNKILPQRQGLISSLQDLIQYSGLLVPPSSVVNAANAAASKAAIFKANYKAGAGNTSMMDQTDSSMKAAGNMLHLIIEACISRKLIDTSAYLWHGYVVPSRTLKDTALPQESPWLNFMKGSQLSEPLIDALVATPASSVAELDKLYSVATNGSEEEKTAAAKILCGASLVRGWNIQVPDVAVALMPLCEAFGSIAPPPNHKSTILGETSVYLVFSCAFLCLLRLWKFYRPPQEYCLTGRGGSVKLELTLDYLLLMHNNRIFSNSSAPNRDSYNSMGSVNEVSAQPIYIDSFPKLSAWYFQNQACIASTLSGLCNKNPVHQVANKILNMICRKMNKGGVSSSNLSSTSSSSVSGSSVSASDDSYQRPAVPAWEFLEAVPFVLEAVLTACAHGRLSSRDLTTSLRDLVDFLPASLAAIVSYFSAEITRGIWKPVPMNGTEWPSPGASLHSIEAEVKEILASAGVQINSCYPRGVPPMLPLPMAALVSLTITFKLDRSLEYIQGVIGHALENCAGGSSWPSMPIIGALWTQKVRRWHDFIVLSCMRSPFGRDKDAVAQLIRSCFSSFLQSSSSGSDIIANRGVGALLGDSITDQGLRLPMAPGFVYLRTCRTFHDTYFVSEVILKQVIEWAHKLANGWSFNGPPQLKSGRTPLSCAASMAHQVAMLGGGLLCIAGGPLVVQVLYEDTLPTLLLSAREQSLKDPGPVSSTLQGYAMANMLFYCGSLLWGADRSSPVMKLSFLSRRPRVVRNHMDFIAGVLDGHILLGCDPGTWKAYVSQFMFLVVKFVPSWLPDIKLDTLKKIAAGLRSWHEHDLALSLLERGGPQAISVVVETFL

SEQ ID NO: 168292 - protein, 912 aa, Zea Mays
MKQAGRKHLKLFGFPPFVLYNGEPLEGPIPHLDARLCMLLALIPLSIAAILQEESDMFGVEGNKILPQRQGLISSLQDLIQYSGLLVPPSSVVNAANAAASKAAIFKANYKAGAGNTSMMDQTDSSMKAAGNMLHLIIEACISRKLIDTSAYLWHGYVVPSRTLKDTALPQESPWLNFMKGSQLSEPLIDALVATPASSVAELDKLYSVATNGSEEEKTAAAKILCGASLVRGWNIQEHVVSMVVKLLSASLPSDSSTSTPGSMSHYLAHMSTLNEILLGVSYGDVIHILSLYGMVPDVAVALMPLCEAFGSIAPPPNHKSTILGETSVYLVFSCAFLCLLRLWKFYRPPQEYCLTGRGGSVKLELTLDYLLLMHNNRIFSNSSAPNRDSYNSMGSVNEVSAQPIYIDSFPKLSAWYFQNQACIASTLSGLCNKNPVHQVANKILNMICRKMNKEAVPFVLEAVLTACAHGRLSSRDLTTSLRDLVDFLPASLAAIVSYFSAEITRGIWKPVPMNGTEWPSPGASLHSIEAEVKEILASAGVQINSCYPRGVPPMLPLPMAALVSLTITFKLDRSLEYIQGVIGHALENCAGGSSWPSMPIIGALWTQKVRRWHDFIVLSCMRSPFGRDKDAVAQLIRSCFSSFLQSSSSGSDIIANRGVGALLGDSITDQGLRLPMAPGFVYLRTCRTFHDTYFVSEVILKQVIEWAHKLANGWSFNGPPQLKSGRTPLSCAASMAHQVAMLGGGLLCIAGGPLVVQVLYEDTLPTLLLSAREQSLKDPGPVSSTLQGYAMANMLFYCGSLLWGADRSSPVMKLSFLSRRPRVVRNHMDFIAGVLDGHILLGCDPGTWKAYVSQFMFLVVKFVPSWLPDIKLDTLKKIAAGLRSWHEHDLALSLLERGGPQAISVVVETFL

SEQ ID NO: 168293 - protein, 1008 aa, Zea Mays
MGSGGSLLGQLTGAGRPACWIIFDIYVENAIDGKHLSVTSAIGIIKEMTKTMQVLNEASWQETFKALWISTLRLVQRAREPLEGPIPHLDARLCMLLALIPLSIAAILQEESDMFGVEGNKILPQRQGLISSLQDLIQYSGLLVPPSSVVNAANAAASKAAIFKANYKAGAGNTSMMDQTDSSMKAAGNMLHLIIEACISRKLIDTSAYLWHGYVVPSRTLKDTALPQESPWLNFMKGSQLSEPLIDALVATPASSVAELDKLYSVATNGSEEEKTAAAKILCGASLVRGWNIQEHVVSMVVKLLSASLPSDSSTSTPGSMSHYLAHMSTLNEILLGVSYGDVIHILSLYGMVPDVAVALMPLCEAFGSIAPPPNHKSTILGETSVYLVFSCAFLCLLRLWKFYRPPQEYCLTGRGGSVKLELTLDYLLLMHNNRIFSNSSAPNRDSYNSMGSVNEVSAQPIYIDSFPKLSAWYFQNQACIASTLSGLCNKNPVHQVANKILNMICRKMNKGGVSSSNLSSTSSSSVSGSSVSASDDSYQRPAVPAWEFLEAVPFVLEAVLTACAHGRLSSRDLTTSLRDLVDFLPASLAAIVSYFSAEITRGIWKPVPMNGTEWPSPGASLHSIEAEVKEILASAGVQINSCYPRGVPPMLPLPMAALVSLTITFKLDRSLEYIQGVIGHALENCAGGSSWPSMPIIGALWTQKVRRWHDFIVLSCMRSPFGRDKDAVAQLIRSCFSSFLQSSSSGSDIIANRGVGALLGDSITDQGLRLPMAPGFVYLRTCRTFHDTYFVSEVILKQVIEWAHKLANGWSFNGPPQLKSGRTPLSCAASMAHQVAMLGGGLLCIAGGPLVVQVLYEDTLPTLLLSAREQSLKDPGPVSSTLQGYAMANMLFYCGSLLWGADRSSPVMKLSFLSRRPRVVRNHMDFIAGVLDGHILLGCDPGTWKAYVSQFMFLVVKFVPSWLPDIKLDTLKKIAAGLRSWHEHDLALSLLERGGPQAISVVVETFL

SEQ ID NO: 168294 - protein, 771 aa, Zea Mays
MEAVKASEARRDPPLLRAVELSRVVAEEGAGAELAGILVSNLCFAHNSPSLWKLLGQAVASRLLCPLHVLALLTPRVLPQRRAQPEAYRLYLELLKCHATSSLLAMEAGPNRDNILEDCGFPSVMAEGQESVYAIEGPQPMDLDIKRGSTENQNEHREQLRRKNTFMALDVLHMMAADRKIQSFLSLIFLNMPEKFSSLRQRLSSIEAHKVTLETLLPSGHKINDLLINIWRVCKAGYQPNNKHILGVLGNMGSGGSLLGQLTGAGRPACWIIFDIYVENAIDGKHLSVTSAIGIIKEMTKTMQVLNEASWQETFKALWISTLRLVQRAREPLEGPIPHLDARLCMLLALIPLSIAAILQEESDMFGVEGNKILPQRQGLISSLQDLIQYSGLLVPPSSVVNAANAAASKAAIFKANYKAGAGNTSMMDQTDSSMKAAGNMLHLIIEACISRKLIDTSAYLWHGYVVPSRTLKDTALPQESPWLNFMKGSQLSEPLIDALVATPASSVAELDKLYSVATNGSEEEKTAAAKILCGASLVRGWNIQEHVVSMVVKLLSASLPSDSSTSTPGSMSHYLAHMSTLNEILLGVSYGDVIHILSLYGMVPDVAVALMPLCEAFGSIAPPPNHKSTILGETSVYLVFSCAFLCLLRLWKFYRPPQEYCLTGRGGSVKLELTLDYLLLMHNNRIFSNSSAPNRDSYNSMGSVNEVSAQPIYIDSFPKLSAWYFQNQACIASTLSGLCNKNPVHQVANKILNMICRKMNKGLLFLLGNF

SEQ ID NO: 168295 - protein, 1266 aa, Zea Mays
MEAVKASEARRDPPLLRAVELSRVVAEEGAGAELAGILVSNLCFAHNSPSLWKLLGQAVASRLLCPLHVLALLTPRVLPQRRAQPEAYRLYLELLKCHATSSLLAMEAGPNRDKIGKSIAEALQLSKVYGFSGTEFGHVVILFVLAVVNKLIDSILEDCGFPSVMAEGQESVYAIEGPQPMDLDIKRGSTENQNEHREQPEKFSSLRQRLSSIEAHKVTLETLLPSGHKINDLLINIWRVCKAGYQPNNKHILGVLGNMGSGGSLLGQLTGAGRPACWIIFDIYVENAIDGKHLSVTSAIGIIKEMTKTMQVLNEASWQETFKALWISTLRLVQRAREPLEGPIPHLDARLCMLLALIPLSIAAILQEESDMFGVEGNKILPQRQGLISSLQDLIQYSGLLVPPSSVVNAANAAASKAAIFKANYKAGAGNTSMMDQTDSSMKAAGNMLHLIIEACISRKLIDTSAYLWHGYVVPSRTLKDTALPQESPWLNFMKGSQLSEPLIDALVATPASSVAELDKLYSVATNGSEEEKTAAAKILCGASLVRGWNIQEHVVSMVVKLLSASLPSDSSTSTPGSMSHYLAHMSTLNEILLGVSYGDVIHILSLYGMVPDVAVALMPLCEAFGSIAPPPNHKSTILGETSVYLVFSCAFLCLLRLWKFYRPPQEYCLTGRGGSVKLELTLDYLLLMHNNRIFSNSSAPNRDSYNSMGSVNEVSAQPIYIDSFPKLSAWYFQNQACIASTLSGLCNKNPVHQVANKILNMICRKMNKGGVSSSNLSSTSSSSVSGSSVSASDDSYQRPAVPAWEFLEAVPFVLEAVLTACAHGRLSSRDLTTSLRDLVDFLPASLAAIVSYFSAEITRGIWKPVPMNGTEWPSPGASLHSIEAEVKEILASAGVQINSCYPRGVPPMLPLPMAALVSLTITFKLDRSLEYIQGVIGHALENCAGGSSWPSMPIIGALWTQKVRRWHDFIVLSCMRSPFGRDKDAVAQLIRSCFSSFLQSSSSGSDIIANRGVGALLGDSITDQGLRLPMAPGFVYLRTCRTFHDTYFVSEVILKQVIEWAHKLANGWSFNGPPQLKSGRTPLSCAASMAHQVAMLGGGLLCIAGGPLVVQVLYEDTLPTLLLSAREQSLKDPGPVSSTLQGYAMANMLFYCGSLLWGADRSSPVMKLSFLSRRPRVVRNHMDFIAGVLDGHILLGCDPGTWKAYVSQFMFLVVKFVPSWLPDIKLDTLKKIAAGLRSWHEHDLALSLLERGGPQAISVVVETFL

SEQ ID NO: 168296 - protein, 274 aa, Zea Mays
MKAQPLLPAALKRRRGPRVAVLALVLCSLLVPLAFLFDRAPSGYVTTEERHRQEVVLPSLDHVEKRRRSGADSGERQDAPEKIPRSSAGTIHQRTPEKNISKGSAAVIHQQTPEKNISKGSAGVIHQQTPEKNISKGSAGVVRQHKQIGSNTTRDDAKPKVFAAPKVEPSADVTDSTKVARFEFKDELSLRAAAFPLSLLSFQHLIYPLDEKLTLAGLGYDYGIDEEVARRSASLHYNGNMKPWLELGIPDYKKYWKRFLDRGDRFMDECNVNP

SEQ ID NO: 168297 - protein, 421 aa, Zea Mays
MEVVLPSLDHVEKRRRSGADSGERQDAPEKIPRSSAGTIHQRTPEKNISKGSAAVIHQQTPEKNISKGSAGVIHQQTPEKNISKGSAGVVRQHKQIGSNTTRDDAKPKELLLHVISQVSYFKTSSVEVVLKNLAASVVINSTVSSCKEPGYLAFHILTDAQNFYAMKHWFTRISYKNAAIHVINYEAIVLEKLPKYTIRQLFLPEEFRVLIRSTKQPTENTRMKYLSLFSHSHFVIPEIFKYLNKVVVLDDDVVVQRDLSFLWHIDMGDKVNGAAEFCDLKLGEMKNVLGKTAYDPESCVWMSGVNLINLDKWREHNVTENYLLLMQKFEFKDELSLRAAAFPLSLLSFQHLIYPLDEKLTLAGLGYDYGIDEEVARRSASLHYNGNMKPWLELGIPDYKKYWKRFLDRGDRFMDECNVNP

SEQ ID NO: 168298 - protein, 209 aa, Zea Mays
MAYAIAEKDAEKAPKPSEGEDAYVKKLFLKGTTYYLYVHSYLHYGLLAARAEVLKAGNGNGYSNCMLEGFQGKYKYGDDSFEASGPPSGASYSKCKDDAVKALKVDEACTHMKCSFGGIWNGGGGAGQKNLFVASFFFDRAAEAGFVNANAPVAKVKPSDFRQAAERACSLSVKNAEATFPGVQKDSIPYICMDLVYQYTLLVEGFGMT

SEQ ID NO: 168299 - protein, 173 aa, Zea Mays
MFGHHHHHGHGGHHQAPPPHEQTLFRIFCRADEAYCLTVRHDAVVLAPTNPRDEYQHWYKDMRHSTKVKDAEGQPAFALINRATGLAIKHSLGQSHPVKLVPYNAEYLDESVLWTESHDVGKGFRCIRMVNNIYLNMDAFHGDKDHGGVHDGTTVVLWEWAKGDNQRWKILPW

SEQ ID NO: 168300 - protein, 221 aa, Zea Mays
MFNHRLDDAARHHGSAEAIPERLAVVTGGNKGVGLEVCRQLALKGVTVILTARDEKRGKDAAETLRRECQLPNIIFHQLDVRDDDSATTLARYVERRYGKLDILVNNAAISGIVADEEGLKALNIDAETWTSGRAANLLKEVFQNTNDEAFNCLNTNYYGCKRVTEALLPLLKLSTSGGARIVNASSLASELKVWSSCIPARTEKISMLLTLIILLPENAK

SEQ ID NO: 168301 - protein, 125 aa, Zea Mays
MPNEKLRNDLSNIDIWDEDRIEAVLDTFLEDLRSGRLEEAGWPVMLPAYSVSKMVINLYTRIMARRYPEMRINCVRPGFVKTDINWNLGVLTPEQGARGPVMLALLPDDGPTGCYFDQTEMVNVW

SEQ ID NO: 168302 - protein, 301 aa, Zea Mays
MALLKRFLKGGNKGVGLEVCRQLALKGVTVILTARDEKRGKDAAETLRRECQLPNIIFHQLDVRDDDSATTLARYVERRYGKLDILVNNAAISGIVADEEGLKALNIDAETWTSGRAANLLKEVFQNTNDEAFNCLNTNYYGCKRVTEALLPLLKLSTSGGARIVNASSLASELKRMPNEKLRNDLSNIDIWDEDRIEAVLDTFLEDLRSGRLEEAGWPVMLPAYSVSKMVINLYTRIMARRYPEMRINCVRPGFVKTDINWNLGVLTPEQGARGPVMLALLPDDGPTGCYFDQTEMVNVW

SEQ ID NO: 168303 - protein, 328 aa, Zea Mays
MKVEGLVLDHGSRHPDMKRRAENCYILTCNVSLEYEKSEINAGFFYSNAEQREKMVAAERRQVDERVKQIIELKNKVCAGGDKNFVVINQKGIDPPSLDLLARAGIIALRRAKRRNMERLVLACGGEAVNSVDELTEDCLGWAGLVYEHVLGEEKYTFVENVKNPRSCTILIKGPNDHTIAQIKDAVRDGLRSVKNTVEDEAVVLGAGAFEVAAKKHLIDNVKKTVKGRAQLGVEAFAEALLVIPKTLAENSGLDTQDVIVSLQNEHDRGLVVGLNHHSGDPIDPQMEGIFDNYSVKRQIINSGPIIASQLLLVDEVIRAGRNMRKPT

SEQ ID NO: 168304 - protein, 212 aa, Zea Mays
MERLVLACGGEAVNSVDELTEDCLGWAGLVYEHVLGEEKYTFVENVKNPRSCTILIKGPNDHTIAQIKDAVRDGLRSVKNTVEDEAVVLGAGAFEVAAKKHLIDNVKKTVKGRAQLGVEAFAEALLVIPKTLAENSGLDTQDVIVSLQNEHDRGLVVGLNHHSGDPIDPQMEGIFDNYSVKRQIINSGPIIASQLLLVDEVIRAGRNMRKPT

SEQ ID NO: 168305 - protein, 153 aa, Zea Mays
MGPCWPRKARTHETQEYSRTGHSRRLFVFLPVRVGERRGVSGVRTAAVDSDSVTATRRSPKLPSPQVLVGMASTACFVIVSKNDIPIYEAEVGSAPKKEDLSYHHQFILHAALDVVQDLAWTTNAMFLKSVDRFNDLVVSVYVTAGHQIHAAS

SEQ ID NO: 168306 - protein, 112 aa, Zea Mays
MASTACFVIVSKNDIPIYEAEVGSAPKKEDLSYHHQFILHAALDVVQDLAWTTNAIFMLLHDSRSEDGIKSFFQEVHELYIKIFLNPLYLPGSRITSSHFDTKVRALARRYL

SEQ ID NO: 168307 - protein, 142 aa, Zea Mays
MRLVLVGMASTACFVIVSKNDIPIYEAEVGSAPKKEDLSYHHQFILHAALDVVQDLAWTTNAMFLKSVDRFNDLVVSVYVTAGHTRFMLLHDSRSEDGIKSFFQEVHELYIKIFLNPLYLPGSRITSSHFDTKVRALARRYL

SEQ ID NO: 168308 - protein, 146 aa, Zea Mays
MRSLGQNPTEAELQDMINEVDADGNGTIDFPEFLNLMARKMKDTDSEEELKEAFRVFDKDQNGFISAAELRHVMTNLGEKLTDEEVDEMIREADVDGDGQINYEEFVKVMMAKWSHLENLNMQQGNVSVIFYLPKVISPLGVLPYL

SEQ ID NO: 168309 - protein, 867 aa, Zea Mays
MRRFFFFGSPAANAGEGAGQPVNDSRTGHRKTDEGKDISTARLSRSRSRRQKRNKEEPANPKQLRRSMSFSSPARSSCVEERCFSFSGDVPCSLYDESDAPHHAKDVAPDMWSPEGNPFSREYAIRTPKDHSAMENDSPRSKYCSCSAGHSPVSSPVAIQCRSTRLGNLLNRNEVLDRYIDRGHGDAIVDEKQKQCVPTVSNLGRPPRPHSTVPSIPRPFKETTESYPDVDLNDAFLWRLAQEGIGDTHKITTMCSASRRHINMSDASERESATTVEDIYEDLQDVRLPNVICPSTCPNSAVEETDDMLLQRVKEVESRFTIPCGDEYEFSMLRYKSSTSNDMFQLIQQLTEDRKQLAYELSSEIKARVTERFAAKEQYKQLKKELDNRTRRLEKEKSEVQTTLEGEMDRRSDDWSIRLSRFQSEEERLHERVRELAEQNVSFQREVTSLGATKAEALMKAASLETQNSKLNDDLEKLKNEHEKLHYSSTDLQARFAEIVEERDHIREYLKAKEGENKALHKVIARLQTTCNEQERTITGMRQGCIDELGRKFVEYSTNDKTRKLQMELIRLTGVEQKLRGEIRSCNLEVKSLRQENIALLNRLQGAGNGASFSSIRLDQELQARVDNLQMQGLSLLDKISQLCTKLLDLMKHKRHENEYLCGNDVSTFSDYIFEYQSIKGGIEAEGSPSKDQTDDFGLKLKEEAMLNRVLKEAVLSKEVAIEQLQSDLASSLRIQDVMRNEIQRVQDELSCITHKAKQLELQVSKKDESIDEIQQDFQESAKELAALRGTLKTVTEERDLSWQEAKQLRRNISIMQDEVVSLKKKIEALDEDILVKEGQITILQDSIDKPFDIICSPRSMREFDMA

SEQ ID NO: 168310 - protein, 892 aa, Zea Mays
MRRFFFFGSPAANAGEGAGQPVNDSRTGHRKTDEGKDISTARLSRSRSRRQKRNKEEPANPKQLRRSMSFSSPARSSCVEERCFSFSGDVPCSLYDESDAPHHAKDVAPDMWSPEGNPFSREYAIRTPKDHSAMENDSPRSKYCSCSAGHSPVSSPVAIQCRSTRLGNLLNRNEVLDRYIDRGHGDAIVDEKQKQCVPTVSNLGRPPRPHSTVPSIPRPFKETTESYPDVDLNDAFLWRLAQEGIGDTHKITTMCSASRRHINMSDASERESATTVEDIYEDLQDVRLPNVICPSTCPNSEETDDMLLQRVKEVESRFTIPCGDEYEFSMLRYKSSTSNDMFQLIQQLTEDRKQLAYELSSEIKARVTERFAAKEQYKQLKKELDNRTRRLEKEKSEVQTTLEGEMDRRSDDWSIRLSRFQSEEERLHERVRELAEQNVSFQREVTSLGATKAEALMKAASLETQNSKLNDDLEKLKNEHEKLHYSSTDLQARFAEIVEERDHIREYLKAKEGENKALHKVIARLQTTCNEQERTITGMRQGCIDELGRKFVEYSTNDKTRKLQMELIRLTGVEQKLRGEIRSCNLEVKSLRQENIALLNRLQGAGNGASFSSIRLDQELQARVDNLQMQGLSLLDKISQLCTKLLDLMKHKRHENEYLCGNDVSTFSDYIFEYQSIKGGIEGLKLSLKAINSILAEKQNAKEKSGEIVAEGSPSKDQTDDFGLKLKEEAMLNRVLKEAVLSKEVAIEQLQSDLASSLRIQDVMRNEIQRVQDELSCITHKAKQLELQVSKKDESIDEIQQDFQESAKELAALRGTLKTVTEERDLSWQEAKQLRRNISIMQDEVVSLKKKIEALDEDILVKEGQITILQDSIDKPFDIICSPRSMREFDMA

SEQ ID NO: 168311 - protein, 878 aa, Zea Mays
MLRAAAAAAAIFPARVAAAPAAAAAEELRYPLLRVIGTLRGSRGSVLLGRRVRFCSNSSASDSEVAAADAEANAEDATVAEEEAGSKASSAIVPTSTNIDDCLSVIALPLPHRPLFPGFYMPIYVKDQKLLQALIENRKRSAPYAGAFLVKDEEGTDPNIVTGSDSEKSIGDLKGKDLLKRLHEVGTLAQITSIQGDQVVLLGHRRLQITEMVEEDPLTVKVDHLKEKPYNKDDDVIKATSFEVISTLREVLRTSSLWKDHVQTYTQHIGDFNYQRLADFGAAISGANKLLCQEVLEELDVYKRLKFTLELVKKEMEISKLQQSIAKAIEEKISGDQRRYLLNEQLKAIKKELGLETDDKTALSAKFRERIESKKDRCPSHVLQVIEEELTKLQLLEASSSEFSVTRNYLDWLTVLPWGNYSDENFDVHRAQKILDEDHYGLSDVKERILEFIAVGKLRGTSQGKIICLSGPPGVGKTSIGRSIARALNRQFYRFSVGGLADVAEIKGHRRTYVGAMPGKMVQCLKSVGTANPLVLIDEIDKLGKGHSGDPASALLELLDPEQNVNFLDHYLDVPIDLSKVLFVCTANVIETIPNPLLDRMEIIAIAGYITDEKMHIARDYLEKNTRQACGIKPEQVEVTDAALLALIENYCREAGVRNLQKHIEKIYRKIALQLVRQGVSNEPDQESLGVTVNEESNSGDSITAKDEIVKDPAVEDASVANNVTNPASEEANEVNLTTEAPKEDSTSKGNKKTDGVAEDAADKATEKVVVDSSNLGDFVGKPVFQAERIYEQTPVGVVMGLAWTAMGGSTLYIETTKVEEREGKGDLVLTGQLGDVMKESAQIAHTVGRTVLLEKEPDNHFFANSKLWESLSRRTSQ

SEQ ID NO: 168312 - protein, 761 aa, Zea Mays
MVVPLGVVQRVAEAILVPSLYEKNGFSRVILKALKGLALFHQRVIALPLPHRPLFPGFYMPIYVKDQKLLQALIENRKRSAPYAGAFLVKDEEGTDPNIVTGSDSEKSIGDLKGKDLLKRLHEVGTLAQITSIQGDQVVLLGHRRLQITEMVEEDPLTVKVDHLKEKPYNKDDDVIKATSFEVISTLREVLRTSSLWKDHVQTYTQHIGDFNYQRLADFGAAISGANKLLCQEVLEELDVYKRLKFTLELVKKEMEISKLQQSIAKAIEEKISGDQRRYLLNEQLKAIKKELGLETDDKTALSAKFRERIESKKDRCPSHVLQVIEEELTKLQLLEASSSEFSVTRNYLDWLTVLPWGNYSDENFDVHRAQKILDEDHYGLSDVKERILEFIAVGKLRGTSQGKIICLSGPPGVGKTSIGRSIARALNRQFYRFSVGGLADVAEIKGHRRTYVGAMPGKMVQCLKSVGTANPLVLIDEIDKLGKGHSGDPASALLELLDPEQNVNFLDHYLDVPIDLSKVEVTDAALLALIENYCREAGVRNLQKHIEKIYRKIALQLVRQGVSNEPDQESLGVTVNEESNSGDSITAKDEIVKDPAVEDASVANNVTNPASEEANEVNLTTEAPKEDSTSKGNKKTDGVAEDAADKATEKVVVDSSNLGDFVGKPVFQAERIYEQTPVGVVMGLAWTAMGGSTLYIETTKVEEREGKGDLVLTGQLGDVMKESAQIAHTVGRTVLLEKEPDNHFFANSKLWESLSRRTSQ

SEQ ID NO: 168313 - protein, 817 aa, Zea Mays
MVVPLGVVQRVAEAILVPSLYEKNGFSRVILKALKGLALFHQRVIALPLPHRPLFPGFYMPIYVKDQKLLQALIENRKRSAPYAGAFLVKDEEGTDPNIVTGSDSEKSIGDLKGKDLLKRLHEVGTLAQITSIQGDQVVLLGHRRLQITEMVEEDPLTVKVDHLKEKPYNKDDDVIKATSFEVISTLREVLRTSSLWKDHVQTYTQHIGDFNYQRLADFGAAISGANKLLCQEVLEELDVYKRLKFTLELVKKEMEISKLQQSIAKAIEEKISGDQRRYLLNEQLKAIKKELGLETDDKTALSAKFRERIESKKDRCPSHVLQVIEEELTKLQLLEASSSEFSVTRNYLDWLTVLPWGNYSDENFDVHRAQKILDEDHYGLSDVKERILEFIAVGKLRGTSQGKIICLSGPPGVGKTSIGRSIARALNRQFYRFSVGGLADVAEIKGHRRTYVGAMPGKMVQCLKSVGTANPLVLIDEIDKLGKGHSGDPASALLELLDPEQNVNFLDHYLDVPIDLSKVLFVCTANVIETIPNPLLDRMEIIAIAGYITDEKMHIARDYLEKNTRQACGIKPEQVEVTDAALLALIENYCREAGVRNLQKHIEKIYRKIALQLVRQGVSNEPDQESLGVTVNEESNSGDSITAKDEIVKDPAVEDASVANNVTNPASEEANEVNLTTEAPKEDSTSKGNKKTDGVAEDAADKATEKVVVDSSNLGDFVGKPVFQAERIYEQTPVGVVMGLAWTAMGGSTLYIETTKVEEREGKGDLVLTGQLGDVMKESAQIAHTVGRTVLLEKEPDNHFFANSKLWESLSRRTSQ

SEQ ID NO: 168314 - protein, 783 aa, Zea Mays
MVVPLGVVQRVAEAILVPSLYEKNGFSRVILKALKGLALFHQRVIALPLPHRPLFPGFYMPIYVKDQKLLQALIENRKRSAPYAGAFLVKDEEGTDPNIVTGSDSEKSIGDLKGKDLLKRLHEVGTLAQITSIQGDQVVLLGHRRLQITEMVEEDPLTVKVDHLKEKPYNKDDDVIKATSFEVISTLREVLRTSSLWKDHVQTYTQHIGDFNYQRLADFGAAISGANKLLCQEVLEELDVYKRLKFTLELVKKEMEISKLQQSIAKAIEEKISGDQRRYLLNEQLKAIKKELGLETDDKTALSAKFRERIESKKDRCPSHVLQVIEEELTKLQLLEASSSEFSVTRNYLDWLTVLPWGNYSDENFDVHRAQKILDEDHYGLSDVKERILEFIAVGKLRGTSQGKIICLSGPPGVGKTSIGRSIARALNRQFYRFSVGGLADVAEIKGHRRTYVGAMPGKMVQCLKSVGTANPLVLIDEIDKLGKGHSGDPASALLELLDPEQNVNFLDHYLDVPIDLSKVLFVCTANVIETIPNPLLDRMEIIAIAGYITDEKMHIARDYLEKNTRQACGIKPEQIALQLVRQGVSNEPDQESLGVTVNEESNSGDSITAKDEIVKDPAVEDASVANNVTNPASEEANEVNLTTEAPKEDSTSKGNKKTDGVAEDAADKATEKVVVDSSNLGDFVGKPVFQAERIYEQTPVGVVMGLAWTAMGGSTLYIETTKVEEREGKGDLVLTGQLGDVMKESAQIAHTVGRTVLLEKEPDNHFFANSKLWESLSRRTSQ

SEQ ID NO: 168315 - protein, 362 aa, Zea Mays
MPGKMVQCLKSVGTANPLVLIDEIDKLGKGHSGDPASALLELLDPEQNVNFLDHYLDVPIDLSKVLFVCTANVIETIPNPLLDRMEIIAIAGYITDEKMHIARDYLEKNTRQACGIKPEQVEVTDAALLALIENYCREAGVRNLQKHIEKIYRKIALQLVRQGVSNEPDQESLGVTVNEESNSGDSITAKDEIVKDPAVEDASVANNVTNPASEEANEVNLTTEAPKEDSTSKGNKKTDGVAEDAADKATEKVVVDSSNLGDFVGKPVFQAERIYEQTPVGVVMGLAWTAMGGSTLYIETTKVEEREGKGDLVLTGQLGDVMKESAQIAHTVGRTVLLEKEPDNHFFANSKLWESLSRRTSQ

SEQ ID NO: 168316 - protein, 88 aa, Zea Mays
MGKPVKKDLAMTGEVTLTGRILPIGGVKEKTIAARRSAIKTLIFPAANKRDFDELASNVKEGLEVHFVDTYSEIYDLAFQSDAGTEMI

SEQ ID NO: 168317 - protein, 218 aa, Zea Mays
MVKQPQGICMIALQLVRQGVSNEPDQESLGVTVNEESNSGDSITAKDEIVKDPAVEDASVANNVTNPASEEANEVNLTTEAPKEDSTSKGNKKTDGVAEDAADKATEKVVVDSSNLGDFVGKPVFQAERIYEQTPVGVVMGLAWTAMGGSTLYIETTKVEEREGKGDLVLTGQLGDVMKESAQIAHTVGRTVLLEKEPDNHFFANSKLWESLSRRTSQ

SEQ ID NO: 168318 - protein, 215 aa, Zea Mays
MATAARERRLPPALPLATLIGRELRAGGSERPALRYGHAGFAKRGEDYFLVKPDCLRVPGDPASAFSVFAVFDGHNGVSAAVYSKEHLLEHVMSALSPDIGREDWLQALPRALVAGFVKADIDFQRKGRRVAAANRGPPPGGECRGAGARHGQRWGSRPAQSLWRPGGRPSPVLAWWLVPLKIHRGHGCWRVHCAHSTCQASQAIKHRRKTDNSI

SEQ ID NO: 168319 - protein, 364 aa, Zea Mays
MATAARERRLPPALPLATLIGRELRAGGSERPALRYGHAGFAKRGEDYFLVKPDCLRVPGDPASAFSVFAVFDGHNGVSAAVYSKEHLLEHVMSALSPDIGREDWLQALPRALVAGFVKADIDFQRKGEVSGTTATLVVIDGFTVTVASVGDSRCILDTQGGELQLLTVDHRLEENAEERERVTASGGEVGRLNLFGGQEVGPLRCWPGGLCLSRSIGDMDVGEFIVPIPHVKQVKLSNTGGRLIIASDGIWDALSNEAAAKACRGLPAELAAKLVVKQALKTSGLKDDTTCVVVDIIPSDHLTSPQLSPKKNQNKLKSLFRRRSHSSVRKLGGKSASIGSVEELFEEGSAMLEESLFSASSQI

SEQ ID NO: 168320 - protein, 158 aa, Zea Mays
MATAARERRLPPALPLATLIGRELRAGGSERPALRYGHAGFAKRGEDYFLVKPDCLRVPGDPASAFSVFAVFDGHNGVSAAVYSKEHLLEHVMSALSPDIGREDWLQALPRALVAGFVKADIDFQRKGECHATAQYRLQSRLEVNVVIVPVSVCVCAY

SEQ ID NO: 168321 - protein, 939 aa, Zea Mays
MLLSRPQTLPLPRARLSSPTLRHLRALAAPLRALVSSPPLGFTSAARGPAPLRAAVSESDREQREAGVEAGEQGRPLRVGLVCGGPSGERGVSLNSARSVLDHIQGEDLVVCCYYIDCAMKAFAISPAQLYSNTPSDFDFKLESLAQEFDSLSDFAEHLATNVDIVFPVIHGKFGEDGGIQELLEKANVPFVGTPSKECQRAFDKHNASLELNAQGFLTVPNFLVEKDKLAKPELEAWFQTVNLNKENGKTIVKPTRAGSSIGVVVAYGVNDAAQKAEEIISEGIDDKVIIEVFIEGGTEFTAIVVDVGIANNSEPVVLLPTEVELQYSNNSDTKEDTIFNYRKKYLPSRQVAYHSPPRFPAEVIDCIRQGISLLFCRLGLHDYARIDGWFLPSPVASLPPAENSDKFGNTKYGSVLFTDINLISGMEQTSFLFQQASAVGFSHSRILRTVVQHACSRFPSLLPCNNAWTALSRKLQPSKQVEAIHKGTSRQKVFVIFGGDTSERQVSLMSGTNVWLNLQGFDDLDVTPCLLAPAHGYFSSHDQDFSDSSREVWTLPYSLVLRHTTEEVHAACVEATEPERVEITKRLRDQVMNELGSALSKHDWFAGFDIAYEQPIKYSLQQWIDHVKETEAVVFIAVHGGIGEDGTIQTLLESAGVPYTGPGPIASRTCIDKVASSLAVDHLASYGIRIIPKDVRATEEVLNSSLVDIWNELKAKLETETVCVKPARDGCSTGVARLCCPKDLEVYTNALRRKFQHLPANCLSRAHGVIEMPVPSPESLIFEPFIETDEIIIANKLEDGSARHLVWKGENDWLEITVGVVGKRGEMHSLNPSITVKESGDILSLEEKFQGGTGINLTPPPATIMGEDALQRCKKSIETMANALGLEGFSRIDAFVNVRSGEVLLIEVNTVPGMTPSTVLIHQALAEEPPVYPHSRRS

SEQ ID NO: 168322 - protein, 468 aa, Zea Mays
MEQTSFLFQQASAVGFSHSRILRTVVQHACSRFPSLLPCNNAWTALSRKLQPSKQVEAIHKGTSRQKVFVIFGGDTSERQVSLMSGTNVWLNLQGFDDLDVTPCLLAPAHGYFSSHDQDFSDSSREVWTLPYSLVLRHTTEEVHAACVEATEPERVEITKRLRDQVMNELGSALSKHDWFAGFDIAYEQPIKYSLQQWIDHVKETEAVVFIAVHGGIGEDGTIQTLLESAGVPYTGSFLAYILRAFVCGQTKEFKSSCHAGPGPIASRTCIDKVASSLAVDHLASYGIRIIPKDVRATEEVLNSSLVDIWNELKAKLETETVCVKPARDGCSTGVARLCCPKDLEVYTNALRRKFQHLPANCLSRAHGVIEMPVPSPESLIFEPFIETDEIIIANKLEDGSARHLVWKGENDWLEITVGVVGKRGEMHSLNPSITVKESGDILSLEEKFQARMLCRGARRVSRPWQTL

SEQ ID NO: 168323 - protein, 556 aa, Zea Mays
MDPSSAPRRCSFLLRLLLLAVAALALRLLYGAFLAVSAGPAGWPLYRPAATVATTTRTHVVQADVPSPEVWRTRRWRRAVDYHAAVLAPHIAAGALAPGSRAVCLGGAQEALAMRELGVARAVAVARKRAPPLVVAGHDRRLPFDASSVDFVFAGRALDAAKRPADLAAEAARILKPEGHLVMLTSSAADAYSFRSIQALLPLLRLVRSREIDGQDDSYSTLRELVFVHKNLRSTGTGTSSSVNNCSVGDHRLQLLAHAEPLIQEEPLKPWLTLKRNMNNIKYLPALADISFKRRYVYVDVGAHSYGSSIGSWFRKHYPKQNHTFQVFAIEADPAFHSEYATKKGVTLLPYAAWVKNETLVFEINGDPGKEDEAKANGRGMGRIRPTTGKKMSGEVRSVPAFDLAEWLKQTVTEQDYLVMKMDVEGTEFDLIPRLFDTGAICLVDELFLECHYNRWQKCCPGERSPKYDNTYEECLDLFSSLRENGVLVHQWCLPASVMYCRVKKVGTVRRPWATGLSGQLQRAFVTGRSTFYQSNGFRIRAMLEKPITDWTGRPG

SEQ ID NO: 168324 - protein, 554 aa, Zea Mays
MDPSSAPRRCSFLLRLLLLAVAALALRLLYGAFLAVSAGPAGWPLYRPAATVATTTRTHVVQADVPSPEVWRTRRWRRAVDYHAAVLAPHIAAGALAPGSRAVCLGGAQEALAMRELGVARAVAVARKRAPPLVVAGHDRRLPFDASSVDFVFAGRALDAAKRPADLAAEAARILKPEGHLVMLTSSAADAYSFRSIQALLPLLRLVRSREIDGQDDSYSTLRELVFVHKNLRSTGTGTSSSVNNCSVGDHRLQLLAHAEPLIQEEPLKPWLTLKRNMNNIKYLPALADISFKRRYVYVDVGAHSYGSSIGSWFRKHYPKQNHTFQVFAIEADPAFHSEYATKKGVTLLPYAAWVKNETLVFEINGDPGKEDEAKANGRGMGRIRPTTGKKMSGEVRSVPAFDLAEWLKQTVTEQDYLVMKMDVEGTEFDLIPRLFDTGAICLVDELFLECHYNRWQKCCPGERSPKYDNTYEECLDLFSSLRENGVLVHQWCLPASVMYCRVKKVGTVRRPWATGLSGQLQRAFVTACEDFSNIVGSTPSCMHAVQGYIIEWS

SEQ ID NO: 168325 - protein, 676 aa, Zea Mays
MVLVKSVLECKEYRPSPMGRVINENEPLSLEQRKKNFAAVASDMLKVILSGDRVVLLCNILVRRYFIFTAKDLEEWSENPESFHHEQNLVQWTEKKRPCAEALFIVIFEKYRELLAPVVVSVLREAMAISPPQETEVTAGMLLKDASYTAAGHVYYELSNYLSFNEWFHGSLSIEISNHHPNMRIIRRKIALLLGHWISEIKGDTRKLVYRALVGLLQDNDIAVRLAACSSLCYLFQESCFSELDLFECLPTCWTMSFKLIEDVQEFDSKVQVLNFISVLLEHAGDKVIPFACQLSQFFQMIWNESAGESLLQIQLLTALRTFVSSLGFQSPLSYHMLIPILQSGINIDSPDALNLLEDSVLLWEATLSNAPSIVPQLLDLFPYLVGIMNRSFDHLEVTMKIIEDYIIFGGSEFLKSHGASLANIIDTIVGNVNDKGLLTALPIVDLLIQIFPLEAPPLISSALQKLTFISLSQDDGQNPSRTTVRASSGAILARLLVMNTNFSAQLLSEPALLASIQQAGISVNNNLLFSLVDMWIDKVDDANAIQQKEYAMALSVILTLQVPQVIDKLDDILSVCTTVIIGSREVKTDDDTSGDITSSSWIGNDGSGYSNTSSKELRKRQVKDSDPIKQTSLEMVLRENLKACAVFHGDAAFNAAIGRIHPSSFAQLQQALNTA

SEQ ID NO: 168326 - protein, 456 aa, Zea Mays
MALSASDVPTMYTVLVNSLSADEAARRPAEAALAQCETRPGFCSCLLEIISARGLACREDVRLLATVYFKNSINRYWRHRRDSYGISNEEKDHLRKNLLLNMREENSQIALQLAVLISKIARLDYPKEWPELLSVLAQQLQSADVLASHRVFMVLFRTLKELSTKRLAVDQKNYAEITGHLFEYTWNLWKSDVQTILQNLSMLSQRNDIDSVFEQSNDLALICDRWLLCLMIVRLLIFSGYASDSRTAQEVWQVREVCPTVLTAIKSLLPYYDTFKDKHAKLCDFAKRACTKLMKVLVTLQGRHPYSFVHETVLSATVDFCLNMITNPEQTGTTFEEFLIQSMVLVKSVLECKEYRPSPMGRVINENEPLSLEQRKKNFAAVASDMLKVILSGDRVVLLCNILVRRYFIFTAKDLEEWSENPESFHHEQNLVQWTEKKRPCAEALFIVIFEKYREV

SEQ ID NO: 168327 - protein, 919 aa, Zea Mays
MALSASDVPTMYTVLVNSLSADEAARRPAEAALAQCETRPGFCSCLLEIISARGLACREDVRLLATVYFKNSINRYWRHRRDSYGISNEEKDHLRKNLLLNMREENSQIALQLAVLISKIARLDYPKEWPELLSVLAQQLQSADVLASHRVFMVLFRTLKELSTKRLAVDQKNYAEITGHLFEYTWNLWKSDVQTILQNLSMLSQRNDIDSVFEQSNDLALICDRWLLCLMIVRLLIFSGYASDSRTAQEVWQVREVCPTVLTAIKSLLPYYDTFKDKHAKLCDFAKRACTKLMKVLVTLQGRHPYSFVHETVLSATVDFCLNMITNPEQTGTTFEEFLIQSMVLVKSVLECKEYRPSPMGRVINENEPLSLEQRKKNFAAVASDMLKVILSGDRVVLLCNILVRRYFIFTAKDLEEWSENPESFHHEQNLVQWTEKKRPCAEALFIVIFEKYRELLAPVVVSVLREAMAISPPQETEVTAGMLLKDASYTAAGHVYYELSNYLSFNEWFHGSLSIEISNHHPNMRIIRRKIALLLGHWISEIKGDTRKLVYRALVGLLQDNDIAVRLAACSSLCYLFQESCFSELDLFECLPTCWTMSFKLIEDVQEFDSKVQVLNFISVLLEHAGDKVIPFACQLSQFFQMIWNESAGESLLQIQLLTALRTFVSSLGFQSPLSYHMLIPILQSGINIDSPDALNLLEDSVLLWEATLSNAPSIVPQLLDLFPYLVGIMNRSFDHLEVTMKIIEDYIIFGGSEFLKSHGASLANIIDTIVGNVNDKGLLTALPIVDLLIQIFPLEAPPLISSALQKLTFISLSQDDGQNPSRTTVRASSGAILARLLVMNTNFSAQLLSEPALLASIQQAGISVNNNLLFSLVDMWIDKVDDANAIQQKEYAMALSVILTLQVPQVIDKLDDILRKP

SEQ ID NO: 168328 - protein, 323 aa, Zea Mays
MIWNESAGESLLQIQLLTALRTFVSSLGFQSPLSYHMLIPILQSGINIDSPDALNLLEDSVLLWEATLSNAPSIVPQLLDLFPYLVGIMNRSFDHLEVTMKIIEDYIIFGGSEFLKSHGASLANIIDTIVGNVNDKGLLTALPIVDLLIQIFPLEAPPLISSALQKLTFISLSQDDGQNPSRTTVRASSGAILARLLVMNTNFSAQLLSEPALLASIQQAGISVNNNLLFSLVDMWIDKVDDANAIQQKEYAMALSVILTLQVPQVIDKLDDILSVCTTVIIGSREVKTDDDTSGDITSSSWIGNDGSGYSNTSSKELRKRQV

SEQ ID NO: 168329 - protein, 300 aa, Zea Mays
MARLLLSVSVPMSASSSRRIVVPGTARHRGRSGVCVAVPATSTATATQQEFDPAAAPPFGLGDIRAAIPKHCWVKDPWRSMGYVVRDVVLVLGLAAAAARLDSWLVWPLYWAAQGTMFWALFVLGHDCGHGSFSNNPRLNSVVGHILHSSILVPYNGWRISHRTHHQNHGHVDKDESWHPLPERLFKSLDSVVLMLRFRLPFPMLVYPFYLANRSPGKSGSHFHPASDLFQPSESKQVLTSTACWLAMVALLAGLAFLMGPLQMLKLYLVPYWVFVMWLDFVTYLRLLLSSHMQYIICKM

SEQ ID NO: 168330 - protein, 702 aa, Zea Mays
MPANDHHPNGLLQESAPGLQHDDMENQQQQVCWERFLLKDTLNVLLVESDASTRQVVSALLRCCMYQVISAKNGQQAWAYLEDKGNNIDLVLTEVFMPGVSGISLLSRIMRHNIFKNIPVIMMSSSDDMSTVFKCLSKGAVDFLVKPIRKNELKNLWQHVWRQRCHSSSGSGSESGIQTQKCAKSKGVNESGNNSGSNDDEAGMGLNARDDSDNGSGTQDLNDLVGLGGVQRMAQNSWTKLAVEIDSPQATSLDQLADPPNSTCAQVIHSKSEICSNRWLPDKSNRNCKKPKNTNDDFKGKDLEIGGPENLYMGHQSSPNGRSIKAADHENNSKESMMENLEEPTVRAADLIGSMAKNMDTPQAARAAEDTPNFSSKVPEGKGKNNQNDKYVLPSLELSLKRSRSCGDGANNKNTVKDDEQRNCVLRRSNLSAFTRYHTSAASNQGGTGLVGSCSPHDNSSEAVKTDSTYNMKSNSDAAPIKQGSNGSSNDNDMGSTTKDVVTKPMLPSAIKANGYTSAFHPVQQWMVPANATAGKTKADENTARNHCVHFENGGSGALQCGSSNVFDPPLEGQATNNYGGVKAGSNSGSNKGQNNGSTAAANAGLAETEIQAMDKSGVGGGNGNGNGSGSGSGNDTYVRRLAANMTPRQAQLKKYREKKKDRNFGKKVRYQSRKRLADQRPRVRGQFVKQAVQNQDGARER

SEQ ID NO: 168331 - protein, 688 aa, Zea Mays
MPANDHHPNGLLQESAPGLQHDDMENQQQQVCWERFLLKDTLNVLLVESDASTRQVVSALLRCCMYQVISAKNGQQAWAYLEDKGNNIDLVLTEVFMPGVSGISLLSRIMRHNIFKNIPVIMMSSSDDMSTVFKCLSKGAVDFLVKPIRKNELKNLWQHVWRQRCHSSSGSGSESGIQTQKCAKSKGVNESGNNSGSNDDEAGMGLNARDDSDNGSGTQAQNSWTKLAVEIDSPQATSLDQLADPPNSTCAQVIHSKSEICSNRWLPDKSNRNCKKPKNTNDDFKGKDLEIGGPENLYMGHQSSPNGRSIKAADHENNSKESMMENLEEPTVRAADLIGSMAKNMDTPQAARAAEDTPNFSSKVPEGKGKNNQNDKYVLPSLELSLKRSRSCGDGANNKNTVKDDEQRNCVLRRSNLSAFTRYHTSAASNQGGTGLVGSCSPHDNSSEAVKTDSTYNMKSNSDAAPIKQGSNGSSNDNDMGSTTKDVVTKPMLPSAIKANGYTSAFHPVQQWMVPANATAGKTKADENTARNHCVHFENGGSGALQCGSSNVFDPPLEGQATNNYGGVKAGSNSGSNKGQNNGSTAAANAGLAETEIQAMDKSGVGGGNGNGNGSGSGSGNDTYVRRLAANMTPRQAQLKKYREKKKDRNFGKKVRYQSRKRLADQRPRVRGQFVKQAVQNQDGARER

SEQ ID NO: 168332 - protein, 283 aa, Zea Mays
MRATVCYVLTVTTFIARYHTSAASNQGGTGLVGSCSPHDNSSEAVKTDSTYNMKSNSDAAPIKQGSNGSSNDNDMGSTTKDVVTKPMLPSAIKANGYTSAFHPVQQWMVPANATAGKTKADENTARNHCVHFENGGSGALQCGSSNVFDPPLEGQATNNYGGVKAGSNSGSNKGQNNGSTAAANAGLAETEIQAMDKSGVGGGNGNGNGSGSGSGNDTYVRRLAANMTPRQAQLKKYREKKKDRNFGKKVRYQSRKRLADQRPRVRGQFVKQAVQNQDGARER

SEQ ID NO: 168333 - protein, 76 aa, Zea Mays
MPANDHHPNGLLQESAPGLQHDDMENQQQQVCWERFLLKDTLNVLLVESDASTRQVVSALLRCCMYQGPTPARCVV

SEQ ID NO: 168334 - protein, 96 aa, Zea Mays
MPANDHHPNGLLQESAPGLQHDDMENQQQQVCWERFLLKDTLNVLLVESDASTRQVVSALLRCCMYQGLCIRRLKLDTPQRVHKPHDRGEKDVLLI

SEQ ID NO: 168335 - protein, 663 aa, Zea Mays
MPANDHHPNGLLQESAPGLQHDDMENQQQQVCWERFLLKDTLNVLLVESDASTRQVVSALLRCCMYQVISAKNGQQAWAYLEDKGNNIDLVLTEVFMPGVSGISLLSRIMRHNIFKNIPVIMMSSSDDMSTVFKCLSKGAVDFLVKPIRKNELKNLWQHVWRQRCHSSSGSGSESGIQTQKCAKSKGVNESGNNSGSNDDEAGMGLNARDDSDNGSGTQAQNSWTKLAVEIDSPQATSLDQLADPPNSTCAQVIHSKSEICSNRWLPDKSNRNCKKPKNTNDDFKGKDLEIGGPENLYMGHQSSPNGRSIKAADHENNSKESMMENLEEPTVRAADLIGSMAKNMDTPQAARAAEDTPNFSSKVPEGKDGANNKNTVKDDEQRNCVLRRSNLSAFTRYHTSAASNQGGTGLVGSCSPHDNSSEAVKTDSTYNMKSNSDAAPIKQGSNGSSNDNDMGSTTKDVVTKPMLPSAIKANGYTSAFHPVQQWMVPANATAGKTKADENTARNHCVHFENGGSGALQCGSSNVFDPPLEGQATNNYGGVKAGSNSGSNKGQNNGSTAAANAGLAETEIQAMDKSGVGGGNGNGNGSGSGSGNDTYVRRLAANMTPRQAQLKKYREKKKDRNFGKKVRYQSRKRLADQRPRVRGQFVKQAVQNQDGARER

SEQ ID NO: 168336 - protein, 646 aa, Zea Mays
MWLGQSHVGAWSGTRRARQGGSGDGPLGVYSYMGDAVISAKNGQQAWAYLEDKGNNIDLVLTEVFMPGVSGISLLSRIMRHNIFKNIPVIMMSSSDDMSTVFKCLSKGAVDFLVKPIRKNELKNLWQHVWRQRCHSSSGSGSESGIQTQKCAKSKGVNESGNNSGSNDDEAGMGLNARDDSDNGSGTQDLNDLVGLGGVQRMAQNSWTKLAVEIDSPQATSLDQLADPPNSTCAQVIHSKSEICSNRWLPDKSNRNCKKPKNTNDDFKGKDLEIGGPENLYMGHQSSPNGRSIKAADHENNSKESMMENLEEPTVRAADLIGSMAKNMDTPQAARAAEDTPNFSSKVPEGKDGANNKNTVKDDEQRNCVLRRSNLSAFTRYHTSAASNQGGTGLVGSCSPHDNSSEAVKTDSTYNMKSNSDAAPIKQGSNGSSNDNDMGSTTKDVVTKPMLPSAIKANGYTSAFHPVQQWMVPANATAGKTKADENTARNHCVHFENGGSGALQCGSSNVFDPPLEGQATNNYGGVKAGSNSGSNKGQNNGSTAAANAGLAETEIQAMDKSGVGGGNGNGNGSGSGSGNDTYVRRLAANMTPRQAQLKKYREKKKDRNFGKKVRYQSRKRLADQRPRVRGQFVKQAVQNQDGARER

SEQ ID NO: 168337 - protein, 390 aa, Zea Mays
MGHQSSPNGRSIKAADHENNSKESMMENLEEPTVRAADLIGSMAKNMDTPQAARAAEDTPNFSSKVPEGKGKNNQNDKYVLPSLELSLKRSRSCGDGANNKNTVKDDEQRNCVLRRSNLSAFTRYHTSAASNQGGTGLVGSCSPHDNSSEAVKTDSTYNMKSNSDAAPIKQGSNGSSNDNDMGSTTKDVVTKPMLPSAIKANGYTSAFHPVQQWMVPANATAGKTKADENTARNHCVHFENGGSGALQCGSSNVFDPPLEGQATNNYGGVKAGSNSGSNKGQNNGSTAAANAGLAETEIQAMDKSGVGGGNGNGNGSGSGSGNDTYVRRLAANMTPRQAQLKKYREKKKDRNFGKKVRYQSRKRLADQRPRVRGQFVKQAVQNQDGARER

SEQ ID NO: 168338 - protein, 336 aa, Zea Mays
MSDKKDDEAGTSTPSVAAAAAPAPAPRPSTYAPMGALRDEECANLLALVSTVSRPLEDAVADFLARVPPDRRLRFGTSISFVLEDKMMLQPAERLVAFAILHQGYSSQLANPFLPLLINAACDETSEEAEQAFLQLLLSSTNGDNIEVLKQSAVAYLNGSDYASQVFLPREQLEKQCSYDAARPLPFSSNFRDATVRSTIPDPDVLQSFGSSSELSSIIPNRDDMVATLLQQTSLKGLPPQWIRPSPPRLEIFEGELQWLNIDNNHELLWDSTMCADTSRGAVIRDLVEQACKAPLALAQHEKCIVMPPKDAFLGKVYSRRNRKHGSGPTQDFKQH

SEQ ID NO: 168339 - protein, 421 aa, Zea Mays
MSDKKDDEAGTSTPSVAAAAAPAPAPRPSTYAPMGALRDEECANLLALVSTVSRPLEDAVADFLARVPPDRRLRFGTSISFVLEAACDETSEEAEQAFLQLLLSSTNGDNIEVLKQSAVAYLNGSDYASQVFLPREQLEKQCSYDAARPLPFSSNFRDATVRSTIPDPDVLQSFGSSSELSSIIPNRDDMVATLLQQTSLKGLPPQWIRPSPPRLEIFEGELQWLNIDNNHELLWDSTMCADTSRGAVIRDLVEQACKAPLALAQHEEITKYLRKDWKLVYHCGMTPQKLPDLVEHNPHIAVEVLSKLINSPDMDAYFDAIVHMDMSLHSMEVVNRLTTAVVLPPGFVHDYISNCIRSCEDIKDKYMQNRLVRLVCVFLQSLIRNRIIDVQDLFVEVQAFCIAFSRIREAVGLFRLLKSLE

SEQ ID NO: 168340 - protein, 238 aa, Zea Mays
MVATLLQQTSLKGLPPQWIRPSPPRLEIFEGELQWLNIDNNHELLWDSTMCADTSRGAVIRDLVEQACKAPLALAQHEEITKYLRKDWKLVYHCGMTPQKLPDLVEHNPHIAVEVLSKLINSPDMDAYFDAIVHMDMSLHSMEVVNRLTTAVVLPPGFVHDYISNCIRSCEDIKDKYMQNRLVRLVCVFLQSLIRNRIIDDAWLCAVQDLFVEVQAFCIAFSRIREAVGLFRLLKSLE

SEQ ID NO: 168341 - protein, 112 aa, Zea Mays
MVATLLQQTSLKGLPPQWIRPSPPRLEIFEGELQWLNIDNNHELLWDSTMCADTSRGAVIRDLVEQACKAPLALAQHEKCIVMPPKDAFLGKVYSRRNRKHGSGPTQDFKQH

SEQ ID NO: 168342 - protein, 236 aa, Zea Mays
MRRFLPPLDNVHAWAWHVLHFRPSHTALSPVKSRTAAAHDLASLPACGASSQAGRPLGGAGDDGEQVVAEGVAEVLGEVLDGAFAGDVGLDEEGEHGEHGEPAVLDLLHLEDGGLVGVAGQAQGVEGATGVQLVLEVQSVDDPVVLGAADEDDLRDHGDHQVDGDAVAEIAEGVSVEEQGSGLQPDGLGAAVSAELVARLWDDSASGTEHGPSGMDQLVGLVLAKSSGFLPRPKGS

SEQ ID NO: 168343 - protein, 88 aa, Zea Mays
MVTGKVAVVLLACWTLVLYQPVLGRLPCNNDQKREILRECDPLNSTPDYTPSRHGACCVAVRKVPGTNMLCIASILSLADKAKYSVMA

SEQ ID NO: 168344 - protein, 468 aa, Zea Mays
MSQQEAVDPPSATDERLGGLPRSGSTSRLNAQAPEFVPRAAAVPPPPPQQKVVRLFAPPPHAAFFVAAPRPPPPPFEYYAAVATGGGGRFGPPAAAAEQEAEAEQPPRDGSFDDPVPKIRKQVEYYFSDINLATTEHLMRFISKDPEGYVPISVVAGFKKIKALVQSNSMLASALRTSSKLVVSDDGARVKREQPFTESDLEELQARIVVAENLPDDHCYQNLMRLFSVVGSVRTIRTCYPQTPNGTGPATNRSAKLDMLFANKLHAFVEYDTIEDAARAIVELNDERNWRSGLRVRLLSTCMGGKGKKGGHESDGYGDEENVSTSDQPYDKYLEETPQMSDVPGEHMTEDSAGDMGRGRVRGRGRGGRGRGRGYHQQNNNQHHQHYQNSSHHSNSSSTRPVGTPPPSGHPVMIEQQQQQQAAQPQPLTAANKQPPGPRMPDGSRGFSMGRGKPQTLTPKVSESEPEQ

SEQ ID NO: 168345 - protein, 169 aa, Zea Mays
MRFISKDPEGYVPISVVAGFKKIKALVQSNSMLASALRTSSKLVVSDDGARVKREQPFTESDLEELQARIVVAENLPDDHCYQNLMRLFSVVGSVRTIRTCYPQTPNGTGPATNRSAKLDMLFANKLHAFVEYDTIEDAARAIVELNDERNWRSGLRVRLLSTCMVTFH

SEQ ID NO: 168346 - protein, 332 aa, Zea Mays
MRFISKDPEGYVPISVVAGFKKIKALVQSNSMLASALRTSSKLVVSDDGARVKREQPFTESDLEELQARIVVAENLPDDHCYQNLMRLFSVVGSVRTIRTCYPQTPNGTGPATNRSAKLDMLFANKLHAFVEYDTIEDAARAIVELNDERNWRSGLRVRLLSTCMTKGGKGKKGGHESDGYGDEENVSTSDQPYDKYLEETPQMSDVPGEHMTEDSAGDMGRGRVRGRGRGGRGRGRGYHQQNNNQHHQHYQNSSHHSNSSSTRPVGTPPPSGHPVMIEQQQQQQAAQPQPLTAANKQPPGPRMPDGSRGFSMGRGKPQTLTPKVSESEPEQ

SEQ ID NO: 168347 - protein, 132 aa, Zea Mays
MGFARKSGVAVGVWWLLLLAGVLLPATAFGRHADAGKDMCDIKCQHHSDPARRQQCVDECHSREHHHPSREFCEMKCQHHQDPARKEICVQQCMSYGLSLRRASAGVDEGEKRFHGWETTVAGGILEECGRQ

SEQ ID NO: 168348 - protein, 235 aa, Zea Mays
MEPWHVDKRRMGMEADAAAVDLLRSQIPFQIDGKFVLPPRDVGVVLVGLCNGFCTVGAGNLIAENHKAYAEGKDEKVKVLERHPIDMHNELLCAQETIRILRREVSEKESEIAQCNAHISELNVHVEAVAQEYKHKMNSKKDEELSAAKQRIVELEGIAARRQRECVVNAVKSVYEARRAITRTHLTHKVLSAAVYNHYKTIYCESLIVKLKFQQVLHLMASHSPFMFHLYIKVL

SEQ ID NO: 168349 - protein, 367 aa, Zea Mays
MQREELEVDLQKVREQMLAVQPSGKARRYMEDGMVDLADSSRHPIDMHNELLCAQETIRILRREVSEKESEIAQCNAHISELNVHVEAVAQEYKHKMNSKKDEELSAAKQRIVELEGIAARRQRECVVNAVKSVYEARRAITRTHLTHKVLSAAVYNHYKTIYCESLIVKLKFQQVLHLMASHSPFMFHLYIKARSVPILSAIKNRYYKVTDGALRACGETTSVVFRPYNSMWSITTCFGIDFKKTKNKCINMRKKLKKRILGVEESASQQEIEKVYHKLALRLHPDTNPGNEPKRSFSGCRRLYPFLEIQRKELYMMRLTSVMTIQSSGVLPNNVQKDLARELLHDFNFHNGQITISSSTMGCLIY

SEQ ID NO: 168350 - protein, 274 aa, Zea Mays
MNSKPRGSGSPFRCIGIDFVQQMNSKKDEELSAAKQRIVELEGIAARRQRECVVNAVKSVYEARRAITRTHLTHKVLSAAVYNHYKTIYCESLIVKLKFQQVLHLMASHSPFMFHLYIKARSVPILSAIKNRYYKVTDGALRACGETTSVVFRPYNSMWSITTCFGIDFKKTKNKCINMRKKLKKRILGVEESASQQEIEKVYHKLALRLHPDTNPGNEPKRSFSGCRRLYPFLEIQRKELYMMRLTSVMTIQSSGVLPNNVQKGMIASMLVVG

SEQ ID NO: 168351 - protein, 193 aa, Zea Mays
MEPWHVDKRRMGMEADAAAVDLLRSQIPFQIDGKFVLPPRDVGVVLVGLCNGFCTVGAGNLIAENHKAYAEGKDEKVKVLERHPIDMHNELLCAQETIRILRREVSEKESEIAQCNAHISELNVHVEAVAQEYKHKMNSKKDEELSAAKQRIVELEGIAARRQRECVVNAVKSVYEARRAITRTHLTHKDSGS

SEQ ID NO: 168352 - protein, 250 aa, Zea Mays
MSAAVACAEKATNDMLIGPDWAINIELCDIINIDPGEAKDTLKLLKKRLGSENSKVQILTLYVLETLSKNCGDIVHQQIVERDILSEMIKIVKKKPDLNVREKILSLIDTWQVVFGGPSGKYRQYHAAYEELRAAGVDFPPREENSLPLFTPPQTQPLRHSHLYPPPGQSYEDAAIQASLQSAPPAPALSLSEIQSARGIVDVLDEMLNALDHRHPEGVREEVIVDLVGQCRSYQSRVMDLVNSTGVMMT

SEQ ID NO: 168353 - protein, 344 aa, Zea Mays
MDLVNSTGDESLLFQALGLNDELQRVVQRHDDIAKGILPPGTGAPVPASANVNQGTTPPRPTAVSFSPLLNVHEDDEPEDEFVVLFRRPARDGTVARNNLPYARRNERPYRSPLLPPPPASKRPVYTEASSIDYLSGGSYKSSEKVPDDFINPTAPANVTTSPHSKPEAYPPPSYSSRPDSVSDDFINPTAPSFSAPSRPTDEEPTRSPVKRQESIPDDDFINPTALPGFSSSSATKEFSEDLPRAPWEAQAAAAGSLPPPPARHGQRQQYLEQNVYSGGSNGGGYDELLTRTENLSLNPEKNASRPTASCQAKPEDSLFKDLVDFAKTKPSSPSKSANSRRTR

SEQ ID NO: 168354 - protein, 254 aa, Zea Mays
MSAAVACAEKATNDMLIGPDWAINIELCDIINIDPGEAKDTLKLLKKRLGSENSKVQILTLYVLETLSKNCGDIVHQQIVERDILSEMIKIVKKKPDLNVREKILSLIDTWQVVFGGPSGKYRQYHAAYEELRAAGVDFPPREENSLPLFTPPQTQPLRHSHLYPPPGQSYEDAAIQASLQSAPPAPALSLSEIQSARGIVDVLDEMLNALDHRHPEGVREEVIVDLVGQCRSYQSRVMDLVNSTGVLFSVMMT

SEQ ID NO: 168355 - protein, 495 aa, Zea Mays
MIKIVKKKPDLNVREKILSLIDTWQVVFGGPSGKYRQYHAAYEELRAAGVDFPPREENSLPLFTPPQTQPLRHSHLYPPPGQSYEDAAIQASLQSAPPAPALSLSEIQSARGIVDVLDEMLNALDHRHPEGVREEVIVDLVGQCRSYQSRVMDLVNSTGDESLLFQALGLNDELQRVVQRHDDIAKGILPPGTGAPVPASANVNQGTTPPRPTAVSFSPLLNVHEDDEPEDEFVVLFRRPARDGTVARNNLPYARRNERPYRSPLLPPPPASKRPVYTEASSIDYLSGGSYKSSEKVPDDFINPTAPANVTTSPHSKPEAYPPPSYSSRPDSVSDDFINPTAPSFSAPSRPTDEEPTRSPVKRQESIPDDDFINPTALPGFSSSSATKEFSEDLPRAPWEAQAAAAGSLPPPPARHGQRQQYLEQNVYSGGSNGGGYDELLTRTENLSLNPEKNASRPTASCQAKPEDSLFKDLVDFAKTKPSSPSKSANSRRTR

SEQ ID NO: 168356 - protein, 244 aa, Zea Mays
MIKIVKKKPDLNVREKILSLIDTWQVVFGGPSGKYRQYHAAYEELRAAGVDFPPREENSLPLFTPPQTQPLRHSHLYPPPGQSYEDAAIQASLQSAPPAPALSLSEIQSARGIVDVLDEMLNALDHRHPEGVREEVIVDLVGQCRSYQSRVMDLVNSTGDESLLFQALGLNDELQRVVQRHDDIAKGILPPGTGAPVPASANVNQGTTPPRPTAVSFSPLLNVHEDDEPEDEFVVLFRLQGMAQ

SEQ ID NO: 168357 - protein, 426 aa, Zea Mays
MAIRSKAWISLLLALAAVLSARAEEPAAAEAEAVLTLDVDSFDEADGIVDYLKKQVGPASKEIKSAEGVAAHFDDKKIYIVGIFKEFSGTEFTNFMELAEKLSSDYDFGHTLHANHLPRGDASVEGPLIRLLKPFDDLVVDSKDFDVAALEKFIDASSTPRVVTFDNNPDNHPYLMKFFQSSAPKAMLFLNFSTGPLDSFKSVYYAAAEEFKDKEIKFLIGDIEASQGAFQYFGLKEDQTPLILIQDGDSKKFLKDHIEADQIVSWLKEYFDGKLTPFKKSEPIPEVNNEPVKVVVADNIHDVVFKSGKNVLIEFYAPWCGHCKKLAPILEEAATTLLSDEEVVIAKMDATANDVPSEFEVQGYPTMYFVTPSGKVTSYDSGRTADDIVDFINKSKETASAVQATATASGKAADAAEKTEPVKDEL

SEQ ID NO: 168358 - protein, 496 aa, Zea Mays
MAIRSKAWISLLLALAAVLSARAEEPAAAEAEAVLTLDVDSFDEAVAKHPFMVVEFYAPWCGHCKNLAPEYENAAKELSKHDPPIVLAKVDANEEKNRPLATKYEIQGFPTLKIFRNQGKNIQEYKGPREADGIVDYLKKQVGPASKEIKSAEGVAAHFDDKKIYIVGIFKEFSGTEFTNFMELAEKLSSDYDFGHTLHANHLPRGDASVEGPLIRLLKPFDDLVVDSKDFDVAALEKFIDASSTPRVVTFDNNPDNHPYLMKFFQSSAPKSVYYAAAEEFKDKEIKFLIGDIEASQGAFQYFGLKEDQTPLILIQDGDSKKFLKDHIEADQIVSWLKEYFDGKLTPFKKSEPIPEVNNEPVKVVVADNIHDVVFKSGKNVLIEFYAPWCGHCKKLAPILEEAATTLLSDEEVVIAKMDATANDVPSEFEVQGYPTMYFVTPSGKVTSYDSGRTADDIVDFINKSKETASAVQATATASGKAADAAEKTEPVKDEL

SEQ ID NO: 168359 - protein, 356 aa, Zea Mays
MAAPASAAAGRGGAMSSDNAKGLVLAVSSSAFIGASFIVKKMGLRRAADSGVRAVIVGEIANFAAYAFAPAILVTPLGALSIIISAALAHAILQEKLHTFGILGCVLCVVGSITIVLHAPQERDIDSVKEVWDLATEPAFLCYAAIVVAAALVLIYFVVPHHGQTNIMVYIGVCSLLGSLTVMSVRALGIALKLTLSGTNQLFYPQTWAFALIVATCVSTQINYLNKALDTFNTAVVSPIYYVMFTSLTIIASVIMFKDWDHQNPTQIVTEMCGFMTILSGTFLLHKTKDMTDSPGQSLLTRRPKHASQNAFAIEVMPLKCQDYIDDETLTLSLPKVENGYLKEEYLLRYKDSSIV

SEQ ID NO: 168360 - protein, 279 aa, Zea Mays
MYVHVFCTVIVGEIANFAAYAFAPAILVTPLGALSIIISAALAHAILQEKLHTFGILGCVLCVVGSITIVLHAPQERDIDSVKEVWDLATEPAFLCYAAIVVAAALVLIYFVVPHHGQTNIMVYIGVCSLLGSLTVMSVRALGIALKLTLSGTNQLFYPQTWAFALIVATCVSTQINYLNKDWDHQNPTQIVTEMCGFMTILSGTFLLHKTKDMTDSPGQSLLTRRPKHASQNAFAIEVMPLKCQDYIDDETLTLSLPKVENGYLKEEYLLRYKDSSIV

SEQ ID NO: 168361 - protein, 294 aa, Zea Mays
MGLLSNRVERSEIRPGDHIYTWRAVYAYSHHGIYVGGSKVVHFTRKKETESSDSSDFTSSLISGVPSECPTFPDCGFQLPSSGVVLTCLDCFVRSGSLYCFEYGVPSAVFLAKLRGGTCTTAESDPPEVVVHRAMCLLQKGFGNYDIFEKNCEDFALYCKTGLLPVEDPGIGTSGQASSAIGVPLAALLSTPFKLLAAGPLGMATVTAGMYCAGRYITDIGVRKDVAKVEVEKLSSHPGFHLVEDEGSVNKRSEKPKSLLPMKRKRGRCLLFPMEITLRPWLHECLSLCVLFCL

SEQ ID NO: 168362 - protein, 297 aa, Zea Mays
MEEQYYILKPNEESTRLFYLHASTDQAAKYQCTAILKASDSSELDRQECVFSTTATVLDNGTQIIGSNGYKLGFFDTIKGYLVSFWDFLIDLISGKSCRLNKCRSFFDFSCHAQYRCITWLVMLVLLLFMLPAGAIVLYLLHQKGFFDPVYDWWDDLLGADYRAHRRHKKGRRHHHHHHDHHHHRHHHHHGHSHGHDHHPHSHHHAHQRRKIEPSHHHVLHRQQPGTAAEGHRHKHDPALGVQHREAGHLGHKRRHGKAVVAEDALDLEFRERRPYEVRHAGHLHRDHHHHHHSWEV

SEQ ID NO: 168363 - protein, 736 aa, Zea Mays
MAPPRPPLPTVLSVLLLLLLAAGSAGGVEILAKSLLESCVADSGAGGRLSCDRKVVVDMAVPSGSNGGEAWLVAQVAHVNDTKQSKTIRNPPVITVNKGAVFALYALNYIRDVAYKPEEQYVETRKCEPDAGSDVVRACERLRYENGSIIEHSEPVCCPCGPNRRVPSSCGNVFEKIFKGKANTAHCLRFPGDWFHVFGIGTRSLGFNIRVQVKKGSSVSEVVVGPENRTVVSKDNFLRVNLIGDFGGYTSIPAFEDFYLVTPRKSAGSGEPQNLGAEYRKWMLLERVRFTDGVECNKIGVGYEAFQNQPNFCASPFESCLNNQLWTFLESDKNRISMSRQPQYVVQGRFQRINQHPDASVHSFSIGVTEVINSNLRIELSADDIEYMYQRSPGNITDISVPAFEVLSQYGTAKVTTKNIGTLEASYTLTFHCSSGISFMEEQYYILKPNEESTRLFYLHASTDQAAKYQCTAILKASDSSELDRQECVFSTTATVLDNGTQIIGSNGYKLGFFDTIKGYLVSFWDFLIDLISGKSCRLNKCRSFFDFSCHAQYRCITWLVMLVLLLFMLPAGAIVLYLLHQKGFFDPVYDWWDDLLGADYRAHRRHKKGRRHHHHHHDHHHHRHHHHHGHSHGHDHHPHSHHHAHQRRKIEPSHHHVLHRQQPGTAAEGHRHKHDPALGVQHREAGHLGHKRRHGKAVVAEDALDLEFRERRPYEVRHAGHLHRDHHHHHHSWEV

SEQ ID NO: 168364 - protein, 175 aa, Zea Mays
MLVLLLFMLPAGAIVLYLLHQKGFFDPVYDWWDDLLGADYRAHRRHKKGRRHHHHHHDHHHHRHHHHHGHSHGHDHHPHSHHHAHQRRKIEPSHHHVLHRQQPGTAAEGHRHKHDPALGVQHREAGHLGHKRRHGKAVVAEDALDLEFRERRPYEVRHAGHLHRDHHHHHHSWEV

SEQ ID NO: 168365 - protein, 268 aa, Zea Mays
MARPLQEAIDTFISITGADEAVAVRKLEEHGGDLNRAINSHFNDGDSILNGISQNTMPTSHDDMMDLDGPLDNTFQRSLFPENFRDPFALMDPNFQHQFFDRVGSTDGVTRGPLVSHPREVREIPIEVKDSDPQTSPSGQAPVIEDVTGHESSNGLEVHETIIIDDEDSGLLSAPSAPHASVPSNTSSEPTAPPLVHVNDYDDDIEEEMIRAAIEASKKDSEGLANIAEQGDQHQEGVNLGEHSSDKAVMRTTDGIVESTSFRKGWNI

SEQ ID NO: 168366 - protein, 266 aa, Zea Mays
MARPLQEAIDTFISITGADEAVAVRKLEEHGGDLNRAINSHFNDGDSILNGISQNTMPTSHDDMMDLDGPLDNTFQRSLFPENFRDPFALMDPNFQHQFFDRVGSTDGVTRGPLVSHPREVREIPIEVKDSDPQTSPSGQAPVIEDVTGHESSNGLEVHETIIIDDEDSGLLSAPSAPHASVPSNTSSEPTAPPLVHVNDYDDDIEEEMIRAAIEASKKDSEGLANIAEQGDQHQEGVNLGEHSSDKAVMRTTDGIVESFRKGWNI

SEQ ID NO: 168367 - protein, 175 aa, Zea Mays
MAMAAVLANGDSQGRPQRNYQVVVAGTRDMGIGKDGVLPWKLPGDLKFFKELTLITSDPVKKNAVIMGRKTWESIPVKSRPLPGRLNVILTRSGSFDFATVENVVICGSMESALELLASTPYCLSIEKVFVIGGGQVLREYLKGPACEAIHLTDIQSSIECDTFIPPVDFSVFQP

SEQ ID NO: 168368 - protein, 466 aa, Zea Mays
MAMAAVLANGDSQGRPQRNYQVVVAGTRDMGIGKDGVLPWKLPVENVVICGSMESALELLASTPYCLSIEKVFVIGGGQVLREYLKGPACEAIHLTDIQSSIECDTFIPPVDFSVFQPWYSSFPVIESNIRHSFVSFVRVRKSVAETHESNGKESTEVDTKNDKFETENFSFLPKMVYDRHEEYQYLNLVEDIIRSGAQKNDRTGTGTLSKFGCQMRFNLRKNFPLLTTKRVFWRGVVEELLWFISGSTNAKVLQEKGIHIWDGNASREYLNSVGLAHREEGDLGPIYGFQWRHFGAEYTDMHADYTGKGFDQLMDVIDKIKNDPDDRRIILSAWNPSDLKKMALPPCHMFAQFYVENGELSCQMYQRSADMGLGVPFNIASYSLLTYMIAQVCDLSPGDFVHVIGDAHVYRNHVRALEEQIQKMPKPFPILKINPSKKDIDSFMASDFKLVGYDPHQKIEMKMAV

SEQ ID NO: 168369 - protein, 85 aa, Zea Mays
MPSALPPLHRRPSSMQSRAIREATVPSTTAIVSDLSSSTAISALSLLSSTVVFRGTIVEAAHETNMEKKNEMAFHMKLVKKELNS

SEQ ID NO: 168370 - protein, 244 aa, Zea Mays
MLAAAAAMAVTVPRAASHCFPANTARKCRTCWSCRAARVEAGHSRLEVRKVTYRPPGTEQNLLNEINLSLQEKSFGLIFGRSGSGKTTLLQLLAGLSEPTSGSICIQKYDDTGNPIGLPELLTSQRVGIVFQFPERYFLADTVLEEVTFGWPRQKADLLLKEQLALNLQNAFNSVQTPDLLLLDEPLAGLDWKARADVVNLLKDLKKHHTILVVSHDLRELYPLVDRSWRMEMGGSLKEEALPV

SEQ ID NO: 168371 - protein, 98 aa, Zea Mays
MYMNVHLCLKRFIKQIMYPVLTIKEMKNKSLDTLNIGEVDRCFRDGITSCRDEYLNTREWYEQIRCAKELQLRLLLTIDFVQLINCQGFMVKSVLEET

SEQ ID NO: 168372 - protein, 162 aa, Zea Mays
MYECLVEGCGMKLKSYKSRQQHLIDKHQFPKSFEFFKKARDSQRQRQKSQRRQTAHKGEETRDNSMDVDGKGARQTNRRYRLKQHDHSEPKENKQQHKEAQEDEMEVEQKIDELTSAVSRLSTADSTPSSVTFGHRRSRGLTFVPRSIRQNKQAALPAGSNK

SEQ ID NO: 168373 - protein, 160 aa, Zea Mays
MSFYNASKGAVIRFYETLRAELGSHVHVTILTPGYVVSNLTKGKGLQKDGHVGIDEEARDINVGPMPVGKTESLAEVVVASVRRRDYYVTWPGWYWPFHMVMCAAPELVDWFSRTFYVSKSGDQDGGGGALSKKILEAVGGKKFLYPQTIRSQTAMAPNN

SEQ ID NO: 168374 - protein, 320 aa, Zea Mays
MGYVTNSAIIPCLIGKGGLIISDSLNHNSIVNGARGSGATVRVFQHNSPAHLEEVLREQIAGGQPRTHRPWKKIIVIVEGIYSMEGELCKLPEIIAVAKKYKAYTYLDEAHSIGAVGQSGRGVCELLGVDPADVDIMMGTFTKSFGSCGGYIAASKEIIQHLKHSCPAHLYATSMSPPAVQQVISAIKVILGEDGSNRGAQKLARIRENSNFFRSELKKMGFEVLGDNDSPVMPIMLYNPAKIPAFSRECLRQKVAVVTVAFPATPLLLARARICISASHTREDLMKALDVISRVGDLVGIKYFPAEPPKIAGADHDKLE

SEQ ID NO: 168375 - protein, 380 aa, Zea Mays
MESTDEIKKRLAAKEVEVQEAKSTLDAKLTTIGNIVHESVPVSEDEANNKIVRTFGEKRVEENLKNHVDLCRMLDIVALEKGADVAGGRGFYLKDEGVLLNLALINFGLAFLRKRGFKPMQTPFFMRKETMAKCAQLAQFDEELYKVTGDGEDKYLIATSEQPLCAYHLGDRIYPAELPIKYAGYSTCFRKEAGSHGRDTAGIFRVHQFEKIEQFCITSPNDNDSWEMHEEMLKNSEDYYKEIGLPYQVVSIVSGALNDAAAKKYDLEAWFPASKTFRELVSCSNCTDFQSRRLGIGYGQKKNDEQSKQFVHMLNSTLTATERTLCCILENFQKEDGVEVPKALQPYMGGIEFLPFKQPLDVKQASDSKSNKSKSKGNAA

SEQ ID NO: 168376 - protein, 299 aa, Zea Mays
MLDINLFRTDKGGNPELIRESQRSRFASVELVDEVIALDKAWRERQFELDKIRQELNATSKKIGKLKASKQEEEAKKLMESTDEIKKRLAAKEVEVQEAKSTLDAKLTTIGNIVHESVPVSEDEANNKIVRTFGEKRVEENLKNHVDLCRMLDIVALEKGADVAGGRGFYLKDEGVLLNLALINFGLAFLRKRGFKPMQTPFFMRKETMAKCAQLAQFDEELYKVTGDGEDKYLIATSEQPLCAYHLDMLGTPHASGRKLVRMEGTQLVSSESTSLKKSNNSALQAQMTTILGRCMKRC

SEQ ID NO: 168377 - protein, 355 aa, Zea Mays
MGRPHLIVMKRRLPHQVKLAKANNKIVRTFGEKRVEENLKNHVDLCRMLDIVALEKGADVAGGRGFYLKDEGVLLNLALINFGLAFLRKRGFKPMQTPFFMRKETMAKCAQLAQFDEELYKVTGDGEDKYLIATSEQPLCAYHLGDRIYPAELPIKYAGYSTCFRKEAGSHGRDTAGIFRVHQFEKIEQFCITSPNDNDSWEMHEEMLKNSEDYYKEIGLPYQVVSIVSGALNDAAAKKYDLEAWFPASKTFRELVSCSNCTDFQSRRLGIGYGQKKNDEQSKQFVHMLNSTLTATERTLCCILENFQKEDGVEVPKALQPYMGGIEFLPFKQPLDVKQASDSKSNKSKSKGNAA

SEQ ID NO: 168378 - protein, 104 aa, Zea Mays
MSHSVKVSEKMKVVGRRRMAHTFSKHQPRSPSPALARTEASESTSLAVSVLLRGWHQHRNEEAPEDADTAVRGGGEEPRSDIVRVMGGAHPNATRDGEGTDDEA

SEQ ID NO: 168379 - protein, 496 aa, Zea Mays
MNPSPNPPPAGVDLVAATQMQLLQQMANTMIEMAQMRQECQEMRQELQEMRQELRQERLERQQQQPLPPPPPAPPRDKHREFMSHKPPTFSNSPDPLQADDWLKTVDKMLNIAQCTDQEKVLYASGRLTGPAADWWDSYCAAHAAANTITWAEFSTQFRNYHIPASLMKIKKKEFLSLKQGNMTVSEYHDKFIQLSRYAPDEVADDERKQEQFMEGLIGPLQYQLVSHTFSSFQRLLDKAIAVEHKRVQLGEMKRKTITQGQGSSSVRRRYVPPQGTPARPGGGQQSYQRPAQQTPQATPQTPHTRQDAPTVTPARPTGQGTATDTICFKCGEIGHYANVCPKRNPNTPARGNSQVKQTQTLGSNRGYSIAKVNQINVEATEDGPNIVIGTFFINSMLATILFYSGASHSFISARYVLANSLPYLALHRPMIVITPKGAYEATYMSHRIELTILGRKFWAMPVVLEESIIDLILGMNWLKQWNAVIHCARGTVELS

SEQ ID NO: 168380 - protein, 558 aa, Zea Mays
MEANASRSEGAKAQGGQERKLCHPQESEDDGSPSRGAFIMLPPFGNPLWVPEDMDDQQQHAPPPTPMELLTVPAQGHEEQNLLALASAAAVAGAGCVFSSPAMLDDDWYFDPVAAAAATGAQGHLLLAPPGPVPGPGAGSQMFSLFNVGGAATFDVHGFDIGLGTLGGGSGGDLVPLAGAGNTSNSASFSMSLNAGLLASSFGGFGTAPAQMPDFGGLGGFDMFNNGAGSSSAAPPPASASLTVPFSGRGKPAVLRPLETFPPVGAQPTLFQKRALRRNGGGEDYDKKRKAEATAAAAGASSACGGDDAEDDDGGSIDASGLNYDSEDACRGVEDSGKKDGKGSNANSAGDGKGKRKRLPAKNLMAERRRRKKLNDRLYMLRSVVPKISKMDRASILGDAIEYLKELLRKIEELQNEVESSASPASTASLPPTPTSFRPLTPTLPALPSRVKEELCPSALPSPTSKQPRVEVRTTREGREVNIHMLCARRPGLLLATMRAIEGLGLDVQQAVASCFNGFSLDIFKAELCKDGPALLLLPEEEIKSVLLQSAGLHGVAP

SEQ ID NO: 168381 - protein, 994 aa, Zea Mays
MGPVRLALLLSVAAVLAAAGAVYIPYNTSAGVVPGKLNVHVVPHTHDDVGWLKTVDQYYVGSNNSIQGACVQNVLDSLIPALLKDENRKFIYVEQAFFQRWWRNQNDMIKDTVKGLISSGRLELINGGMCMHDEAAVHYIDMIDQTTLGHKYIKEEFGQIPRIGWQIDPFGHSAVQAYLLGAEVGFDAFYFFRIDYQDRDTRKGTKELEVVWRGSKTLGSSADIFAGIFPKNYEPPPGDFYFEVDDNSPVVQDDPLLFDYNVEERVNDFVAAAVAQANITRTNHIMFTMGTDFKYQYAESWFRNMDKLIHYVNKDGRINALYSTPSIYTDAKYAANEQWPLKTNDFFPYADNPNAYWTGYFTSRPALKRYVRMMSGYYLAARQLEFFKGRYSSGLSTDSLGDALALAQHHDAVTGTEKQHVANDYAKRLSIGYTQAQELVSTSLACLTESGSKSRCASPVTKFSQCLLLNVTYCPPSEMDLTKGKSLVVLVYNSLGWKREDVIRIPVFSDSIVVHDSEGREIESQLLPIATASLNIREKHVKAYLGTTPGAKPKFWLAFPVSVPPLGFNTYFVSNLKKSAHISSKSTQYSPQGSESSNLQVGQGNLKLQYNEAGKLSLYSDSKTMVQANFEQKYKYYIGQDGNGSDPQASGAYIFRPNGTVPISTDGQVSLTVLRGPILDEVHQQINSWIFQITRLYKEKDFLETEFIVGPIPVDDGNGKEVATEIVTNMVTNKTFYTDSSGRDFIKRVNLGIYVEDGSKELSVLVDRSIGGSSIKDGQIELMLHRRLLHDDGKGVAEALNETVCLDKQCEGLIIQGKYYVKIDPQGEGARWRRTFGQEIYSPLLLAFTEQDGGNWANSHVAKFSAMDSTYSLPDNVAMLTLQELEDGSVLLRFAHLYEAGEDKDLSSLASIDLKRVFPEKKIGKVIETSLSANQERAAMEKKRLKWKAQGSAADEKVVRGGPVDPSKLVVELGPMEIRTFIVSFDHISDKQQL

SEQ ID NO: 168382 - protein, 73 aa, Zea Mays
MSSAAASSSPAAGSEGSGGAVEGREIAYVSYGGEHHLPLVMSLVDEELSEPYSIFTYRYFVYLWPQLTFLQLS

SEQ ID NO: 168383 - protein, 152 aa, Zea Mays
MSSAAASSSPAAGSEGSGGAVEGREIAYVSYGGEHHLPLVMSLVDEELSEPYSIFTYRYFVYLWPQLTFLAFDARDGKCVGTVVCKMGEHRGAFRGYIAMLVVLKPYRGRGIATELVTRSIRVMMESGCEETVQVLFEWCRRFSAETSVSTP

SEQ ID NO: 168384 - protein, 981 aa, Zea Mays
MDPSSGSTSRHGRLLISPSLSTPTFSTHSPSPSSAASPAPHRNSTSSPKPLVSFPSPSSANRPRSSYVGAGPRAATAAASASGPAFAHNARLAAALVPAAAFLLDLGGLPVFAVLAIGLAAAYLLDALQLRQGSFFTVWAALLAADVAFFFSASLSSAAAASLPLTVLALLLCAETSFLIGVWASLQFRWIQLENPTIVAALERLLFACVPIAAPALFTWALVSAVGMANASYYFATFCMVFYWLFSIPRRSSFNSRKQDAPMLDSDGILGPLESCVHSLYVLFVPVLFHAVSHRATLFTSLASVCELLLLFFIPFLFQLYASTRGALWWITRDARTMDQIRIVNGFVALVVVVLCLEVRVVFHSFGRYIHAPPPLNYLLVTVTMLGGALGLAAHAAGKVGDAASSVAFTGLAVLVSGAGAVVIGFPMVFLPLPMISGYYVARFFTKKSLSSYFTFVALASLMVLWFVVHNYWDLNIWIAGMPLKSFTKYVVAAVIMAMAVPGLALLPTKLRFLLELGLIGHTLLLCYIENRLFNYASMYYYGFEEDIIYPNYMVFITTFLGLALVRRLYVDQRLGPKAAWILTCLYSSKLAMLFMTSRSVIWFSAVLLLAVTPPLLLYRDKSKGASKMKVWQAYFHASVIAFSAWLCRETIFEALQWWNGRPPSDGLLLGSYILLTGVACIPIVALHFPHAQSAKRFLVLIVATGLLFVVMQPPIKLSWVYRSDFITAAHLSDDDISIYGFVASKPSWPSWLLIATVVLTLAAVTSIIPVKYVVELRTSYAVAVGITLGIYISVQYFFQAVVLYPLLVATIVSAAVFVVFTHLPSESSTRVLPWVFSFLVALFPVTYLLEGHLRAKSFADEDEAEKFTNMLAIEGARMSLLGLYAAIFMIIALEIKFELTLLLREKAADRGMHGPSSRSAAFPPKARLLQQRRAHAAPTFTIKRLAAEAAWMPAIGYGRRLGLAMEDGLLISGARAGCLL

SEQ ID NO: 168385 - protein, 741 aa, Zea Mays
MDPSSGSTSRHGRLLISPSLSTPTFSTHSPSPSSAASPAPHRNSTSSPKPLVSFPSPSSANRPRSSYVGAGPRAATAAASASGPAFAHNARLAAALVPAAAFLLDLGGLPVFAVLAIGLAAAYLLDALQLRQGSFFTVWAALLAADVAFFFSASLSSAAAASLPLTVLALLLCAETSFLIGVWASLQFRWIQLENPTIVAALERLLFACVPIAAPALFTWALVSAVGMANASYYFATFCMVFYWLFSIPRRSSFNSRKQDAPMLDSDGILGPLESCVHSLYVLFVPVLFHAVSHRATLFTSLASVCELLLLFFIPFLFQLYASTRGALWWITRDARTMDQIRIVNGFVALVVVVLCLEVRVVFHSFGRYIHAPPPLNYLLVTVTMLGGALGLAAHAAGKVGDAASSVAFTGLAVLVSGAGAVVIGFPMVFLPLPMISGYYVARFFTKKSLSSYFTFVALASLMVLWFVVHNYWDLNIWIAGMPLKSFTKYVVAAVIMAMAVPGLALLPTKLRFLLELGLIGHTLLLCYIENRLFNYASMYYYGFEEDIIYPNYMVFITTFLGLALVRRLYVDQRLGPKAAWILTCLYSSKLAMLFMTSRSVIWFSAVLLLAVTPPLLLYRDKSKGASKMKVWQAYFHASVIAFSAWLCRETIFEALQWWNGRPPSDGLLLGSYILLTGVACIPIVALHFPHAQRRDSWSLLWQQAFSSLLCSLLLSYHGYTGRILSQRHIYLMMTFQYMGL

SEQ ID NO: 168386 - protein, 1120 aa, Zea Mays
MDPSSGSTSRHGRLLISPSLSTPTFSTHSPSPSSAASPAPHRNSTSSPKPLVSFPSPSSANRPRSSYVGAGPRAATAAASASGPAFAHNARLAAALVPAAAFLLDLGGLPVFAVLAIGLAAAYLLDALQLRQGSFFTVWAALLAADVAFFFSASLSSAAAASLPLTVLALLLCAETSFLIGVWASLQFRWIQLENPTIVAALERLLFACVPIAAPALFTWALVSAVGMANASYYFATFCMVFYWLFSIPRRSSFNSRKQDAPMLDSDGILGPLESCVHSLYVLFVPVLFHAVSHRATLFTSLASVCELLLLFFIPFLFQLYASTRGALWWITRDARTMDQIRIVNGFVALVVVVLCLEVRVVFHSFGRYIHAPPPLNYLLVTVTMLGGALGLAAHAAGKVGDAASSVAFTGLAVLVSGAGAVVIGFPMVFLPLPMISGYYVARFFTKKSLSSYFTFVALASLMVLWFVVHNYWDLNIWIAGMPLKSFTKYVVAAVIMAMAVPGLALLPTKLRFLLELGLIGHTLLLCYIENRLFNYASMYYYGFEEDIIYPNYMVFITTFLGLALVRRLYVDQRLGPKAAWILTCLYSSKLAMLFMTSRSVIWFSAVLLLAVTPPLLLYRDKSKGASKMKVWQAYFHASVIAFSAWLCRETIFEALQWWNGRPPSDGVACIPIVALHFPHAQSAKRFLVLIVATGLLFVVMQPPIKLSWVYRSDFITAAHLSDDDISIYGFVASKPSWPSWLLIATVVLTLAAVTSIIPVKYVVELRTSYAVAVGITLGIYISVQYFFQAVVLYPLLVATIVSAAVFVVFTHLPSESSTRVLPWVFSFLVALFPVTYLLEGHLRAKSFADEDEAEKFTNMLAIEGARMSLLGLYAAIFMIIALEIKFELTLLLREKAADRGMHGPSSRSAAFPPKARLLQQRRAHAAPTFTIKRLAAEAAWMPAIGNVSTVLCFGICLVLNLTLTGGSNRAIFFLAPILLLLNQDSDIFAGFGDRQRYFPVTVSISGYLLLTALYRIWEETWPGNGGWALDIGGPGWLFAVKNFALLVLTLPNHILFNRFMWDYVRQTDAKLLLTLPLNLPSIIMTDILTIRVLGLLGAMYSLAQYMISRRIRIAGMRYI

SEQ ID NO: 168387 - protein, 686 aa, Zea Mays
MISGYYVARFFTKKSLSSYFTFVALASLMVLWFVVHNYWDLNIWIAGMPLKSFTKYVVAAVIMAMAVPGLALLPTKLRFLLELGLIGHTLLLCYIENRLFNYASMYYYGFEEDIIYPNYMVFITTFLGLALVRRLYVDQRLGPKAAWILTCLYSSKLAMLFMTSRSVIWFSAVLLLAVTPPLLLYRDKSKGASKMKVWQAYFHASVIAFSAWLCRETIFEALQWWNGRPPSDGVACIPIVALHFPHAQSAKRFLVLIVATGLLFVVMQPPIKLSWVYRSDFITAAHLSDDDISIYGFVASKPSWPSWLLIATVVLTLAAVTSIIPVKYVVELRTSYAVAVGITLGIYISVQYFFQAVVLYPLLVATIVSAAVFVVFTHLPSESSTRVLPWVFSFLVALFPVTYLLEGHLRAKSFADEDEAEKFTNMLAIEGARMSLLGLYAAIFMIIALEIKFELTLLLREKAADRGMHGPSSRSAAFPPKARLLQQRRAHAAPTFTIKRLAAEAAWMPAIGNVSTVLCFGICLVLNLTLTGGSNRAIFFLAPILLLLNQDSDIFAGFGDRQRYFPVTVSISGYLLLTALYRIWEETWPGNGGWALDIGGPGWLFAVKNFALLVLTLPNHILFNRFMWDYVRQTDAKLLLTLPLNLPSIIMTDILTIRVLGLLGAMYSLAQYMISRRIRIAGMRYI

SEQ ID NO: 168388 - protein, 693 aa, Zea Mays
MVFLPLPMISGYYVARFFTKKSLSSYFTFVALASLMVLWFVVHNYWDLNIWIAGMPLKSFTKYVVAAVIMAMAVPGLALLPTKLRFLLELGLIGHTLLLCYIENRLFNYASMYYYGFEEDIIYPNYMVFITTFLGLALVRRLYVDQRLGPKAAWILTCLYSSKLAMLFMTSRSVIWFSAVLLLAVTPPLLLYRDKSKGASKMKVWQAYFHASVIAFSAWLCRETIFEALQWWNGRPPSDGVACIPIVALHFPHAQSAKRFLVLIVATGLLFVVMQPPIKLSWVYRSDFITAAHLSDDDISIYGFVASKPSWPSWLLIATVVLTLAAVTSIIPVKYVVELRTSYAVAVGITLGIYISVQYFFQAVVLYPLLVATIVSAAVFVVFTHLPSESSTRVLPWVFSFLVALFPVTYLLEGHLRAKSFADEDEAEKFTNMLAIEGARMSLLGLYAAIFMIIALEIKFELTLLLREKAADRGMHGPSSRSAAFPPKARLLQQRRAHAAPTFTIKRLAAEAAWMPAIGNVSTVLCFGICLVLNLTLTGGSNRAIFFLAPILLLLNQDSDIFAGFGDRQRYFPVTVSISGYLLLTALYRIWEETWPGNGGWALDIGGPGWLFAVKNFALLVLTLPNHILFNRFMWDYVRQTDAKLLLTLPLNLPSIIMTDILTIRVLGLLGAMYSLAQYMISRRIRIAGMRYI

SEQ ID NO: 168389 - protein, 696 aa, Zea Mays
MFLYMFLPLPMISGYYVARFFTKKSLSSYFTFVALASLMVLWFVVHNYWDLNIWIAGMPLKSFTKYVVAAVIMAMAVPGLALLPTKLRFLLELGLIGHTLLLCYIENRLFNYASMYYYGFEEDIIYPNYMVFITTFLGLALVRRLYVDQRLGPKAAWILTCLYSSKLAMLFMTSRSVIWFSAVLLLAVTPPLLLYRDKSKGASKMKVWQAYFHASVIAFSAWLCRETIFEALQWWNGRPPSDGVACIPIVALHFPHAQSAKRFLVLIVATGLLFVVMQPPIKLSWVYRSDFITAAHLSDDDISIYGFVASKPSWPSWLLIATVVLTLAAVTSIIPVKYVVELRTSYAVAVGITLGIYISVQYFFQAVVLYPLLVATIVSAAVFVVFTHLPSESSTRVLPWVFSFLVALFPVTYLLEGHLRAKSFADEDEAEKFTNMLAIEGARMSLLGLYAAIFMIIALEIKFELTLLLREKAADRGMHGPSSRSAAFPPKARLLQQRRAHAAPTFTIKRLAAEAAWMPAIGNVSTVLCFGICLVLNLTLTGGSNRAIFFLAPILLLLNQDSDIFAGFGDRQRYFPVTVSISGYLLLTALYRIWEETWPGNGGWALDIGGPGWLFAVKNFALLVLTLPNHILFNRFMWDYVRQTDAKLLLTLPLNLPSIIMTDILTIRVLGLLGAMYSLAQYMISRRIRIAGMRYI

SEQ ID NO: 168390 - protein, 135 aa, Zea Mays
MTFSRFARRRSACVRGSRLPPKQPWRPRCSAVRSTSAACSPRFRTAPLPRLLGHSDPEDLPAERRHHHDRPLLRRESPPPPQQVGVPEQAAGFPGARPGAGHLGRTARARHGRAQHPRPSTSARPRKPRFVEMVD

SEQ ID NO: 168391 - protein, 100 aa, Zea Mays
MSTSSNWHHKLCLLSSKLFIFPCFSNKLVALFKDRVVRRCQITKQLRWLWQSNALCDKALIQLYTLVSLRALLVTEIASQLSVQLICNWHSGWHPRGACL

SEQ ID NO: 168392 - protein, 87 aa, Zea Mays
MGQSFIYGCMPPQFLVSLFCSMQLSALFLAEQQTQPKFSSDASPGFSKMMMHHFYGQNVKGTSFSGLFRAVIFIHTFVHTLKILFLK

SEQ ID NO: 168393 - protein, 561 aa, Zea Mays
MEEEAGRSWTTDERGDDDGDQLRGTTTATGSRRVAAAAAGASGEIEMLQTEAAATVVVVGGGASASASVQQGGGDADDECGIQQIPIWKRFLTHAGPGFLVSLAYIDPSNVQTDLQAGSSHKFELLWVLFFGFFFVLVIQSLAAKLGIITGRNLAQMCMYEYPKLVKYGLWLLIEVGVIAATIPGVLGTALAYNILLNIPFLVGVLICGASTFLLLALQIYGVRKIELIGVIFMLLIAISFFVELSTVNPPMGEVIQGLFIPRLRGVYAVSDAIALFSVLVVPHNLFLHSSLVVSRKISPSPKGFKDTSTFFLIENAFAMLLVLLVNVAIVSTTGTICANNTQLVDNNNACSGLTLNSASVLLKNMFGRSTSKIYGLALLASGQSNTMTTSYSGQYIMQGFSGMRKCIVFIIAPCFTVIPSLIICSVAGAPHVRQLINVSAIILAFVLPFSLVPLLKFSSSCAVKIVQVAWILSIVIMGINIYFFCNSFISWLVHSELPRIVNVIISTLVFPFMAAYIAALIYLAFRKVNAAGIFPSVSASTGTEVEAWRQDGNIDDIGVH

SEQ ID NO: 168394 - protein, 288 aa, Zea Mays
MHLSLLFIIRHNLFLHSSLVVSRKISPSPKGFKDTSTFFLIENAFAMLLVLLVNVAIVSTTGTICANNTQLVDNNNACSGLTLNSASVLLKNMFGRSTSKIYGLALLASGQSNTMTTSYSGQYIMQGFSGMRKCIVFIIAPCFTVIPSLIICSVAGAPHVRQLINVSAIILAFVLPFSLVPLLKFSSSCAVKIVQVAWILSIVIMGINIYFFCNSFISWLVHSELPRIVNVIISTLVFPFMAAYIAALIYLAFRKVNAAGIFPSVSASTGTEVEAWRQDGNIDDIGVH

SEQ ID NO: 168395 - protein, 477 aa, Zea Mays
MVALDAWPKPLDYCPVSYLSPDKLGEKTFHEQLLWVLFFGFFFVLVIQSLAAKLGIITGRNLAQMCMYEYPKLVKYGLWLLIEVGVIAATIPGVLGTALAYNILLNIPFLVGVLICGASTFLLLALQIYGVRKIELIGVIFMLLIAISFFVELSTVNPPMGEVIQGLFIPRLRGVYAVSDAIALFSVLVVPHNLFLHSSLVVSRKISPSPKGFKDTSTFFLIENAFAMLLVLLVNVAIVSTTGTICANNTQLVDNNNACSGLTLNSASVLLKNMFGRSTSKIYGLALLASGQSNTMTTSYSGQYIMQGFSGMRKCIVFIIAPCFTVIPSLIICSVAGAPHVRQLINVSAIILAFVLPFSLVPLLKFSSSCAVKVPYKNSACIVQVAWILSIVIMGINIYFFCNSFISWLVHSELPRIVNVIISTLVFPFMAAYIAALIYLAFRKVNAAGIFPSVSASTGTEVEAWRQDGNIDDIGVH

SEQ ID NO: 168396 - protein, 679 aa, Zea Mays
MAAPPPYTPPAAVPQPLVLLHHPPALVLHVRLRPRSLRLARAPAATATAAAASVAPDDISQLNYRLRAIVRRREGAAAQGATSSSPVDPAQAEAYLRMIRDQQRLGLRQLRREEQEGEGDGDEEGPDGERARKGVAAGSSLGHRVDPRELEPGEYVVHKKVGVGKFACISAEDGADYVFIQYADGMAKLAVDQAARMLYRYNLPHEKRRPRNLSKLNDPSTWEKRRLKGKLAVQKMVVNLMELYLQRMRLGRSPYPKPASMDDFAAEFPYEPTPDQCQAFIDVEKDLTERETPMDRLICGDVGFGKTEVAMRAIFIVVSAGFQAMVLAPTIILAKQHYDVMTERFANYPEMKVAIFSGAQSKEEKDELITMIKNGDLHIIVGTHALLTERMVYSNLGLLVVDEEQKFGVQQKEKIASYKSSIDVLTLSATPIPRTLYLALTGFRDASLMSTPPPERVAVKTYVSAFSKERALSAIKFELQRGGQVFYVVPRIKAIDDVLQFLKDSLPDVPIAVAHGKKLSKNIQLAMEDFTSGKVKILVCTHIIESGIDIAHANTMIIQFAELYGLAQLYQLRGRVGRSGTEGFAYLFYTDKSLLSRVATDRLGAIEEHSELGQGFHVAEKDMGIRGFGSLFGEQQSGDVANVGIDLFFDMLFDSLSKVDQFCLVPVPYKDVQLSGKSC

SEQ ID NO: 168397 - protein, 590 aa, Zea Mays
MVVNLMELYLQRMRLGRSPYPKPASMDDFAAEFPYEPTPDQCQAFIDVEKDLTERETPMDRLICGDVGFGKTEVAMRAIFIVVSAGFQAMVLAPTIILAKQHYDVMTERFANYPEMKVAIFSGAQSKEEKDELITMIKNGDLHIIVGTHALLTERMVYSNLGLLVVDEEQKFGVQQKEKIASYKSSIDVLTLSATPIPRTLYLALTGFRDASLMSTPPPERVAVKTYVSAFSKERALSAIKFELQRGGQVFYVVPRIKAIDDVLQFLKDSLPDVPIAVAHGKKLSKNIQLAMEDFTSGKVKILVCTHIIESGIDIAHANTMIIQFAELYGLAQLYQLRGRVGRSGTEGFAYLFYTDKSLLSRVATDRLGAIEEHSELGQGFHVAEKDMGIRGFGSLFGEQQSGDVANVGIDLFFDMLFDSLSKVDQFCLVPVPYKDVQLDINISPRLSSEYISYLENPVELLNEAAKAAEKDLWTLIQFTEDLRRRYGKEPRDMELLLKKLYVRRMAADLGISRIYPSGKMIFMKTNMNKKVFRLMTEAMTSETHRNSLSFAEKEIKAELLVNLPDTLLLNWLFHCLSDCYTVIPALVKY

SEQ ID NO: 168398 - protein, 500 aa, Zea Mays
MAAPPPYTPPAAVPQPLVLLHHPPALVLHVRLRPRSLRLARAPAATATAAAASVAPDDISQLNYRLRAIVRRREGAAAQGATSSSPVDPAQAEAYLRMIRDQQRLGLRQLRREEQEGEGDGDEEGPDGERARKGVAAGSSLGHRVDPRELEPGEYVVHKKVGVGKFACISAEDGADYVFIQYADGMAKLAVDQAARMLYRYNLPHEKRRPRNLSKLNDPSTWEKRRLKGKLAVQKMVVNLMELYLQRMRLGRSPYPKPASMDDFAAEFPYEPTPDQCQAFIDVEKDLTERETPMDRLICGDVGFGKTEVAMRAIFIVVSAGFQAMVLAPTIILAKQHYDVMTERFANYPEMKVAIFSGAQSKEEKDELITMIKNGDLHIIVGTHALLTERMVYSNLGLLVVDEEQKFGVQQKEKIASYKSSIDVLTLSATPIPRTLYLALTGFRDASLMSTPPPERVAVKTYVSAFSKERALSAIKFELQRGGQVFYVVPRIKVSQGLSA

SEQ ID NO: 168399 - protein, 374 aa, Zea Mays
MPGFQAMVLAPTIILAKQHYDVMTERFANYPEMKVAIFSGAQSKEEKDELITMIKNGDLHIIVGTHALLTERMVYSNLGLLVVDEEQKFGVQQKEKIASYKSSIDVLTLSATPIPRTLYLALTGFRDASLMSTPPPERVAVKTYVSAFSKERALSAIKFELQRGGQVFYVVPRIKAIDDVLQFLKDSLPDVPIAVAHGKKLSKNIQLAMEDFTSGKVKILVCTHIIESGIDIAHANTMIIQFAELYGLAQLYQLRGRVGRSGTEGFAYLFYTDKSLLSRVATDRLGAIEEHSELGQGFHVAEKDMGIRGFGSLFGEQQSGDVANVGIDLFFDMLFDSLSKVDQFCLVPVPYKDVQVNLKILLNLTCKLSDASTK

SEQ ID NO: 168400 - protein, 691 aa, Zea Mays
MAAPPPYTPPAAVPQPLVLLHHPPALVLHVRLRPRSLRLARAPAATATAAAASVAPDDISQLNYRLRAIVRRREGAAAQGATSSSPVDPAQAEAYLRMIRDQQRLGLRQLRREEQEGEGDGDEEGPDGERARKGVAAGSSLGHRVDPRELEPGEYVVHKKVGVGKFACISAEDGADYVFIQYADGMAKLAVDQAARMLYRYNLPHEKRRPRNLSKLNDPSTWEKRRLKGKLAVQKMVVNLMELYLQRMRLGRSPYPKPASMDDFAAEFPYEPTPDQCQAFIDVEKDLTERETPMDRLICGDVGFGKTEVAMRAIFIVVSAGFQAMVLAPTIILAKQHYDVMTERFANYPEMKVAIFSGAQSKEEKDELITMIKNGDLHIIVGTHALLTERMVYSNLGLLVVDEEQKFGVQQKEKIASYKSSIDVLTLSATPIPRTLYLALTGFRDASLMSTPPPERVAVKTYVSAFSKERALSAIKFELQRGGQVFYVVPRIKAIDDVLQFLKDSLPDVPIAVAHGKKLSKNIQLAMEDFTSGKVKILVCTHIIESGIDIAHANTMIIQFAELYGLAQLYQLRGRVGRSGTEGFAYLFYTDKSLLSRVATDRLGAIEEHSELGQGFHVAEKDMGIRGFGSLFGEQQSGDVANVGIDLFFDMLFDSLSKAELLVNLPDTLLLNWLFHCLSDCYTVIPALVKY

SEQ ID NO: 168401 - protein, 532 aa, Zea Mays
MDRLICGDVGFGKTEVAMRAIFIVVSAGFQAMVLAPTIILAKQHYDVMTERFANYPEMKVAIFSGAQSKEEKDELITMIKNGDLHIIVGTHALLTERMVYSNLGLLVVDEEQKFGVQQKEKIASYKSSIDVLTLSATPIPRTLYLALTGFRDASLMSTPPPERVAVKTYVSAFSKERALSAIKFELQRGGQVFYVVPRIKAIDDVLQFLKDSLPDVPIAVAHGKKLSKNIQLAMEDFTSGKVKILVCTHIIESGIDIAHANTMIIQFAELYGLAQLYQLRGRVGRSGTEGFAYLFYTDKSLLSRVATDRLGAIEEHSELGQGFHVAEKDMGIRGFGSLFGEQQSGDVANVGIDLFFDMLFDSLSKVDQFCLVPVPYKDVQLDINISPRLSSEYISYLENPVELLNEAAKAAEKDLWTLIQFTEDLRRRYGKEPRDMELLLKKLYVRRMAADLGISRIYPSGKMIFMKTNMNKKVFRLMTEAMTSETHRNSLSFAEKEIKAELLVNLPDTLLLNWLFHCLSDCYTVIPALVKY

SEQ ID NO: 168402 - protein, 183 aa, Zea Mays
MLLPMIILTGLLQLFQVDQFCLVPVPYKDVQLDINISPRLSSEYISYLENPVELLNEAAKAAEKDLWTLIQFTEDLRRRYGKEPRDMELLLKKLYVRRMAADLGISRIYPSGKMIFMKTNMNKKVFRLMTEAMTSETHRNSLSFAEKEIKAELLVNLPDTLLLNWLFHCLSDCYTVIPALVKY

SEQ ID NO: 168403 - protein, 599 aa, Zea Mays
MASARDEHLDGIRALMAAHSPPLHGLVVPSEDAHQSEYVSEQDKRREFISGFTGSAGLALITMKEALLWTDGRYFLQATQQLSDRWKLMRMGEDPPVEAWIADNLADEAVIGINPWCISVDSAQRYENSFSKRHQTLFQLSSDLVDEVWKDRPLVEPRPVIVHPVEFAGRSVPEKMKELREKLVHEKATAIIITALDEVQKYMSGNGIEIREYETVQSDASLLASGKLQSSVHVEKYMDEVESSKIWIDSGSCCLALYSKLSPHQVLTLQSPIALPKAVKNPTELDGLRKAHIRDGAAVVQYLAWLDNQMQENYGASGYFSEIKGSHKNEHLATKLTEVSVSDKLEGFRATKENFKGLSFPTISSVGPNAAVIHYKPEASTCSEMDADKIYLCDSGAQYLDGTTDITRTVHFGKPSAHEKSCYTAVLKGHIALDIAVFPNGTTGHALDILSRAPLWREGLDYRHGTGHGIGSYLNVHEGPHLISFRPSARNVPLQASMTVTDEPGYYEDGAFGIRLENVLICKDANAKFNFGDKGYLAFEHITWAPYQTKLIDTGLLTPVEIDWVNTYHSDCRKILEPHLNEQEKQWLMKATEPVAARG

SEQ ID NO: 168404 - protein, 114 aa, Zea Mays
MLMQMYSAQMGSPMGPQFTRPSQSGQTPNTNETQGSETGQGNPQNGHFSGRCLLEDRFFLLLNQVWDIGRHHHGDILHIQWALGTPPMANTATSITSDRCLNSSGEATNNNPMS

SEQ ID NO: 168405 - protein, 94 aa, Zea Mays
MSTQGHENVAAEYYKQQVEMLEGFSEMDAFTDRAFLPVMSKEEHEKVVRSESLAIWLSNIANMVLFAAKVYASVRSGSLAIIASTLDSLLDLLS

SEQ ID NO: 168406 - protein, 101 aa, Zea Mays
MSLFSHIFLLNVPFMVLLIAQGHENVAAEYYKQQVEMLEGFSEMDAFTDRAFLPVMSKEEHEKVVRSESLAIWLSNIANMVLFAAKVYASKLNWKSVCSRW

SEQ ID NO: 168407 - protein, 446 aa, Zea Mays
MCRQILYQVFAESADENANDDALEDSDAKDDHLSKEGTDVAKPMPVSNKMSSNADVVTSSKTGKDPEEEKNQTSSSDISEDMIKEAIEKRASYFRKNSDTLTLQGVRRTLEEDLKLQKKALDAYKNFITTGLDKILQEPANGTKKKSKNGSSKDTDKTSKGSKRVHEESDSSELNDRKSDMDNSDVDSRPRKKRAEKAKVTKKQKIVTNERKLSTPKAKKVAKQDLGSSTEEQGGNSAEEDNSHSSAEEDNKRKRQQTPAYGKQAEHLKSIIKSCGMTIPPTVYRRVKQAAENKREACLIKELQDILEKEGLSKNPSEKEIKAVKKRKERAKELEGIDMSNIITSSRRRSTSSFIPLPPPPQIEVDSDDDEDDDDDAEGNDAEGDDDDAEGDDEDDAEGDDDDAEGDDAEDDDEVDEENVKGRDEGDNDTAEAANGSADDAEKENN

SEQ ID NO: 168408 - protein, 169 aa, Zea Mays
MGFGRKWYNLLCLLLSTSSTKLLVNGVPGEFILHHRGLRQGGPLSPVLFLLVMEALNALITKAVQAYFLQPLAVQQAKHRISLYVDDAILFLRPNRDDLLLISQLLKAFGYASGLQTNLAKSSVCPINCTIEDLKVISELLDCEIRNLPCTYLGIPLTIRKPTKSACCL

SEQ ID NO: 168409 - protein, 513 aa, Zea Mays
MGADDEAAAAMEAQEREAEIEKAMRARVADFKKQADSLTLEGVRRALEKDLDLKIYSLDAHKKFIKQCVDKVFAESADENANDDALEDSDAKDDHLSKEGTDVAKPMPVSNKMSSNADVVTSSKTGKDPEEEKNQTSSSDISEDMIKEAIEKRASYFRKNSDTLTLQGVRRTLEEDLKLQKKALDAYKNFITTGLDKILQEPANGTKKKSKNGSSKDTDKTSKGSKRVHEESDSSELNDRKSDMDNSDVDSRPRKKRAEKAKVTKKQKIVTNERKLSTPKAKKVAKQDLGSSTEEQGGNSAEEDNSHSSAEEDNKRKRQQTPAYGKQAEHLKSIIKSCGMTIPPTVYRRVKQAAENKREACLIKELQDILEKEGLSKNPSEKEIKAVKKRKERAKELEGIDMSNIITSSRRRSTSSFIPLPPPPQIEVDSDDDEDDDDDAEGNDAEGDDDDAEGDDEDDAEGDDDDAEGDDAEDDDEVDEENVKGRDEGDNDTAEAANGSADGKKHVIPDLAF

SEQ ID NO: 168410 - protein, 494 aa, Zea Mays
MGADDEAAAAMEAQEREAEIEKAMRARVADFKKQADSLTLEGVRRALEKDLDLKIYSLDAHKKFIKQCVDKVFAESADENANDDALEDSDAKDDHLSKEGTDVAKPMPVSNKMSSNADVVTSSKTGKDPEEEKNQTSSSDISEDMIKEAIEKRASYFRKNSDTLTLQGVRRTLEEDLKLQKKALDAYKNFITTGLDKILQEPANGTKKKSKNGSSKDTDKTSKGSKRVHEESDSSELNDRKSDMDNSDVDSRPRKKRAEKAKVTKKQKIVTNERKLSTPKAKKVAKQDLGSSTEEQGGNSAEEDNSHSSAEEDNKRKRQQTPAYGKQAEHLKSIIKSCGMTIPPTVYRRVKQAAENKREACLIKELQDILEKEGLSKNPSEKEIKAVKKRKERAKELEGIDMSNIITSSRRRSTSSFIPLPPPPQIEVDSDDDEDDDDDAEGNDAEGDDDDAEGDDAEDDDEVDEENVKGRDEGDNDTAEAANGSADDAEKENN

SEQ ID NO: 168411 - protein, 391 aa, Zea Mays
MGADDEAAAAMEAQEREAEIEKAMRARVADFKKQADSLTLEGVRRALEKDLDLKIYSLDAHKKFIKQCVDKVFAESADENANDDALEDSDAKDDHLSKEGTDVAKPMPVSNKMSSNADVVTSSKTGKDPEEEKNQTSSSDISEDMIKEAIEKRASYFRKNSDTLTLQGVRRTLEEDLKLQKKALDAYKNFITTGLDKILQEPANGTKKKSKNGSSKDTDKTSKGSKRVHEESDSSELNDRKSDMDNSDVDSRPRKKRAEKAKVTKKQKIVTNERKLSTPKAKKVAKQDLGSSTEEQGGNSAEEDNSHSSAEEDNKRKRQQTPAYGKQAEHLKSIIKSCGMTIPPTVYRRVKQAAENKREACLIKELQDILEKEGLSKNPSEKGTFIMVSNF

SEQ ID NO: 168412 - protein, 386 aa, Zea Mays
MGADDEAAAAMEAQEREAEIEKAMRARVADFKKQADSLTLEGVRRALEKDLDLKIYSLDAHKKFIKQCVDKVFAESADENANDDALEDSDAKDDHLSKEGTDVAKPMPVSNKMSSNADVVTSSKTGKDPEEEKNQTSSSDISEDMIKEAIEKRASYFRKNSDTLTLQGVRRTLEEDLKLQKKALDAYKNFITTGLDKILQEPANGTKKKSKNGSSKDTDKTSKGSKRVHEESDSSELNDRKSDMDNSDVDSRPRKKRAEKAKVTKKQKIVTNERKLSTPKAKKVAKQDLGSSTEEQGGNSAEEDNSHSSAEEDNKRKRQQTPAYGKQAEHLKSIIKSCGMTIPPTVYRRVKQAAENKREACLIKELQDILEKEGLSKNPSEKELKQ

SEQ ID NO: 168413 - protein, 410 aa, Zea Mays
MPVSNKMSSNADVVTSSKTGKDPEEEKNQTSSSDISEDMIKEAIEKRASYFRKNSDTLTLQGVRRTLEEDLKLQKKALDAYKNFITTGLDKILQEPANGTKKKSKNGSSKDTDKTSKGSKRVHEESDSSELNDRKSDMDNSDVDSRPRKKRAEKAKVTKKQKIVTNERKLSTPKAKKVAKQDLGSSTEEQGGNSAEEDNSHSSAEEDNKRKRQQTPAYGKQAEHLKSIIKSCGMTIPPTVYRRVKQAAENKREACLIKELQDILEKEGLSKNPSEKEIKAVKKRKERAKELEGIDMSNIITSSRRRSTSSFIPLPPPPQIEVDSDDDEDDDDDAEGNDAEGDDDDAEGDDEDDAEGDDDDAEGDDAEDDDEVDEENVKGRDEGDNDTAEAANGSADGNLTSIAREVGTSA

SEQ ID NO: 168414 - protein, 292 aa, Zea Mays
MPVSNKMSSNADVVTSSKTGKDPEEEKNQTSSSDISEDMIKEAIEKRASYFRKNSDTLTLQGVRRTLEEDLKLQKKALDAYKNFITTGLDKILQEPANGTKKKSKNGSSKDTDKTSKGSKRVHEESDSSELNDRKSDMDNSDVDSRPRKKRAEKAKVTKKQKIVTNERKLSTPKAKKVAKQDLGSSTEEQGGNSAEEDNSHSSAEEDNKRKRQQTPAYGKQAEHLKSIIKSCGMTIPPTVYRRVKQAAENKREACLIKELQDILEKEGLSKNPSEKANATKSPPPTMSSSDL

SEQ ID NO: 168415 - protein, 446 aa, Zea Mays
MFCTVNSKVFAESADENANDDALEDSDAKDDHLSKEGTDVAKPMPVSNKMSSNADVVTSSKTGKDPEEEKNQTSSSDISEDMIKEAIEKRASYFRKNSDTLTLQGVRRTLEEDLKLQKKALDAYKNFITTGLDKILQEPANGTKKKSKNGSSKDTDKTSKGSKRVHEESDSSELNDRKSDMDNSDVDSRPRKKRAEKAKVTKKQKIVTNERKLSTPKAKKVAKQDLGSSTEEQGGNSAEEDNSHSSAEEDNKRKRQQTPAYGKQAEHLKSIIKSCGMTIPPTVYRRVKQAAENKREACLIKELQDILEKEGLSKNPSEKEIKAVKKRKERAKELEGIDMSNIITSSRRRSTSSFIPLPPPPQIEVDSDDDEDDDDDAEGNDAEGDDDDAEGDDEDDAEGDDDDAEGDDAEDDDEVDEENVKGRDEGDNDTAEAANGSADDAEKENN

SEQ ID NO: 168416 - protein, 261 aa, Zea Mays
MYFWGYSTCDLVQEYFSSRICARIKKIMQADEDVGKIALAVPVLVSRALELFLQDLIDRTYEITLQSGAKTLNSFHLKQCVKRYSSFDFLTEVVSKVPDLGGADSCGDERVLPRRRKSNGSDPENDESRSSKMAIRNANTSPRGRGRGRGRGRGRPPTKRKEVGYVQFEDESSMFAEQGETLPGEGTVPEINSGNEITPQSTQPPLTAPAQATNSKVEEASTDHQSDWPMPDATGNIGVGPSGFGHLTVQVDEDEDYDNED

SEQ ID NO: 168417 - protein, 65 aa, Zea Mays
MLKPWLLGKWSYFGHQMQEFHYYMCHLKLLCQNIMVKASVYWDLFFILQMIFLKEIDMSRYACFT

SEQ ID NO: 168418 - protein, 57 aa, Zea Mays
MVQVLLHLFQEFHYYMCHLKLLCQNIMVKASVYWDLFFILQMIFLKEIDMSRYACFT

SEQ ID NO: 168419 - protein, 90 aa, Zea Mays
MSNQIGPWLFFLSSIVFFSPSMELTTLSIFQADAIMSRLNIDDYQKEGSQPTLLITSDIVVVHEGIIREKPTTKEEARQFLKGLFPRYTR

SEQ ID NO: 168420 - protein, 82 aa, Zea Mays
MIIDQGSFALSFYTVQVYFHDIPDEVIKSLIDEGVVFRVAGGLLLEHPLTLPFVEAVVGSSDSVMGLSKEVANKLIHDALST

SEQ ID NO: 168421 - protein, 125 aa, Zea Mays
MSNQIGPWLFFLSSIVFFSPSMELTTLSIFQADAIMSRLNIDDYQKEGSQPTLLITSDIVYFHDIPDEVIKSLIDEGVVFRVAGGLLLEHPLTLPFVEAVVGSSDSVMGLSKEVANKLIHDALST

SEQ ID NO: 168422 - protein, 77 aa, Zea Mays
MCSSPPPPPGVALLNSKSRPPSVSPLLLSRVLHCYSASTQVPALLPSAPLQIKQFMSGRWKRSSQQKKNQAGHQQNR

SEQ ID NO: 168423 - protein, 83 aa, Zea Mays
MWLAIANSHHESVDAVLEVVGQLSHLPCPELDLDVRLYSSLIRLASLGKRVPIAPVTISAMVAQSELLPTSTTSCKVASDKIL

SEQ ID NO: 168424 - protein, 226 aa, Zea Mays
MEGYQVRCRWKVPAPQQRMEGPHARTLAGRSLIELIMEGHHTRMEDADGRSVAKSDLPPRPRDAAAHRARDSAPITSGSQVWGGREGGGASEPRHSAAAPTAEARCPDLRSPRARRLPRPAKGDSRARRSRQQANNPADGGSIKEGRAPSSTTRFFPDAEAAGQLRPRGDGAHGRQRCGSRAPLGQEAPQNEPDREGTRGGHLAGGPQRQRGGAAWAEHGVRPCAA

SEQ ID NO: 168425 - protein, 94 aa, Zea Mays
MHCAYWRLLLQFSKAIRLEMLPHVMMQLWKRVLLVPELHKQTFVNADDLLNGHPVTTAPQGSRDTRQAHPLASEKISDRAEDAINKSSLKISTT

SEQ ID NO: 168426 - protein, 285 aa, Zea Mays
MDQRRQQAAEKKANSARTPVARRSMPVKSGSADAAAPNDAIPAVQEPHENTDKPLKQMQPGKTEDDVRSTTSSTNTPRAAARKSAAVAAGFSFRLEERAEKRKEFFQKLEEKIHAKELEKTNLQEKSKESQEAEIKLLRKSLTFKATPMPSFYKEQPPKVELKKIPPTRARSPKLGRHKPANSATAASADGSVSCESPRSTANSSKASATTKAEARPVVTRPKISNSKPKASRAKVARAQETPAEAPPSEPAAPEDFTVEHGVGDATGPDLTAQLVASNEVPVHG

SEQ ID NO: 168427 - protein, 449 aa, Zea Mays
MEDAVAAENGIEGEGYVVVKAAAAAEAEGDSGASDRGDLAAPAEDAAPAGSEDAPAPAVTPDETAAPAKAPAKKGGSGDAAGVRKARPQNGRVPAAAAAAPRVKKPGVLSQSASFPARGAAAKKASAVATPKQAKGVVTNGSEAAAGRAAEKKANSARTPVARRSMPVKSGSADAAAPNDAIPAVQEPHENTDKPLKQMQPGKTEDDVRSTTSSTNTPRAAARKSAAVAAGFSFRLEERAEKRKEFFQKLEEKIHAKELEKTNLQEKSKESQEAEIKLLRKSLTFKATPMPSFYKEQPPKIPPTRARSPKLGRHKPANSATAASADGSVSCESPRSTANSSKVNEAMENNKPHAPARKPVQRPVVKAPSQASATTKAEARPVVTRPKISNSKPKASRAKVARAQETPAEAPPSEPAAPEDFTVEHGVGDATGPDLTAQLVASNEVPVHG

SEQ ID NO: 168428 - protein, 618 aa, Zea Mays
MQWTEKYRPKVPNDIVGNQSMVKQLHDWLKSWDALFLHSGQKGKGKKQTDSAAKKAVLLSGPPGIGKTTTAKVVSQMLGLQAIEVNASDSRGKADSKIEKGVGGSTSNSIKELINNATLNYSDNRLKHPKAVLVMDEVDGMSAGDRGGVADLIASIKISKIPIICICNDRYSQKLKNLVNYCLMLNFRKPTKQQMGKRLMEIAKKEGIQAQENAMEELAERVHGDIRMALNHLQYMSLSQSVVKYDDIKERLNSSSKDEDISPFTAVDKLFGFNGGRLRMDERMDFGMSDPDLVPLIIQENYINYRPNTIGKDESGVKRMNALARAAESIADGDLVNVQIRRYRQWQLSQAACFASSIVPAALMHGNREILEAGERNFNRFGGWLGKYSTTNKNRRLLEDVHSHILASQQANLDRDALRLDYLTLILRELTDPLKKMSKDEAVQKVVEFMDTYSLSQEDFDTIVEVSKFKGHPSPMDGIQPAVKSALTKAYKQGSSSRVVRAADLINIPGMKKPLKKRVAAILEPVEESLPEENGLASAEDDEDGSSDAENNDELVPADSTPKLDLQSDKKKGIQVQLDLKSNGDGPRGKKAPAARSRATGSGGKAAAGGGSAGKRKR

SEQ ID NO: 168429 - protein, 435 aa, Zea Mays
MKLMVCLLEIEMGKRLMEIAKKEGIQAQENAMEELAERVHGDIRMALNHLQYMSLSQSVVKYDDIKERLNSSSKDEDISPFTAVDKLFGFNGGRLRMDERMDFGMSDPDLVPLIIQENYINYRPNTIGKDESGVKRMNALARAAESIADGDLVNVQIRRYRQWQLSQAACFASSIVPAALMHGNREILEAGERNFNRFGGWLGKYSTTNKNRRLLEDVHSHILASQQANLDRDALRLDYLTLILRELTDPLKKMSKDEAVQKVVEFMDTYSLSQEDFDTIVEVSKFKGHPSPMDGIQPAVKSALTKAYKQGSSSRVVRAADLINIPGMKKPLKKRVAAILEPVEESLPEENGLASAEDDEDGSSDAENNDELVPADSTPKLDLQSDKKKGIQVQLDLKSNGDGPRGKKAPAARSRATGSGGKAAAGGGSAGKRKR

SEQ ID NO: 168430 - protein, 397 aa, Zea Mays
MKLMVCLLEIEMGKRLMEIAKKEGIQAQENAMEELAERVHGDIRMALNHLQYMSLSQSVVKYDDIKERLNSSSKDEDISPFTAVDKLFGFNGGRLRMDERMDFGMSDPDLVPLIIQENYINYRPNTIGKDESGVKRMNALARAAESIADGDLVNVQIRRYRQWQLSQAACFASSIVPAALMHGNREILEAGERNFNRFGGWLGKYSTTNKNRRLLEDVHSHILASQQANLDRDALRLDYLTLILRELTDPLKKMSKDEAVQKVVEFMDTYSLSQEDFDTIVEVSKFKGHPSPMDGIQPAVKSALTKAYKQGSSSRVVRAADLINIPGMKKPLKKRVAAILEPVEESLPEENGLASAEDDEDGSSDAENNGACSPFPRNKHKKSGRCLFVWLMCQALG

SEQ ID NO: 168431 - protein, 544 aa, Zea Mays
MHYSFILAKRVNASDSRGKADSKIEKGVGGSTSNSIKELINNATLNYSDNRLKHPKAVLVMDEVDGMSAGDRGGVADLIASIKISKIPIICICNDRYSQKLKNLVNYCLMLNFRKPTKQQMGKRLMEIAKKEGIQAQENAMEELAERVHGDIRMALNHLQYMSLSQSVVKYDDIKERLNSSSKDEDISPFTAVDKLFGFNGGRLRMDERMDFGMSDPDLVPLIIQENYINYRPNTIGKDESGVKRMNALARAAESIADGDLVNVQIRRYRQWQLSQAACFASSIVPAALMHGNREILEAGERNFNRFGGWLGKYSTTNKNRRLLEDVHSHILASQQANLDRDALRLDYLTLILRELTDPLKKMSKDEAVQKVVEFMDTYSLSQEDFDTIVEVSKFKGHPSPMDGIQPAVKSALTKAYKQGSSSRVVRAADLINIPGMKKPLKKRVAAILEPVEESLPEENGLASAEDDEDGSSDAENNDELVPADSTPKLDLQSDKKKGIQVQLDLKSNGDGPRGKKAPAARSRATGSGGKAAAGGGSAGKRKR

SEQ ID NO: 168432 - protein, 580 aa, Zea Mays
MQWTEKYRPKVPNDIVGNQSMVKQLHDWLKSWDALFLHSGQKGKGKKQTDSAAKKAVLLSGPPGIGKTTTAKVVSQMLGLQAIEVNASDSRGKADSKIEKGVGGSTSNSIKELINNATLNYSDNRLKHPKAVLVMDEVDGMSAGDRGGVADLIASIKISKIPIICICNDRYSQKLKNLVNYCLMLNFRKPTKQQMGKRLMEIAKKEGIQAQENAMEELAERVHGDIRMALNHLQYMSLSQSVVKYDDIKERLNSSSKDEDISPFTAVDKLFGFNGGRLRMDERMDFGMSDPDLVPLIIQENYINYRPNTIGKDESGVKRMNALARAAESIADGDLVNVQIRRYRQWQLSQAACFASSIVPAALMHGNREILEAGERNFNRFGGWLGKYSTTNKNRRLLEDVHSHILASQQANLDRDALRLDYLTLILRELTDPLKKMSKDEAVQKVVEFMDTYSLSQEDFDTIVEVSKFKGHPSPMDGIQPAVKSALTKAYKQGSSSRVVRAADLINIPGMKKPLKKRVAAILEPVEESLPEENGLASAEDDEDGSSDAENNGACSPFPRNKHKKSGRCLFVWLMCQALG

SEQ ID NO: 168433 - protein, 394 aa, Zea Mays
MQWTEKYRPKVPNDIVGNQSMVKQLHDWLKSWDALFLHSGQKGKGKKQTDSAAKKAVLLSGPPGIGKTTTAKVVSQMLGLQAIEVNASDSRGKADSKIEKGVGGSTSNSIKELINNATLNYSDNRLKHPKAVLVMDEVDGMSAGDRGGVADLIASIKISKIPIICICNDRYSQKLKNLVNYCLMLNFRKPTKQQMGKRLMEIAKKEGIQAQENAMEELAERVHGDIRMALNHLQYMSLSQSVVKYDDIKERLNSSSKDEDISPFTAVDKLFGFNGGRLRMDERMDFGMSDPDLVPLIIQENYINYRPNTIGKDESGVKRMNALARAAESIADGDLVNVQIRRYRQWQLSQAACFASSIVPAALMHGNREILEAVMFKHLTDTIFNILLQLIGLN

SEQ ID NO: 168434 - protein, 783 aa, Zea Mays
MSSDIRKWFMKPQDKSAAASGAAGKPSGSAAEKKPVLSIPEKKSAPPALASCDHDTSARRKTSKYFGSKAEKDSDVQMADASGGKSAAKRKLQKCNDEVKEDSKPFPAKKMFDDEEDDDFVAPAKKKTPVKPPPSKKLKVESNVEAPAKTTGVDDAEDEDRMDEDAKTPSKGAGRGRGRGGRGGAGAAPGGRGRGGGRGFMNFGERKDPPHKGEKEVPEGAPDCLSGLTFVISGTLDSLEREEATDLIKRYGGRVTGSISKKTSYLLADEDIGGVKSNKAKDLGVPFLTEDGLFDLIRKSKPAKAPVDKRQNNNSSEKLQKSQTKSSPAKVEKRAEASAVGKSIASNSNAASASADKQKPKIVDRGSMQWTEKYRPKVPNDIVGNQSMVKQLHDWLKSWDALFLHSGQKGKGKKQTDSAAKKAVLLSGPPGIGKTTTAKVVSQMLGLQAIEVNASDSRGKADSKIEKGVGGSTSNSIKELINNATLNYSDNRLKHPKAVLVMDEVDGMSAGDRGGVADLIASIKISKIPIICICNDRYSQKLKNLVNYCLMLNFRKPTKQQMGKRLMEIAKKEGIQAQENAMEELAERVHGDIRMALNHLQYMSLSQSVVKYDDIKERLNSSSKDEDISPFTAVDKLFGFNGGRLRMDERMDFGMSDPDLVPLIIQENYINYRPNTIGKDESGVKRMNALARAAESIADGDLVNVQIRRYRQWQLSQAACFASSIVPAALMHGNREILEAGERNFNRFGGWLGKYSTTNKNRRLLEDVHSHILASQQANLDSS

SEQ ID NO: 168435 - protein, 937 aa, Zea Mays
MASCDHDTSARRKTSKYFGSKAEKDSDVQMADASGGKSAAKRKLQKCNDEVKEDSKPFPAKKMFDDEEDDDFVAPAKKKTPVKPPPSKKLKVESNVEAPAKTTGVDDAEDEDRMDEDAKTPSKGAGRGRGRGGRGGAGAAPGGRGRGGGRGFMNFGERKDPPHKGEKEVPEGAPDCLSGLTFVISGTLDSLEREEATDLIKRYGGRVTGSISKKTSYLLADEDIGGVKSNKAKDLGVPFLTEDGLFDLIRKSKPAKAPVDKRQNNNSSEKLQKSQTKSSPAKVEKRAEASAVGKSIASNSNAASASADKQKPKIVDRGSMQWTEKYRPKVPNDIVGNQSMVKQLHDWLKSWDALFLHSGQKGKGKKQTDSAAKKAVLLSGPPGIGKTTTAKVVSQMLGLQAIEVNASDSRGKADSKIEKGVGGSTSNSIKELINNATLNYSDNRLKHPKAVLVMDEVDGMSAGDRGGVADLIASIKISKIPIICICNDRYSQKLKNLVNYCLMLNFRKPTKQQMGKRLMEIAKKEGIQAQENAMEELAERVHGDIRMALNHLQYMSLSQSVVKYDDIKERLNSSSKDEDISPFTAVDKLFGFNGGRLRMDERMDFGMSDPDLVPLIIQENYINYRPNTIGKDESGVKRMNALARAAESIADGDLVNVQIRRYRQWQLSQAACFASSIVPAALMHGNREILEAGERNFNRFGGWLGKYSTTNKNRRLLEDVHSHILASQQANLDRDALRLDYLTLILRELTDPLKKMSKDEAVQKVVEFMDTYSLSQEDFDTIVEVSKFKGHPSPMDGIQPAVKSALTKAYKQGSSSRVVRAADLINIPGMKKPLKKRVAAILEPVEESLPEENGLASAEDDEDGSSDAENNDELVPADSTPKLDLQSDKKKGIQVQLDLKSNGDGPRGKKAPAARSRATGSGGKAAAGGGSAGKRKR

SEQ ID NO: 168436 - protein, 999 aa, Zea Mays
MSSDIRKWFMKPQDKSAAASGAAGKPSGSAAEKKPVLSIPEKKSAPPALASCDHDTSARRKTSKYFGSKAEKDSDVQMADASGGKSAAKRKLQKCNDEVKEDSKPFPAKKMFDDEEDDDFVAPAKKKTPVKPPPSKKLKVESNVEAPAKTTGVDDAEDEDRMDEDAKTPSKGAGRGRGRGGRGGAGAAPGGRGRGGGRGFMNFGERKDPPHKGEKEVPEGAPDCLSGLTFVISGTLDSLEREEATDLIKRYGGRVTGSISKKTSYLLADEDIGGVKSNKAKDLGVPFLTEDGLFDLIRKSKPAKAPVDKRQNNNSSEKLQKSQTKSSPAKVEKRAEASAVGKSIASNSNAASASADKQKPKIVDRGSMQWTEKYRPKVPNDIVGNQSMVKQLHDWLKSWDALFLHSGQKGKGKKQTDSAAKKAVLLSGPPGIGKTTTAKVVSQMLGLQAIEVNASDSRGKADSKIEKGVGGSTSNSIKELINNATLNYSDNRLKHPKAVLVMDEVDGMSAGDRGGVADLIASIKISKIPIICICNDRYSQKLKNLVNYCLMLNFRKPTKQQMGKRLMEIAKKEGIQAQENAMEELAERVHGDIRMALNHLQYMSLSQSVVKYDDIKERLNSSSKDEDISPFTAVDKLFGFNGGRLRMDERMDFGMSDPDLVPLIIQENYINYRPNTIGKDESGVKRMNALARAAESIADGDLVNVQIRRYRQWQLSQAACFASSIVPAALMHGNREILEAGERNFNRFGGWLGKYSTTNKNRRLLEDVHSHILASQQANLDRDALRLDYLTLILRELTDPLKKMSKDEAVQKVVEFMDTYSLSQEDFDTIVEVSKFKGHPSPMDGIQPAVKSALTKAYKQGSSSRVVRAADLINIPGMKKPLKKRVAAILEPVEESLPEENGLASAEDDEDGSSDAENNGACSPFPRNKHKKSDELVPADSTPKLDLQSDKKKGIQVQLDLKSNGDGPRGKKAPAARSRATGSGGKAAAGGGSAGKRKR

SEQ ID NO: 168437 - protein, 53 aa, Zea Mays
MRTKLGNLDFYADRSLYIGWDFYADRRGTGLPHDLGKRKPRKNSTKKWFPKEP

SEQ ID NO: 168438 - protein, 383 aa, Zea Mays
MLDDLQFTKFVGAEVSRGTPLSFSAIFPEASGMLNSSLLFATECWGYRSQVHKRSGATLLHRCRVNALQTPMINASMVLCDRHFGGINYPVGGVGGIAISLADGLVEKGSEIRYKANVTNVILENGKAVGVRLSNGKEFFAKTVISNATRWDTFGKLVKEELPEEEKNFQKNYVKAPSFLSIHMGVKASVLPAGTDCHHFILEDNWNNLEKPYGSIFLSIPTVLDPSLAPEGHHILHIFTTAGIEDWEGLSRKEYEEKKEVVANEIIRRLEKKLFPGLQDSIVLKEVGSPKTHRRFLARNDGTYGPMPRGKPKGLLAMPFNTTSIDGLYCVGDSCFPGQGVIAVAFSGIMCAHRVAADIGLEQKSPVLDAGLLGLLRWLRTLA

SEQ ID NO: 168439 - protein, 443 aa, Zea Mays
MFGFSDKGNLNLITQALEAVGRKMRVLPDPSTVHFHLPGDLSVLVHRKYEDFINELVSKFPHEKEGILKFYDTCWTIFNSLNSLELKSLEEPLYLFRQFFQKPRECLTLAYYLPQNAGDIARKFIKDQELLSFIDAEVLCDRHFGGINYPVGGVGGIAISLADGLVEKGSEIRYKANVTNVILENGKAVGVRLSNGKEFFAKTVISNATRWDTFGKLVKEELPEEEKNFQKNYVKAPSFLSIHMGVKASVLPAGTDCHHFILEDNWNNLEKPYGSIFLSIPTVLDPSLAPEGHHILHIFTTAGIEDWEGLSRKEYEEKKEVVANEIIRRLEKKLFPGLQDSIVLKEVGSPKTHRRFLARNDGTYGPMPRGKPKGLLAMPFNTTSIDGLYCVGDSCFPGQGVIAVAFSGIMCAHRVAADIGLEQKSPVLDAGLLGLLRWLRTLA

SEQ ID NO: 168440 - protein, 192 aa, Zea Mays
MPSPMGQKAGRHHTVRGREDGKTMASHHHTSGGRKNGRKIPVLDQLLMMPVQQAKAIAPLSRKEWAHLIINRNGGVVGLVMTIYHRRSTNPMDGVHQLLPRGLTRITSTCLVVVTTSLPSPHEGTTMVPRHPVLGNTGSRRQYSPPATPMSGSKEASRMHVSVFVACLAIDNSYLLGLNSSCWFMPLDRCLV

SEQ ID NO: 168441 - protein, 330 aa, Zea Mays
MGLMPLHLTRIPRYFDPGETLLETCFNCSEEGHVAANCPMGKRKKPCFVCGLFGHNAKQCKQGQDCFICKKGGHMAKDCPDKHKRNDHQSTLCIRCGETGHDMFGCANDYPPDDIEQIRCYACNQKGHLCCSDFFDNSLEQGCAKQRREASAVTTPTLCFKCGEEGHFARGCTKNAKSDGPKGWSSPHSQRKGRWKNDGKSPSHIRRKEKWKKDSSARSAPHDACTTSKSNSPSFEERMGASNHKSKWRGGWTGDDDLPSKKYKPNGWGSPATPKRSYTNHQYLSGGGDYFTPQSSRRHNHGTASPGARKHRFSSSIFAASNTHVRFKRS

SEQ ID NO: 168442 - protein, 305 aa, Zea Mays
MGKRKKPCFVCGLFGHNAKQCKQGQDCFICKKGGHMAKDCPDKHKRNDHQSTLCIRCGETGHDMFGCANDYPPDDIEQIRCYACNQKGHLCCSDFFDNSLEQVSCYNCAQSGHSGLGCAKQRREASAVTTPTLCFKCGEEGHFARGCTKNAKSDGPKGWSSPHSQRKGRWKNDGKSPSHIRRKEKWKKDSSARSAPHDACTTSKSNSPSFEERMGASNHKSKWRGGWTGDDDLPSKKYKPNGWGSPATPKRSYTNHQYLSGGGDYFTPQSSRRHNHGTASPGARKHRFSSSIFAASNTHVRFKRS

SEQ ID NO: 168443 - protein, 270 aa, Zea Mays
MVGFGSMAGYGIQSMLKEGHRHLSGLEEAVLKNIDACRELSAITRTSLGPNGMNKMVINHLDKLFVTNDAATIVNELEVQHPAAKILVLAGRAQQEEIGDGANLTISFAGELLEKAEELIRMGLHPSEIIIGYTKAINKTIEILEDLVEKGSENMDVRNKEDVVLRMRSAVASKQFGQEDIMCPLVADACIQVCPKNPANFNVDNVRVAKLLGGGLHNSSVVRGMVLKNDAVGSIKRVEKAKVSQNATLHSHCTPVKVLYLSFLLILMFF

SEQ ID NO: 168444 - protein, 155 aa, Zea Mays
MILKELLMMASIRTRDSRIIPGAAATEIELAKRLKEFSLKETGLDQYAVAKFAESFEMVPRTLAENAGLSAMDVISSLYAEHASGNVKVGIDLEEGACKDITTLKIWDLYVTKFFALKYSADAACTVLRVDQIIMAKPAGGPRRDAQPGGGMDED

SEQ ID NO: 168445 - protein, 63 aa, Zea Mays
MYVQPRDLGSAFKAQETANKWYDTTLSFQRVLVSCIFYITPRNYSRDSLLNRIIHTTISILSY

SEQ ID NO: 168446 - protein, 317 aa, Zea Mays
MRKLFFSESACKETKLHSAPHSWLPLERGKLSKFSGHAAAGSSILNCPEAAMRSLQLAREHAASDHERLVYEGWILYDTGHCEEGLQKAEASIAIQRSFEAFFLKAYALADSSLDPSTSATVVSLLEDALRCPSDRLRKGQALNNLGSVYVDCGKLDLAAECYINALKIGHTRAHQGLARVHFLRNNRAGAYDEMTKLIEKARNNASAYEKRSEYCDRELTKTDLQMVTKLDPLRVYPYRYRAAVLMDNHKEKEAIAELTKAIAFKADLNLLHLRAAFHEHVGDVSSALQDCRAALSVDPNHQEMLELHHRVNSQEP

SEQ ID NO: 168447 - protein, 682 aa, Zea Mays
MRKLFFSESACKETKLHSAPHSWLPLERGKLSKFSGHAAAGSSIESLMKMPEPAVLPHFKPADYVDVLAQIHEELESCPPDDKSSLYLLQYQVFRGLGEAKLSRRSLQSAWEKGSTIHEKLIFGAWLKYEKKGEEAISDLLSSCSKCLQEFRLLDFVLQVSTGSHVINYDGDDDEFRGSAVVHFRIRDDMVACDRRKLAALSTPLYAMLNGGFRESYLEVIDMSRNGISPIGMRAISKFSLSGRLPYLSADAILEILDFANKFCCKGLKDACERKLASFVSSRQDAIDFMECALELGCSILAASCLQVLLNELPECLNDEQVVRIFSSANKAQRLTMVGNASFSLYCLLSEVSMSTNPTSDVTVSFLEKLVESASDSRQNQLALHQLACTKFLRKDYPESERLFNAAFSAGHLYSIVGLARLASLRGNKHFALKLLDSVMSSRWPLGWMYQERALYLDGDNKLENLNKATELDPTLTYPYMFRAASLMKRQSVEAALMEINRILGFKLVLECLELRFCCYLALEDYRAALCDVQAILTLAPDYRMIGGRVAAKQLRMLVLENVEQWTAADCWMQLYDRWSSVDDIGSLSVIYQMLESDTAKGVLYFRQSLLLLRLNCPEAAMRSLQLAREHAASDHERLVYEGWILYDTGHCEEGLQKAEASIAIQSNSCITSRRCIAVSLR

SEQ ID NO: 168448 - protein, 722 aa, Zea Mays
MRKLFFSESACKETKLHSAPHSWLPLERGKLSKFSGHAAAGSSIESLMKMPEPAVLPHFKPADYVDVLAQIHEELESCPPDDKSSLYLLQYQVFRGLGEAKLSRRSLQSAWEKGSTIHEKLIFGAWLKYEKKGEEAISDLLSSCSKCLQEFRLLDFVLQVSTGSHVINYDGDDDEFRGSAVVHFRIRDDMVACDRRKLAALSTPLYAMLNGGFRESYLEVIDMSRNGISPIGMRAISKFSLSGRLPYLSADAILEILDFANKFCCKGLKDACERKLASFVSSRQDAIDFMECALELGCSILAASCLQVLLNELPECLNDEQVVRIFSSANKAQRLTMVGNASFSLYCLLSEVSMSTNPTSDVTVSFLEKLVESASDSRQNQLALHQLACTKFLRKDYPESERLFNAAFSAGHLYSIVGLARLASLRGNKHFALKLLDSVMSSRWPLGWMYQERALYLDGDNKLENLNKATELDPTLTYPYMFRAASLMKRQSVEAALMEINRILGFKLVLECLELRFCCYLALEDYRAALCDVQAILTLAPDYRMIGGRVAAKQLRMLVLENVEQWTAADCWMQLYDRWSSVDDIGSLSVIYQMLESDTAKGVLYFRQSLLLLRLNCPEAAMRSLQLAREHAASDHERLVYEGWILYDTGHCEEGLQKAEASIAIQRSFEAFFLKAYALADSSLDPSTSATVVSLLEDALRCPSDRLRKGQVSFFFSLCIMS

SEQ ID NO: 168449 - protein, 721 aa, Zea Mays
MRIKEVDVGVVAIFDGHNGAEASEMASKLFLDYFLLHVYFLLDGIHSLRFRKSTGKLTYREVTIFNNVFNLYKHGQSDHAERSCWASPAILDRSFHTEILKESLMRAVHDIDLTFSKEALQNNFESGSTATVVLIADGQIISANVGDSKAFLCSEGYNLHHRNRKRRRKRNSINHEEFALANYDGPLYHARELTKDHHPNREDERNRVEAAGGYVLEWAGVYRVNGELALSRAIGDVPYKRYGVISTPELTGWQILSENDSFLIASSDGIFEKMTMQDVCDLMLHAKIRVKHDFGSSAITQRNLADYVVHVALQKGTTDNVAAVVVPLGSPGSTGTTLKDSSQFEEDLKISISPMLNVPYGLKPDHGHSSAVIDMEYFKRSSIKFQRFLVEAKPKKLGCFYLSESLDEDMDYIFRVPEAYQREEVHDFNHIPAETALYSDGNLEKYKDKHFCLYLGPEDGEMGQCNGPEAFANFFGLLDSLPHNGSKPNGSHSFGNTIDFRYKLKRRFDRGSYGEVWLAFHWNCSEDTDVHKEPPHFTNISQSEMYNCTSSGRMSSDEDHGSGTVNGDLFILKRIMVERGNAAYLSGLREKYFGELFSNASRTLEGLSRIESSTISVDMLYDPDIHLEKNLSATEEPLKHVARFIESFESESREIWLVYHNEGHSLSKLIYTAEETKLVTGNNNERVRHIQVLHPSKWWHWLRTTKAGLKQMQNLLWQLRT

SEQ ID NO: 168450 - protein, 370 aa, Zea Mays
MRIKEVDVGVVAIFDGHNGAEASEMASKLFLDYFLLHVYFLLDGIHSLRFRKSTGKLTYREVTIFNNVFNLYKHGQSDHAERSCWASPAILDRSFHTEILKESLMRAVHDIDLTFSKEALQNNFESGSTATVVLIADGQIISANVGDSKAFLCSEGYNLHHRNRKRRRKRNSINHEEFALANYDGPLYHARELTKDHHPNREDERNRVEAAGGYVLEWAGVYRVNGELALSRAIGDVPYKRYGVISTPELTGWQILSENDSFLIASSDGIFEKMTMQDVCDLMLHAKIRVKHDFGSSAITQRNLADYVVHVALQKGTTDNVAAVVVPLGSPGSTGTTLKDSSQFEEDLKISISPMLNVPYGLKPGSLADH

SEQ ID NO: 168451 - protein, 607 aa, Zea Mays
MQEALQNNFESGSTATVVLIADGQIISANVGDSKAFLCSEGYNLHHRNRKRRRKRNSINHEEFALANYDGPLYHARELTKDHHPNREDERNRVEAAGGYVLEWAGVYRVNGELALSRAIGDVPYKRYGVISTPELTGWQILSENDSFLIASSDGIFEKMTMQDVCDLMLHAKIRVKHDFGSSAITQRNLADYVVHVALQKGTTDNVAAVVVPLGSPGSTGTTLKDSSQFEEDLKISISPMLNVPYGLKPDHGHSSAVIDMEYFKRSSIKFQRFLVEAKPKKLGCFYLSESLDEDMDYIFRVPEAYQREEVHDFNHIPAETALYSDGNLEKYKDKHFCLYLGPEDGEMGQCNGPEAFANFFGLLDSLPHNGSKPNGSHSFGNTIDFRYKLKRRFDRGSYGEVWLAFHWNCSEDTDVHKEPPHFTNISQSEMYNCTSSGRMSSDEDHGSGTVNGDLFILKRIMVERGNAAYLSGLREKYFGELFSNASRTLEGLSRIESSTISVDMLYDPDIHLEKNLSATEEPLKHVARFIESFESESREIWLVYHNEGHSLSKLIYTAEETKLVTGNNNERVRHIQVLHPSKWWHWLRTTKAGLKQMQNLLWQLASD

SEQ ID NO: 168452 - protein, 719 aa, Zea Mays
MRIKEVDVGVVAIFDGHNGAEASEMASKLFLDYFLLHVYFLLDGIHSLRFRKSTGKLTYREVTIFNNVFNLYKHGQSDHAERSCWASPAILDRSFHTEILKESLMRAVHDIDLTFSKEALQNNFESGSTATVVLIADGQIISANVGDSKAFLCSEGYNLHHRNRKRRRKRNSINHEEFALANYDGPLYHARELTKDHHPNREDERNRVEAAGGYVLEWAGVYRVNGELALSRAIGDVPYKRYGVISTPELTGWQILSENDSFLIASSDGIFEKMTMQDVCDLMLHAKIRVKHDFGSSAITQRNLADYVVHVALQKGTTDNVAAVVVPLGSPGSTGTTLKDSSQFEEDLKISISPMLNVPYGLKPDHGHSSAVIDMEYFKRSSIKFQRFLVEAKPKKLGCFYLSESLDEDMDYIFRVPEAYQREEVHDFNHIPAETALYSDGNLEKYKDKHFCLYLGPEDGEMGQCNGPEAFANFFGLLDSLPHNGSKPNGSHSFGNTIDFRYKLKRRFDRGSYGEVWLAFHWNCSEDTDVHKEPPHFTNISQSEMYNCTSSGRMSSDEDHGSGTVNGDLFILKRIMVERGNAAYLSGLREKYFGELFSNASRTLEGLSRIESSTISVDMLYDPDIHLEKNLSATEEPLKHVARFIESFESESREIWLVYHNEGHSLSKLIYTAEETKLVTGNNNERVRHIQVLHPSKWWHWLRTTKAGLKQMQNLLWQL

SEQ ID NO: 168453 - protein, 709 aa, Zea Mays
MGCHVAADRGRRRSQEDRAVCALGIRIPFVENMRIKEVDVGVVAIFDGHNGAEASEMASKLFLDYFLLHVYFLLDGIHSLRFRKSTGKLTYREVTIFNNVFNLYKHGQSDHAERSCWASPAILDRSFHTEILKESLMRAVHDIDLTFSKEGKRRRKRNSINHEEFALANYDGPLYHARELTKDHHPNREDERNRVEAAGGYVLEWAGVYRVNGELALSRAIGDVPYKRYGVISTPELTGWQILSENDSFLIASSDGIFEKMTMQDVCDLMLHAKIRVKHDFGSSAITQRNLADYVVHVALQKGTTDNVAAVVVPLGSPGSTGTTLKDSSQFEEDLKISISPMLNVPYGLKPDHGHSSAVIDMEYFKRSSIKFQRFLVEAKPKKLGCFYLSESLDEDMDYIFRVPEAYQREEVHDFNHIPAETALYSDGNLEKYKDKHFCLYLGPEDGEMGQCNGPEAFANFFGLLDSLPHNGSKPNGSHSFGNTIDFRYKLKRRFDRGSYGEVWLAFHWNCSEDTDVHKEPPHFTNISQSEMYNCTSSGRMSSDEDHGSGTVNGDLFILKRIMVERGNAAYLSGLREKYFGELFSNASRTLEGLSRIESSTISVDMLYDPDIHLEKNLSATEEPLKHVARFIESFESESREIWLVYHNEGHSLSKLIYTAEETKLVTGNNNERVRHIQVLHPSKWWHWLRTTKAGLKQMQNLLWQLASD

SEQ ID NO: 168454 - protein, 824 aa, Zea Mays
MRIKEVDVGVVAIFDGHNGAEASEMASKLFLDYFLLHVYFLLDGIHSLRFRKSTGKLTYREVTIFNNVFNLYKHGQSDHAERSCWASPAILDRSFHTEILKESLMRAVHDIDLTFSKEALQNNFESGSTATVVLIADGQIISANVGDSKAFLCSEGYNLHHRNRKRRRKRNSINHEEFALANYDGPLYHARELTKDHHPNREDERNRVEAAGGYVLEWAGVYRVNGELALSRAIGDVPYKRYGVISTPELTGWQILSENDSFLIASSDGIFEKMTMQDVCDLMLHAKIRVKHDFGSSAITQRNLADYVVHVALQKGTTDNVAAVVVPLGSPGSTGTTLKDSSQFEEDLKISISPMLNVPYGLKPDHGHSSAVIDMEYFKRSSIKFQRFLVEAKPKKLGCFYLSESLDEDMDYIFRVPEAYQREEVHDFNHIPAETALYSDGNLEKYKDKHFCLYLGPEDGEMGQCNGPEAFANFFGLLDSLPHNGSKPNGSHSFGNTIDFRYKLKRRFDRGSYGEVWLAFHWNCSEDTDVHKEPPHFTNISQSEMYNCTSSGRMSSDEDHGSGTVNGDLFILKRIMVERGNAAYLSGLREKYFGELFSNASRTLEGLSRIESSTISVDMLYDPDIHLEKNLSATEEPLKHVARFIESFESESREIWLVYHNEGHSLSKLIYTAEETKLVTGNNNERVRHIQVLHPSKWWHWLRTTKAGLKQMQNLLWQLLMGLKACHDRNITHRDIKPENMIICFEDMETGKCLREVPSEAKQNKLNMRLIDFGSAIDDYTLKNLYGPGPTRSEQTFEYTPPEALLNSNWFQGSRSARLKYDIW

SEQ ID NO: 168455 - protein, 708 aa, Zea Mays
MGCHVAADRGRRRSQEDRAVCALGIRIPFVENMRIKEVDVGVVAIFDGHNGAEASEMASKLFLDYFLLHVYFLLDGIHSLRFRKSTGKLTYREVTIFNNVFNLYKHGQSDHAERSCWASPAILDRSFHTEILKESLMRAVHDIDLTFSKEGKRRRKRNSINHEEFALANYDGPLYHARELTKDHHPNREDERNRVEAAGGYVLEWAGVYRVNGELALSRAIGDVPYKRYGVISTPELTGWQILSENDSFLIASSDGIFEKMTMQDVCDLMLHAKIRVKHDFGSSAITQRNLADYVVHVALQKGTTDNVAAVVVPLGSPGSTGTTLKDSSQFEEDLKISISPMLNVPYGLKPDHGHSSAVIDMEYFKRSSIKFQRFLVEAKPKKLGCFYLSESLDEDMDYIFRVPEAYQREEVHDFNHIPAETALYSDGNLEKYKDKHFCLYLGPEDGEMGQCNGPEAFANFFGLLDSLPHNGSKPNGSHSFGNTIDFRYKLKRRFDRGSYGEVWLAFHWNCSEDTDVHKEPPHFTNISQSEMYNCTSSGRMSSDEDHGSGTVNGDLFILKRIMVERGNAAYLSGLREKYFGELFSNASRTLEGLSRIESSTISVDMLYDPDIHLEKNLSATEEPLKHVARFIESFESESREIWLVYHNEGHSLSKLIYTAEETKLVTGNNNERVRHIQVLHPSKWWHWLRTTKAGLKQMQNLLWQLRT

SEQ ID NO: 168456 - protein, 786 aa, Zea Mays
MGCHVAADRGRRRSQEDRAVCALGIRIPFVENMRIKEVDVGVVAIFDGHNGAEASEMASKLFLDYFLLHVYFLLDGIHSLRFRKSTGKLTYREVTIFNNVFNLYKHGQSDHAERSCWASPAILDRSFHTEILKESLMRAVHDIDLTFSKEALQNNFESGSTATVVLIADGQIISANVGDSKAFLCSEGYNLHHRNRKRRRKRNSINHEEFALANYDGPLYHARELTKDHHPNREDERNRVEAAGGYVLEWAGVYRVNGELALSRAIGDVPYKRYGVISTPELTGWQILSENDSFLIASSDGIFEKMTMQDVCDLMLHAKIRVKHDFGSSAITQRNLADYVVHVALQKGTTDNVAAVVVPLGSPGSTGTTLKDSSQFEEDLKISISPMLNVPYGLKPDHGHSSAVIDMEYFKRSSIKFQRFLVEAKPKKLGCFYLSESLDEDMDYIFRVPEAYQREEVHDFNHIPAETALYSDGNLEKYKDKHFCLYLGPEDGEMGQCNGPEAFANFFGLLDSLPHNGSKPNGSHSFGNTIDFRYKLKRRFDRGSYGEVWLAFHWNCSEDTDVHKEPPHFTNISQSEMYNCTSSGRMSSDEDHGSGTVNGDLFILKRIMVERGNAAYLSGLREKYFGELFSNASRTLEGLSRIESSTISVDMLYDPDIHLEKNLSATEEPLKHVARFIESFESESREIWLVYHNEGHSLSKLIYTAEETKLVTGNNNERVRHIQVLHPSKWWHWLRTTKAGLKQMQNLLWQLLMGLKACHDRNITHRDIKPGRNDVTAYFFLVFYTS

SEQ ID NO: 168457 - protein, 753 aa, Zea Mays
MGCHVAADRGRRRSQEDRAVCALGIRIPFVENMRIKEVDVGVVAIFDGHNGAEASEMASKLFLDYFLLHVYFLLDGIHSLRFRKSTGKLTYREVTIFNNVFNLYKHGQSDHAERSCWASPAILDRSFHTEILKESLMRAVHDIDLTFSKEALQNNFESGSTATVVLIADGQIISANVGDSKAFLCSEGYNLHHRNRKRRRKRNSINHEEFALANYDGPLYHARELTKDHHPNREDERNRVEAAGGYVLEWAGVYRVNGELALSRAIGDVPYKRYGVISTPELTGWQILSENDSFLIASSDGIFEKMTMQDVCDLMLHAKIRVKHDFGSSAITQRNLADYVVHVALQKGTTDNVAAVVVPLGSPGSTGTTLKDSSQFEEDLKISISPMLNVPYGLKPDHGHSSAVIDMEYFKRSSIKFQRFLVEAKPKKLGCFYLSESLDEDMDYIFRVPEAYQREEVHDFNHIPAETALYSDGNLEKYKDKHFCLYLGPEDGEMGQCNGPEAFANFFGLLDSLPHNGSKPNGSHSFGNTIDFRYKLKRRFDRGSYGEVWLAFHWNCSEDTDVHKEPPHFTNISQSEMYNCTSSGRMSSDEDHGSGTVNGDLFILKRIMVERGNAAYLSGLREKYFGELFSNASRTLEGLSRIESSTISVDMLYDPDIHLEKNLSATEEPLKHVARFIESFESESREIWLVYHNEGHSLSKLIYTAEETKLVTGNNNERVRHIQVLHPSKWWHWLRTTKAGLKQMQNLLWQLRT

SEQ ID NO: 168458 - protein, 709 aa, Zea Mays
MRIKEVDVGVVAIFDGHNGAEASEMASKLFLDYFLLHVYFLLDGIHSLRFRKSTGKLTYREVTIFNNVFNLYKHGQSDHAERSCWASPAILDRSFHTEILKESLMRAVHDIDLTFSKEGKRRRKRNSINHEEFALANYDGPLYHARELTKDHHPNREDERNRVEAAGGYVLEWAGVYRVNGELALSRAIGDVPYKRYGVISTPELTGWQILSENDSFLIASSDGIFEKMTMQDVCDLMLHAKIRVKHDFGSSAITQRNLADYVVHVALQKGTTDNVAAVVVPLGSPGSTGTTLKDSSQFEEDLKISISPMLNVPYGLKPDHGHSSAVIDMEYFKRSSIKFQRFLVEAKPKKLGCFYLSESLDEDMDYIFRVPEAYQREEVHDFNHIPAETALYSDGNLEKYKDKHFCLYLGPEDGEMGQCNGPEAFANFFGLLDSLPHNGSKPNGSHSFGNTIDFRYKLKRRFDRGSYGEVWLAFHWNCSEDTDVHKEPPHFTNISQSEMYNCTSSGRMSSDEDHGSGTVNGDLFILKRIMVERGNAAYLSGLREKYFGELFSNASRTLEGLSRIESSTISVDMLYDPDIHLEKNLSATEEPLKHVARFIESFESESREIWLVYHNEGHSLSKLIYTAEETKLVTGNNNERVRHIQVLHPSKWWHWLRTTKAGLKQMQNLLWQLLMGLKACHDRNITHRDIKPGRNDVTAYFFLVFYTS

SEQ ID NO: 168459 - protein, 688 aa, Zea Mays
MRIKEVDVGVVAIFDGHNGAEASEMASKLFLDYFLLHVYFLLDGIHSLRFRKSTGKLTYREVTIFNNVFNLYKHGQSDHAERSCWASPAILDRSFHTEILKESLMRAVHDIDLTFSKEAFLCSEGYNLHHRNRKRRRKRNSINHEEFALANYDGPLYHARELTKDHHPNREDERNRVEAAGGYVLEWAGVYRVNGELALSRAIGDVPYKRYGVISTPELTGWQILSENDSFLIASSDGIFEKMTMQDVCDLMLHAKIRVKHDFGSSAITQRNLADYVVHVALQKGTTDNVAAVVVPLGSPGSTGTTLKDSSQFEEDLKISISPMLNVPYGLKPDHGHSSAVIDMEYFKRSSIKFQRFLVEAKPKKLGCFYLSESLDEDMDYIFRVPEAYQREEVHDFNHIPAETALYSDGNLEKYKDKHFCLYLGPEDGEMGQCNGPEAFANFFGLLDSLPHNGSKPNGSHSFGNTIDFRYKLKRRFDRGSYGEVWLAFHWNCSEDTDVHKEPPHFTNISQSEMYNCTSSGRMSSDEDHGSGTVNGDLFILKRIMVERGNAAYLSGLREKYFGELFSNASRTLEGLSRIESSTISVDMLYDPDIHLEKNLSATEEPLKHVARFIESFESESREIWLVYHNEGHSLSKLIYTAEETKLVTGNNNERVRHIQVLHPSKWWHWLRTTKAGLKQMQNLLWQL

SEQ ID NO: 168460 - protein, 709 aa, Zea Mays
MQEALQNNFESGSTATVVLIADGQIISANVGDSKAFLCSEGYNLHHRNRKRRRKRNSINHEEFALANYDGPLYHARELTKDHHPNREDERNRVEAAGGYVLEWAGVYRVNGELALSRAIGDVPYKRYGVISTPELTGWQILSENDSFLIASSDGIFEKMTMQDVCDLMLHAKIRVKHDFGSSAITQRNLADYVVHVALQKGTTDNVAAVVVPLGSPGSTGTTLKDSSQFEEDLKISISPMLNVPYGLKPDHGHSSAVIDMEYFKRSSIKFQRFLVEAKPKKLGCFYLSESLDEDMDYIFRVPEAYQREEVHDFNHIPAETALYSDGNLEKYKDKHFCLYLGPEDGEMGQCNGPEAFANFFGLLDSLPHNGSKPNGSHSFGNTIDFRYKLKRRFDRGSYGEVWLAFHWNCSEDTDVHKEPPHFTNISQSEMYNCTSSGRMSSDEDHGSGTVNGDLFILKRIMVERGNAAYLSGLREKYFGELFSNASRTLEGLSRIESSTISVDMLYDPDIHLEKNLSATEEPLKHVARFIESFESESREIWLVYHNEGHSLSKLIYTAEETKLVTGNNNERVRHIQVLHPSKWWHWLRTTKAGLKQMQNLLWQLLMGLKACHDRNITHRDIKPENMIICFEDMETGKCLREVPSEAKQNKLNMRLIDFGSAIDDYTLKNLYGPGPTRSEQTFEYTPPEALLNSNWFQGSRSARLKYDIW

SEQ ID NO: 168461 - protein, 742 aa, Zea Mays
MRIKEVDVGVVAIFDGHNGAEASEMASKLFLDYFLLHVYFLLDGIHSLRFRKSTGKLTYREVTIFNNVFNLYKHGQSDHAERSCWASPAILDRSFHTEILKESLMRAVHDIDLTFSKEALQNNFESGSTATVVLIADGQIISANVGDSKAFLCSEGYNLHHRNRKRRRKRNSINHEEFALANYDGPLYHARELTKDHHPNREDERNRVEAAGGYVLEWAGVYRVNGELALSRAIGDVPYKRYGVISTPELTGWQILSENDSFLIASSDGIFEKMTMQDVCDLMLHAKIRVKHDFGSSAITQRNLADYVVHVALQKGTTDNVAAVVVPLGSPGSTGTTLKDSSQFEEDLKISISPMLNVPYGLKPDHGHSSAVIDMEYFKRSSIKFQRFLVEAKPKKLGCFYLSESLDEDMDYIFRVPEAYQREEVHDFNHIPAETALYSDGNLEKYKDKHFCLYLGPEDGEMGQCNGPEAFANFFGLLDSLPHNGSKPNGSHSFGNTIDFRYKLKRRFDRGSYGEVWLAFHWNCSEDTDVHKEPPHFTNISQSEMYNCTSSGRMSSDEDHGSGTVNGDLFILKRIMVERGNAAYLSGLREKYFGELFSNASRTLEGLSRIESSTISVDMLYDPDIHLEKNLSATEEPLKHVARFIESFESESREIWLVYHNEGHSLSKLIYTAEETKLVTGNNNERVRHIQVLHPSKWWHWLRTTKAGLKQMQNLLWQLSSFWAFPYIRITSTKLMGLKACH

SEQ ID NO: 168462 - protein, 466 aa, Zea Mays
MTMQDVCDLMLHAKIRVKHDFGSSAITQRNLADYVVHVALQKGTTDNVAAVVVPLGSPGSTGTTLKDSSQFEEDLKISISPMLNVPYGLKPDHGHSSAVIDMEYFKRSSIKFQRFLSLDEDMDYIFRVPEAYQREEVHDFNHIPAETALYSDGNLEKYKDKHFCLYLGPEDGEMGQCNGPEAFANFFGLLDSLPHNGSKPNGSHSFGNTIDFRYKLKRRFDRGSYGEVWLAFHWNCSEDTDVHKEPPHFTNISQSEMYNCTSSGRMSSDEDHGSGTVNGDLFILKRIMVERGNAAYLSGLREKYFGELFSNASRTLEGLSRIESSTISVDMLYDPDIHLEKNLSATEEPLKHVARFIESFESESREIWLVYHNEGHSLSKLIYTAEETKLVTGNNNERVRHIQVLHPSKWWHWLRTTKAGLKQMQNLLWQLLMGLKACHDRNITHRDIKPGRNDVTAYFFLVFYTS

SEQ ID NO: 168463 - protein, 64 aa, Zea Mays
MRTNRPLNGGRQALTASCHSCPLACAGMIFYPETTDCSFIHQLIPDLWHQYFSVVNRPVHELNH

SEQ ID NO: 168464 - protein, 92 aa, Zea Mays
MGFCRGSCTFRHSWCFPEICQSRIMKKKEAILGRKKYSSYFNYTSHGPTSQGKNTVVKAAKYSRENREGGIITLICICMQQSALLAGSMCIC

SEQ ID NO: 168465 - protein, 88 aa, Zea Mays
MEVAAATCTLLAAVALPASSSSAAARSATKQSYARRKTTPHQVPPPATATATTYRDNWFDKLAIGYLSRNLQEASGTNVDEQEAWSVE

SEQ ID NO: 168466 - protein, 54 aa, Zea Mays
MELTVLYYHCSDFEDMSCEMIFGQQPPEDDPALKQPCFRTKCIAKQNHQVNCSI

SEQ ID NO: 168467 - protein, 324 aa, Zea Mays
MAKIADSMMKHILVPAISNIHVSVLVECGPEHTVSVLSVVHSEENKDNRDGSNLYSRIVDVIKFVCKFICMENSKWVQFFAKLTWPRISDLVITHFLSKAVPNEASKLIEFQDVVQSTTEFENKLRSMMFLLPDRKDGKLTQFVDDVEVHFAVRKRSEILVKARNILVQYDYDSPLESGDQGDSVVDLLFQPEKCFTSKSALLVMKLVHGALKDASLSSARVAKEFCFAARDVLLLYRAIVPVQYRADFPSDLQKQVVFVDLAPIFSQMADAILRRQIQLTVDTISEAIDGAEGFQNTHQPQHYESAKFSIEQVCSTVKEYELF

SEQ ID NO: 168468 - protein, 527 aa, Zea Mays
MAADDVRELLLSTTADASDPSTPLSAPDLRLLIDRLRFCSDRLNASALSFAASNRGVLANALLRAASAADSSASLESSLDSALAPLASWPDLSDLRALADRLLAARRELAERQEHLAAASMIASLSSRLREARAAASPLDAAAAIAELKTLLIDLERSGSGQDDPVVFRLLRSDWEQLVDELQVRLSKNVEECVDFAPEGGKVVVSATPKGHSDGSHGVELPVALQALEIIDALDYGMAKIADSMMKHILVPAISNIHVSVLVECGPEHTVSVLSVVHSEENKDNRDGSNLYSRIVDVIKFVCKFICMENSKWVQFFAKLTWPRISDLVITHFLSKAVPNEASKLIEFQDVVQSTTEFENKLRSMMFLLPDRKDGKLTQFVDDVEVHFAVRKRSEILVKARNILVQYDYDSPLESGDQGDSVVDLLFQPEKCFTSKSALLVMKLVHGALKDASLSSARVAKEFCFAARDVLLLYRAIVPVQYRADFPSDLQKQVVFVDLAPIFSQMADAILRRQIQLTVDTISYRWC

SEQ ID NO: 168469 - protein, 245 aa, Zea Mays
MAKIADSMMKHILVPAISNIHVSVLVECGPEHTVSVLSVVHSEENKDNRDGSNLYSRIVDVIKFVCKFICMENSKWVQFFAKLTWPRISDLVITHFLSKAVPNEASKLIEFQDVVQSTTEFENKLRSMMFLLPDRKDGKLTQFVDDVEVHFAVRKRSEILVKARNILVQYDYDSPLESGDQGDSVVDLLFQPEKCFTSKSALLVMKLVHGALKLEKQFDSLSQVAAIVHNDFYHLSQEILGLAFQ

SEQ ID NO: 168470 - protein, 210 aa, Zea Mays
MAADDVRELLLSTTADASDPSTPLSAPDLRLLIDRLRFCSDRLNASALSFAASNRGVLANALLRAASAADSSASLESSLDSALAPLASWPDLSDLRALADRLLAARRELAERQEHLAAASMIASLSSRLREARAAASPLDAAAAIAELKTLLIDLERSGSGQDDPVVFRLLRSDWEQLVDEVMMKFRFRMIQLMSGFAFVLMLIVVGLWL

SEQ ID NO: 168471 - protein, 527 aa, Zea Mays
MAADDVRELLLSTTADASDPSTPLSAPDLRLLIDRLRFCSDRLNASALSFAASNRGVLANALLRAASAADSSASLESSLDSALAPLASWPDLSDLRALADRLLAARRELAERQEHLAAASMIASLSSRLREARAAASPLDAAAAIAELKTLLIDLERSGSGQDDPVVFRLLRSDWEQLVDELQVRLSKNVEECVDFAPEGGKVVVSATPKGHSDGSHGVELPVALQALEIIDALDYGMAKIADSMMKHILVPAISNIHVSVLVECGPEHTVSVLSVVHSEENKDNRDGSNLYSRIVDVIKFVCKFICMENSKWVQFFAKLTWPRISDLVITHFLSKAVPNEASKLIEFQDVVQSTTEFENKLRSMMFLLPDRKDGKLTQFVDDVEVHFAVRKRSEILVKARNILVQYDYDSPLESGDQGDSVVDLLFQPEKCFTSKSALLVMKLVHGALKDASLSSARVAKEFCFAARDVLLLYRAIVPVQLEKQFDSLSQVAAIVHNDFYHLSQEILGLAFQIFLVIYRNRLFLWI

SEQ ID NO: 168472 - protein, 561 aa, Zea Mays
MAADDVRELLLSTTADASDPSTPLSAPDLRLLIDRLRFCSDRLNASALSFAASNRGVLANALLRAASAADSSASLESSLDSALAPLASWPDLSDLRALADRLLAARRELAERQEHLAAASMIASLSSRLREARAAASPLDAAAAIAELKTLLIDLERSGSGQDDPVVFRLLRSDWEQLVDELQVRLSKNVEECVDFAPEGGKVVVSATPKGHSDGSHGVELPVALQALEIIDALDYGMAKIADSMMKHILVPAISNIHVSVLVECGPEHTVSVLSVVHSEENKDNRDGSNLYSRIVDVIKFVCKFICMENSKWVQFFAKLTWPRISDLVITHFLSKAVPNEASKLIEFQDVVQSTTEFENKLRSMMFLLPDRKDGKLTQFVDDVEVHFAVRKRSEILVKARNILVQYDYDSPLESGDQGDSVVDLLFQPEKCFTSKSALLVMKLVHGALKDASLSSARVAKEFCFAARDVLLLYRAIVPVQYRADFPSDLQKQVVFVDLAPIFSQMADAILRRQIQLTVDTISEAIDGAEGFQNTHQPQHYESAKFSIEQVCSTVKEYELF

SEQ ID NO: 168473 - protein, 569 aa, Zea Mays
MAADDVRELLLSTTADASDPSTPLSAPDLRLLIDRLRFCSDRLNASALSFAASNRGVLANALLRAASAADSSASLESSLDSALAPLASWPDLSDLRALADRLLAARRELAERQEHLAAASMIASLSSRLREARAAASPLDAAAAIAELKTLLIDLERSGSGQDDPVVFRLLRSDWEQLVDELQVRLSKNVEECVDFAPEGGKVVVSATPKGHSDGSHGVELPVALQALEIIDALDYGMAKIADSMMKHILVPAISNIHVSVLVECGPEHTVSVLSVVHSEENKDNRDGSNLYSRIVDVIKFVCKFICMENSKWVQFFAKLTWPRISDLVITHFLSKAVPNEASKLIEFQDVVQSTTEFENKLRSMMFLLPDRKDGKLTQFVDDVEVHFAVRKRSEILVKARNILVQYDYDSPLESGDQGDSVVDLLFQPEKCFTSKSALLVMKLVHGALKDASLSSARVAKEFCFAARDVLLLYRAIVPVQLEKQFDSLSQVAAIVHNDFYHLSQEILGLAFQVCMPNLLLLVIIIDHEFCLCMLVCSCLKMQICHMYKLFILYLPCIKLCCIVILYSI

SEQ ID NO: 168474 - protein, 293 aa, Zea Mays
MAKIADSMMKHILVPAISNIHVSVLVECGPEHTVSVLSVVHSEENKDNRDGSNLYSRIVDVIKFVCKFICMENSKWVQFFAKLTWPRISDLVITHFLSKAVPNEASKLIEFQDVVQSTTEFENKLRSMMFLLPDRKDGKLTQFVDDVEVHFAVRKRSEILVKARNILVQYDYDSPLESGDQGDSVVDLLFQPEKCFTSKSALLVMKLVHGALKYRADFPSDLQKQVVFVDLAPIFSQMADAILRRQIQLTVDTISEAIDGAEGFQNTHQPQHYESAKFSIEQVCSTVKEYELF

SEQ ID NO: 168475 - protein, 332 aa, Zea Mays
MAKIADSMMKHILVPAISNIHVSVLVECGPEHTVSVLSVVHSEENKDNRDGSNLYSRIVDVIKFVCKFICMENSKWVQFFAKLTWPRISDLVITHFLSKAVPNEASKLIEFQDVVQSTTEFENKLRSMMFLLPDRKDGKLTQFVDDVEVHFAVRKRSEILVKARNILVQYDYDSPLESGDQGDSVVDLLFQPEKCFTSKSALLVMKLVHGALKDASLSSARVAKEFCFAARDVLLLYRAIVPVQLEKQFDSLSQVAAIVHNDFYHLSQEILGLAFQVCMPNLLLLVIIIDHEFCLCMLVCSCLKMQICHMYKLFILYLPCIKLCCIVILYSI

SEQ ID NO: 168476 - protein, 259 aa, Zea Mays
MAKIADSMMKHILVPAISNIHVSVLVECGPEHTVSVLSVVHSEENKDNRDGSNLYSRIVDVIKFVCKFICMENSKWVQFFAKLTWPRISDLVITHFLSKAVPNEASKLIEFQDVVQSTTEFENKLRSMMFLLPDRKDGKLTQFVDDVEVHFAVRKRSEILVKARNILVQYDYDSPLESGDQGDSVVDLLFQPEKCFTSKSALLVMKLVHGALKYRADFPSDLQKQVVFVDLAPIFSQMADAILRRQIQLTVDTISYRWC

SEQ ID NO: 168477 - protein, 64 aa, Zea Mays
MEKLKLTLSQLSFNLIHYLAGKGTAGQSIKHFSWTSAFLYDNFYVCPDWMDAGFSTLSRSPSHI

SEQ ID NO: 168478 - protein, 78 aa, Zea Mays
MQRKNNKKIRPDYCSTKGGKISTVANPMMHQGLDLNPTAGNDFLIGPMWTVTSPSAASTPVMSTQANSTRTQTPSSPV

SEQ ID NO: 168479 - protein, 140 aa, Zea Mays
MGFACQGDCRGIGRLQVLQVTGQAHKHLFLSFWLPSSWVCTAPALDLDVHCLYSTWICSAVRISSAALFPSSSAVSFPVFPLLVLCYIDADRKCSSSLFLQLIAQWYIILHSEFQYVGAVVRRGFPGQNLVGSIANSAFC

SEQ ID NO: 168480 - protein, 256 aa, Zea Mays
MLNKQEGFAFSHCTTCKAPYYLRVHSHTDRKWRTLKFRFFVTRDILFIFALVQTVISALAYLVHFLDGYQQYWLRTAWGFDNQVSFYYICGALLFFALLGLSGCFITCYDRRVRNDLAQPCRELCLCCCQPGMCADCHLPGTLCMWTDCTTCFEGCATTAGECGGCLGGAGEAGLPLLLIMGVIVLGLFTVIGIFYSVLVATMVGQRIWQRHYHILAKRMLTKEYVVEDVDGERTDWCPPPLPAEHISQLRSLGLL

SEQ ID NO: 168481 - protein, 246 aa, Zea Mays
MKRSSTVFSRKKRLDRDPPWHLAHSNLIHSPLLSSSHTRICSLVSPVASAFSQTRLLPTPSALSLLCSSLTPVPSPGCTHHPPPFSSWTPPATNLLLVALVACGLPSFWAVAVCTRFLGRQSATCRPSGSTALDLGACCLSTAAPLWNTDVYLYTTTRCVQIAIYLARYACGLTAPPASKVVLPQLASVVVAWEVLGKLGYLCFSSWGLLCLGFSRSSAYSTVSWSRQWLASGSGSGIITFLQNEC

SEQ ID NO: 168482 - protein, 151 aa, Zea Mays
MDPDAVKSTLSNLAFGNVIAAAARDLQKEMVAKDKAQAAPASHDEVDLDELMDDPELEKLHAERIAALKKEVEKREVLKRQGHGEYREVIEGDFLGEVTGSERVICHFYHREFYRCKIMDKHLKALAPVYVGTKFIKLDAEPNWQSKPCHV

SEQ ID NO: 168483 - protein, 51 aa, Zea Mays
MKANHCVNIVFRERGAENWEVAISCQGQTNGNWKYATSYVPKKLQFMLRRQ

SEQ ID NO: 168484 - protein, 72 aa, Zea Mays
MVSVLSTKDVEGWAPIHSMACSDNSQIIDIHLERSVFGSSGFDAAPADHPLVSGNETGLVFCTSYMLELQRL

SEQ ID NO: 168485 - protein, 98 aa, Zea Mays
MEYSQVVGNSSIYSIESNIWDLLVSAPPLQLLISFLGPCCCGIMCDIGCKVMCDLLGVVARHSPQLVIFSFGAQVLRLRHDWTWHFGDIRIAHAASVV

SEQ ID NO: 168486 - protein, 68 aa, Zea Mays
MPFPFHRVHLSMRLRLAKLVLCAWCGCSTPTVSLCCVLSAALLRLAKLVLDADLSAPCDALVLFAGHV

SEQ ID NO: 168487 - protein, 431 aa, Zea Mays
MAAIGGNTAGPGDAVPSQPPLWPRGFIQQHPLDCNMMRNINFSNASYGPTTMWAPIQTGNISSESTMLPATQSAVYWNHYMNFVRNPLGSVQGNPFPDSFSGTNTSTPLQGSNTIPSIPVNLESAAEHSVQDINSPIKTSAPVTKPKKTKEQNYTAAEDLLLCTTWLQISSDPIVHTGQRKKGLWARIEKRYNEQRGEYPCRMNRALSSRWDKIRADVGKFSGCYARVLREKQSGLTDDDKTSKAATLFAHEENKPFHFMHCWHKLKGEPKWESICQGPFRGLHGKAIGSSGGPFIGVEESDSGSAGLTGKRPLCRDSSKSERKKAASSTTTEYLSRLQELTEKLIQRIIEKGEKKYKYNEQDMELEKKRLDLEAKKLSIRKRELRLKELSMAEQQLEMLERTREDEVDPEVWSMMKERKKHLQQFIFSFC

SEQ ID NO: 168488 - protein, 288 aa, Zea Mays
MAATSPFSSYPPRLHSKTLKPRHSRPLHHKAAPAASAPRPLLLSFPAPARHCGAGLRASAAQKNSADYKFDEDDDDDEEEEYEYDGEEEEWEEEDDEDAMNVEAMEEEARGAAADLAKRLARELHIDDDVREKRRNIRDKTSVSKHIPDNLLPKVAIIGRPNVGKSALFNRLVGGNRAIVVDEPGVTRDRLYGRSYWGDHEFMVIDTGGVITLSKSQAGVMEELAVTTTVGMDGIPLATREAAIARMPSMIEKQAVAAVDEASVILFVVDGQAGLGNYLSFLLMEVLV

SEQ ID NO: 168489 - protein, 510 aa, Zea Mays
MAATSPFSSYPPRLHSKTLKPRHSRPLHHKAAPAASAPRPLLLSFPAPARHCGAGLRASAAQKNSADYKFDEDDDDDEEEEYEYDGEEEEWEEEDDEDAMNVEAMEEEARGAAADLAKRLARELHIDDDVREKRRNIRDKTSVSKHIPDNLLPKVAIIGRPNVGKSALFNRLVGGNRAIVVDEPGVTRDRLYGRSYWGDHEFMVIDTGGVITLSKSQAGVMEELAVTTTVGMDGIPLATREAAIARMPSMIEKQAVAAVDEASVILFVVDGQAGLVAADIEISDWLRRNYSDKCILLAVNKCESPRKGQMQALDFWSLGFSPLPISAITGTGTGDLLDLVCSELRKFEVLDAVEEEKNKVPAIAIVGRPNVGKSSILNALVGEDRTIVSPVSGTTRDAIDTEFTTADGEKYKLIDTAGIRRRTAVISAGSTTESLSVKRAFRAIRRSDVVALVIEAMACVTEQDYKIAERIEKEGKACVIVVNKWDTIPNKNHESTTHYEQDDNFCCCFG

SEQ ID NO: 168490 - protein, 279 aa, Zea Mays
MAATSPFSSYPPRLHSKTLKPRHSRPLHHKAAPAASAPRPLLLSFPAPARHCGAGLRASAAQKNSADYKFDEDDDDDEEEEYEYDGEEEEWEEEDDEDAMNVEAMEEEARGAAADLAKRLARELHIDDDVREKRRNIRDKTSVSKHIPDNLLPKVAIIGRPNVGKSALFNRLVGGNRAIVVDEPGVTRDRLYGRSYWGDHEFMVIDTGGVITLSKSQAGVMEELAVTTTVGMDGIPLATREAAIARMPSMIEKQAVAAVDEASVILFVVDGQAGWSCGS

SEQ ID NO: 168491 - protein, 471 aa, Zea Mays
MAATSPFSSYPPRLHSKTLKPRHSRPLHHKAAPAASAPRPLLLSFPAPARHCGAGLRASAAQKNSADYKFDEDDDDDEEEEYEYDGEEEEWEEEDDEDAMNVEAMEEEARGAAADLAKRLARELHIDDDVREKRRNIRDKTSVSKHIPDNLLPKVAIIGRPNVGKSALFNRLVGGNRAIVVDEPGVTRDRLYGRSYWGDHEFMVIDTGGVITLSKSQAGVMEELAVTTTVGMDGIPLATREAAIARMPSMIEKQAVAAVDEASVILFVVDGQAGLVAADIEISDWLRRNYSDKCILLAVNKCESPRKGQMQALDFWSLGFSPLPISAITGTGTGDLLDLVCSELRKFEVLDAVEEEKNKVPAIAIVGRPNKYKLIDTAGIRRRTAVISAGSTTESLSVKRAFRAIRRSDVVALVIEAMACVTEQDYKIAERIEKEGKACVIVVNKWDTIPNKNHESTTHYEQDDNFCCCFG

SEQ ID NO: 168492 - protein, 451 aa, Zea Mays
MVIDTGGVITLSKSQAGVMEELAVTTTVGMDGIPLATREAAIARMPSMIEKQAVAAVDEASVILFVVDGQAGLVAADIEISDWLRRNYSDKCILLAVNKCESPRKGQMQALDFWSLGFSPLPISAITGTGTGDLLDLVCSELRKFEVLDAVEEEKNKVPAIAIVGRPNVGKSSILNALVGEDRTIVSPVSGTTRDAIDTEFTTADGEKYKLIDTAGIRRRTAVISAGSTTESLSVKRAFRAIRRSDVVALVIEAMACVTEQDYKIAERIEKEGKACVIVVNKWDTIPNKNHESTTHYEQDVREKLRILDWAPIVYCSATNGTSVEKIISAAALVEKERSRRLSTSILNQVIREAIAFKSPPRTRGGKRGRVYYTTQAAVGPPTFVLFVNDAKLFPDTYRRYMEKKLRSDAGFPGTPIRLLWRSRRRPDKRGKSADSRAQSPGTPSEVALAA

SEQ ID NO: 168493 - protein, 287 aa, Zea Mays
MLWLEKIELLSAQLVGQHVMPLILSLLQQMGRNRTIICSNMLQKYKLIDTAGIRRRTAVISAGSTTESLSVKRAFRAIRRSDVVALVIEAMACVTEQDYKIAERIEKEGKACVIVVNKWDTIPNKNHESTTHYEQDVREKLRILDWAPIVYCSATNGTSVEKIISAAALVEKERSRRLSTSILNQVIREAIAFKSPPRTRGGKRGRVYYTTQAAVGPPTFVLFVNDAKLFPDTYRRYMEKKLRSDAGFPGTPIRLLWRSRRRPDKRGKSADSRAQSPGTPSEVALAA

SEQ ID NO: 168494 - protein, 308 aa, Zea Mays
MVIDTGGVITLSKSQAGVMEELAVTTTVGMDGIPLATREAAIARMPSMIEKQAVAAVDEASVILFVVDGQAGLVAADIEISDWLRRNYSDKCILLAVNKCESPRKGQMQALDFWSLGFSPLPISAITGTGTGDLLDLVCSELRKFEVLDAVEEEKNKVPAIAIVGRPNVGKSSILNALVGEDRTIVSPVSGTTRDAIDTEFTTADGEKYKLIDTAGIRRRTAVISAGSTTESLSVKRAFRAIRRSDVVALVIEAMACVTEQDYKIAERIEKEGKACVIVVNKWDTIPNKNHESTTHYEQDDNFCCCFG

SEQ ID NO: 168495 - protein, 344 aa, Zea Mays
MQALDFWSLGFSPLPISAITGTGTGDLLDLVCSELRKFEVLDAVEEEKNKVPAIAIVGRPNVGKSSILNALVGEDRTIVSPVSGTTRDAIDTEFTTADGEKYKLIDTAGIRRRTAVISAGSTTESLSVKRAFRAIRRSDVVALVIEAMACVTEQDYKIAERIEKEGKACVIVVNKWDTIPNKNHESTTHYEQDVREKLRILDWAPIVYCSATNGTSVEKIISAAALVEKERSRRLSTSILNQVIREAIAFKSPPRTRGGKRGRVYYTTQAAVGPPTFVLFVNDAKLFPDTYRRYMEKKLRSDAGFPGTPIRLLWRSRRRPDKRGKSADSRAQSPGTPSEVALAA

SEQ ID NO: 168496 - protein, 540 aa, Zea Mays
MPATASGGARPEEVSPAPSASASASSCMGTRAEELTARLAAAGPSPGAGAGGEEVEHERVRALREIKNQIIGNRTKKLLYLRLGAVPAVVAALADPGASPAALVQAAAAAGSFACGVEDCARAVLAAGAVGYLTRLLAHPDEKDKQIKTKLIMVLLELIEEPGHIGDEAPLALTTMIKDSFELQKQALATNAVEKLSNHLLAKPLETRQAVAILLALSELCSKLEESRSQMMSDEVSTLLLDALKHDWADIRVAACSCLKNISRSPKVLSGGRLSCDTVIGPLVQLLNDSCTSVQVAALGAICNIAINLTPRKSVLLNSGVVSHLVHLSKSMDPILRLKSVWALRNIMFLLSPKDKDFIVKELTLSTLSSLICDSEHFVQEQTLALVRNLVDGYVDSANFVIGEDGIIMNAIARQLNNASAPGVFVQGMYVLANIAAGNELNKEAVMNVLLPHRADRIKPLFAVNFLQSKDKQLRVATLWCLLNLIYPKCEASSGRAVRLQNAGVIQQVKNMINDHCLDCKLRARMVLQHCVNNADDCFM

SEQ ID NO: 168497 - protein, 535 aa, Zea Mays
MIYQSRLAPKFDVNRGKNMNFVLSLLDSENENVTELAAAIISHSCKSSAEQLALCSAGVPQKLVSLFGGSVNLRDACLGSVTVVVQNNQDVASRFVTTVHGKCFRSVVGLIHDRNPSTRLLACRCLIALGHASPGHFQDKQIKTKLIMVLLELIEEPGHIGDEAPLALTTMIKDSFELQKQALATNAVEKLSNHLLAKPLETRQAVAILLALSELCSKLEESRSQMMSDEVSTLLLDALKHDWADIRVAACSCLKNISRSPKVLSGGRLSCDTVIGPLVQLLNDSCTSVQVAALGAICNIAINLTPRKSVLLNSGVVSHLVHLSKSMDPILRLKSVWALRNIMFLLSPKDKDFIVKELTLSTLSSLICDSEHFVQEQTLALVRNLVDGYVDSANFVIGEDGIIMNAIARQLNNASAPGVFVQGMYVLANIAAGNELNKEAVMNVLLPHRADRIKPLFAVNFLQSKDKQLRVATLWCLLNLIYPKCEASSGRAVRLQNAGVIQQVKNMINDHCLDCKLRARMVLQHCVNNADDCFM

SEQ ID NO: 168498 - protein, 564 aa, Zea Mays
MRLKSGAGLVPRDLLPSGRVVDASARALRMIYQSRLAPKFDVNRGKNMNFVLSLLDSENENVTELAAAIISHSCKSSAEQLALCSAGVPQKLVSLFGGSVNLRDACLGSVTVVVQNNQDVASRFVTTVHGKCFRSVVGLIHDRNPSTRLLACRCLIALGHASPGHFQDKQIKTKLIMVLLELIEEPGHIGDEAPLALTTMIKDSFELQKQALATNAVEKLSNHLLAKPLETRQAVAILLALSELCSKLEESRSQMMSDEVSTLLLDALKHDWADIRVAACSCLKNISRSPKVLSGGRLSCDTVIGPLVQLLNDSCTSVQVAALGAICNIAINLTPRKSVLLNSGVVSHLVHLSKSMDPILRLKSVWALRNIMFLLSPKDKDFIVKELTLSTLSSLICDSEHFVQEQTLALVRNLVDGYVDSANFVIGEDGIIMNAIARQLNNASAPGVFVQGMYVLANIAAGNELNKEAVMNVLLPHRADRIKPLFAVNFLQSKDKQLRVATLWCLLNLIYPKCEASSGRAVRLQNAGVIQQVKNMINDHCLDCKLRARMVLQHCVNNADDCFM

SEQ ID NO: 168499 - protein, 209 aa, Zea Mays
MDPILRLKSVWALRNIMFLLSPKDKDFIVKELTLSTLSSLICDSEHFVQEQTLALVRNLVDGYVDSANFVIGEDGIIMNAIARQLNNASAPGVFVQGMYVLANIAAGNELNKEAVMNVLLPHRADRIKPLFAVNFLQSKDKQLRVATLWCLLNLIYPKCEASSGRAVRLQNAGVIQQVKNMINDHCLDCKLRARMVLQHCVNNADDCFM

SEQ ID NO: 168500 - protein, 581 aa, Zea Mays
MVTVVNGQLPGPVIEATEGDSVAVHVVNQSPHNLTIHWHGVKQQRNCWADGVPMVTQCPILPGHNFTYRFDVAGQEGTLWWHAHVFSLRGTVHGAFIIRPRRRADDDSYYPFPKPHAEVPIVIGEWWETDLEQMDRDFAHGHLDDQPSAATINGKLGDLFRACEGAGVEDGYVLDVEPGKTYLLRVVNAALFSEYYLRIAGHVFTVVAGDANYVRPYRTDVLAVSPGETVDALVVASARPASSYYMVAKPILTPPPDPQIPAFATRATVRYTTAYSSGAPRSSRRRRPRSSSDDDAPVAPEMPDDYDMMTSFYFRGNLTSLRRQPVPSAQADERMFVALALGSVCRRRGQRWCERGDSDETITVATMNNVSFELPPAAATTPMLDAYYRNRSGNGVDDDDDDVAVVVRLPDVPPRAFNFTDRALQPTGPEEEELEPTSRATAVRRFRHGAVVDLVFQSTALWQGDSNPMHLHGHDMFVLAQGLGNYDAARDVARYNLVDPPVRNTVLVPSLGWAAVRFVADNPGMWFMHCHYDFHLSMGMAAVFIVEDGTTADTSLPPPPAVVSSCSHGNVLMPGEILPQS

SEQ ID NO: 168501 - protein, 68 aa, Zea Mays
MDMFLSAMHGASSSSNSSRSTCSTWEPLVSSNTMSQETSTNPVDLLKTLYMPLCLSHNQVKSLLQPSE

SEQ ID NO: 168502 - protein, 153 aa, Zea Mays
MGRASGRLARHNPVGHLYLHTIMMVLASVVTTSFAILLNFSLPSCLHLCATPFSAEGVGACASYPYSSDTSLDTDSRSGYCTSTRTFHIMRAPSFSSSSDVPFIFLDFARFFFPNLLPSPTVVAASRPTLADAGTGRVSHASGLSLCVPSRRT

SEQ ID NO: 168503 - protein, 555 aa, Zea Mays
MIREYLKQKNKRYFIVLDDIWDTKTWEIIKTAFPLTHCGSIIIVTTRINEVARECCRYSDNGHIYNMRPLNMEHSAQLFYGRLFSPEEKCPGHLQEISGQILEKCAGLPLAIIAMSGLLSSKGRTRKEWDIVKDSMGRALERNSDVQRMLEIISLSYLDLPPELRTCLLYLSIFPEDYTIDKDGLIKRSLLQPGEMDEFGVVKSCRIHDTVLDFIVSKAIEENFVTLIGVPGVNPTAVGDKDKVRRLSMQNEGKIPPELVLSSVRSLNVFGARVEIPSLSRFRRLRVLAFEGCGQLQDDHLKDVGDLLHLRYLRLNEASGVTELPEKTAGLKHLGALDVHGHNTVMEIPASICQAGRLECLVTLAVDRETIMPDEIADMKALQVLEGVNVYIQSVDFIEGLGELTNLRKLGIRFINSDADEEWDEKYEEIVSSVRKLADSNLDSLRVHTLNEPPELLNKLNDHGTVDLGELVVTGDIVSDLADWWGVLVNLHKLLFYTYGLSEKDVETLGSITGLEYLCIHLFDAPDDPHELKAPLERAMDAHPNRPRLVWVDED

SEQ ID NO: 168504 - protein, 824 aa, Zea Mays
MDGIEGLLARDFGVRPQGKAAPMAGASRSTGSSAGADAWASYGRSTPAPSAAPSYDDLFGASLFDSFKGPTTTTTTNPAAPSPAPAYDDDIFDAVPGLRPSSSASTTASSAPRYDDGVFGSSAAPAYDDVFATSARSAPPPPAYDDDILGGFGSALPQAQAEERRRPVAVDDDDLLGAFGRSPSEGKRKPAPAQADRVGSTGFDDLIPGFAGSSPPRSRKSNDDNKMKPPVPTSKQRASMADGPFVVLETASAYTSPGRSTDPVEDLDKTASFDGKAANSTADDDSLFEQSSAFDQAPKSDPLFTSEFNGHAKDTKPPSAVRDSSPLHHSMDRNPARQSSMEDFDNVMPKSQSARYSDVRGNDTEDQSPRSTESEDDIWLTVSEIPLFTAPTIAPPPSRSPPLLKRKPLRANAKENGHARQSTPNQNHYTDLPKQPEVSSIDDLEGFSMGKPQMPAYGNTVFDEDYERSSSDTEEKDRQERLEKEREMKLREEMEREQRRLEKERELEQQRERERERQAVERATKEARERASAEARAKAEREARQRSQRAAVQRAQQEARERAAVEAKERAARVAAEARERAAAEAKERAAAEAKEKAAAEAKERERAAARERAAAERAAAERAQQEARKRAERAAVERAATEARERQAAAAAAAATAAAAAAAREKQSTADDLESFFGVGSRANSAPKQRAPTPTVDSMFGFGAQGRGTTNGSQRAASTSAPVRKVASATSFGDDLSDLFGAPASSDVFQEVEGESEERRRARLERHQRTRERAAKALAEKNERDMQVQREQAERDRIGDTLDFEIKRWSAEAVQEGNTVHSS

SEQ ID NO: 168505 - protein, 672 aa, Zea Mays
MKPPVPTSKQRASMADGPFVVLETASAYTSPGRSTDPVEDLDKTASFDGKAANSTADDDSLFEQSSAFDQAPKSDPLFTSEFNGHAKDTKPPSAVRDSSPLHHSMDRNPARQSSMEDFDNVMPKSQSARYSDVRGNDTEDQSPRSTESEDDIWLTVSEIPLFTAPTIAPPPSRSPPLLKRKPLRANAKENGHARQSTPNQNHYTDLPKQPEVSSIDDLEGFSMGKPQMPAYGNTVFDEDYERSSSDTEEKDRQERLEKEREMKLREEMEREQRRLEKERELEQQRERERERQAVERATKEARERASAEARAKAEREARQRSQRAAVQRAQQEARERAAVEAKERAARVAAEARERAAAEAKERAAAEAKEKAAAEAKERERAAARERAAAERAAAERAQQEARKRAERAAVERAATEARERQAAAAAAAATAAAAAAAREKQSTADDLESFFGVGSRANSAPKQRAPTPTVDSMFGFGAQGRGTTNGSQRAASTSAPVRKVASATSFGDDLSDLFGAPASSDVFQEVEGESEERRRARLERHQRTRERAAKALAEKNERDMQVQREQAERDRIGDTLDFEIKRWSAGKEGNLRALLSTLQYILWPECGWQAVSLTDLITGAAVKKQYRKATLCIHPDKVQQKGATLQQKYIAEKVFDILKEAWNKFNSEELF

SEQ ID NO: 168506 - protein, 51 aa, Zea Mays
MFSGCLCSCSLGWCVDFFLSHDEYFFVCYLMAPVRRPADVWSILDLFILSS

SEQ ID NO: 168507 - protein, 67 aa, Zea Mays
MGAAAASIGESSMLELTSLAFSPFSNSLSGLTVCPFDLSDADDAIGSITLWLFSPANAGGAAATSFA

SEQ ID NO: 168508 - protein, 617 aa, Zea Mays
MAAQEAAAADSLGPRFAPDDPTLPAPWKGLIDGATLYYWNPETNVTQYEKPAATAGVPPLSAGLPPATPAQVPESAPVAFPQLNVQFGQAGQAGHQERPDQAAYPQAGQLGQQHTQQPAQQQPFQQQQPFQQHVQAQHQASFQHVPYQQQQTHMPNQPHQYHSTHPQHMPYQHGLYMQPQQQQQAPPYSYQADQQPQMRQTAYNQAQQPSVPQAAYNQSQSQQPPMPQSSYDQGQSQQPPMPQPSYNQGQVQQPPMPQPSYNQGQQSMIPQSAYNQAQQPQIPHGAYNQSQQPLGDRIPQGQGQHPQQSLSSHHPAQASQSPQVSQPQGPKMPTQQGQLQHGLPFTQHGKTPLSHGQQSPLLKDDDGGVHEGKRTGFPLPLSQQRGQAPLPNQQLPSTHQHPGALSSQPNIPGVGGPFYPARNLPDGPSSAETNNMGFMNSPAQMHQGGADTNYQKKPVSGHTVPNHVGPSPIRPPMGFDMGNSVGHFERDDPHSYGRFDGAKALQQQPKLAALPTSQNSMVMHNGPLYPRPDNFGGHNMAPPHSVPNPYNLGPLPIGTSVRPPSSMFAPPDFPSVSSADAYRQHHEVTAMGENVPAPFMTFEATGFPPEILREIIK

SEQ ID NO: 168509 - protein, 81 aa, Zea Mays
MWSPCLSPAHRKPAPSRCLIPRRARPDRASSLSSPSPPHPSLAMVLLPVFCSPLPSALASGRHCPSFPWRHFLLPGGRRPP

SEQ ID NO: 168510 - protein, 99 aa, Zea Mays
MECRSELYPICNACAPSSKSPQPCWSATTRPRSAIPSLVVDLGTLDDYANWRAWIRMDHKVALMDPSRYGRLDQVSGLLMLAKRTSSNHTNLVYPRYAR

SEQ ID NO: 168511 - protein, 632 aa, Zea Mays
MRSSWADSVANAEESAPATAAANGSVANHSNSRPTRSSYVPPHLRGRSAGAAVGAQAGSVAPAQGGPLPLAAAQPSGQGAVVGGPRWAGIVNGGGGGSVGAPRQGYGGGGGGGGRGAWNSRPGGWDRRDREPDPFAKAEAEEVDFDGQENTGINFDAYEDIPVETSGHDVPAPVNTFAEIDLGDALNENIRRCKYVKPTPVQRYAIPISIAGRDLMACAQTGSGKTAAFCFPIISGILKSPKPHQRSRSTRTACPLALILSPTRELSVQIHEEARKFAYQTGVRVVVAYGGAPITNQLRELERGVEILVATPGRLMDLLERARVSLQMIKYLALDEADRMLDMGFEPQIRKIVEGMDMPQRGERQTMLFSATFPKEIQRMAADFLADYIFLAVGRVGSSTDLIVQRVEFVLDSDKRSYLMDLIHAQKANGTHGKHALTLVFVETKRGADALEDWLFRNGFPATSIHGDRTQQEREHALRSFKSGATPILVATDVAARGLDIPHVAHVINFDLPNDIDDYVHRIGRTGRAGKSGLATAFFNESNTTLARPLSDLMKEANQEVPKWLDGYAARSAYGGGGGRNRRQGSGARFGGRDFRRDRGSGGYGGSSGYGGAYGGGGSSGYGGGQSTSSWD

SEQ ID NO: 168512 - protein, 164 aa, Zea Mays
MRVHVVSAKYVMKCDDDTFVRLDSVVTEIKKVPGGRSLYMGSMNIQHKPLRHGKWAVTYEEWPQEVYPLYANGPGYVISSDIADFIMSEFMKQKLMLFKMEDVSLGVWVEQFNKTRPVEYVHSDKFCPNGCVPDYYTAHYQSPRLMLCMWQKLLEGRPDCCNAR

SEQ ID NO: 168513 - protein, 65 aa, Zea Mays
MEDVSLGVWVEQFNKTRPVEYVHSDKFCPNGCVPDYYTAHYQSPRLMLCMWQKLLEGRPDCCNAR

SEQ ID NO: 168514 - protein, 130 aa, Zea Mays
MGILLVYDVTDESSFDNIRNWIRNIEQHASDNVNKILVGNKVDMDAKRVVSTAQGQKLADEYGIKFFETSAKTNRNVEQVFFAMARDVKQRLTETVAAAAEPPTIQISRPDPDQADAASSRRWSSSCCNT

SEQ ID NO: 168515 - protein, 117 aa, Zea Mays
MAAPPSRSRGDYDHLIKLLLIGDSGVGKSCLLLRFSDDTFTTSFITTIGIDFKVRTVELDGKRVKLQIWDTAGQERFRTITTAYYRGAMGILLVYDVTDESSFDSTQQHTLGTGFAT

SEQ ID NO: 168516 - protein, 387 aa, Zea Mays
MSHFHVSVDGQLKCEKWIRDDDSKSEESKMKWWVKRLIGRPKDVRIIWPYPFTEGKLFVMTLTAGLEGYHVNVDGRHVASFPYRTGYSLEDATALSLNGDIDIESIFASSLPNSHPSFAPERYLEMSEQWRAPPLPTEPVELFIGILSAASHFAERMAVRKSWMMYTRKSSNVVARFFVALNGKKEVNAELKKEAEFFQDIVIVPFIDTYDLVVLKTVAIAEYGVRVVPAKYVMKCDDDTFVRIDSVLDQVKNVGNDKSVYVGSINYFHRPLRSGKWAVTYEEWPEALYPNYANGPGYVISSDIARYIVSEFDNQTLRLFKMEDVSMGMWVEKFNRTRRAVEIRHDVRFYQSGCYNGYFTAHYQSPQHMICLWRKLQSGSARCCNVR

SEQ ID NO: 168517 - protein, 250 aa, Zea Mays
MDPASSVAAEFWRPPYHHLRASSVVTAAARSGGGSSSRRRPRRDAAASSEEEPSKLVSTSGTAASSSAGCQDSIAPSEKNDRRTEAETNSGNASKSADKKPAPKEPPKDYIHVRARRGQATDSHSLAERARREKISERMKVLQDIVPGCNKVHGEPHGFKVIGKASVLDEIINYIQSLQRQVEFLSMKLEAINAHVSNATVAFPTKDFGVAPYNTAPSLTLDPQTPREYAQGSMSDWLHMQVGNAYERVT

SEQ ID NO: 168518 - protein, 216 aa, Zea Mays
MDPASSVAAEFWRPPYHHLRASSVVTAAARSGGGSSSRRRPRRDAAASSEEEPSKLVSTSGTAASSSAGCQDSADPEAKRLKQIAPSEKNDRRTEAETNSGNASKSADKKPAPKEPPKDYIHVRARRGQATDSHSLAERARREKISERMKVLQDIVPGCNKVIGKASVLDEIINYIQSLQRQVEFLSMKLEAINAHVSNATVAFPTKDFRDHRCCC

SEQ ID NO: 168519 - protein, 424 aa, Zea Mays
MASTSASSAPVSPSHPNPNPTPDADLPSDRPMPDADGGSGGASPASPEKREEEEEVPGEVAAAAAAVEQPTPRKTRLPRACNNKPKPPPPPPPPERPRRRAAAAGGADETPQCRVVTPLVSEPEAPAELPRWRLRCMWELGSVLNFLHVFRPLLNITGDFTAEELEVALITPNEILDDVHMPLLKSIPPVTRMAMGRGTWVTVLCRKLKDWWHWVAEGDLPIVASHGTEIETYKTIEPAIRLLILKAICDIRVEQEDIRNFIDSSLKHGQNFSTFRKDRIGGDSLGISYWYEDDEILGHRLYREIRRVEQVKKEPGKRSRGKGGSSAISVVSYQWETVASTFDEFDDVAEKLFSSRNRTEVSLGKKLKIEYLPEIEKIHKKKERLLKKQQREALLLDSYLTSDGLTTGRSLRDRKPVTYTFEKA

SEQ ID NO: 168520 - protein, 224 aa, Zea Mays
MGEAVYDEEYLRSRKQNKTSSASEEDEEFRLEEDGEDDDEEEEYSLSTSEDLEEPQRHKKLETRGRRGTKLRSVDEIQTGLRRSKRSSRPRINYHQYDFSDSDTGPGKAKKSDASDSEAGSDAENDMELSTSSQEGEEEEDDSHDEENGNNVNDKMDEDHTVAENKVEPEEEEQKEQPPIEKMDAPSTESRRVGRTFLDLNELAPGGGFDESPSLTVKDDIDNI

SEQ ID NO: 168521 - protein, 434 aa, Zea Mays
MEAADHGKLFVGGISWETSEDRLREYFGRFGEVTEAVIMRDRSTGRARGFGFVVFADAAVAERVTTEKHMIDGRMVEAKKAVPRDDHSIVTKSNASSIGSPGPGRTRKIFVGGLPSNVTEADFRRYFEQFGVITDVVVMYDHNTQRPRGFGFITYDSEDAVDKALHKSFHELNGKMVEVKRAVPKEQSPGPAARSPVGVGQNYAMNRVHSFLNGFNQGYNPNPIGGYGIRVDGRYGLISGARNGFSSFGPGYGMGMNVEGGLGGTFGASSGFISNSNGRQMGSYFNASSNRLGSPIGYLGLNDVPGSMLSSMSRNVWGNGSLNYPSNPTNMSAFASPRNGGQVSLPSDNWGGLPSAHGMDNISSLGSGNLGRGTGDNNFGLPSGSYGRNNSTGTIGEPFSAAGNTYEVNNRDTYGSSSIYGGTAWSKSHGQLPC

SEQ ID NO: 168522 - protein, 237 aa, Zea Mays
MEAADHGKLFVGGISWETSEDRLREYFGRFGEVTEAVIMRDRSTGRARGFGFVVFADAAVAERVTTEKHMIDGRMVEAKKAVPRDDHSIVTKSNASSIGSPGPGRTRKIFVGGLPSNVTEADFRRYFEQFGVITDVVVMYDHNTQRPRGFGFITYDSEDAVDKALHKSFHELNGKMVEVKRAVPKEQSPGPAARSPVGVGQNYAMNRVHSFLNGFNQGYNPNPIGGYGIRVDGRQYI

SEQ ID NO: 168523 - protein, 286 aa, Zea Mays
MAEHLASIFGTEKDRVNCPFYFKIGACRHGDRCSRLHNRPTISPTLVLANMYQRPDMITPGVDAQGQPIDPEKMQEHFEDFYEDIYEELGKFGEIENLNVCDNLADHMIGNVYVQFREEEQAAAAYNALQGRFYSGRPIIVEYSPVTDFREATCRQFEENSCNRGGYCNFMHVKQIGRDLRRKLYGRSASRRYHGRSRSRSPPPQRRGHRDRDDYRGGGGGGRGRGSRYDRYDDGAGRGGRHDRYDDGGRRRHGSPPRRARSPVRESSEERRAKIEQWNREREGKQ

SEQ ID NO: 168524 - protein, 94 aa, Zea Mays
MWCHKQPSGPVLCGFYVCEFMRQNRRYITNPCQYLCDRADPPIPCELVRGHLDYTPHAWNIVPVKKRNGWVRMIVDACYPTSINEETDPEYFCR

SEQ ID NO: 168525 - protein, 92 aa, Zea Mays
MSTYYKKNSIVNYYMVRSTFCYILFIIWSMMLLTSWQSYLYKIYLWLCSCSPSVQFSIRKIIAAKKNIFSLSQKLMVNAGRYSFNLYYYLCN

SEQ ID NO: 168526 - protein, 129 aa, Zea Mays
MKYLCDRADPPIPCELVRGHLDYTPHAWNIVPVKKRNGWVRMIVDACYPTSINEETDPEYFCRRPQRKLVHGSAFLHALGLHPWPRISPTKLPSMAVATNPWQPRPGPRTLGKCVSMFPELCWLAHDIK

SEQ ID NO: 168527 - protein, 64 aa, Zea Mays
MKYLCDRADPPIPCELVRGHLDYTPHAWNIVPVKKRNGWVRMIVDACYPTSINEETDPEYFCRN

SEQ ID NO: 168528 - protein, 92 aa, Zea Mays
MKYLCDRADPPIPCELVRGHLDYTPHAWNIVPVKKRNGWVRMIVDACYPTNIKEETDPEYFCRHPQRKLVHGSAFLPFSTRWACIHGRESPP

SEQ ID NO: 168529 - protein, 65 aa, Zea Mays
MKYLCDRADPPIPCELVRGHLDYTPHAWNIVPVKKRNGWVRMIVDACYPTSINEETDPEYFCRGN

SEQ ID NO: 168530 - protein, 90 aa, Zea Mays
MASEEGVVIACHTKADFDAHMAKAKEAGKLVIIDFTASWCGPCRFIAPLFVEHAKKFTQAVFLKVDVDELKLPRPTMSRRCRPSTSSRTG

SEQ ID NO: 168531 - protein, 75 aa, Zea Mays
MADVDVEPEVAAGAPKKRTFRKYSYRGVDLDALLDMSTDDLVQLFPARARRRFQRGLKRKPMALIKKLRKASAVL

SEQ ID NO: 168532 - protein, 133 aa, Zea Mays
MYSMLAAVPSVLCQVDAVNARLCLSVIICGSLFSYTCYSISSRAISHCPEQKKDAPAGEKPEPVKTHLRNMIIVPEMIGSIVGVYNGKTFNQVEIKPEMIGHYLAEFSISYKPVKHGRPGIGATHSSRFIPLK

SEQ ID NO: 168533 - protein, 422 aa, Zea Mays
MMKLKSGRRPFYKDVKLVDCRSGSSLPHLAAQAKFAAMNMKTEDVNPRRPVQVRRSRWALGDVTEVLDHNSWRLGKITEVLKNDYFVIRLVGCIQPREFHISCLRIPHDRKQLTVGGRDEEAQDAQDAQWITQYILKCRKWKMTICIAAAAMGMYYLDKYWNKADYRIPTESGYQWVMRSLGNRTYCYQNYRMHRNVFDLLHNVLVESYGLTSTRRMSSVETLAFFLWMCGTPQGMRQAEDRLFRSKETLSRKFEKVLNCLNKLAVDNIRPLDPEFTTIHPRLQSRRFSHYFDNCIGAIDGTHIPVVVPANQVVQHTGRKGYTSQNVLAICDFNMRFTFVVAGWHGSVHDMRVFKDAVDKYGNKFPHPPQASFILWIRDIPTGRVIWRRIEVQSTIFLSFSKVLCQEVKKRFSILHTLRLGM

SEQ ID NO: 168534 - protein, 435 aa, Zea Mays
MMKLKSGRRPFYKDVKLVDCRSGSSLPHLAAQAKFAAMNMKTEDVNPRRPVQVRRSRWALGDVTEVLDHNSWRLGKITEVLKNDYFVIRLVGCIQPREFHISCLRIPHDRKQLTVGGRDEEAQDAQDAQWITQYILKCRKWKMTICIAAAAMGMYYLDKYWNKADYRIPTESGYQWVMRSLGNRTYCYQNYRMHRNVFDLLHNVLVESYGLTSTRRMSSVETLAFFLWMCGTPQGMRQAEDRLFRSKETLSRKFEKVLNCLNKLAVDNIRPLDPEFTTIHPRLQSRRFSHYFDNCIGAIDGTHIPVVVPANQVVQHTGRKGYTSQNVLAICDFNMRFTFVVAGWHGSVHDMRVFKDAVDKYGNKFPHPPQASFILWIRDIPTGRVIWRRIEVQSTIFLSFSKVLCQEMMILIYVMMMRTMFPLPLKDHLRREQMS

SEQ ID NO: 168535 - protein, 67 aa, Zea Mays
MECITCPSNTSGPSPSGNVVGTLGTPLNLPTQRTTKSAACVCRNQERRGYVGHTTDLAPSKCMLDIA

SEQ ID NO: 168536 - protein, 850 aa, Zea Mays
MNGHLHLIPSTPPRLHLTSLSPTFLSFPPAPCPHPPPHGPHPRLPLRSVAVAAAADPRAAHAAAVKSGALGPSSDARTANAVMCAYLRVGRLGDARDVFDWMPARDAASYSALISGYARLAGGSGSVTATVASAELLGRMRLADGLLPTEYTFVGLFTACARRGNPRLGTQVHALAAKSGHSSLLLVANAILGMYVKCGRFGDAMRAFDGMDRRDVSSWNAVLAGLVELGRHDEAFEMFGEMRASGNVRADRFSLSALLTAAGEGVGQLQGEAVHALSFKSGLETDLSVGNALIGFYAEHGASVEDVVSVFQRMPVKDVISWTGLLNGYMEFGLVDMALDVFERMPQRNFVTYNAVLTGFCRNKEGVRATFAKKAGLRGLGLFRQMVEDGLEISDVTVTGVLNACAIAADRKVSEQVHAFVIKCGCVSSPWSDAALIDMCIKCGRSGDAHLLFEQWQHEESFHIAWNSLLLASVRGGEYEKALSTFLQMFRSSGAEFIDEFMLTSVLGVCGSLGFAELGKQMHTFAAKSGLLSARGVGNAIISMYGKCGELKDAISLFERMSCRDLVSWNAMITAHLLLHQGDDILKIWSEMERSMVRPDSITFLLVISACSHTSSDSTDKCRKLFLSMPSTYGIEPAMEHYAAFVYVLGCWGRFDEAEQLIGGMPLQPGALVWRSLLDSCSKHSNMAVRRRAMKHLLALEPQDPSTYVLTSNLLSESARWRSSENTRLEMYEKGMRKIPARSWTFHGNMVHSFFARDKSHPQSRDIYAGLDVLILECIKAGYEPDTTFVLHDVEEYQKRHFLMYHSMKLASMYGLLMAGPGQTIRVVKNIRMCGDCHSFLEHASAATGA

SEQ ID NO: 168537 - protein, 856 aa, Zea Mays
MNGHLHLIPSTPPRLHLTSLSPTFLSFPPAPCPHPPPHGPHPRLPLRSVAVAAAADPRAAHAAAVKSGALGPSSDARTANAVMCAYLRVGRLGDARDVFDWMPARDAASYSALISGYARLAGGSGSVTATVASAELLGRMRLADGLLPTEYTFVGLFTACARRGNPRLGTQVHALAAKSGHSSLLLVANAILGMYVKCGRFGDAMRAFDGMDRRDVSSWNAVLAGLVELGRHDEAFEMFGEMRASGNVRADRFSLSALLTAAGEGVGQLQGEAVHALSFKSGLETDLSVGNALIGFYAEHGASVEDVVSVFQRMPVKDVISWTGLLNGYMEFGLVDMALDVFERMPQRNFVTYNAVLTGFCRNKEGVRATFAKKAGLRGLGLFRQMVEDGLEISDVTVTGVLNACAIAADRKVSEQVHAFVIKCGCVSSPWSDAALIDMCIKCGRSGDAHLLFEQWQHEESFHIAWNSLLLASVRGGEYEKALSTFLQMFRSSGAEFIDEFMLTSVLGVCGSLGFAELGKQMHTFAAKSGLLSARGVGNAIISMYGKCGELKDAISLFERMSCRDLVSWNAMITAHLLLHQGDDILKIWSEMERSMVRPDSITFLLVISACSHTSSDSTDKCRKLFLSMPSTYGIEPAMEHYAAFVYVLGCWGRFDEAEQLIGGMPLQPGALVWRSLLDSCSKHSNMAVRRRAMKHLLALEPQDPSTYVLTSNLLSESARWRSSENTRLEMYEKGMRKIPARSWTFHGNMVHSFFARDKSHPQSRDIYAGLDVLILECIKAGYEPDTTFVLHDVEEYQKRHFLMYHSMKLASMYGLLMAGPGQTIRVVKNIRMCGDCHSFLEHASAATAVQVHRPG

SEQ ID NO: 168538 - protein, 421 aa, Zea Mays
MHQVPMVHMADLVCVLVTIRTRLVGHTIHIIVVRCSLTSSKSLPAITIRLLPMIKPRGSRGTKTRDSILISCYGPSLWYGSHMYSSGLYGGWNSLYDGKYRTRGRCNNGYYAYGNGSLDGFNELKRGPRSGMYTNQLGLGATTEVPAKEQDLLSANGSHPAMKDQYNRADFAETYSDAKFFIIKSYSEDDVHKSVKYNVWASTPNGNKKLDAAYQEAKEKSSETPVFLLFSVNASGQFVGLAEMVGRVDFNKTVDHWQQDKWTGCFPVKWHIVKDVPNSLLKHIILENNENKPVTNSRDTHEVKLEQGLQVLKVFKDHVCKTSILDDFGFYDNREKMMQYRKAKQQQSLKKVIDVKVPNATDADTSLVGTGSTELTNVEADVLNKELSLDKAVEKNEEKGNDVAPQDLKSSAEKSASPNGC

SEQ ID NO: 168539 - protein, 135 aa, Zea Mays
MLPLSEAEVIREGSDITLVGWGAQLAVLKEACEDAAKDGVSCELIDLKTLVPWDKETVEASVKKTGKLLVSHEAPVTGGFGAEIAASIAERCFQRLEAPVARVCGLDTPFPLVYEPFYMPTKNKVLDAIKATVDF

SEQ ID NO: 168540 - protein, 366 aa, Zea Mays
MAAKGLREVGRRRAAEVGRRCLSGGSAGPPAPAAKRKEGGKAVNLFTAVNQALHIALDTDPRAYVFGEDVGFGGVFRCTTGLADRFGKSRVFNTPLCEQGIAGFAIGLAAMGNRAIAEIQFADYIFPAFDQIVNEAAKFRYRSGNEFNCGGLTIRTPYGAVGHGGHYHSQSPEAFFCHVPGLKVVIPRSPREAKGLLLASIRDPNPVVFFEPKWLYRLAVEEVPEEDYMLPLSEAEVIREGSDITLVGWGAQLAVLKEACEDAAKDGVSCELIDLKTLVPWDKETVEASVKKTGKLLPRGSSHRGLRRGDRRVHCRALLPEVRSTRGESLRSRHPFPSRVRAILHAHQEQGPGRDKSHCRFLKHVA

SEQ ID NO: 168541 - protein, 241 aa, Zea Mays
MAAKGLREVGRRRAAEVGRRCLSGGSAGPPAPAAKRKEGGKAVNLFTAVNQALHIALDTDPRAYVFGEDVGFGGVFRCTTGLADRFGKSRVFNTPLCEQGIAGFAIGLAAMGNRAIAEIQFADYIFPAFDQIVNEAAKFRYRSGNEFNCGGLTIRTPYGAVGHGGHYHSQSPEAFFCHVPGLKVVIPRSPREAKGLLLASIRDPNPVVFFEPKWLYRLAVEEVPEEDYMLPLSEAELMYFR

SEQ ID NO: 168542 - protein, 327 aa, Zea Mays
MAAKGLREVGRRRAAEVGRRCLSGGSAGPPAPAAKRKEGGKAVNLFTAVNQALHIALDTDPRAYVFGEDVGFGGVFRCTTGLADRFGKSRVFNTPLCEQGIAGFAIGLAAMGNRAIAEIQFADYIFPAFDQIVNEAAKFRYRSGNEFNCGGLTIRTPYGAVGHGGHYHSQSPEAFFCHVPGLKVVIPRSPREAKGLLLASIRDPNPVVFFEPKWLYRLAVEEVPEEDYMLPLSEAEVIREGSDITLVGWGAQLAVLKEACEDAAKDGVSCELIDLKTLVPWDKETVEASVKKTGKLLFCNRLATRLQSPGASARRSPRPLPSAASRG

SEQ ID NO: 168543 - protein, 296 aa, Zea Mays
MRPILMKGHERPLTFLRYNRDGDLLFSCAKDHTPTVWYADNGDRLGTYRGHNGAVWTCDVSRDSARLITGSADQTAKLWEVSTGKELFSFRFDAPARSVEFAIGDALAVVTTDNFMDHVPTVQVKRIAEDIDDQTEESALVITGIKGRINRAVWGPLNRTIITAGEDATIRIWDSETGQLLKESDKESGHQKTISSLSKSLDWSHFITGSLDKSAKVVLGGGQDAMNVTMTDRRAGKFEAKFYHKILQEEIGGVKGHFGPINALAFNPDGRSFSSGGEDGYVRLHHFDSDYFSIKM

SEQ ID NO: 168544 - protein, 1118 aa, Zea Mays
MTTSPPPAEQEQQEEEEVLVPHGPHQELPNGAQPMEVVPAEPAATVENQQIEDPPISRFTWTIENLSRVSTKKLYSEIFVVGGYKWRILIFPRGNNVEFLSMYLDVADSGVLPYGWTRYAQFSLSVVNQIHNKFTIRKETQHQFSARESDWGFTSFMPLGELYNPSRGYLVNDTCIVEAEVAVCKVVEYWSYDSKKETGYVGLKNQGATCYMNSLLQTLYHIPYFRKAVYHMPTTENDMPSGSIPLALQSLFYKLQYNDSSVSTKELTKSFGWDMHDSFMQHDVQELNRVLSEKLEDKMKGTVVEGTIQQLFEGHHMNYIECINVDFKSTRKESFYDLQLDVKGCQDVYASFDKYVEVERLEGDNKYHADKHGLQDAKKGVLFIDFPPVLQLQLKRFEYDFMRDTMVKINDRYEFPLQLDLDRDNGKYLSPDADRNVRNLYTLHSVLVHSGGVHGGHYYAFIRPTLSDQWFKFDDERVTKEDAKRALEEQYGGEEELPQTNPGLNNTPFKFTKYSNAYMLVYIRESDKDKIICNVDEKDIAEHLRIRLENDREEKERRKKEKAEAHLYTIIKVARDDDLKAQIGKDIYFDLVDHDKVPSFRIQKQMTFAQFKEEVAKEFGIPTQFQRFWLWAKRQNHTYRPNRPLCPQDEAHTVGQLKELVNKAHNAELKLFLEVELGLDLKPLPLPDKTREDIFLFFKLYEPEKEQLRYVGRLFVKASGRPQDILLKLRMLAGFSQDDDIELYEEIKFEPNVMCEYIDNRLLFRSCQLEDGDIICFQKPSKPDSADRYRFPDVPSFLTYIRNRQVVHFRSLEKPKDDEFCLEMSKIFTYDQVVEKVAEKLGVDDPSKIRLTSHNCYSQQPKPQPIKYRGVERLLDMLIHYNQTSDILYYEVLDIPLPELQALKTLKVTYHHATKDEVSVHSIRLPKNSTVGDVLNDIKTKVELSHTNAELRLLEVFYHKIYKVFAPNEKIENINDQYWTLRAEEVPEEEKNLGPFDRLIHVYHFTKDTQNQTQVQNFGEPFFMVIREDETLSSIKERIQKKLKVPDEDFSKWKFAYISLGRPDYFEDSDTVALKFQRNMYGAWEQYLGLEHPDTAPRKAHTANQNRHSFERPVKIYN

SEQ ID NO: 168545 - protein, 887 aa, Zea Mays
MPTTENDMPSGSIPLALQSLFYKLQYNDSSVSTKELTKSFGWDMHDSFMQHDVQELNRVLSEKLEDKMKGTVVEGTIQQLFEGHHMNYIECINVDFKSTRKESFYDLQLDVKGCQDVYASFDKYVEVERLEGDNKYHADKHGLQDAKKGVLFIDFPPVLQLQLKRFEYDFMRDTMVKINDRYEFPLQLDLDRDNGKYLSPDADRNVRNLYTLHSVLVHSGGVHGGHYYAFIRPTLSDQWFKFDDERVTKEDAKRALEEQYGGEEELPQTNPGLNNTPFKFTKYSNAYMLVYIRESDKDKIICNVDEKDIAEHLRIRLENDREEKERRKKEKAEAHLYTIIKVARDDDLKAQIGKDIYFDLVDHDKVPSFRIQKQMTFAQFKEEVAKEFGIPTQFQRFWLWAKRQNHTYRPNRPLCPQDEAHTVGQLKELVNKAHNAELKLFLEVELGLDLKPLPLPDKTREDIFLFFKLYEPEKEQLRYVGRLFVKASGRPQDILLKLRMLAGFSQDDDIELYEEIKFEPNVMCEYIDNRLLFRSCQLEDGDIICFQKPSKPDSADRYRFPDVPSFLTYIRNRQVVHFRSLEKPKDDEFCLEMSKIFTYDQVVEKVAEKLGVDDPSKIRLTSHNCYSQQPKPQPIKYRGVERLLDMLIHYNQTSDILYYEVLDIPLPELQALKTLKVTYHHATKDEVSVHSIRLPKNSTVGDVLNDIKTKVELSHTNAELRLLEVFYHKIYKVFAPNEKIENINDQYWTLRAEEVPEEEKNLGPFDRLIHVYHFTKDTQNQTQVQNFGEPFFMVIREDETLSSIKERIQKKLKVPDEDFSKWKFAYISLGRPDYFEDSDTVALKFQRNMYGAWEQYLGLEHPDTAPRKAHTANQNRHSFERPVKIYN

SEQ ID NO: 168546 - protein, 1128 aa, Zea Mays
MTTSPPPAEQEQQEEEEVLVPHGPHQELPNGAQPMEVVPAEPAATVENQQIEDPPISRFTWTIENLSRVSTKKLYSEIFVVGGYKWRILIFPRGNNVEFLSMYLDVADSGVLPYGWTRYAQFSLSVVNQIHNKFTIRKETQHQFSARESDWGFTSFMPLGELYNPSRGYLVNDTCIVEAEVAVCKVVEYWSYDSKKETGYVGLKNQGATCYMNSLLQTLYHIPYFRKIQLTTDISCQAVYHMPTTENDMPSGSIPLALQSLFYKLQYNDSSVSTKELTKSFGWDMHDSFMQHDVQELNRVLSEKLEDKMKGTVVEGTIQQLFEGHHMNYIECINVDFKSTRKESFYDLQLDVKGCQDVYASFDKYVEVERLEGDNKYHADKHGLQDAKKGVLFIDFPPVLQLQLKRFEYDFMRDTMVKINDRYEFPLQLDLDRDNGKYLSPDADRNVRNLYTLHSVLVHSGGVHGGHYYAFIRPTLSDQWFKFDDERVTKEDAKRALEEQYGGEEELPQTNPGLNNTPFKFTKYSNAYMLVYIRESDKDKIICNVDEKDIAEHLRIRLENDREEKERRKKEKAEAHLYTIIKVARDDDLKAQIGKDIYFDLVDHDKVPSFRIQKQMTFAQFKEEVAKEFGIPTQFQRFWLWAKRQNHTYRPNRPLCPQDEAHTVGQLKELVNKAHNAELKLFLEVELGLDLKPLPLPDKTREDIFLFFKLYEPEKEQLRYVGRLFVKASGRPQDILLKLRMLAGFSQDDDIELYEEIKFEPNVMCEYIDNRLLFRSCQLEDGDIICFQKPSKPDSADRYRFPDVPSFLTYIRNRQVVHFRSLEKPKDDEFCLEMSKIFTYDQVVEKVAEKLGVDDPSKIRLTSHNCYSQQPKPQPIKYRGVERLLDMLIHYNQTSDILYYEVLDIPLPELQALKTLKVTYHHATKDEVSVHSIRLPKNSTVGDVLNDIKTKVELSHTNAELRLLEVFYHKIYKVFAPNEKIENINDQYWTLRAEEVPEEEKNLGPFDRLIHVYHFTKDTQNQTQVQNFGEPFFMVIREDETLSSIKERIQKKLKVPDEDFSKWKFAYISLGRPDYFEDSDTVALKFQRNMYGAWEQYLGLEHPDTAPRKAHTANQNRHSFERPVKIYN

SEQ ID NO: 168547 - protein, 513 aa, Zea Mays
MTFAQFKEEVAKEFGIPTQFQRFWLWAKRQNHTYRPNRPLCPQDEAHTVGQLKELVNKAHNAELKLFLEVELGLDLKPLPLPDKTREDIFLFFKLYEPEKEQLRYVGRLFVKASGRPQDILLKLRMLAGFSQDDDIELYEEIKFEPNVMCEYIDNRLLFRSCQLEDGDIICFQKPSKPDSADRYRFPDVPSFLTYIRNRQVVHFRSLEKPKDDEFCLEMSKIFTYDQVVEKVAEKLGVDDPSKIRLTSHNCYSQQPKPQPIKYRGVERLLDMLIHYNQTSDILYYEVLDIPLPELQALKTLKVTYHHATKDEVSVHSIRLPKNSTVGDVLNDIKTKVELSHTNAELRLLEVFYHKIYKVFAPNEKIENINDQYWTLRAEEVPEEEKNLGPFDRLIHVYHFTKDTQNQTQVQNFGEPFFMVIREDETLSSIKERIQKKLKVPDEDFSKWKFAYISLGRPDYFEDSDTVALKFQRNMYGAWEQYLGLEHPDTAPRKAHTANQNRHSFERPVKIYN

SEQ ID NO: 168548 - protein, 1103 aa, Zea Mays
MTTSPPPAEQEQQEEEEVLVPHGPHQELPNGAQPMEVVPAEPAATVENQQIEDPPISRFTWTIENLSRVSTKKLYSEIFVVGGYKWRILIFPRGNNVEFLSMYLDVADSGVLPYGWTRYAQFSLSVVNQIHNKFTIRKETQHQFSARESDWGFTSFMPLGELYNPSRGYLVNDTCIVEAEVAVCKVVEYWSYDSKKETGYVGLKNQGATCYMNSLLQTLYHIPYFRKAVYHMPTTENDMPSGSIPLALQSLFYKLQYNDSSVSTKELTKSFGWDMHDSFMQHDVQELNRVLSEKLEDKMKGTVVEGTIQQLFEGHHMNYIEYLQLDVKGCQDVYASFDKYVEVERLEGDNKYHADKHGLQDAKKGVLFIDFPPVLQLQLKRFEYDFMRDTMVKINDRYEFPLQLDLDRDNGKYLSPDADRNVRNLYTLHSVLVHSGGVHGGHYYAFIRPTLSDQWFKFDDERVTKEDAKRALEEQYGGEEELPQTNPGLNNTPFKFTKYSNAYMLVYIRESDKDKIICNVDEKDIAEHLRIRLENDREEKERRKKEKAEAHLYTIIKVARDDDLKAQIGKDIYFDLVDHDKVPSFRIQKQMTFAQFKEEVAKEFGIPTQFQRFWLWAKRQNHTYRPNRPLCPQDEAHTVGQLKELVNKAHNAELKLFLEVELGLDLKPLPLPDKTREDIFLFFKLYEPEKEQLRYVGRLFVKASGRPQDILLKLRMLAGFSQDDDIELYEEIKFEPNVMCEYIDNRLLFRSCQLEDGDIICFQKPSKPDSADRYRFPDVPSFLTYIRNRQVVHFRSLEKPKDDEFCLEMSKIFTYDQVVEKVAEKLGVDDPSKIRLTSHNCYSQQPKPQPIKYRGVERLLDMLIHYNQTSDILYYEVLDIPLPELQALKTLKVTYHHATKDEVSVHSIRLPKNSTVGDVLNDIKTKVELSHTNAELRLLEVFYHKIYKVFAPNEKIENINDQYWTLRAEEVPEEEKNLGPFDRLIHVYHFTKDTQNQTQVQNFGEPFFMVIREDETLSSIKERIQKKLKVPDEDFSKWKFAYISLGRPDYFEDSDTVALKFQRNMYGAWEQYLGLEHPDTAPRKAHTANQNRHSFERPVKIYN

SEQ ID NO: 168549 - protein, 902 aa, Zea Mays
MNSLLQTLYHIPYFRKAVYHMPTTENDMPSGSIPLALQSLFYKLQYNDSSVSTKELTKSFGWDMHDSFMQHDVQELNRVLSEKLEDKMKGTVVEGTIQQLFEGHHMNYIECINVDFKSTRKESFYDLQLDVKGCQDVYASFDKYVEVERLEGDNKYHADKHGLQDAKKGVLFIDFPPVLQLQLKRFEYDFMRDTMVKINDRYEFPLQLDLDRDNGKYLSPDADRNVRNLYTLHSGGVHGGHYYAFIRPTLSDQWFKFDDERVTKEDAKRALEEQYGGEEELPQTNPGLNNTPFKFTKYSNAYMLVYIRESDKDKIICNVDEKDIAEHLRIRLENDREEKERRKKEKAEAHLYTIIKVARDDDLKAQIGKDIYFDLVDHDKVPSFRIQKQMTFAQFKEEVAKEFGIPTQFQRFWLWAKRQNHTYRPNRPLCPQDEAHTVGQLKELVNKAHNAELKLFLEVELGLDLKPLPLPDKTREDIFLFFKLYEPEKEQLRYVGRLFVKASGRPQDILLKLRMLAGFSQDDDIELYEEIKFEPNVMCEYIDNRLLFRSCQLEDGDIICFQKPSKPDSADRYRFPDVPSFLTYIRNRQVVHFRSLEKPKDDEFCLEMSKIFTYDQVVEKVAEKLGVDDPSKIRLTSHNCYSQQPKPQPIKYRGVERLLDMLIHYNQTSDILYYEVLDIPLPELQALKTLKVTYHHATKDEVSVHSIRLPKNSTVGDVLNDIKTKVELSHTNAELRLLEVFYHKIYKVFAPNEKIENINDQYWTLRAEEVPEEEKNLGPFDRLIHVYHFTKDTQNQTQVQNFGEPFFMVIREDETLSSIKERIQKKLKVPDEDFSKWKFAYISLGRPDYFEDSDTVALKFQRNMYGAWEQYLGLEHPDTAPRKAHTANQNRHSFERPVKIYN

SEQ ID NO: 168550 - protein, 1150 aa, Zea Mays
MTTSPPPAEQEQQEEEEVLVPHGPHQELPNGAQPMEVVPAEPAATVENQQIEDPPISRFTWTIENLSRVSTKKLYSEIFVVGGYKWRILIFPRGNNVEFLSMYLDVADSGVLPYGWTRYAQFSLSVVNQIHNKFTIRKETQHQFSARESDWGFTSFMPLGELYNPSRGYLVNDTCIVEAEVAVCKVVEYWSYDSKKETGYVGLKNQGATCYMNSLLQTLYHIPYFRKAVYHMPTTENDMPSGSIPLALQSLFYKLQYNDSSVSTKELTKSFGWDMHDSFMQHDVQELNRVLSEKLEDKMKGTVVEGTIQQLFEGHHMNYIECINVDFKSTRKESFYDLQLDVKGCQDVYASFDKYVEVERLEGDNKYHADKHGLQDAKKGVLFIDFPPVLQLQLKRFEYDFMRDTMVKINDRYEFPLQLDLDRDNGKYLSPDADRNVRNLYTLHSLLDVDDILAIKAIRCVVVDLIDSHAHNDYSYSVLVHSGGVHGGHYYAFIRPTLSDQWFKFDDERVTKEDAKRALEEQYGGEEELPQTNPGLNNTPFKFTKYSNAYMLVYIRESDKDKIICNVDEKDIAEHLRIRLENDREEKERRKKEKAEAHLYTIIKVARDDDLKAQIGKDIYFDLVDHDKVPSFRIQKQMTFAQFKEEVAKEFGIPTQFQRFWLWAKRQNHTYRPNRPLCPQDEAHTVGQLKELVNKAHNAELKLFLEVELGLDLKPLPLPDKTREDIFLFFKLYEPEKEQLRYVGRLFVKASGRPQDILLKLRMLAGFSQDDDIELYEEIKFEPNVMCEYIDNRLLFRSCQLEDGDIICFQKPSKPDSADRYRFPDVPSFLTYIRNRQVVHFRSLEKPKDDEFCLEMSKIFTYDQVVEKVAEKLGVDDPSKIRLTSHNCYSQQPKPQPIKYRGVERLLDMLIHYNQTSDILYYEVLDIPLPELQALKTLKVTYHHATKDEVSVHSIRLPKNSTVGDVLNDIKTKVELSHTNAELRLLEVFYHKIYKVFAPNEKIENINDQYWTLRAEEVPEEEKNLGPFDRLIHVYHFTKDTQNQTQVQNFGEPFFMVIREDETLSSIKERIQKKLKVPDEDFSKWKFAYISLGRPDYFEDSDTVALKFQRNMYGAWEQYLGLEHPDTAPRKAHTANQNRHSFERPVKIYN

SEQ ID NO: 168551 - protein, 787 aa, Zea Mays
MNYIEYLQLDVKGCQDVYASFDKYVEVERLEGDNKYHADKHGLQDAKKGVLFIDFPPVLQLQLKRFEYDFMRDTMVKINDRYEFPLQLDLDRDNGKYLSPDADRNVRNLYTLHSVLVHSGGVHGGHYYAFIRPTLSDQWFKFDDERVTKEDAKRALEEQYGGEEELPQTNPGLNNTPFKFTKYSNAYMLVYIRESDKDKIICNVDEKDIAEHLRIRLENDREEKERRKKEKAEAHLYTIIKVARDDDLKAQIGKDIYFDLVDHDKVPSFRIQKQMTFAQFKEEVAKEFGIPTQFQRFWLWAKRQNHTYRPNRPLCPQDEAHTVGQLKELVNKAHNAELKLFLEVELGLDLKPLPLPDKTREDIFLFFKLYEPEKEQLRYVGRLFVKASGRPQDILLKLRMLAGFSQDDDIELYEEIKFEPNVMCEYIDNRLLFRSCQLEDGDIICFQKPSKPDSADRYRFPDVPSFLTYIRNRQVVHFRSLEKPKDDEFCLEMSKIFTYDQVVEKVAEKLGVDDPSKIRLTSHNCYSQQPKPQPIKYRGVERLLDMLIHYNQTSDILYYEVLDIPLPELQALKTLKVTYHHATKDEVSVHSIRLPKNSTVGDVLNDIKTKVELSHTNAELRLLEVFYHKIYKVFAPNEKIENINDQYWTLRAEEVPEEEKNLGPFDRLIHVYHFTKDTQNQTQVQNFGEPFFMVIREDETLSSIKERIQKKLKVPDEDFSKWKFAYISLGRPDYFEDSDTVALKFQRNMYGAWEQYLGLEHPDTAPRKAHTANQNRHSFERPVKIYN

SEQ ID NO: 168552 - protein, 580 aa, Zea Mays
MTTSPPPAEQEQQEEEEERRKKEKAEAHLYTIIKVARDDDLKAQIGKDIYFDLVDHDKVPSFRIQKQMTFAQFKEEVAKEFGIPTQFQRFWLWAKRQNHTYRPNRPLCPQDEAHTVGQLKELVNKAHNAELKLFLEVELGLDLKPLPLPDKTREDIFLFFKLYEPEKEQLRYVGRLFVKASGRPQDILLKLRMLAGFSQDDDIELYEEIKFEPNVMCEYIDNRLLFRSCQLEDGDIICFQKPSKPDSADRYRFPDVPSFLTYIRNRQVVHFRSLEKPKDDEFCLEMSKIFTYDQVVEKVAEKLGVDDPSKIRLTSHNCYSQQPKPQPIKYRGVERLLDMLIHYNQTSDILYYEVLDIPLPELQALKTLKVTYHHATKDEVSVHSIRLPKNSTVGDVLNDIKTKVELSHTNAELRLLEVFYHKIYKVFAPNEKIENINDQYWTLRAEEVPEEEKNLGPFDRLIHVYHFTKDTQNQTQVQNFGEPFFMVIREDETLSSIKERIQKKLKVPDEDFSKWKFAYISLGRPDYFEDSDTVALKFQRNMYGAWEQYLGLEHPDTAPRKAHTANQNRHSFERPVKIYN

SEQ ID NO: 168553 - protein, 750 aa, Zea Mays
MPTTENDMPSGSIPLALQSLFYKLQYNDSSVSTKELTKSFGWDMHDSFMQHDVQELNRVLSEKLEDKMKGTVVEGTIQQLFEGHHMNYIEYLQLDVKGCQDVYASFDKYVEVERLEGDNKYHADKHGLQVLEPSEASMDHNGRQHAHRYWMSSIPCRCVKDAKKGVLFIDFPPVLQLQLKRFEYDFMRDTMVKINDRYEFPLQLDLDRDNGKYLSPDADRNVRNLYTLHSVLVHSGGVHGGHYYAFIRPTLSDQWFKFDDERVTKEDAKRALEEQYGGEEELPQTNPGLNNTPFKFTKYSNAYMLVYIRESDKDKIICNVDEKDIAEHLRIRLENDREEKERRKKEKAEAHLYTIIKVARDDDLKAQIGKDIYFDLVDHDKVPSFRIQKQMTFAQFKEEVAKEFGIPTQFQRFWLWAKRQNHTYRPNRPLCPQDEAHTVGQLKELVNKAHNAELKLFLEVELGLDLKPLPLPDKTREDIFLFFKLYEPEKEQLRYVGRLFVKASGRPQDILLKLRMLAGFSQDDDIELYEEIKFEPNVMCEYIDNRLLFRSCQLEDGDIICFQKPSKPDSADRYRFPDVPSFLTYIRNRQVVHFRSLEKPKDDEFCLEMSKIFTYDQVVEKVAEKLGVDDPSKIRLTSHNCYSQQPKPQPIKYRGVERLLDMLIHYNQTSDILYYEVLDIPLPELQALKTLKVTYHHATKDEVSVHSIRLPKNSTVGDVLNDIKTKVELSHTNAELRLLEVFYHKIYKFL

SEQ ID NO: 168554 - protein, 1095 aa, Zea Mays
MTTSPPPAEQEQQEEEEVLVPHGPHQELPNGAQPMEVVPAEPAATVENQQIEDPPISRFTWTIENLSRVSTKKLYSEIFVVGGYKWRILIFPRGNNVEFLSMYLDVADSGVLPYGWTRYAQFSLSVVNQIHNKFTIRKETQHQFSARESDWGFTSFMPLGELYNPSRGYLVNDTCIVEAEVAVCKVVEYWSYDSKKETGYVGLKNQGATCYMNSLLQTLYHIPYFRKAVYHMPTTENDMPSGSIPLALQSLFYKLQYNDSSVSTKELTKSFGWDMHDSFMQHDVQELNRVLSEKLEDKMKGTVVEGTIQQLFEGHHMNYIEYLQLDVKGCQDVYASFDKYVEVERLEGDNKYHADKHGLQVLEPSEASMDHNGRQHAHRYWMSSIPCRCVKDAKKGVLFIDFPPVLQLQLKRFEYDFMRDTMVKINDRYEFPLQLDLDRDNGKYLSPDADRNVRNLYTLHSVLVHSGGVHGGHYYAFIRPTLSDQWFKFDDERVTKEDAKRALEEQYGGEEELPQTNPGLNNTPFKFTKYSNAYMLVYIRESDKDKIICNVDEKDIAEHLRIRLENDREEKERRKKEKAEAHLYTIIKVARDDDLKAQIGKDIYFDLVDHDKVPSFRIQKQMTFAQFKEEVAKEFGIPTQFQRFWLWAKRQNHTYRPNRPLCPQDEAHTVGQLKELVNKAHNAELKLFLEVELGLDLKPLPLPDKTREDIFLFFKLYEPEKEQLRYVGRLFVKASGRPQDILLKLRMLAGFSQDDDIELYEEIKFEPNVMCEYIDNRLLFRSCQLEDGDIICFQKPSKPDSADRYRFPDVPSFLTYIRNRQVVHFRSLEKPKDDEFCLEMSKIFTYDQVVEKVAEKLGVDDPSKIRLTSHNCYSQQPKPQPIKYRGVERLLDMLIHYNQTSDILYYEVLDIPLPELQALKTLKVTYHHATKDEVSVHSIRLPKNSTVGDVLNDIKTKVELSHTNAELRLLEVFYHKIYKVFAPNEKIENINDQYWTLRAEEVPEEEKNLGPFDRLIHVYHFTKDTQNQTWKFAYISLGRPDYFEDSDTVALKFQRNMYGAWEQYLGLEHPDTAPRKAHTANQNRHSFERPVKIYN

SEQ ID NO: 168555 - protein, 1170 aa, Zea Mays
MTTSPPPAEQEQQEEEEVLVPHGPHQELPNGAQPMEVVPAEPAATVENQQIEDPPISRFTWTIENLSRVSTKKLYSEIFVVGGYKWRILIFPRGNNVEFLSMYLDVADSGVLPYGWTRYAQFSLSVVNQIHNKFTIRKETQHQFSARESDWGFTSFMPLGELYNPSRGYLVNDTCIVEAEVAVCKVVEYWSYDSKKETGYVGLKNQGATCYMNSLLQTLYHIPYFRKIQLTTDISCQAVYHMPTTENDMPSGSIPLALQSLFYKLQYNDSSVSTKELTKSFGWDMHDSFMQHDVQELNRVLSEKLEDKMKGTVVEGTIQQLFEGHHMNYIEYLQLDVKGCQDVYASFDKYVEVERLEGDNKYHADKHGLQASMDHNGRQHAHRYWMSSIPCRCVKDAKKGVLFIDFPPVLQLQLKRFEYDFMRDTMVKINDRYEFPLQLDLDRDNGKYLSPDADRNVRNLYTLHSLLDVDDILAIKAIRCVVVDLIDSHAHNDYSYSVLVHSGGVHGGHYYAFIRPTLSDQWFKFDDERVTKEDAKRALEEQYGGEEELPQTNPGLNNTPFKFTKYSNAYMLVYIRESDKDKIICNVDEKDIAEHLRIRLENDREEKERRKKEKAEAHLYTIIKVARDDDLKAQIGKDIYFDLVDHDKVPSFRIQKQMTFAQFKEEVAKEFGIPTQFQRFWLWAKRQNHTYRPNRPLCPQDEAHTVGQLKELVNKAHNAELKLFLEVELGLDLKPLPLPDKTREDIFLFFKLYEPEKEQLRYVGRLFVKASGRPQDILLKLRMLAGFSQDDDIELYEEIKFEPNVMCEYIDNRLLFRSCQLEDGDIICFQKPSKPDSADRYRFPDVPSFLTYIRNRQVVHFRSLEKPKDDEFCLEMSKIFTYDQVVEKVAEKLGVDDPSKIRLTSHNCYSQQPKPQPIKYRGVERLLDMLIHYNQTSDILYYEVLDIPLPELQALKTLKVTYHHATKDEVSVHSIRLPKNSTVGDVLNDIKTKVELSHTNAELRLLEVFYHKIYKVFAPNEKIENINDQYWTLRAEEVPEEEKNLGPFDRLIHVYHFTKDTQNQTQVQNFGEPFFMVIREDETLSSIKERIQKKLKVPDEDFSKWKFAYISLGRPDYFEDSDTVALKFQRNMYGAWEQYLGLEHPDTAPRKAHTANQNRHSFERPVKIYN

SEQ ID NO: 168556 - protein, 1113 aa, Zea Mays
MTTSPPPAEQEQQEEEEVLVPHGPHQELPNGAQPMEVVPAEPAATVENQQIEDPPISRFTWTIENLSRVSTKKLYSEIFVVGGYKWRILIFPRGNNVEFLSMYLDVADSGVLPYGWTRYAQFSLSVVNQIHNKFTIRKETQHQFSARESDWGFTSFMPLGELYNPSRGYLVNDTCIVEAEVAVCKVVEYWSYDSKKETGYVGLKNQGATCYMNSLLQTLYHIPYFRKAVYHMPTTENDMPSGSIPLALQSLFYKLQYNDSSVSTKELTKSFGWDMHDSFMQHDVQELNRVLSEKLEDKMKGTVVEGTIQQLFEGHHMNYIECINVDFKSTRKESFYDLQLDVKGCQDVYASFDKYVEVERLEGDNKYHADKHGLQDAKKGVLFIDFPPVLQLQLKRFEYDFMRDTMVKINDRYEFPLQLDLDRDNGKYLSPDADRNVRNLYTLHSGGVHGGHYYAFIRPTLSDQWFKFDDERVTKEDAKRALEEQYGGEEELPQTNPGLNNTPFKFTKYSNAYMLVYIRESDKDKIICNVDEKDIAEHLRIRLENDREEKERRKKEKAEAHLYTIIKVARDDDLKAQIGKDIYFDLVDHDKVPSFRIQKQMTFAQFKEEVAKEFGIPTQFQRFWLWAKRQNHTYRPNRPLCPQDEAHTVGQLKELVNKAHNAELKLFLEVELGLDLKPLPLPDKTREDIFLFFKLYEPEKEQLRYVGRLFVKASGRPQDILLKLRMLAGFSQDDDIELYEEIKFEPNVMCEYIDNRLLFRSCQLEDGDIICFQKPSKPDSADRYRFPDVPSFLTYIRNRQVVHFRSLEKPKDDEFCLEMSKIFTYDQVVEKVAEKLGVDDPSKIRLTSHNCYSQQPKPQPIKYRGVERLLDMLIHYNQTSDILYYEVLDIPLPELQALKTLKVTYHHATKDEVSVHSIRLPKNSTVGDVLNDIKTKVELSHTNAELRLLEVFYHKIYKVFAPNEKIENINDQYWTLRAEEVPEEEKNLGPFDRLIHVYHFTKDTQNQTQVQNFGEPFFMVIREDETLSSIKERIQKKLKVPDEDFSKWKFAYISLGRPDYFEDSDTVALKFQRNMYGAWEQYLGLEHPDTAPRKAHTANQNRHSFERPVKIYN

SEQ ID NO: 168557 - protein, 818 aa, Zea Mays
MNYIEYLQLDVKGCQDVYASFDKYVEVERLEGDNKYHADKHGLQVLEPSEASMDHNGRQHAHRYWMSSIPCRCVKDAKKGVLFIDFPPVLQLQLKRFEYDFMRDTMVKINDRYEFPLQLDLDRDNGKYLSPDADRNVRNLYTLHSVLVHSGGVHGGHYYAFIRPTLSDQWFKFDDERVTKEDAKRALEEQYGGEEELPQTNPGLNNTPFKFTKYSNAYMLVYIRESDKDKIICNVDEKDIAEHLRIRLENDREEKERRKKEKAEAHLYTIIKVARDDDLKAQIGKDIYFDLVDHDKVPSFRIQKQMTFAQFKEEVAKEFGIPTQFQRFWLWAKRQNHTYRPNRPLCPQDEAHTVGQLKELVNKAHNAELKLFLEVELGLDLKPLPLPDKTREDIFLFFKLYEPEKEQLRYVGRLFVKASGRPQDILLKLRMLAGFSQDDDIELYEEIKFEPNVMCEYIDNRLLFRSCQLEDGDIICFQKPSKPDSADRYRFPDVPSFLTYIRNRQVVHFRSLEKPKDDEFCLEMSKIFTYDQVVEKVAEKLGVDDPSKIRLTSHNCYSQQPKPQPIKYRGVERLLDMLIHYNQTSDILYYEVLDIPLPELQALKTLKVTYHHATKDEVSVHSIRLPKNSTVGDVLNDIKTKVELSHTNAELRLLEVFYHKIYKVFAPNEKIENINDQYWTLRAEEVPEEEKNLGPFDRLIHVYHFTKDTQNQTQVQNFGEPFFMVIREDETLSSIKERIQKKLKVPDEDFSKWKFAYISLGRPDYFEDSDTVALKFQRNMYGAWEQYLGLEHPDTAPRKAHTANQNRHSFERPVKIYN

SEQ ID NO: 168558 - protein, 706 aa, Zea Mays
MNFHSNWILIEIMENIYLLMLTGMCVIFIPFTGVLVHSGGVHGGHYYAFIRPTLSDQWFKFDDERVTKEDAKRALEEQYGGEEELPQTNPGLNNTPFKFTKYSNAYMLVYIRESDKDKIICNVDEKDIAEHLRIRLENDREEKERRKKEKAEAHLYTIIKVARDDDLKAQIGKDIYFDLVDHDKVPSFRIQKQMTFAQFKEEVAKEFGIPTQFQRFWLWAKRQNHTYRPNRPLCPQDEAHTVGQLKELVNKAHNAELKLFLEVELGLDLKPLPLPDKTREDIFLFFKLYEPEKEQLRYVGRLFVKASGRPQDILLKLRMLAGFSQDDDIELYEEIKFEPNVMCEYIDNRLLFRSCQLEDGDIICFQKPSKPDSADRYRFPDVPSFLTYIRNRQVVHFRSLEKPKDDEFCLEMSKIFTYDQVVEKVAEKLGVDDPSKIRLTSHNCYSQQPKPQPIKYRGVERLLDMLIHYNQTSDILYYEVLDIPLPELQALKTLKVTYHHATKDEVSVHSIRLPKNSTVGDVLNDIKTKVELSHTNAELRLLEVFYHKIYKVFAPNEKIENINDQYWTLRAEEVPEEEKNLGPFDRLIHVYHFTKDTQNQTQVQNFGEPFFMVIREDETLSSIKERIQKKLKVPDEDFSKWKFAYISLGRPDYFEDSDTVALKFQRNMYGAWEQYLGLEHPDTAPRKAHTANQNRHSFERPVKIYN

SEQ ID NO: 168559 - protein, 991 aa, Zea Mays
MTTSPPPAEQEQQEEEEVLVPHGPHQELPNGAQPMEVVPAEPAATVENQQIEDPPISRFTWTIENLSRVSTKKLYSEIFVVGGYKWRILIFPRGNNVEFLSMYLDVADSGVLPYGWTRYAQFSLSVVNQIHNKFTIRKETQHQFSARESDWGFTSFMPLGELYNPSRGYLVNDTCIVEAEVAVCKVVEYWSYDSKKETGYVGLKNQGATCYMNSLLQTLYHIPYFRKAVYHMPTTENDMPSGSIPLALQSLFYKLQYNDSSVSTKELTKSFGWDMHDSFMQHDVQELNRVLSEKLEDKMKGTVVEGTIQQLFEGHHMNYIECINVDFKSTRKESFYDLQLDVKGCQDVYASFDKYVEVERLEGDNKYHADKHGLQVLEPSEASMDHNGRQHAHRYWMSSIPCRCVKDAKKGVLFIDFPPVLQLQLKRFEYDFMRDTMVKINDRYEFPLQLDLDRDNGKYLSPDADRNVRNLYTLHSGGVHGGHYYAFIRPTLSDQWFKFDDERVTKEDAKRALEEQYGGEEELPQTNPGLNNTPFKFTKYSNAYMLVYIRESDKDKIICNVDEKDIAEHLRIRLENDREEKERRKKEKAEAHLYTIIKVARDDDLKAQIGKDIYFDLVDHDKVPSFRIQKQMTFAQFKEEVAKEFGIPTQFQRFWLWAKRQNHTYRPNRPLCPQDEAHTVGQLKELVNKAHNAELKLFLEVELGLDLKPLPLPDKTREDIFLFFKLYEPEKEQLRYVGRLFVKASGRPQDILLKLRMLAGFSQDDDIELYEEIKFEPNVMCEYIDNRLLFRSCQLEDGDIICFQKPSKPDSADRYRFPDVPSFLTYIRNRQVVHFRSLEKPKDDEFCLEMSKIFTYDQVVEKVAEKLGVDDPSKIRLTSHNCYSQQPKPQPIKYRGVERLLDMLIHYNQTSDILYYEVLDIPLPELQALKTLKVTYHHATKDEVSVHSIRLPKNSTVGDVLNDIKTKVELSHTNAELRLLEVFYHKIYKFL

SEQ ID NO: 168560 - protein, 713 aa, Zea Mays
MRDTMVKINDRYEFPLQLDLDRDNGKYLSPDADRNVRNLYTLHSSGGVHGGHYYAFIRPTLSDQWFKFDDERVTKEDAKRALEEQYGGEEELPQTNPGLNNTPFKFTKYSNAYMLVYIRESDKDKIICNVDEKDIAEHLRIRLENDREEKERRKKEKAEAHLYTIIKVARDDDLKAQIGKDIYFDLVDHDKVPSFRIQKQMTFAQFKEEVAKEFGIPTQFQRFWLWAKRQNHTYRPNRPLCPQDEAHTVGQLKELVNKAHNAELKLFLEVELGLDLKPLPLPDKTREDIFLFFKLYEPEKEQLRYVGRLFVKASGRPQDILLKLRMLAGFSQDDDIELYEEIKFEPNVMCEYIDNRLLFRSCQLEDGDIICFQKPSKPDSADRYRFPDVPSFLTYIRNRQVVHFRSLEKPKDDEFCLEMSKIFTYDQVVEKVAEKLGVDDPSKIRLTSHNCYSQQPKPQPIKYRGVERLLDMLIHYNQTSDILYYEVLDIPLPELQALKTLKVTYHHATKDEVSVHSIRLPKNSTVGDVLNDIKTKVELSHTNAELRLLEVFYHKIYKVFAPNEKIENINDQYWTLRAEEVPEEEKNLGPFDRLIHVYHFTKDTQNQTQVQNFGEPFFMVIREDETLSSIKERIQKKLKVPDEDFSKWKFAYISLGRPDYFEDSDTVALKFQRNMYGAWEQYLGLEHPDTAPRKAHTANQNRHSFERPVKIYN

SEQ ID NO: 168561 - protein, 1149 aa, Zea Mays
MTTSPPPAEQEQQEEEEVLVPHGPHQELPNGAQPMEVVPAEPAATVENQQIEDPPISRFTWTIENLSRVSTKKLYSEIFVVGGYKWRILIFPRGNNVEFLSMYLDVADSGVLPYGWTRYAQFSLSVVNQIHNKFTIRKETQHQFSARESDWGFTSFMPLGELYNPSRGYLVNDTCIVEAEVAVCKVVEYWSYDSKKETGYVGLKNQGATCYMNSLLQTLYHIPYFRKAVYHMPTTENDMPSGSIPLALQSLFYKLQYNDSSVSTKELTKSFGWDMHDSFMQHDVQELNRVLSEKLEDKMKGTVVEGTIQQLFEGHHMNYIECINVDFKSTRKESFYDLQLDVKGCQDVYASFDKYVEVERLEGDNKYHADKHGLQVLEPSEASMDHNGRQHAHRYWMSSIPCRCVKDAKKGVLFIDFPPVLQLQLKRFEYDFMRDTMVKINDRYEFPLQLDLDRDNGKYLSPDADRNVRNLYTLHSVLVHSGGVHGGHYYAFIRPTLSDQWFKFDDERVTKEDAKRALEEQYGGEEELPQTNPGLNNTPFKFTKYSNAYMLVYIRESDKDKIICNVDEKDIAEHLRIRLENDREEKERRKKEKAEAHLYTIIKVARDDDLKAQIGKDIYFDLVDHDKVPSFRIQKQMTFAQFKEEVAKEFGIPTQFQRFWLWAKRQNHTYRPNRPLCPQDEAHTVGQLKELVNKAHNAELKLFLEVELGLDLKPLPLPDKTREDIFLFFKLYEPEKEQLRYVGRLFVKASGRPQDILLKLRMLAGFSQDDDIELYEEIKFEPNVMCEYIDNRLLFRSCQLEDGDIICFQKPSKPDSADRYRFPDVPSFLTYIRNRQVVHFRSLEKPKDDEFCLEMSKIFTYDQVVEKVAEKLGVDDPSKIRLTSHNCYSQQPKPQPIKYRGVERLLDMLIHYNQTSDILYYEVLDIPLPELQALKTLKVTYHHATKDEVSVHSIRLPKNSTVGDVLNDIKTKVELSHTNAELRLLEVFYHKIYKVFAPNEKIENINDQYWTLRAEEVPEEEKNLGPFDRLIHVYHFTKDTQNQTQVQNFGEPFFMVIREDETLSSIKERIQKKLKVPDEDFSKWKFAYISLGRPDYFEDSDTVALKFQRNMYGAWEQYLGLEHPDTAPRKAHTANQNRHSFERPVKIYN

SEQ ID NO: 168562 - protein, 796 aa, Zea Mays
MWISNQQERNPSMANLQLDVKGCQDVYASFDKYVEVERLEGDNKYHADKHGLQDAKKGVLFIDFPPVLQLQLKRFEYDFMRDTMVKINDRYEFPLQLDLDRDNGKYLSPDADRNVRNLYTLHSVLVHSGGVHGGHYYAFIRPTLSDQWFKFDDERVTKEDAKRALEEQYGGEEELPQTNPGLNNTPFKFTKYSNAYMLVYIRESDKDKIICNVDEKDIAEHLRIRLENDREEKERRKKEKAEAHLYTIIKVARDDDLKAQIGKDIYFDLVDHDKVPSFRIQKQMTFAQFKEEVAKEFGIPTQFQRFWLWAKRQNHTYRPNRPLCPQDEAHTVGQLKELVNKAHNAELKLFLEVELGLDLKPLPLPDKTREDIFLFFKLYEPEKEQLRYVGRLFVKASGRPQDILLKLRMLAGFSQDDDIELYEEIKFEPNVMCEYIDNRLLFRSCQLEDGDIICFQKPSKPDSADRYRFPDVPSFLTYIRNRQVVHFRSLEKPKDDEFCLEMSKIFTYDQVVEKVAEKLGVDDPSKIRLTSHNCYSQQPKPQPIKYRGVERLLDMLIHYNQTSDILYYEVLDIPLPELQALKTLKVTYHHATKDEVSVHSIRLPKNSTVGDVLNDIKTKVELSHTNAELRLLEVFYHKIYKVFAPNEKIENINDQYWTLRAEEVPEEEKNLGPFDRLIHVYHFTKDTQNQTQVQNFGEPFFMVIREDETLSSIKERIQKKLKVPDEDFSKWKFAYISLGRPDYFEDSDTVALKFQRNMYGAWEQYLGLEHPDTAPRKAHTANQNRHSFERPVKIYN

SEQ ID NO: 168563 - protein, 802 aa, Zea Mays
MNYIECINVDFKSTRKESFYDLQLDVKGCQDVYASFDKYVEVERLEGDNKYHADKHGLQDAKKGVLFIDFPPVLQLQLKRFEYDFMRDTMVKINDRYEFPLQLDLDRDNGKYLSPDADRNVRNLYTLHSVLVHSGGVHGGHYYAFIRPTLSDQWFKFDDERVTKEDAKRALEEQYGGEEELPQTNPGLNNTPFKFTKYSNAYMLVYIRESDKDKIICNVDEKDIAEHLRIRLENDREEKERRKKEKAEAHLYTIIKVARDDDLKAQIGKDIYFDLVDHDKVPSFRIQKQMTFAQFKEEVAKEFGIPTQFQRFWLWAKRQNHTYRPNRPLCPQDEAHTVGQLKELVNKAHNAELKLFLEVELGLDLKPLPLPDKTREDIFLFFKLYEPEKEQLRYVGRLFVKASGRPQDILLKLRMLAGFSQDDDIELYEEIKFEPNVMCEYIDNRLLFRSCQLEDGDIICFQKPSKPDSADRYRFPDVPSFLTYIRNRQVVHFRSLEKPKDDEFCLEMSKIFTYDQVVEKVAEKLGVDDPSKIRLTSHNCYSQQPKPQPIKYRGVERLLDMLIHYNQTSDILYYEVLDIPLPELQALKTLKVTYHHATKDEVSVHSIRLPKNSTVGDVLNDIKTKVELSHTNAELRLLEVFYHKIYKVFAPNEKIENINDQYWTLRAEEVPEEEKNLGPFDRLIHVYHFTKDTQNQTQVQNFGEPFFMVIREDETLSSIKERIQKKLKVPDEDFSKWKFAYISLGRPDYFEDSDTVALKFQRNMYGAWEQYLGLEHPDTAPRKAHTANQNRHSFERPVKIYN

SEQ ID NO: 168564 - protein, 833 aa, Zea Mays
MPTTENDMPSGSIPLALQSLFYKLQYNDSSVSTKELTKSFGWDMHDSFMQHDVQELNRVLSEKLEDKMKGTVVEGTIQQLFEGHHMNYIEYLQLDVKGCQDVYASFDKYVEVERLEGDNKYHADKHGLQDAKKGVLFIDFPPVLQLQLKRFEYDFMRDTMVKINDRYEFPLQLDLDRDNGKYLSPDADRNVRNLYTLHSVLVHSGGVHGGHYYAFIRPTLSDQWFKFDDERVTKEDAKRALEEQYGGEEELPQTNPGLNNTPFKFTKYSNAYMLVYIRESDKDKIICNVDEKDIAEHLRIRLENDREEKERRKKEKAEAHLYTIIKVARDDDLKAQIGKDIYFDLVDHDKVPSFRIQKQMTFAQFKEEVAKEFGIPTQFQRFWLWAKRQNHTYRPNRPLCPQDEAHTVGQLKELVNKAHNAELKLFLEVELGLDLKPLPLPDKTREDIFLFFKLYEPEKEQLRYVGRLFVKASGRPQDILLKLRMLAGFSQDDDIELYEEIKFEPNVMCEYIDNRLLFRSCQLEDGDIICFQKPSKPDSADRYRFPDVPSFLTYIRNRQVVHFRSLEKPKDDEFCLEMSKIFTYDQVVEKVAEKLGVDDPSKIRLTSHNCYSQQPKPQPIKYRGVERLLDMLIHYNQTSDILYYEVLDIPLPELQALKTLKVTYHHATKDEVSVHSIRLPKNSTVGDVLNDIKTKVELSHTNAELRLLEVFYHKIYKVFAPNEKIENINDQYWTLRAEEVPEEEKNLGPFDRLIHVYHFTKDTQNQTWKFAYISLGRPDYFEDSDTVALKFQRNMYGAWEQYLGLEHPDTAPRKAHTANQNRHSFERPVKIYN

SEQ ID NO: 168565 - protein, 1117 aa, Zea Mays
MTTSPPPAEEQQEEEEVLVPHGPHQELPNGAQPMEVVPAEPAATVENQQIEDPPISRFTWTIENLSRVSTKKLYSEIFVVGGYKWRILIFPRGNNVEFLSMYLDVADSGVLPYGWTRYAQFSLSVVNQIHNKFTIRKETQHQFSARESDWGFTSFMPLGELYNPSRGYLVNDTCIVEAEVAVCKVVEYWSYDSKKETGYVGLKNQGATCYMNSLLQTLYHIPYFRKAVYHMPTTENDMPSGSIPLALQSLFYKLQYNDSSVSTKELTKSFGWDMHDSFMQHDVQELNRVLSEKLEDKMKGTVVEGTIQQLFEGHHMNYIECINVDFKSTRKESFYDLQLDVKGCQDVYASFDKYVEVERLEGDNKYHADKHGLQDAKKGVLFIDFPPVLQLQLKRFEYDFMRDTMVKINDRYEFPLQLDLDRDNGKYLSPDADRNVRNLYTLHSVLVHSGGVHGGHYYAFIRPTLSDQWFKFDDERVTKEDAKRALEEQYGGEEELPQTNPGLNNTPFKFTKYSNAYMLVYIRESDKDKIICNVDEKDIAEHLRIRLENDREEKERRKKEKAEAHLYTIIKVARDDDLKAQIGKDIYFDLVDHDKVPSFRIQKQMTFAQFKEEVAKEFGIPTQFQRFWLWAKRQNHTYRPNRPLCPQDEAHTVGQLKELVNKAHNAELKLFLEVELGLDLKPLPLPDKTREDIFLFFKLYEPEKEQLRYVGRLFVKASGRPQDILLKLRMLAGFSQDDDIELYEEIKFEPNVMCEYIDNRLLFRSCQLEDGDIICFQKPSKPDSADRYRFPDVPSFLTYIRNRQVVHFRSLEKPKDDEFCLEMSKIFTYDQVVEKVAEKLGVDDPSKIRLTSHNCYSQQPKPQPIKYRGVERLLDMLIHYNQTSDILYYEVLDIPLPELQALKTLKVTYHHATKDEVSVHSIRLPKNSTVGDVLNDIKTKVELSHTNAELRLLEVFYHKIYKVFAPNEKIENINDQYWTLRAEEVPEEEKNLGPFDRLIHVYHFTKDTQNQTQVQNFGEPFFMVIREDETLSSIKERIQKKLKVPDEDFSKWKFAYISLGRPDYFEDSDTVALKFQRNMYGAWEQYLGLEHPDTAPRKAHTANQNRHSFERPVKIYN

SEQ ID NO: 168566 - protein, 552 aa, Zea Mays
MTTSPPPAEQEQQEEEEVLVPHGPHQELPNGAQPMEVVPAEPAATVENQQIEDPPISRFTWTIENLSRVSTKKLYSEIFVVGGYKWRILIFPRGNNVEFLSMYLDVADSGVLPYGWTRYAQFSLSVVNQIHNKFTIRKETQHQFSARESDWGFTSFMPLGELYNPSRGYLVNDTCIVEAEVAVCKVVEYWSYDSKKETGYVGLKNQGATCYMNSLLQTLYHIPYFRKAVYHMPTTENDMPSGSIPLALQSLFYKLQYNDSSVSTKELTKSFGWDMHDSFMQHDVQELNRVLSEKLEDKMKGTVVEGTIQQLFEGHHMNYIECINVDFKSTRKESFYDLQLDVKGCQDVYASFDKYVEVERLEGDNKYHADKHGLQDAKKGVLFIDFPPVLQLQLKRFEYDFMRDTMVKINDRYEFPLQLDLDRDNGKYLSPDADRNVRNLYTLHSVLVHSGGVHGGHYYAFIRPTLSDQWFKFDDERVTKEDAKRALEEQYGGEEELPQTNPGLNNTPFKFTKYSNAYMLVYIRESDKDKIICNVDEKDIAEHLRVICPPKT

SEQ ID NO: 168567 - protein, 677 aa, Zea Mays
MTTSPPPAEQEQQEEEEVLVPHGPHQELPNGAQPMEVVPAEPAATVENQQIEDPPISRFTWTIENLSRVSTKKLYSEIFVVGGYKWRILIFPRGNNVEFLSMYLDVADSGVLPYGWTRYAQFSLSVVNQIHNKFTIRKETQHQFSARESDWGFTSFMPLGELYNPSRGYLVNDTCIVEAEVAVCKVVEYWSYDSKKETGYVGLKNQGATCYMNSLLQTLYHIPYFRKIQLTTDISCQAVYHMPTTENDMPSGSIPLALQSLFYKLQYNDSSVSTKELTKSFGWDMHDSFMQHDVQELNRVLSEKLEDKMKGTVVEGTIQQLFEGHHMNYIEYLQLDVKGCQDVYASFDKYVEVERLEGDNKYHADKHGLQDAKKGVLFIDFPPVLQLQLKRFEYDFMRDTMVKINDRYEFPLQLDLDRDNGKYLSPDADRNVRNLYTLHSVLVHSGGVHGGHYYAFIRPTLSDQWFKFDDERVTKEDAKRALEEQYGGEEELPQTNPGLNNTPFKFTKYSNAYMLVYIRESDKDKIICNVDEKDIAEHLRIRLENDREEKERRKKEKAEAHLYTIIKVARDDDLKAQIGKDIYFDLVDHDKVPSFRIQKQMTFAQFKEEVAKEFGIPTQFQRFWLWAKRQNHTYRPNRPLCPQDEAHTVGQLKELVNKAHNAELKLFLEVELGLVCW

SEQ ID NO: 168568 - protein, 388 aa, Zea Mays
MLAGFSQDDDIELYEEIKFEPNVMCEYIDNRLLFRSCQLEDGDIICFQKPSKPDSADRYRFPDVPSFLTYIRNRQVVHFRSLEKPKDDEFCLEMSKIFTYDQVVEKVAEKLGVDDPSKIRLTSHNCYSQQPKPQPIKYRGVERLLDMLIHYNQTSDILYYEVLDIPLPELQALKTLKVTYHHATKDEVSVHSIRLPKNSTVGDVLNDIKTKVELSHTNAELRLLEVFYHKIYKVFAPNEKIENINDQYWTLRAEEVPEEEKNLGPFDRLIHVYHFTKDTQNQTQVQNFGEPFFMVIREDETLSSIKERIQKKLKVPDEDFSKWKFAYISLGRPDYFEDSDTVALKFQRNMYGAWEQYLGLEHPDTAPRKAHTANQNRHSFERPVKIYN

SEQ ID NO: 168569 - protein, 239 aa, Zea Mays
MKAIVKLQQQVRRFFNLSVLTVVGDGTSTLFWLDKWLNGKAIQDIAPDVVCLVDSRVSSTRTVAQAMDNWQRVSDIGSHLYLIGLQQYLKLWDALGEVTLSQEADRLVWMHTAFGQFSSRSCYRAFFMGFISFEPWKRLWKTWAPPKCKFFLWLAIRNKCWTADRLQMRGLQYPVCCPLCDQEQETVQHILCTCSFTRQFWHLILSSIGLGDLTPFVVEQSFAEWWGKASKKVQRCKRK

SEQ ID NO: 168570 - protein, 285 aa, Zea Mays
MRDNVINLRAVLPNGDVVKTGSRARKSAAGYDLARLIIGSEGTLGVITEVTLRLQKLPSHSVVAMCNFKTIKDAADVAIATMLSGIQVSRVELLDEVQIKAINMANGKNLPEVPTLMFEFIGTEAYALEQTLLVQKIATEHHGSDFVFVEEPDAKAELWKIRKEALWAGFAMKPDHEAMITDVCVPLSRLAECISTSKRLLDASPLTCQEDQRKEAERLNHFMVHTALSMEGTCTGEHGVGTGKMKYLEKELGIESLRTMKRIKAALDPNNIMNPGKLIPPHVCI

SEQ ID NO: 168571 - protein, 301 aa, Zea Mays
MCATRCSGSLAVRYGTMRDNVINLRAVLPNGDVVKTGSRARKSAAGYDLARLIIGSEGTLGVITEVTLRLQKLPSHSVVAMCNFKTIKDAADVAIATMLSGIQVSRVELLDEVQIKAINMANGKNLPEVPTLMFEFIGTEAYALEQTLLVQKIATEHHGSDFVFVEEPDAKAELWKIRKEALWAGFAMKPDHEAMITDVCVPLSRLAECISTSKRLLDASPLTCQEDQRKEAERLNHFMVHTALSMEGTCTGEHGVGTGKMKYLEKELGIESLRTMKRIKAALDPNNIMNPGKLIPPHVCI

SEQ ID NO: 168572 - protein, 535 aa, Zea Mays
MATSLLRLSRHRRALLAISSVRLALSTQPHVPSPSPSPTPSSARRLPHFLSFLAAAAAAAAGGATVALCDSGLDHRVGGKDSADLVVRGERKFVPQEFIDELASFLGDNITLDYEERSFHGTPQNSFHKAVNLPDVVVFPSSQDEVQRIVMACNKHKVPIVPYGGATSIEGHTLAPHGGVCIDMTLMKKIKSLNVEDMDVVVEPGVGWIELNEYLKPYGLFFPLDPGPGATIGGMCATRCSGSLAVRYGTMRDNVINLRAVLPNGDVVKTGSRARKSAAGYDLARLIIGSEGTLGVITEVTLRLQKLPSHSVVAMCNFKTIKDAADVAIATMLSGIQVSRVELLDEVQIKAINMANGKNLPEVPTLMFEFIGTEAYALEQTLLVQKIATEHHGSDFVFVEEPDAKAELWKIRKEALWAGFAMKPDHEAMITDVCVPLSRLAECISTSKRLLDASPLTCQEDQRKEAERLNHFMVHTALSMEGTCTGEHGVGTGKMKYLEKELGIESLRTMKRIKAALDPNNIMNPGKLIPPHVCI

SEQ ID NO: 168573 - protein, 405 aa, Zea Mays
MACNKHKVPIVPYGGATSIEGHTLAPHGGVCIDMTLMKKIKSLNVEDMDVVVEPGVGWIELNEYLKPYGLFFPLDPGPGATIGGMCATRCSGSLAVRYGTMRDNVINLRAVLPNGDVVKTGSRARKSAAGYDLARLIIGSEGTLGVITEVTLRLQKLPSHSVVAMCNFKTIKDAADVAIATMLSGIQVSRVELLDEVQIKAINMANGKNLPEVPTLMFEFIGTEAYALEQTLLVQKIATEHHGSDFVFVEEPDAKAELWKIRKEALWAGFAMKPDHEAMITDVCVPLSRLAECISTSKRLLDASPLTCLVIAHAGDGNFHTIILFDPSQEDQRKEAERLNHFMVHTALSMEGTCTGEHGVGTGKMKYLEKELGIESLRTMKRIKAALDPNNIMNPGKLIPPHVCI

SEQ ID NO: 168574 - protein, 374 aa, Zea Mays
MEPKVEGSSSLARSHTLCTLVSRVEEPTGCPAMSSPAAGTAAEPHVVEDCLGFVQLLSDGTVRRSTDYSMLRPIGRVPSDTDLPVQWKDVVYEDTRGLRLRMYRPTGAAAGETKLPVLVYFHGGGFCLLSFEVASFHAGALRLAAELPALVLSADYRLAPEHRLPAALDDAESAFAWLRAQAAPPSAAGAESDPWLAESADFARVFVAGDSAGGNISHHVAVRHASSGGGLSLAPLRLAGCVMLWPYFGGEEPTPSEAAFPADQPMGTALFDQMWRLALPAGATKDHPFANPFAPGSVPLRDLGAAFPPLLVVDPDQDPLHDRVVDYVARLKAAGKAVELVVFAGQGHGFFAMEPCGEAADDLIRVIRRFVYGA

SEQ ID NO: 168575 - protein, 283 aa, Zea Mays
MGNTCIGPSAPSDRHSFFNTVSLAVLWRPPAAADRAEPSPTAEPSSSTPCSPPSRAPNPVTISDSEHPPHSTSTALGPAAPPNPNGKPKPKPKVKRVQSAGLLAGSVLKRDSERLKDVYTLGKKLGQGQFGTTYQCVEKATGKHFACKSIAKRKLVTDEDVEDVRREIQIMHHLAGHPNVVSIVGAYEDAVAVHLVMELCAGGELFDRIIQRGHYSEKAAAQLARVIIGVVEACHSLGVMHRDLKPENFLFVNQKEDAPLKAIDFGLSIFFKPALICFAGRGE

SEQ ID NO: 168576 - protein, 473 aa, Zea Mays
MGNTCIGPSAPSDRHSFFNTVSLAVLWRPPAAADRAEPSPTAEPSSSTPCSPPSRAPNPVTISDSEHPPHSTSTALGPAAPPNPNGKPKPKPKVKRVQSAGLLAGSVLKRDSERLKDVYTLGKKLGQGQFGTTYQCVEKATGKHFACKSIAKRKLVTDEDVEDVRREIQIMHHLAGHPNVVSIVGAYEDAVAVHLVMELCAGGELFDRIIQRGHYSEKAAAQLARVIIGVVEACHSLGVMHRDLKPENFLFVNQKEDAPLKAIDFGLSIFFKPGEIFSDVVGSPYYVAPEVLKKRYGCEVDVWSAGVIIYILLSGVPPFWAESEQGIFKQVLKGGLDFSSDPWPSISESAKDLVRKMLNRDPRKRLTAHDALCHPWVCVDGVAPDKPLDSAVLTRLKQFSAMNKLKKMALRVIAENLSEDEIAGLKEMFKMLDTDNSGQITLEELKIGLKRVGANLKDSEITTLMEAFQALLE

SEQ ID NO: 168577 - protein, 286 aa, Zea Mays
MGNTCIGPSAPSDRHSFFNTVSLAVLWRPPAAADRAEPSPTAEPSSSTPCSPPSRAPNPVTISDSEHPPHSTSTALGPAAPPNPNGKPKPKPKVKRVQSAGLLAGSVLKRDSERLKDVYTLGKKLGQGQFGTTYQCVEKATGKHFACKSIAKRKLVTDEDVEDVRREIQIMHHLAGHPNVVSIVGAYEDAVAVHLVMELCAGGELFDRIIQRGHYSEKAAAQLARVIIGVVEACHSLGVMHRDLKPENFLFVNQKEDAPLKAIDFGLSIFFKPAFRRVQRIWLGRC

SEQ ID NO: 168578 - protein, 225 aa, Zea Mays
MLNRDPRKRLTAHDALCHPWVCVDGVAPDKPLDSAVLTRLKQFSAMNKLKKMALRVIAENLSEDEIAGLKEMFKMLDTDNSGQITLEELKIGLKRVGANLKDSEITTLMEAADIDNSGSIDYGEFLAATLHLNKVEREDNLFAAFSYFDKDGSGYITHDELQKACEEFGIEDAHLEDIIHDVDQDNDGRIDYNEFVTMMQKGNNPLGKKGHCQMSFGLREALKLG

SEQ ID NO: 168579 - protein, 278 aa, Zea Mays
MTPAASASRPSPTVTPPRCQRSSQCPMCWQAISMKDPTSQELLEAVEEERNDVQENHARTTTVFRHPLLGDFEVPVDADDAEIEERIMQHLAAAAAIRRSHRHARREGRRSSRAAAAHGHGHPQPQTQVLFFPSAGEATPGGSGSPSPHPRQEHAASSVVSPPPLPAVASAEGTDADSTASVGGAVGPDDSVSRSQSSPVNHDEAGPSADAQSFSDTIKSRLQSVSTKYISLPVSYISTPPKNTRCMPLSNSKPSLDLHSHTFIVLKSQRWMAGTRTP

SEQ ID NO: 168580 - protein, 394 aa, Zea Mays
MDAAAAAAAQMERHSSAAAQMERHSSAAAFVEGGVQDGCDDTCSICLETFSDSDPSAVTSCKHEFHLQCILEWCQRSSQCPMCWQAISMKDPTSQELLEAVEEERNDVQENHARTTTVFRHPLLGDFEVPVDADDAEIEERIMQHLAAAAAIRRSHRHARREGRRSSRAAAAHGHGHPQPQTQVLFFPSAGEATPGGSGSPSPHPRQEHAASSVVSPPPLPAVASAEGTDADSTASVGGAVGPDDRSQSSPVNHDEAGPSADAQSFSDTIKSRLQSVSTKYKDSITKSTRGWKERWFAQSSAMSNLGSEMRREVGAGIAAVSRMIEKQLETRPDGSGTAPSPATASSPAHAHPGSDASSQGQGAAVPATPAAALNNATPAAAAALNDASSSSTA

SEQ ID NO: 168581 - protein, 826 aa, Zea Mays
MRQQLALGMEAQSIVSDGWRARKNDDNNYGNKDDSGDDCDGDGSSDDGDGSSDDDVTDQICALCDDGGHLLSCDGPCKRSFHPTKKDGRESKCESLHYTSAEVKRIGTYLCANCKNKQHQCFRCGELEPSHGPNAKVFQCNQASCGYFYHPKCIAQLLDPNATDGELERRIMSGMSFPCPIHWCFKCGHMENKAQRALQLAVCRRCPRAYHRECLPRDLSFGTKDKDGNQRAWKLSDTIFIYCLDHEIDKDTGTTSRNHIKFPATPEYTKTKGLGNSKGRMTGKRRKNKRRKNTDQSTKPTDLPNRLCGAESEQADNVGAKSTLPQIVVEPHCAAKHLKGDPQIAKQGVAARQNGAETMKGHENQFGISFCVASTETEKRVTCLAQRGTCLGTQYDGPSTKGMYDCSVQDTPMDDDVELDNVACIIAVDKYVNGRGKTQEDYTRKEAAQRKDSSENQGQNDALELDNLRMEMQADERPLEPGNKRDRKWQKNVYGLGSASGQKETLSRRENPRSDRGMVHSNDSKTIYYRKGGTEVDNVDDHPLEKQDHQDTSSDGSKKRSRPVDNASGGNRPYLDENKKRNLREDGRYAHYEDWRSERNTAADTSGYKAQSEEKPVWTNTRTGSREHSLDRQRIECGDSYRGTYNNRQRHEWLHPHASGNSSRIGWDDRRQWSSSRSPFPSAEFGGDRSCSRAHPRGSKYRTGGRHDHPQYLGLGTPQHGTSRPHHTMGWDRDTFHDHQHGRRPPHHTMGWDRAPFRDHQHGEYDDSRYGEYDATDNGPDSAHRPYTAAGVAGRSAPSYQLAGGYGEGSRAWRPVTDKYAPWPLP

SEQ ID NO: 168582 - protein, 224 aa, Zea Mays
MRGDPDLRRHELRFVHDHESSSAPAGGASSAAMAAHPELLLLDRYQYHHHGRFDLTVGQSMVLNNDSAIAGHQIYGATAYYHPFYGAQALHGRVLLPPAIAADEPVYVNAKQFNGILRRRLARAKRAAATDRRVSGSRKPYLHESRHLHALRRARGTGGRFLNTRSRDGDPEAGSAGKAARLQEEDRQADAVFLSSLASMAGGDATRWPSAPSRGRGCCDLLKA

SEQ ID NO: 168583 - protein, 85 aa, Zea Mays
MAMRVQYLAEGNSDLASKQSLLKDGIFLLESVNAEAGHCVWRLADVKENRAEAGKGRPLNRKQRDWRLQTCFTAVKKVTLYLDAN

SEQ ID NO: 168584 - protein, 79 aa, Zea Mays
MYCICIPNMLSLISACVAHIWYTKAISSNSPITSTISNSTLQTVLSTVQNNVLHVHIQLYTICWTRPKGVLVSKWWFLF

SEQ ID NO: 168585 - protein, 893 aa, Zea Mays
MPQQAVLVGLTAGMVAAEGKAAGNKTMMQKQQASSCCSDRDQDMADLELALEAVVPVSVQRQDSLYRDATRAGGGGQQQHEGWARTLRLAFQCVGVLYGDIGTSPLYVYSSTFAGGIRDTDDLLGVLSLIIYSFLLFTIIKYVYIALRANDDGDGGTLALYSLISRHAKVSLVPNHQPEDELQTTDAAAAVLGKHGSVRRRTVQLAASHGREQRAVWVKELLETSKPVRISLFFLTIVATAMVISDACLTPAISVLSAVGGLKEKAPNLTTALRHPQGGLPVRPRLLLWLLLIGGVGVYNLLRHDVTVLRAFNPKYILDYFRRNGRDAWVSLGGVLLCFTGTEALFADLGYFSIRSIQLSFGFGLVPAVLLAYIGQAAFLRRYPEQVSNAFYQSTPESIFWPTFVLALAASVIGSQAMISCAFATISHSQALGCFPRVKVLHTSRQYRGQLYIPEVNLLLALVACVVTLASKTTAVIAEAHGICVVLVMLITTLLLTLVMLLVWRVNAACVALFFAVFAAAESVYLSSVLYRFAHGGYIPVAMSAVLVAVMVLWHYVHVKRYKYELERTVSHESVVRDLLPRCRTVPGVGLFYTDLVQGIPPVFPHLVDKIPSIHAVLLFVSVKHLPVPHVDATERFLFRQVASSSESDTAAGPRVFRCVARYGYRDLLEEASDFAGSLVERLQYYIRDVNLYGVEHQQPGAKVSYPSSRCDSMILMARQRSSVMMLRQSSAASYYSSYAAAAETQQLQLARARSTSGAGGILLHSASERAEQLARARSTGIFAEEMLTPAESFSELSRMGSIGGGGMQAVKISLEEMARIEEEQRFIEREMEKGVVYILGESEVVARPHSSLLKKLLVNYAYAFLRNNCRQGEKMLAIPKSQLLKVGMSYEI

SEQ ID NO: 168586 - protein, 897 aa, Zea Mays
MPQQAVLVGLTAGMVAAEGKAAGNKTMMQKQQASSCCSDRDQDMADLELALEAVVPVSVQRQDSLYRDATRAGGGGQQQHEGWARTLRLAFQCVGVLYGDIGTSPLYVYSSTFAGGIRDTDDLLGVLSLIIYSFLLFTIIKYVYIALRANDDGDGGTLALYSLISRHAKVSLVPNHQPEDELQTTDAAAAVLGKHGSVRRRTVQLAASHGREQRAVWVKELLETSKPVRISLFFLTIVATAMVISDACLTPAISVLSAVGGLKEKAPNLTTGTAGARPRVRTPDRVDHCGHPGASVRRAALRHPQGGLPVRPRLLLWLLLIGGVGVYNLLRHDVTVLRAFNPKYILDYFRRNGRDAWVSLGGVLLCFTGTEALFADLGYFSIRSIQLSFGFGLVPAVLLAYIGQAAFLRRYPEQVSNAFYQSTPESIFWPTFVLALAASVIGSQAMISCAFATISHSQALGCFPRVKVLHTSRQYRGQLYIPEVNLLLALVACVVTLASKTTAVIAEAHGICVVLVMLITTLLLTLVMLLVWRVNAACVALFFAVFAAAESVYLSSVLYRFAHGGYIPVAMSAVLVAVMVLWHYVHVKRYKYELERTVSHESVVRDLLPRCRTVPGVGLFYTDLVQGIPPVFPHLVDKIPSIHAVLLFVSVKHLPVPHVDATERFLFRQVASSSESDTAAGPRVFRCVARYGYRDLLEEASDFAGSLVERLQYYIRDVNLYGVEHQQPGAKVSYPSSRCDSMILMARQRSSVMMLRQSSAASYYSSYAAAAETQQLQLARARSTGIFAEEMLTPAESFSELSRMGSIGGGGMQAVKISLEEMARIEEEQRFIEREMEKGVVYILGESEVVARPHSSLLKKLLVNYAYAFLRNNCRQGEKMLAIPKSQLLKVGMSYEI

SEQ ID NO: 168587 - protein, 105 aa, Zea Mays
MPNAVQDFKLNWATQQPAPKKLPDPDFKLDLATQQERHAAVDSSSDHSIFVGDLAYNVTGYMLHHVFKARYPSVKSAKIIFDKFTGLSKCYGFVQFGDVDEQIQH

SEQ ID NO: 168588 - protein, 431 aa, Zea Mays
MADTVQYRLERMTDELDDLERRGLFTRGELADVVRKRRDFEYRLRRHSPLRQDFLDYIAYELRLDSLRNLRKRAIIRAAAEDDDDEPQHDARSSDDEGGRRKRKKDKSKKKWKKSVSDVAGVLRVLDIYRMATVRFKGDLDLWFRYLEFCRDKRHGRMKQVLAQAIRFHPKVPGLWIYAAAWEFDQNLNVAAARALMQSGLRSCPQSEDMWIEYLRMELTYLNKLKARKVALGEDVKTLQKKDNDASQWKEENKELFMPLNEQVKDPKEPGSAGDALEEKEDLFWRQGLLIIQTIYHGAVEALPSSLTLRKKFLEILNSVDLAHSDELKLEVLDDLKRDFSHSEDYWDWFARLQLSNLNSSSNSNRKDAISNKLNRSIQRCMTKLSGSYQIPKCTHCMQSFGWMLYILTEKIQSHYSRILNLMLQSSLHPY

SEQ ID NO: 168589 - protein, 381 aa, Zea Mays
MADTVQYRLERMTDELDDLERRGLFTRGELADVVRKRRDFEYRLRRHSPLRQDFLDYIAYELRLDSLRNLRKRAIIRAAAEDDDDEPQHDARSSDDEGGRRKRKKDKSKKKWKKSVSDVAGVLRVLDIYRMATVRFKGDLDLWFRYLEFCRDKRHGRMKQVLAQAIRFHPKVPGLWIYAAAWEFDQNLNVAAARALMQSGLRSCPQSEDMWIEYLRMELTYLNKLKARKVALGEDVKTLQKKDNDASQWKEENKELFMPLNEQVKDPKEPGSAGDALEEKEDLFWRQGLLIIQTIYHGAVEALPSSLTLRKKFLEILNSVDLAHSDELKLEVLDDLKRDFSHSEDYWDWFARLQLSNLNSSSNSNRKDAISNKLNRSIQGV

SEQ ID NO: 168590 - protein, 310 aa, Zea Mays
MASDGSGVVTVYGNNGAALLEPPKQPKSSTFSVKVGLAQMLRGGVIMDVVTPEQARLAEEAGACAVMALERVPADIRAQGGVARMSDPGLIRDIKRAVTIPVMAKARIGHFVEAQILEAVGVDYVDESEVLTPADDAHHINKHNFRVPFVCGCRDLGEALRRVREGAAMIRTKGEAGTGNVVEAVRHVRSVAGAVRALRGMDDDEVFAYAKRIAAPYDLVMQTKQLGRLPVVQFAAGGVATPADAALMMQLGCDGVFVGSGIFKSGDPARRARAIVQAVTHYSDPTILTDVSAGLGEAMVGINLNDPKGA

SEQ ID NO: 168591 - protein, 498 aa, Zea Mays
MAQGNGGGAPTPLPQLGARATATLYLPQRQATTASTADPTPNHPTSIEDGAGGSSSFTPTPSASPTVVGSSSDTGNKRGRKTTSDVWNDFEQLYKQVNGKKVRYAAKCHYCKSQLTAKGGTGHLHRHRIACASKADRASRPQSLLQFNGDGSVRSWDYNAATARTEMCRLIATLDLPLGFGGHPAFERYIRRSHNPRFRSVCRQTTTRDLVKFFKQRRTVLIDLLQSSVSSVALTSDIWSGNAKEDYISVVAHFVNVDWLLEKRVIGMRLIDVSHSGSNIAERVATVVEEFKLIDKVFSVTLDNASANSNAMNILAPRFSGYVGSLFLHQRCACHIINLIVKSGLKRLKPYVEDFRTAISFLNASNQRIAAYKSYCVAMDVRPRKFGLDMDVRWNSTYLMLKHVIPYKTTFSVFIQTHYQQVMGQTLLTQAHWEIGEKILTFLELFYDSTVALSGIYYPTSPLMLHHIIEIASHLSNYENDILLRDIVVPMKSKFLKY

SEQ ID NO: 168592 - protein, 655 aa, Zea Mays
MGTKRHQVFMLTSCLYRIVNFKFKDYNSALEDLSTCVKHDKKNSSAHTYLGLTLSALGEYKRAEDEHVIGLKYDESFLDCWAHLAQLYLDLAYPEKLLNCLEKAIQIDSRFAKAYHLRGILYHGMGRHRSAIKELSVALTYESSSIECLYLRASSHHAIGEYKAAIKGYDDVLDLELDSMDKFVLQCLSFYQKEMALYIASKANLEFSQFNIDDDVDPLFKEYWCKRLHPKNVAEKVYRQPPLRISLRSGRLNKQDFKFTKHQTTLLLAADSIGKKIQYNCHGFLPNQRQYRMAGLAAIEIAQKVSKAWRFLRNPKNIAKLVRKRDKLNMSQNRGGYCSTSTLAGSPTSSPNEDRVSSGISLSWQDVYNIAVKWRQISEPCDPVVWVNKLSEEFNSGFGSHTPMLLGQAKVIRYYPYYQRVLETAKTIMLDLKYVNNAEDRAIFLTDIDKLKKIEIASSCSDLYHVVGETYWVATRCDSMAFRGRRLEGTRITTQNIGKTGFDFAIRTPCTPSRWEEYDEEMTAAWEAICEAYCNDTNPTRDPGVLDAVKDAILRMTYYWYNFMPLSRGSAVVGYVVLLGLFLAANMDITASIPPGVQVDWEAILSPDPGTFVDAVKPWLYPSTKISRCLKDYTDVSCAFSTTGSVVAALTSVDP

SEQ ID NO: 168593 - protein, 648 aa, Zea Mays
MGSDRAELARLCSARNWSKAIRLLDSILARSPSSIHDLCNRAFCYSQLELHKHVVKDCDRALLLDPALLQAYILKGKALSSLDKKEDALAAWKQGYEIAVRDTTDLKQLLDLEELVSSVKICGTTQSADHVMDASTCDTKVVISEDRVADTSFAATTMADTKTVVCEEAIGSSKVSSNGDTKLTNYNKKADHNKVSSSSVKDITGTQAPKKAPKLDKKNKAKAVKEINGRAEGVTGRASTDESETISLDQALFATKISKSSKSISLDFRLSRGIAQVNEGRYDQAISIFDQILRETPTYPEALIGRGTAYAFQRELDSAISDFTKAIQSSPSAGEAWKRRGQARAALGEFKEAIEDLTKALEFEPNSPDILHERGIVNFKFKDYNSALEDLSTCVKHDKKNSSAHTYLGLTLSALGEYKRAEDEHVIGLKYDESFLDCWAHLAQLYLDLAYPEKLLNCLEKAIQIDSRFAKAYHLRGILYHGMGRHRSAIKELSVALTYESSSIECLYLRASSHHAIGEYKAAIKGYDDVLDLELDSMDKFVLQCLSFYQKEMALYIASKANLEFSQFNIDDDVDPLFKEYWCKRLHPKNVAEKVYRQPPLRISLRSGRLNKQDFKFTKHQTTLLLAADSIGKKIQYNCHGFLPNQRQ

SEQ ID NO: 168594 - protein, 786 aa, Zea Mays
MGSDRAELARLCSARNWSKAIRLLDSILARSPSSIHDLCNRAFCYSQLELHKHVVKDCDRALLLDPALLQAYILKGKALSSLDKKEDALAAWKQGYEIAVRDTTDLKQLLDLEELVSSVKICGTTQSADHVMDASTCDTKVVISEDRVADTSFAATTMADTKTVVCEEAIGSSKVSSNGDTKLTNYNKKADHNKVSSSSVKDITGTQAPKKAPKLDKKNKAKAVKEINGRAEGVTGRASTDESETISLDQALFATKISKSSKSISLDFRLSRGIAQVNEGRYDQAISIFDQILRETPTYPEALIGRGTAYAFQRELDSAISDFTKAIQSSPSAGEAWKRRGQARAALGEFKEAIEDLTKALEFEPNSPDILHERGIVNFKFKDYNSALEDLSTCVKHDKKNSSAHTYLGLTLSALGEYKRAEDEHVIGLKYDESFLDCWAHLAQLYLDLAYPEKLLNCLEKAIQIDSRFAKAYHLRGILYHGMGRHRSAIKELSVALTYESSSIECLYLRASSHHAIGEYKAAIKGYDDVLDLELDSMDKFVLQCLSFYQKEMALYIASKANLEFSQFNIDDDVDPLFKEYWCKRLHPKNVAEKVYRQPPLRISLRSGRLNKQDFKFTKHQTTLLLAADSIGKKIQYNCHGFLPNQRQYRMAGLAAIEIAQKVSKAWRFLRNPKNIAKLVRKRDKLNMSQNRGGYCSTSTLAGSPTSSPNEDRVSSGISLSWQDVYNIAVKWRQISEPCDPVVWVNKLRVQFWIWFSYPNASWSSKSYSLLSILPKSLGNCEDYNA

SEQ ID NO: 168595 - protein, 532 aa, Zea Mays
MGRHRSAIKELSVALTYESSSIECLYLRASSHHAIGEYKAAIKGYDDVLDLELDSMDKFVLQCLSFYQQKEMALYIASKANLEFSQFNIDDDVDPLFKEYWCKRLHPKNVAEKVYRQPPLRISLRSGRLNKQDFKFTKHQTTLLLAADSIGKKIQYNCHGFLPNQRQYRMAGLAAIEIAQKVSKAWRFLRNPKNIAKLVRKRDKLNMSQNRGGYCSTSTLAGSPTSSPNEDRVSSGISLSWQDVYNIAVKWRQISEPCDPVVWVNKLSEEFNSGFGSHTPMLLGQAKVIRYYPYYQRVLETAKTIMLDLKYVNNAEDRAIFLTDIDKLKKIEIASSCSDLYHVVGETYWVATRCDSMAFRGRRLEGTRITTQNIGKTGFDFAIRTPCTPSRWEEYDEEMTAAWEAICEAYCNDTNPTRDPGVLDAVKDAILRMTYYWYNFMPLSRGSAVVGYVVLLGLFLAANMDITASIPPGVQVDWEAILSPDPGTFVDAVKPWLYPSTKISRCLKDYTDVSCAFSTTGSVVAALTSVDP

SEQ ID NO: 168596 - protein, 682 aa, Zea Mays
MVLFSQIGSHYHFIETNPYLVFDRKRAYGMRLNILAGTAVRFEPGDAKSVILVSIGGHKVIKGGNGIADGPIDSSSLNVVMQKVNANSFGHEDYPDAREGIIGDGSFDCTVDHEKYASIYGPTTGDKIRLGDTNLYAEIEKDFAFYGDECIFGGGKVLRDGMGQASGYPESFCLDTVITNAVVIDYTGIYKADIGIKGGLIVAIGKAGNPDVMDGVHNNMIVGVNTEVIASEGMIVTAGGIDCHVHFICPQLAEEAIASGITTLVGGGTGPAHGTCATTCTPAPSQLKLMLQSTDQLPINMGFTGKGNTSKPEGLAEIIKAGAMGLKLHEDWGTTPSAIDNCLSVAEDFDIQVNIHTDTLNESGCVEHTIAAFKGRAIHTYHSEGAGGGHAPDIIKVCGVKNVLPSSTNPTRPFTSNTVDEHLDMLMVCHHLDKNIPEDVAFAESRIRAETIAAEDILHDMGAISIISSDSQAMGRVGEVITRTWQTANKMKVQRGSLPGSGDANAAPDSDNLRIRRYIAKYTINPAIVNGFSDFVGSVEVGKLADLVLWKPSFFGAKPELVVKGGAIAWANMGDPNASIPTPEPVVMRPMFGAFGKAGSSNSIAFVSKAAKEAGVATEYRLEKRVEAVGRVRGLTKLDMKLNDALPKIEVDPETYTVTADGEVLTCQPAPTLPLSRNYFLF

SEQ ID NO: 168597 - protein, 653 aa, Zea Mays
MRLNILAGTAVRFEPGDAKSVILVSIGGHKVIKGGNGIADGPIDSSSLNVVMQKVNANSFGHEDYPDAREGIIGDGSFDCTVDHEKYASIYGPTTGDKIRLGDTNLYAEIEKDFAFYGDECIFGGGKVLRDGMGQASGYPESFCLDTVITNAVVIDYTGIYKADIGIKGGLIVAIGKAGNPDVMDGVHNNMIVGVNTEVIASEGMIVTAGGIDCHVHFICPQLAEEAIASGITTLVGGGTGPAHGTCATTCTPAPSQLKLMLQSTDQLPINMGFTGKGNTSKPEGLAEIIKAGAMGLKLHEDWGTTPSAIDNCLSVAEDFDIQVNIHTDTLNESGCVEHTIAAFKGRAIHTYHSEGAGGGHAPDIIKVCGVKNVLPSSTNPTRPFTSNTVDEHLDMLMVCHHLDKNIPEDVAFAESRIRAETIAAEDILHDMGAISIISSDSQAMGRVGEVITRTWQTANKMKVQRGSLPGSGDANAAPDSDNLRIRRYIAKYTINPAIVNGFSDFVGSVEVGKLADLVLWKPSFFGAKPELVVKGGAIAWANMGDPNASIPTPEPVVMRPMFGAFGKAGSSNSIAFVSKAAKEAGVATEYRLEKRVEAVGRVRGLTKLDMKLNDALPKIEVDPETYTVTADGEVLTCQPAPTLPLSRNYFLF

SEQ ID NO: 168598 - protein, 687 aa, Zea Mays
MKISKYCLILQIGSHYHFIETNPYLVFDRKRAYGMRLNILAGTAVRFEPGDAKSVILVSIGGHKVIKGGNGIADGPIDSSSLNVVMQKVNANSFGHEDYPDAREGIIGDGSFDCTVDHEKYASIYGPTTGDKIRLGDTNLYAEIEKDFAFYGDECIFGGGKVLRDGMGQASGYPESFCLDTVITNAVVIDYTGIYKADIGIKGGLIVAIGKAGNPDVMDGVHNNMIVGVNTEVIASEGMIVTAGGIDCHVHFICPQLAEEAIASGITTLVGGGTGPAHGTCATTCTPAPSQLKLMLQSTDQLPINMGFTGKGNTSKPEGLAEIIKAGAMGLKLHEDWGTTPSAIDNCLSVAEDFDIQVNIHTDTLNESGCVEHTIAAFKGRAIHTYHSEGAGGGHAPDIIKVCGVKNVLPSSTNPTRPFTSNTVDEHLDMLMVCHHLDKNIPEDVAFAESRIRAETIAAEDILHDMGAISIISSDSQAMGRVGEVITRTWQTANKMKVQRGSLPGSGDANAAPDSDNLRIRRYIAKYTINPAIVNGFSDFVGSVEVGKLADLVLWKPSFFGAKPELVVKGGAIAWANMGDPNASIPTPEPVVMRPMFGAFGKAGSSNSIAFVSKAAKEAGVATEYRLEKRVEAVGRVRGLTKLDMKLNDALPKIEVDPETYTVTADGEVLTCQPAPTLPLSRNYFLF

SEQ ID NO: 168599 - protein, 869 aa, Zea Mays
MYRSAAGSRASGPSTHLSPADSLGNPSKTPSSQPYRNCCSPPAASAATSPSAPLSLSLALSPFSRPRRGGPPFRSLPLRAADLRGGGMRLLPREADKLALHNAGFLAQKRLARGLRLNYTEAVALIAAQILELIRDGDKTVTDLMDLGKQLLGSDDVEEYPGEIHYSSSRIVLNLHRRALSLKVVNKADRPIQIGSHYHFIETNPYLVFDRKRAYGMRLNILAGTAVRFEPGDAKSVILVSIGGHKVIKGGNGIADGPIDSSSLNVVMQKVNANSFGHEDYPDAREGIIGDGSFDCTVDHEKYASIYGPTTGDKIRLGDTNLYAEIEKDFAFYGDECIFGGGKVLRDGMGQASGYPESFCLDTVITNAVVIDYTGIYKADIGIKGGLIVAIGKAGNPDVMDGVHNNMIVGVNTEVIASEGMIVTAGGIDCHVHFICPQLAEEAIASGITTLVGGGTGPAHGTCATTCTPAPSQLKLMLQSTDQLPINMGFTGKGNTSKPEGLAEIIKAGAMGLKLHEDWGTTPSAIDNCLSVAEDFDIQVNIHTDTLNESGCVEHTIAAFKGRAIHTYHSEGAGGGHAPDIIKVCGVKNVLPSSTNPTRPFTSNTVDEHLDMLMVCHHLDKNIPEDVAFAESRIRAETIAAEDILHDMGAISIISSDSQAMGRVGEVITRTWQTANKMKVQRGSLPGSGDANAAPDSDNLRIRRYIAKYTINPAIVNGFSDFVGSVEVGKLADLVLWKPSFFGAKPELVVKGGAIAWANMGDPNASIPTPEPVVMRPMFGAFGKAGSSNSIAFVSKAAKEAGVATEYRLEKRVEAVGRVRGLTKLDMKLNDALPKIEVDPETYTVTADGEVLTCQPAPTLPLSRNYFLF

SEQ ID NO: 168600 - protein, 439 aa, Zea Mays
MEISPFYKQRVSNQHWGITTLVGGGTGPAHGTCATTCTPAPSQLKLMLQSTDQLPINMGFTGKGNTSKPEGLAEIIKAGAMGLKLHEDWGTTPSAIDNCLSVAEDFDIQVNIHTDTLNESGCVEHTIAAFKGRAIHTYHSEGAGGGHAPDIIKVCGVKNVLPSSTNPTRPFTSNTVDEHLDMLMVCHHLDKNIPEDVAFAESRIRAETIAAEDILHDMGAISIISSDSQAMGRVGEVITRTWQTANKMKVQRGSLPGSGDANAAPDSDNLRIRRYIAKYTINPAIVNGFSDFVGSVEVGKLADLVLWKPSFFGAKPELVVKGGAIAWANMGDPNASIPTPEPVVMRPMFGAFGKAGSSNSIAFVSKAAKEAGVATEYRLEKRVEAVGRVRGLTKLDMKLNDALPKIEVDPETYTVTADGEVLTCQPAPTLPLSRNYFLF

SEQ ID NO: 168601 - protein, 449 aa, Zea Mays
MIVTAGGIDCHVHFICPQLAEEAIASGITTLVGGGTGPAHGTCATTCTPAPSQLKLMLQSTDQLPINMGFTGKGNTSKPEGLAEIIKAGAMGLKLHEDWGTTPSAIDNCLSVAEDFDIQVNIHTDTLNESGCVEHTIAAFKGRAIHTYHSEGAGGGHAPDIIKVCGVKNVLPSSTNPTRPFTSNTVDEHLDMLMVCHHLDKNIPEDVAFAESRIRAETIAAEDILHDMGAISIISSDSQAMGRVGEVITRTWQTANKMKVQRGSLPGSGDANAAPDSDNLRIRRYIAKYTINPAIVNGFSDFVGSVEVGKLADLVLWKPSFFGAKPELVVKGGAIAWANMGDPNASIPTPEPVVMRPMFGAFGKAGSSNSIAFVSKAAKEAGVATEYRLEKRVEAVGRVRGLTKLDMKLNDALPKIEVDPETYTVTADGEVLTCQPAPTLPLSRNYFLF

SEQ ID NO: 168602 - protein, 359 aa, Zea Mays
MGLKLHEDWGTTPSAIDNCLSVAEDFDIQVNIHTDTLNESGCVEHTIAAFKGRAIHTYHSEGAGGGHAPDIIKVCGVKNVLPSSTNPTRPFTSNTVDEHLDMLMVCHHLDKNIPEDVAFAESRIRAETIAAEDILHDMGAISIISSDSQAMGRVGEVITRTWQTANKMKVQRGSLPGSGDANAAPDSDNLRIRRYIAKYTINPAIVNGFSDFVGSVEVGKLADLVLWKPSFFGAKPELVVKGGAIAWANMGDPNASIPTPEPVVMRPMFGAFGKAGSSNSIAFVSKAAKEAGVATEYRLEKRVEAVGRVRGLTKLDMKLNDALPKIEVDPETYTVTADGEVLTCQPAPTLPLSRNYFLF

SEQ ID NO: 168603 - protein, 222 aa, Zea Mays
MGAISIISSDSQAMGRVGEVITRTWQTANKMKVQRGSLPGSGDANAAPDSDNLRIRRYIAKYTINPAIVNGFSDFVGSVEVGKLADLVLWKPSFFGAKPELVVKGGAIAWANMGDPNASIPTPEPVVMRPMFGAFGKAGSSNSIAFVSKAAKEAGVATEYRLEKRVEAVGRVRGLTKLDMKLNDALPKIEVDPETYTVTADGEVLTCQPAPTLPLSRNYFLF

SEQ ID NO: 168604 - protein, 684 aa, Zea Mays
MAGGDRERDADEETRNQMMQNLFGDQSEDEDDADDDDVAEMVDEDDGHQPQSPPQSPPQRHQELDDDAYDDEEEDARSHAPARASGYHSEEVDGEAENGGEGEGESEGQVVIEEESEGEAHGADLDQGESDGDKVQSSPERELDDQRMEPDARGMDSEDEGYQQRTVSGRRRGVIASESEGSEDSYYAAGAQEDEEPRQTRKQSSPLEEERDHEVVRDVFGDSDEDEPAPYRVRHEIDEDSHRSHMEDEGHYEKDMQPDDVVADEDMRYESDDNRELKPKEKPVGPPLDLVVPFKQPPARPDKMNVIKVSNIMGIDPKPFDPKTYVEEDVFVTDESGTKKRIRLEDNIVRWRTIRNADGTTSCESNARFVKWKDGTMQLLIGNEVLDISVHEAHHDQSHLFLRHGKGILQSQGRLLHKMRFMPSSLSSKSHRLLTALVDSQNKKTVKMQKWFETKDPEKAKMEKERVLGQNIRAHSILQRKREKVNRKYTQPARPRRQLSPGFLEDALDELIIFCQDDEPGYDSRRMPGRRRFEDELEAEALAERRIINAKKSNMSRNVPHKPPYPPARPPRRQADEYSGSEREESEYETDGEDIEHSLPRGRREDELDEEEEYEEDVEEEEAPLSDEEMEAPKRKRESGGGGQRREELVSEEDDEDHDDSPPRKQPAVSHRRKAVVFDDSDED

SEQ ID NO: 168605 - protein, 460 aa, Zea Mays
MCLVIAMKMNQLHIVFAMKSMKILMSHMEDEGHYEKDMQPDDVVADEDMRYESDDNRELKPKEKPVGPPLDLVVPFKQPPARPDKMNVIKVSNIMGIDPKPFDPKTYVEEDVFVTDESGTKKRIRLEDNIVRWRTIRNADGTTSCESNARFVKWKDGTMQLLIGNEVLDISVHEAHHDQSHLFLRHGKGILQSQGRLLHKMRFMPSSLSSKSHRLLTALVDSQNKKTVKMQKWFETKDPEKAKMEKERVLGQNIRAHSILQRKREKVNRKYTQPARPRRQLSPGFLEDALDEDDEPGYDSRRMPGRRRFEDELEAEALAERRIINAKKSNMSRNVPHKPPYPPARPPRRQADEYSGSEREESEYETDGEDIEHSLPRGRREDELDEEEEYEEDVEEEEAPLSDEEMEAPKRKRESGGGGQRREELVSEEDDEDHDDSPPRKQPAVSHRRKAVVFDDSDED

SEQ ID NO: 168606 - protein, 204 aa, Zea Mays
MDKILERYERYSYAEKALISAESESEGNWCHEYRKLKAKIETIQKCHKHLMGEDLESLNPKELQQLEQQLESSLKHIRSRKSHLMAESISELQKKERSLQEENKALQKELAERQKAVASRQQQVQWDQQTHAQAQTSSSSSSFMMRQDQQGLPPPHNICFPPLTMGDRGEELAAAAQQQPLPGQAQPQLRIAGLPPWMLSHLNA

SEQ ID NO: 168607 - protein, 342 aa, Zea Mays
MGGGGGVHRRAAALLFVVVLAAVDQAGKSVCEAQLRRGYYAGVCPDVESIVRGVVARKVQQTAATVGATVRLFFHDCFVEGCDASVMVASTANNTAEKDHVINQSLAGDGFDTVIRARAAVDAVPGCRGKVSCADVLAMATRDAIALVNECAQAGGPSYAVELGRLDGLRSTASSVNGRLPAPFFNLDQLSQMFAANGLSQADMIALSAGHTVGLAHCGTFSGRLRGPSAPDRTLDSGYAAQLAAWCPAGVDPRVAVAMDPVTPVAFDNQFFRNLQAGKGLLASDQVLHADPRSRPTVDALAQSSVAFERAFVEAMTKMGRVGVKTARDRQGNVRRDCAVLG

SEQ ID NO: 168608 - protein, 657 aa, Zea Mays
MHMLSAEAANRGEVAGIWWLQSAAMVGSSAGDYDMVDRLRASALDRFQTVDRRALRGRGPRLDRGRGSWRGRGGRFGGRSFLESDRRVIRDMPESSRGVVSSNAFDEDAKKRAADTVDDGALADGKGKKRREDLCCEICEGDHVPLDCQVYNGPKPHAILCGFGSGESGFFQIPNFGSKGLIPLKESSTAFITAKEGTITAELVKSELARLIPVRWTWAVQSHANGFVVPFPSKVELQRMVAMKFVHAVDGKSIMVIQELEQKIEPVQHLEKAWVNIYGVPYEIRSFLPLWAVGTIIGATQKVDLRYTKQMGVVRLLVGVTNVDKIPESVDIVVGEGLYEIFFKIDKVCKDGVWSEYYYPSDKKDDDFESKDEDFDGLDDIQPKFDDTTRDTVMKDVSGSKVDNSSNVQHATQQNCDIRQTDALEKCLVAVNRSSVFRENVAAPTAVAHGVVYDNKWTEAEGTIILNAKQTAQKRDMPQIYPVAAPRAAESRKNNDVPFDVVSRTVGREGHVDADAFNLNTICHESGKKAAAPFVVVCTADASEGSVDANSICLNSFPGVPASAAAVYPISLEDINTDLNSVAIEFSPATNIHAAIPNVSVEQIHEHVRGAEHSVAQLTSPGGADGSGALVENFSLQDMETLISCIHAWTMVVVPSI

SEQ ID NO: 168609 - protein, 177 aa, Zea Mays
MAVGNKAVAAVVMVVTILSSAAAVHLAPPTPTAVIRKLLQQEEDDCLPPMIIGSCCTGCGLFPFHGPVGRCCDPDNNVCTLVPGDGSDFEACVPRDILVVAPDFGYLCDTNKDSVHAQRIRKTQQAPIATWTRRIRHTLECLSPRVGGALKSHLDVATILSNRSGGRAVSAGSGRRV

SEQ ID NO: 168610 - protein, 442 aa, Zea Mays
MPESSRGVVSSNAFDEDAKKRAADTVDDGALADGKGKKRREDLCCEICEGDHVPLDCQVYNGPKPHAILCGFGSGESGFFQIPNFGSKGLIPLKESSTAFITAKEGTITAELVKSELARLIPVRWTWAVQSHANGFVVPFPSKVELQRMVAMKFVHAVDGKSIMVIQELEQKIEPVQHLEKAWVNIYGVPYEIRSFLPLWAVGTIIGATQKVDLRYTKQMGVVRLLVGVTNVDKIPESVDIVVGEGLYEIFFKIDKVCKDGVWSEYYYPSDKKDDDFESKDEDFDGLDDIQPKFDDTTRDTVMKDVSGSKVDNSSNVQHATQQNCDIRQTGVPSDFGSLAQSTESFIPHINTSSLDCSDALEKCLVAVNRSSVFRENVAAPTAVAHGVVYDNKWTEAEGTIILNAKQTAQKRGEFSRTGGPSSYLASMVQLNEGSFQGNILA

SEQ ID NO: 168611 - protein, 771 aa, Zea Mays
MECDRCWKVLADFWSEMLLYIAPSENVKEHIEALANGGEFITHWWALLTHAGILDRNVHTNRGEVAGIWWLQSAAMVGSSAGDYDMVDRLRASALDRFQTVDRRALRGRGPRLDRGRGSWRGRGGRFGGRSFLESDRRVIRDMPESSRGVVSSNAFDEDAKKRAADTVDDGALADGKGKKRREDLCCEICEGDHVPLDCQVYNGPKPHAILCGFGSGESGFFQIPNFGSKGLIPLKESSTAFITAKEGTITAELVKSELARLIPVRWTWAVQSHANGFVVPFPSKVELQRMVAMKFVHAVDGKSIMVIQELEQKIEPVQHLEKAWVNIYGVPYEIRSFLPLWAVGTIIGATQKVDLRYTKQMGVVRLLVGVTNVDKIPESVDIVVGEGLYEIFFKIDKVCKDGVWSEYYYPSDKKDDDFESKDEDFDGLDDIQPKFDDTTRDTVMKDVSGSKVDNSSNVQHATQQNCDIRQTGVPSDFGSLAQSTESFIPHINTSSLDCSDALEKCLVAVNRSSVFRENVAAPTAVAHGVVYDNKWTEAEGTIILNAKQTAQKRGEFSRTGGPSSYLASMVQLNEGSNSNINSHSLHCSDMPQIYPVAAPRAAESRKNNDVPFDVVSRTVGREGHVDADAFNLNTICHESGKKAAAPFVVVCTADASEGSVDANSICLNSFPGVPASAAAVYPISLEDINTDLNSVAIEFSPATNIHAAIPNVSVEQIHEHVRGAEHSVAQLTSPGGADGSGALVENFSLQDMETLISCIHAWTMVVVPSI

SEQ ID NO: 168612 - protein, 63 aa, Zea Mays
MWFSACASSMVHEREHEAHRWAARLKVTWADGSALGPGRMMEQPIASQAESHWFKKICVDSGR

SEQ ID NO: 168613 - protein, 54 aa, Zea Mays
MVHEREHEAHRWAARLKVTWADGSALGPGRMMEQPIASQAESHWFKKICVDSGR

SEQ ID NO: 168614 - protein, 133 aa, Zea Mays
MRLHPHRRRGQVPPPRRRPVETGEGTRTRRGSGRAGPRAPAPTRSSSSAAASASSRSPPRFSASPSTSSPPSSPSAPAPIYSGAYSGATRSSSRYSSPSSRPSGGSSSVSGRYLNTGLHGECSRSCKCFFTSV

SEQ ID NO: 168615 - protein, 1168 aa, Zea Mays
MPLTLRARRLVFRSLVLLPPLAVTMPSWWKRSKSAFHRSPVTPFSSASTPSSPARASTSCVQPGGRAGRRDLLAPPKLTRQRKLRHVDDLYVALGDLRVDVSDRSSSSSPPQQRRLATASEAIEIPVPTLVSRVTSQIAQKFPEHNELLPNGIKRATFSHHRNAFREKFQDKSSAEIINFQLNIPAKSAPSSGFSSPVCSPRRFSNADFSSTVAPAQGPLAWSSPSIQSTDFMGVSSCPEKYTGVPDQTSFSSGLRSPILMPRITSAPPSPMHSKLYPDNNISRIEGNGSVSFHPLPLPPGALSPMQTGFTTQSAPKVEMPSVAGQWQKGKLLGSGTFGCVYEATNRHTGALCAMKEVNIIPDDAKSAESLKQLEQEVKFLSQFKHENIVQYYGSDIIEDRFYIYLEYVHPGSINKYVKQHYGAMTESVIRNFTRHILRGLAFLHGQKIMHRDIKGANLLVDVQGVVKLADFGMAKHLSTAAPNLSLKGTPYWMAPEMVQATLMKDVGYDLAVDIWSLGCTIIEMFDGKPPWSDLEGPAAMFKVLHKDPPIPENLSNEGKEFLQCCFKRTPAERPTASELLDHPFIRNSSHYNKHGSIHSFAGIKVNDTTYSSRDNWPASKSDSNMKGKNTNVKLVSLLVLNLTYAPSPGVRSSQAQAKQPLAELPGDPPDSVLSASGSSSFALSFTPWDNSKNLHKIDVTVNSYFAVLDGKKVYNRGRTINLVVNPEHYTLIDLEKDVDSYFKWGSCQKPIFWVVEKGDKWQCKLTSDAQLSDLVSSFDLVKLFMTMGRCKEGEETLHVVTDVVGKEMLAAAYPVGKEMDVDNIVYEEMHVDEVIGTTDNGEEGMHEDMDKQPEWREVPEYGQTTAGAPVVDLMDKIREKIMEKIATRQDIANRLEGHILPSVLHELNMKSRGLNYDFSKSGLLAAEISGTTNEGKTWRYGVDLNKRTCGCGQWEVSGKPCTHAIFSLGKFRQKELKIEDFVDDYYSVERFKLAYQFEVIPMGDKSQWPKNDPGFEMVPPPLERPAGRPRKQRIKASGEPGKRGPYQCKRCFKFGHIEKGCNATQAELEQELPPPRPKKQKKQSKTKSEAYENSTKGAEPSNIDVDPKLTSSPGVTTRRMASLSPARASPCVTTRRMASLSPTSPGVSTRRMAFISPGGINRRLIID

SEQ ID NO: 168616 - protein, 691 aa, Zea Mays
MPLTLRARRLVFRSLVLLPPLAVTMPSWWKRSKSAFHRSPVTPFSSASTPSSPARASTSCVQPGGRAGRRDLLAPPKLTRQRKLRHVDDLYVALGDLRVDVSDRSSSSSPPQQRRLATASEAIEIPVPTLVSRVTSQIAQKFPEHNELLPNGIKRATFSHHRNAFREKFQDKSSAEIINFQLNIPAKSAPSSGFSSPVCSPRRFSNADFSSTVAPAQGPLAWSSPSIQSTDFMGVSSCPEKYTGVPDQTSFSSGLRSPILMPRITSAPPSPMHSKLYPDNNISRIEGNGSVSFHPLPLPPGALSPMQTGFTTQSAPKVEMPSVAGQWQKGKLLGSGTFGCVYEATNRHTGALCAMKEVNIIPDDAKSAESLKQLEQEVKFLSQFKHENIVQYYGSDIIEDRFYIYLEYVHPGSINKYVKQHYGAMTESVIRNFTRHILRGLAFLHGQKIMHRDIKGANLLVDVQGVVKLADFGMAKHLSTAAPNLSLKGTPYWMAPEMVQATLMKDVGYDLAVDIWSLGCTIIEMFDGKPPWSDLEGPAAMFKVLHKDPPIPENLSNEGKEFLQCCFKRTPAERPTASELLDHPFIRNSSHYNKHGSIHSFAGIKVNDTTYSSRDNWPASKSDSNMKGKNTNVKLVSLLVLNLTYAPSPGVRSSQAQAKQPLAELPGDPPDSVLSASGSSSFALSFTPCAH

SEQ ID NO: 168617 - protein, 193 aa, Zea Mays
MGNGTADSGDNVNYGSKKVFVGGLQDDTTEEEFRAYFETFGTVTDVAVIYDSATNRSRGFGFVTFDSEEAVGKVMRQSFHDLNGTKVEAKIAIPKDEQYYRNRGRGARSSGGRVPAGYEGSMYQPPYNAGYGSYNGYMPQPVHVQPYFPAPYFPVAGYPYGSGYPSQVVMANAPDMMSRWVPPAYGNYPQMYP

SEQ ID NO: 168618 - protein, 74 aa, Zea Mays
MLEGEGASLIPFAALDSPFKATRAHTSANTLAHLLSSTLLHASPADLASYRRPRRPGPHRSLVAAMAITPRAPR

SEQ ID NO: 168619 - protein, 142 aa, Zea Mays
MPPGSGPPRPYSTSPGRLSLPLADALAAAADASPPPSHDRRRHRAARGARGRCSHDTSNLRAPGLEEMVSTTRRRSRSPSNGSAAADGGRPMCLRSPRPRRAQAEGPEARGDGLDDATEIEEPEERLSGGGWRSPEVLCSRC

SEQ ID NO: 168620 - protein, 97 aa, Zea Mays
MHIWFFFPCSHLYKFYPFSFPNFQRLDTELCITASAHAYAHTCSFCDYDFFFVYSLLQIASIFLHISNNYSHSYLYQIFFQKMLCILIPQKNTIIVI

SEQ ID NO: 168621 - protein, 249 aa, Zea Mays
MDQNFGNLGTGAGSSGGCGGSNSNSKAVAAVSSSSFLQLPLSTAAAASPAYYGAPLALLHHGTTAGPSSSQQQQHQSPYAKHGAEMSAAEADAIKAKIVAHPQYSALLAAYLDCQKVGAPPDLLERLTAMAAKLDARPPGRHGPRDPELDQFMEAYCNMLVKYREELTRPIDEAMEFLKRVEAQLDSIAGGGSSSSARLSLAGGSPAWSKLTRHFEIRRRQNKTSGWKVETRDLTKSSSLFFFFFFCRW

SEQ ID NO: 168622 - protein, 221 aa, Zea Mays
MDQNFGNLGTGAGSSGGCGGSNSNSKAVAAVSSSSFLQLPLSTAAAASPAYYGAPLALLHHGTTAGPSSSQQQQHQSPYAKHGAEMSAAEADAIKAKIVAHPQYSALLAAYLDCQKVGAPPDLLERLTAMAAKLDARPPGRHGPRDPELDQFMEAYCNMLVKYREELTRPIDEAMEFLKRVEAQLDSIAGGGSSSSARLSLAALLIGGRRQPSVVETDETL

SEQ ID NO: 168623 - protein, 221 aa, Zea Mays
MASNRSSSTVVGEMQSRLDRVRRQLSSTSTRHLLQGPLLKRSDTLRKWNERWVILDPATGKIEYKVNRSDKDVRGVVVFDSTSTVTLSPTNFHGLAKYDGCCFYIGTPQKKEYFLCAETPSAARAWVSTLHATQLVLQAHKEAVNSLGENGPAKLGTVATVVAVANATAIEATKEVEAAMKISLRAALGSTTHKLTKGQLDDLTIMMTMAMHLQPTGDPSS

SEQ ID NO: 168624 - protein, 376 aa, Zea Mays
MDWQNTMDAVSILELHRKRNTFFVQKLPALQEHGATQLVLQAHKEAVNSLGENGPAKLGTVATVVAVANATAIEATKEVEAAMKISLRAALGSTTHKLTKGQLDDLTIMMETLRVKDDELHQLLQDIRARDSTINEIADKLQETAEAAETAASAARSIDEERRFFTLELERLKQDHEKQVEASLLRLRESEEKAKLLVEERDRLLTERDSALQEAQMWRSELGKARGNAVILEAAVVRAEEKARVSAADADIRIKEAMNRLESATKEKEDLLALVDALQSQIQRQETSTIQVCEESSELCSTASKHMEDDNVDKACVSDPDSVPVTENVVELDDEGVDIPTVGDTEWDDPRSSEVSDVREVTTEPEENSLDIPVDT

SEQ ID NO: 168625 - protein, 294 aa, Zea Mays
MKISLRAALGSTTHKLTKGQLDDLTIMMETLRVKDDELHQLLQDIRARDSTINEIADKLQETAEAAETAASAARSIDEERRFFTLELERLKQDHEKQVEASLLRLRESEEKAKLLVEERDRLLTERDSALQEAQMWRSELGKARGNAVILEAAVVRAEEKARVSAADADIRIKEAMNRLESATKEKEDLLALVDALQSQIQRQETSTIQVCEESSELCSTASKHMEDDNVDKACVSDPDSVPVTENVVELDDEGVDIPTVGDTEWDDPRSSEVSDVREVTTEPEENSLDIPVDT

SEQ ID NO: 168626 - protein, 55 aa, Zea Mays
MLPATRGSKPPQRSAARSCSASLVLIRSHGPVVGPEAQAALPQQGGHARAPHELS

SEQ ID NO: 168627 - protein, 127 aa, Zea Mays
MHGANRPCPHHTTGRNERRRDESTRRGSRSAPSPTTMTHHLQKAPLTATDPPTANAPDPGTSYKHKQATPPSQRADRVRGRQRRWPATATRARGHHRRGLAARATTAVAARPPAHASREERRAATNP

SEQ ID NO: 168628 - protein, 97 aa, Zea Mays
MGQRRLPGRPWRRCGARACEGSRGLKLQRETSPRRVRAPQEEGGPARLQPGELQPDIPEPGGERGEGGLRRARRHSDRVLPDRPRCSDGKVHAGESS

SEQ ID NO: 168629 - protein, 80 aa, Zea Mays
MVYARGCVPISYLYGIAAKQSKKQSEELKAMLIHKKLKPPARVGADASVAAIDDAVQPPAGRAEVPACKAAACHNRGAGW

SEQ ID NO: 168630 - protein, 157 aa, Zea Mays
MRDSALSLTKCLAQTAQKTFSDFEEAVEKDATKNIHTDGTVHPLTSYVINYVKFLFDYQSTLKQLFQEFKEDGTGSELAAVTMKIMQALQNNLEAKAKQYKDPALMHIFLMNNIHYIVKSVRRSEAKDLLGDDWIQRHRRIVQQNANQYRRIAWAKV

SEQ ID NO: 168631 - protein, 235 aa, Zea Mays
MGELAAASSPPPPAVLQVVFVDGEQSVDLGTVAVQPSLSGVKRLQAVVADRVGVAPYQISASLARPRRARRVPLDDATDLAAAVAREGSGCYVVAGLRRSRRERRGGRSRRDRKGAKDAGAPAEKTILKRLPPTDLASLVGTPPPPLPFPHAVAAAAAMRQPAFHWCVHDAVVSAVFRSHVGPIERPPKKTPSPPPLLPLPPSPGRLLGMPVYEFIDQHLLFRRRRLPHSSSNCT

SEQ ID NO: 168632 - protein, 509 aa, Zea Mays
MGACVSKAACCCRQPHNGVTNERTDTVTEDEEAYDLPAFQEFTFEQLRLATSGFAVENIVSEQGEKAPNVVYKGKLDAQRRIAVKRFNRSAWPDPRQFLEEARSVGLLRSKRLANLLGCCCEGDERLLVAEYMPNDTLAKHLFHWESQSMKWTMRLRVVLCLAEALEYCTNRGRALYHDLNAYRALFDDDCNPRLSCFGLMKNSRDGKSYSTNLAFTPPEYMRTGRITPESVIYSFGTLLIDVLSGKHIPPSHALDLIRDRNFNMLLDSCLEGQFSNEEGTEMVRLASRCLHYEPRERPNVRSLVQVLTPLQRDVERPRRPLNLCPTLTQGHCCPTPSYVLMGIPRGGASSTEPLNLSPLAEACSRKDLTAIHEILEKTGYKDDEGTANELSFQMWTNQMQDTLNSKKKGDNAFRQKDFTAAIDCYSQFIEVGTMVSPTIYARRCLSYLMNGMPQEALNDAMNALVISPTWSTAFYLQAAALLSQGMENEAQEALKDGCNLEQSSSGGH

SEQ ID NO: 168633 - protein, 486 aa, Zea Mays
MGACVSKAACCCRQPHNGVTNERTDTVTEDEEAYDLPAFQEFTFEQLRLATSGFAVENIVSEQGEKAPNVVYKGKLDAQRRIAVKRFNRSAWPDPRQFLEEARSVGLLRSKRLANLLGCCCEGDERLLVAEYMPNDTLAKHLFHWESQSMKWTMRLRVVLCLAEALEYCTNRGRALYHDLNAYRALFDDDCNPRLSCFGLMKNSRDGKSYSTNLAFTPPEYMRTGRITPESVIYSFGTLLIDVLSGKHIPPSHALDLIRDRNFNMLLDSCLEGQFSNEEGTEMVRLASRCLHYEPRERPNVRSLVQVLTPLQRDVETPSYVLMGIPRGGASSTEPLNLSPLAEACSRKDLTAIHEILEKTGYKDDEGTANEMWTNQMQDTLNSKKKGDNAFRQKDFTAAIDCYSQFIEVGTMVSPTIYARRCLSYLMNGMPQEALNDAMNALVISPTWSTAFYLQAAALLSQGMENEAQEALKDGCNLEQSSSGGH

SEQ ID NO: 168634 - protein, 649 aa, Zea Mays
MSSFTSNLHRSSSEREHGRHRSLRYCRPSFPFPPSTLLHLTRYGIASLAIEIVAYLAVACLYICNSVRQEKLISAGFLLLLLLVFLLSSIGVRTSRFRIDFVFGANIVAVSSYCVWKFNYTSSMSKVRRTISHVAIVTILLSVVIFDYVCRFYPISYYPDSYSLPDYYRDGAIRLLIQLVAYAAIGCLYICNSSTRKMKVVSAAFLVLVLAVSLLSSINNDNDRFGYIFVANIVTISLYCIWKHYLAILVTLAWLQRWLSEEEEAAAAAMAPSKRLARGEDEEAGLLKPLDLDLVESGPRQFSYSELAAATKNFSDDRRLGSGGFGSVYRGILTTDGRNRCVAVKRVSKTARQGWKEFVSEVVIISRLRHRNLVQLIGWCQGSGNKLLLVYELMPNGSLDDHLHRPDSVLMWPVRYGIALGVGAALLYLHDDAEQRVVHRDVKPSNVMLDASFNAKLGDFGLARLIDDGRRSHTTGVAGTFGYMDPESMLAGKASVESDVYSFGVFLLEITCGRRPAVLVREEDYVHLVQWVWDSYGGGSILDAADPWLGNNFNSQEMACAMLVGLWCAHPDRSLRPTIRQAVNVLRFEAPPPRLPAKMPVATFGPPAAHASGSTTSSAEALMTWGSSLPTMAMAASSLDIEHSSTKTS

SEQ ID NO: 168635 - protein, 231 aa, Zea Mays
MAAAGRNAGVLALFDVDGTLTAPRKGVTPEMLEFMKQLRQHVTVGVVGGSDLVKITEQLGSTVITDYDYVFSENGLVAHKNGQLIGTQSLKSFIGEDKLKEFINFTLHYIADLDIPIKRNCSQEERDEFEKYDKVHNIRPKMVSVLREKFAHMNLTFSIGGQISFDVFPQGWDKTYCLRYLEEFQEIHFFGDKTYKGGNDYEIFESERTVGHTVTSPSDTAQQCRSLFLSK

SEQ ID NO: 168636 - protein, 71 aa, Zea Mays
MDIDLTVDMVPPKDPYIQVRVLEDIGEVSLGDHSVSLTKNSLHFLRRTDAEQFISQNFWSRDHMYECMMVQ

SEQ ID NO: 168637 - protein, 186 aa, Zea Mays
MYGRRASQLLKEIDSSEAGQLVPFNSDVFDQVIRECNEHNSQFQSLIRKMVEQNLDIETTRNEDHYGAAIHHLSLLRNKRCLMAYMYNRAEVIQSFRWKIGPVLPHDIQEKLHFSEKEYFKNHSAAIKSYISEMDIDLTVVRVLEDIGEVSLGDHSVSLTKNSLHFLRRTDAEQFISQGLMEEFLE

SEQ ID NO: 168638 - protein, 104 aa, Zea Mays
MAGWMDAYICSALMELERIMMLKNNNGGPELRDNMIPSSYLFDQTSVSRRLIGQCCVFPMIMVCCVFGLMARLARMHPCFGDMAIQVVCFDNRMSRFFRCNENT

SEQ ID NO: 168639 - protein, 219 aa, Zea Mays
MELLGGGYGVWKLRSGFIYGVLEQKSHGMLRNMAVWRERDSFQLLIYMMTHDSAVQPSLVIVYFGGNDSIDAHCSGLGPHVPLDEYIGNMRKIAEHLKSLSEKTRVLFLSCPPLNEEMLRNSTSSTILSEIVRTNETCRLYSDVCVALCKEMHLKVVDLWHAMQKREDWKTACFTREQHCGGRDPEGVERGRVGTIPALEGNADGVRRGLPLRSCLLQR

SEQ ID NO: 168640 - protein, 335 aa, Zea Mays
MTHNLPPTYDFHNYMIRSMEEEFEKIVGVSGLLWGFVVAFMLFNVDGSNLYFWIAILPVTLVLLVGAKLQHVIATLTAEGAKMSTYGPRIQPRDDLFWFKKPEFLLWLIHFVLFQNAFELASFFWFWWQFGYDSCFIKNHLLVYCRLILGFAGQFLCSYSTLPVYALVTQMGSKYKAALIPRRIRETIHGWGKATRKKRRRRRGDDSTVRTETSTVCSLTDDDEDFEDDDDHHHHGPSYDTPRAGGRPPYLKIETHRQSGSGHDGPRPGGTPCFHPSGSGSGHAMLLRQASVSAPSSPSYRGGNNVTRSASMPGIAALRTTGSGTPTRVSHEEPT

SEQ ID NO: 168641 - protein, 195 aa, Zea Mays
MWLKKTHRNPLYKAMEKMKEEMMLLGFISLLLAATSRIISGICIDSKYYNSRFSPCTKEEVQESINAEHAIAHARKHLLEVILHHSPRRNLKTSYHNHEGCREGYESFVSHEGLEQLHRFIFVMAVTHVTYSCLTMLLAILKIHKWRKWEDEAFRDNHESFSQIAYESATRRFALLRNLVSLLFEQTILSSARVL

SEQ ID NO: 168642 - protein, 765 aa, Zea Mays
METIVLIIHRLLFTYSYTLQESINICWFLFSDSKKKFYLFSCRYSSLVDILQGCDFLTELVQRIEFCLDSTLSLVLDRASKKLEIIRRERRRNIEMLESLLKDTAAKIFLAGGIDNPLVTKRRSRMCVGVKASHKHLMPGGIVLSSSGSGATYFMEPQDAVELNNREVKLSGEERAEELVVLSLLTSMIADSQLKIRNLMDNVLELDLACARGSYALWTNSVRPTFTDSYTISQSDQCNDYSIYIEGIRHPLLLEQSLMAEESTTEASEMPVPLDMWVKKNARIVVISGPNTGGKTATMKTLGLSSLMSKAGIFFPAKGRPRIPWFDQVLADIGDHQSLEHSLSTFSGHISRLRKIVEMVSKDSLVLIDEIGSGTDPAEGVALSTSILKYLASRVNLAIVTTHYADLSRLQSVDNRFENAAMEFCVETLQPTYRILWGSTGNSNALSIAKSIGFDQKVLDRAQEWVEKLLPDKQKERQGLLYDSLVDEKELLESQANEAASVLSQVEGLYNEIRLEADDLESRVAALRARETQKVQQELKVVKYRMDTIIKNFEAQLKNSKLEQYNSLMRKAEAATASVVAAHQPSEIAFDDDDENRISFVSQVGDKVYVQGLGGETMATVVETLGEDESCMVQYGKIKVRVKRSRIKLVQRGTNNEATTSSSVKAKGRTPKQRSATTTDVSFGPVVQTSKNTVDLRGKRVSEAAFELRMAVDACRPYQVLFVVHGMGTGAVKDCAIDVLRKHPRVARFEDESPLNYGCTVAYIQ

SEQ ID NO: 168643 - protein, 533 aa, Zea Mays
MAATGTLALLLPVTLSSRPSHRTRGFMQIPRRQQPRRLTAAATEASSYNLPSRSSPEAPETRQIRLETESALEWGGVCERLAHFTATAAGRAACEGGRVPVGRSREESERLIDQTAAAVLLPTPLDFGGVEDVSALVAAAVAGRALAVRELCAVGRSIRAVRAVFHQLKRLADEMPDGRYSSLVDILQGCDFLTELVQRIEFCLDSTLSLVLDRASKKLEIIRRERRRNIEMLESLLKDTAAKIFLAGGIDNPLVTKRRSRMCVGVKASHKHLMPGGIVLSSSGSGATYFMEPQDAVELNNREVKLSGEERAEELVVLSLLTSMIADSQLKIRNLMDNVLELDLACARGSYALWTNSVRPTFTDSYTISQSDQCNDYSIYIEGIRHPLLLEQSLMAEESTTEASEMPVPLDMWVKKNARIVVISGPNTGGKTATMKTLGLSSLMSKAGIFFPAKGRPRIPWFDQVLADIGDHQSLEHSLSTFSGHISRLRKIVEMVSKDSLVLIDEIGSGTDPAEVGSSQLTTDSRMLQWNFV

SEQ ID NO: 168644 - protein, 421 aa, Zea Mays
MAGKKRKSGSEKPTKHRLPLGADADAVAEASKRRRSGATKQHQADEEASIPPSLSAKILREARKQQEEEMRADSSDEQRPSAVEATAGPSTSSSFPVPAADGENEGDDVDEFDGFDALSEYDGGEVEINEEDEKALAAFMSKDKAAERTLGDIILQKIREKDAEVATGEGRPRVKLDNSIIELYKEVGKFLSRYTSGKIPKAFKRIPSMECWADVVQLTEPENWSPNAVYQATRLFSSNMNTKNAERFYEAILLPRVRNDIRKNKRLHFALYQSLKKALYKPAAFNKGILLPLCRERNCTLREAVIIGSIIQKVSIPFLHASVALVKLAEMEYCGTTSYFIKLFLDKKYALPYRALDAVLAHFMRFVDDERIMPVIWHQSLLAFVERLVMDVQTSKHFFFDSKHVILLFVACCQKPSMLQI

SEQ ID NO: 168645 - protein, 338 aa, Zea Mays
MAGKKRKSGSEKPTKHRLPLGADADAVAEASKRRRSGATKQHQADEEASIPPSLSAKILREARKQQEEEMRADSSDEQRPSAVEATAGPSTSSSFPVPAADGENEGDDVDEFDGFDALSEYDGGEVEINEEDEKALAAFMSKDKAAERTLGDIILQKIREKDAEVATGEGRPRVKLDNSIIELYKEVGKFLSRYTSGKIPKAFKRIPSMECWADVVQLTEPENWSPNAVYQATRLFSSNMNTKNAERFYEAILLPRVRNDIRKNKRLHFALYQSLKKALYKPAAFNKGILLPLCRERNCTLREAVIIGSIIQKVSIPFLHASVALVKLAEMEYCGTTR

SEQ ID NO: 168646 - protein, 354 aa, Zea Mays
MAGKKRKSGSEKPTKHRLPLGADADAVAEASKRRRSGATKQHQADEEASIPPSLSAKILREARKQQEEEMRADSSDEQRPSAVEATAGPSTSSSFPVPAADGENEGDDVDEFDGFDALSEYDGGEVEINEEDEKALAAFMSKDKAAERTLGDIILQKIREKDAEVATGEGRPRVKLDNSIIELYKEVGKFLSRYTSGKIPKAFKRIPSMECWADVVQLTEPENWSPNAVYQATRLFSSNMNTKNAERFYEAILLPRVRNDIRKNKRLHFALYQSLKKALYKPAAFNKGILLPLCRERNCTLREAVIIGSIIQKVSIPFLHASSSKTSRDGVLWHYKLLHQAISRQEICFAIPCT

SEQ ID NO: 168647 - protein, 211 aa, Zea Mays
MLLINGRDGEASKLTENGFQFLLMETNAQLWYIMREYISSAEERGVDPTELISFLLELSFHKLGAAYSLNTLTDVQRIAIRDLAELGLVKQQQGRKDSWFIPTQLATNLSASLSDSSSNKEGFVVVETNFRMYAYSTSKLHCEILRLFARVEYQLPNLIVGAVTKESIYGAFENGITAEQIISFLRQNAHPRVADKIPAVPENVTDQVVGN

SEQ ID NO: 168648 - protein, 72 aa, Zea Mays
MGPFFYPIGLVRMDICKGSSMISGRVLYPNTTRPAAIPKRSYSVNSLNRAALSISGGEFSSVPVSISLHIWA

SEQ ID NO: 168649 - protein, 78 aa, Zea Mays
MLTVWRFNISIVIVLYILHQCSCPHQSTNRGSTFELGRPLHHIMRPDLTPHCSRHQDLLWCTSPKQQHGSRSPAVPTE

SEQ ID NO: 168650 - protein, 231 aa, Zea Mays
MASFFADDGADDLPRATSHPFDSDDFGAAAADDASAGGKNAMELEKKEQKEKELRAQIIAEAEEFKKAFFEKRIQNCASNMVNNREREKIFVASQEKFHANADKQYWKSISDLIPHEIATIEKRGKKDKDKKPSVTVIQGPKPGKPTDLSRMRHILVKLKHAPPPHMLQPPPAPAAKEGAKDGSKEGGKDGGAKDGAAAPANDAKQPAESQETSTANGPSEAEKEQPAASE

SEQ ID NO: 168651 - protein, 236 aa, Zea Mays
MPNQAQLHFRRRRWPATALPRARRIWLRLPSPPSPPCATPPRRAVKTPVFFSSRRRSSSLPPSPRSCFLPMAWIWMVLAAGAVLLWAISLGRIFSSAAPSCVPLSPQFMPPLRGDRRTRNVMLVVAHPDDESMFFAPTILFLKSKGHNIHILCMSRGNADGLGDTRKEELYHACETLKIPHEQVEVLDHPKLQDGFHEKWDHELVSELVMEHVQLWVIDMPLLTGAIFDGILDCDI

SEQ ID NO: 168652 - protein, 266 aa, Zea Mays
MPNQAQLHFRRRRWPATALPRARRIWLRLPSPPSPPCATPPRRAVKTPVFFSSRRRSSSLPPSPRSCFLPMAWIWMVLAAGAVLLWAISLGRIFSSAAPSCVPLSPQFMPPLRGDRRTRNVMLVVAHPDDESMFFAPTILFLKSKGHNIHILCMSRGNADGLGDTRKEELYHACETLKIPHEQVEVLDHPKLQDGFHEKWDHELVSELVMEHVQLWVIDMIVTFDSYGVSGHPNHRDVHYGICKFLHANRQGNVEAWELHIILEER

SEQ ID NO: 168653 - protein, 255 aa, Zea Mays
MPNQAQLHFRRRRWPATALPRARRIWLRLPSPPSPPCATPPRRAVKTPVFFSSRRRSSSLPPSPRSCFLPMAWIWMVLAAGAVLLWAISLGRIFSSAAPSCVPLSPQFMPPLRGDRRTRNVMLVVAHPDDESMFFAPTILFLKSKGHNIHILCMSRGNADGLGDTRKEELYHACETLKIPHEQVEVLDHPKLQDGFHEKWDHELVSELVMEHVQLWVIDMIVTFDSYGVSGHPNHRDVHYGIWDFVMLDIRTVVL

SEQ ID NO: 168654 - protein, 332 aa, Zea Mays
MALQAALLPSTLSSVPKKCSIAVAAKDTAFLSVSQKALAETGKWHVVMACRDFLKAAKAAKGAGMADGSYTIMHLDLASLDSVRQFVDSFRRAGMPLDSLVCNAAIYRPTARTPTFTADGYEMSVGVNHLGHFLLARLLLDDMQKSDYPSRRLIILGSITGNTNTLAGNIPPKAGLGDLRGLAAGLRGQNGSAMIDGSESFDGAKAYKDSKICNMLTMQELHRRYHEETGITFASLYPGCIATTGLFREHIPLFRLLFPPFQKFVTKGFVSEAESGKRLAQVVSDPSLTKSGVYWSWNKDSASFENQLSQEASDPEKAKKLWEISEKLVGLA

SEQ ID NO: 168655 - protein, 114 aa, Zea Mays
MDHHHPQQQQQQYGDPYRGLMTSPQPDHHLHALQYHQPQPQQQPALMSPPQPQPALMSPQPQQTLMSPPQPQQHHHASLASHFHLLHLVTRLADAIGTGTRDQNFDALVRITIY

SEQ ID NO: 168656 - protein, 159 aa, Zea Mays
MSSAPSTTASTIAASIHTPFSSGPRGARLPAALRLSLAQLRSAGCRAAPGRLARPRARVRCGAAARFIGQGEFPAEVLESELPVLVDFVADWCGPCRLIAPVVDWASELIEEYKVYGLPTLILFKDGQEVPGSRREGAMIKDKFKEYLEPLLTTITTAA

SEQ ID NO: 168657 - protein, 1792 aa, Zea Mays
MRVTQDASLCTANSTIIRMPLSSKCLKELEAGCNIVQRVFDRFTQNPSSTLLFLRSIIQVSLSTWEDGASQSTLNYSVLVDPSVASLRNPFSEKKWRKFQISRIFSSTSAAIKMQAIDVHVIESGCSYIDKWFVALSLGSGQTRNMALDRRYLAYNLTPVAGVAAHIARNGVSTNIHPSSCILSPLPLSGFISMPVTTLGHFIVRHSGGRYIFDSPRDASLPELKEDRVRLVEAWNKELMLCVRDSYVEMVLEFQKLKTDPLSSAIEPRSAQSVSAILQTYGDRVYSFWPRSKQNPTSFTGRVSTGTNMDSPRASKADWQSLIEQVIKPFYVRLADLPVWQLYHGNLVKVDEGMFLAHSGNGDDDNLPSDSVCSFIKERYPVFSVPWELVSEIQAVGVTIREIRPKMVRGLLKASPSILLRSIETYIDVLEYCFSDMDPYRFSDDLPDESRVNSQHVGTTNSSISHSMPSSSSSLSYQSSTQMAGTSGGDALEIMTYFGKALYDFGRGVVEDISKTNSPAFHRTQAAETNVLSSIISELKGVPFPTSTMRLTKLGMAELWIANEQQQLLMSPLLDQFIHYKCLEKPFLALLLSTQVIHRPLKLRSFSPHLLAGYLKRILDERWIRIVLENKSSWIPWDNNAESSTTPTPKWIRSFWKIFSSLNGDLSLLSDWPLVPAYLDKPVLCRVKERHLIFVPPISDSPDPPGDDVAGQLDTPDSPREDTRAEQNAVLDTAFRSMNSEFPWLTSLLNQLNVPIFDPSFPECGAMCNLFPPNGRTLGQTIVYKLVAAKNAAHLPSLISLSSEDCDKLFGLFVSEFILTNNHLYQREELDVLRTLPMYKTVTGTYTSLLGSDHCILSPTAFFHPSDARCLSCSSNAHLFLQALGVEQLNDHEILVKFALPGFGNKTAQEQEDILTYLYASWKDLQLNSAVVETLKETNFVANANEFCKEFFKPEELLDPSDALLTSVFSGERNKFPAERFMSDGWLVILRKAGLRTSTEADMIIQCARKIETMGHDIMSSLEDADDFEADFTDSKNEIPFEICSLAESVVNVLFANFATLYDSAFCEKIGKIAFVPAEKGFPSIGGKRGGRRVLASYNGAILLKDWPLAWSSAPILTKQTIVPPEYSWGAFRLRSPPAFSTVFRHLQIVGRGNGADTLAHWPTSAEIMTVEDAFLQVLQYLDKIWGTISSSEKKELEKLAFIPVANGTRLVPVKSLFARLTINMSPFAFELPSRYLPFVSLLREIGMQESLTNSYARELLLDIQKACGYQRLNPNELRAVMEILEFMCNGINQSITDGSDGPFDSVIPDDGCRLVTAASCVYVDPYGSRLLSNIITSRLRFTHPDLPQNICKALSIKKLSDVIVEELDGKEEIKVVNSIHSVTLDRIKEKLRSKSLQDALRIVMISVTNHFPSFEALALVQIERTLEDISQKLQLVQRLHTRFLLLPNLQDVTRTIQRPSIHEWSSNGMHRSICFVNKATGYILIAEPPSFLTIYDVIAIIVSHRLGAPMILPIASVFACPDGSEKEVLQILHLGSDFGVSKREGRYDASLGAELLSQDARQVQFLPLRPFYSGEIVAWKTGKEGEKLRYGRVPEDVRPSAGQALYRFPVETAPGETRMMLSSHVYSFKSVSMADLLSAPSQVNGDVALGGQENLLATNTGTEVTKDADAGLEYGKVSSTELVQAVHDMLSAAGVRMDAEKETLFEATLSLQDQLKESQVALLVEQEKAEAAVKEADVAKAAWACRICLNAEVNMTIIPCGHVLCNRCSSSVSRCPFCRTQVARMMKIFRP

SEQ ID NO: 168658 - protein, 3111 aa, Zea Mays
MDPGGGGGMLLEDFGQRVDLTRRIREVLANYPEGTTALRELIQNADDAGAGRVRLCLDRRSHGRASLLSPALAQWQGPALLAYNDAVFTDEDFASISRIGDSRKVAQTWKTGRFGVGFNSVYHLTDLPSFVSGKYVVLFDPQGAYLPNVSASNPGKRIDYVSSSAITMYHDQFSPYCAFGCDMKASFQGTLFRFPLRSSEQASSSRLSRQSYTEDDILSLFAQLYQEGVYNLLFLKNVLSLEMYVWESGMTEPKIIYSCYLGPQSEKLSWHRQALVRFSGTPVESSKQKLDSFSMDFISEAFLGNKIEKKSSTYFIIQGMASASSKIGIFATAAAKEYDLHLLPWASVAACISNTGLEDTVLRQGQAFCFLPLPVRTGLSVHVNGYFEVSSNRRDIWYGADMDRGGKLRSDWNRLLLEDVVAPLFRELLMKLRTLSDSTISYYSLWPTGLYEDPWSILVEQIYKVIYTSPVLHSEIEGGTWISPADALLHDEGFSGSNNLNEALVLVGMPIVRVSNAIGDMFSKFYMQSMLKIVSPAIVRHFLKDYAKLATLGKSHKLILLEYCLTDVYNTDIGKCMNGLPLIPLANMRYGTFSASSQEDYYYVCDNIEYELLAEVGDRIVDRSIPPVLLDKLYQIASDSQANIRFIDGPIFCQLLPRLFPPGWKLKDQVPWNPGLGGSSPTAAWFKLFWQYIGGRSYDLHLFSDWPILPSTFGHLHRACTSSKLIKTESLSSLMNELLAKFGCKILDAEYLSDHKQLSFYVYDGDATGVLQSIFEVISLEGVDLQSLFQRITPGEKNELYQFLLDPKWYLGACLSVVSINQCKKLPIFRVFDGGSPSTYGFSDLFSSRKYLPPLGVPDHLLNDDFIFSICPSDEDIIMRYYGIERMPKSNFYQRYVLNRLDKLQTELRDSVLLTILQDLPQLSLEDPMFKETLKILRFVPTINGTLKSPQSLYDPRVEELYVLLQESGCFPHGLFQNPDVLDMLLCLGLRTSVSTDTILESARQIDSLVNIDQQKAHSRAKVLLSYLEVHAHKWYVNKLFDGRKKVNMLAKVTTALRPRDKSWEFDLEKFWSDLRLICWCPVLATAPSPALPWPSVSSMIAPPKQVRMQEDMWIVSASSRILDGECTSSALSYSLGWLSPPSGSVIAAQLLELGKNNEIVTDQVLRQELALVMPKIYSLLTNLIGSDEMDIVKVVLEGCRWIWVGDGFAKTDEVVLSGHLHLAPYIRVVPIDLAVFKDLFLELGIKEHLYPVDYASILGRMAIRKASASLEAEELRTAILVVQHLSEFRFQDQQTQIYLPDSSSRLCLSSELVFNDAPWLLDFGHDISGSASSIALSSKKYVHNFVHGNISNDVAERLGVRSLRRLLLAESSDSMNLSLSGVAEAFGQHEDLTTRLKHIVEMYADGPGILFELVQNAEDAKASEVVFLLDKTQYGTSSILSPEMAEWQGPALYCFNDSVFSPQDLYAISRIGQDSKLEKPFAIGRFGLGFNCVYHFTDIPGFVSGENIVMFDPHACYLPGISPSHPGLRIQFVGRRILDQFPDQFAPFLHFGCNLQQPFPGTLFRFPLRNAAAASRSQIKREQYAPQDVEMLFSSFSEVVSEALLFLRNVKKVTLYVKENNSKEMRLVHRVSRHNSSQIGKEPHALGAMLAFIHGSQPSGMDRNQFFSKLNKTKDSDLPWSCQKVTILEENPSSHLLHSWILAECIGGGHARKLSTASVSKSHFFVPWASVAAYLHSVSVDDTKGLSAEAEVNHDNSVFTNPDLGSSKFRKNFEARAFCFLPLPINTSIPVHVNAYFELSSNRRDIWIGNDMAGGGRVRSEWNLALLEDVVAPAYGHLLAAVAEELGPSDLFLSFWPSAAGVEPWSSMVRKLYVSIAELGIHVLYTKARGGHWLSTRQAIFPDFSFSKAMELAEVLSQAGLPVVSVTKPIIDSFINAYPSVHLLNPHLLRNLLIRRKRGFRSREEAILVLEYCLSDMGDPSFCDKLQGLALLPVANGSFTTFNKRGEGERVFLTSQIEFELLKDSIPHLVIDNSLPDGVSKKLYDIAYSACMNIYIFTSNLLIELLPRILPPEWQHAKQLSWFPEQQGQPSMEWMVSLWNFLRHSCDDISVFAKWPIIPLVDGKVVQLGNAANVIRDYGWSENMHSLLQKLGCLFLRSDLQIEHPQLANFVQESTAAGVLNAVQSVASNLQDIKELFMSTSLAEAHELRSFIFQSKWFSGNQISSSHMNTIRNLPIFESYKSRELVSLTNPRKWLKPEGVHEDLLDASFIRTESVKERSILVSYFDIKEPQKVEFYKDHVLPRMSEFLLQPAIISAVIRDVKLLIDNDDSARAALCETPFVLAANGAWVQPFRLYDPRVPELLKLLHQDTFFPSEKFMMTEVIELLGSFGLKRNFGFSTLLDMARSVSLVQNSGQGDAFDYGQKLLAYLNILESKTSKMEGGETFLEDGNLEASEISETLEPNNHGDVCDPSDQTSVSLFSNFDYDMPEDLFWSELKNISWCPVHVAPLLKGLPWFISEDIIAPPVITRPKSQMWLVSSKMRILSADSCSMYLQRKLGWCDPPNVSTLSSQLVELSKSHDELKMFSADTDIDAILQKEVQVMYSKLQDIIGTPSGNALKKYLDGFQWVYVGDRFVAPQALAFDSPVKYHPYLYTVPSELSEFKKLLSELGVRQTFDGMDYLNALRRLEGDVKGEPLSTDQLSFVHCVLEAFVDCYPDSQAPDVLLNSLAIPDSLGVLTPARNLVYNDAPWMNANPTSKNFIHLSIGNELANRLGVRSLRGSSLLDDELMRNLPCMEYAKISELLALYGESDFLLFDLIELADYCNAKKVHLIYDKREHPKQSLLQQSLGDLQGSSLTVVFEGTIMNREEVCSFQLPPPWKLRGNILNYGLGLLSSYFVCDALTILSGGYFYIFDPLGLTGGTTSTATSSARYFSLLGNDLVERFYDQFLPMRVTQDASLCTANSTIIRMPLSSKCLKELEAGCNIVQRVFDRFTQNPSSTLLFLRSIIQVSLSTWEDGASQSTLNYSVLVDPSVASLRNPFSEKKWRKFQISRIFSSTSAAIKMQAIDVHVIESGCSYIDKWFVALSLGSGQTRNMALDRLLVEAMVRTH

SEQ ID NO: 168659 - protein, 2240 aa, Zea Mays
MVRKLYVSIAELGIHVLYTKARGGHWLSTRQAIFPDFSFSKAMELAEVLSQAGLPVVSVTKPIIDSFINAYPSVHLLNPHLLRNLLIRRKRGFRSREEAILVLEYCLSDMGDPSFCDKLQGLALLPVANGSFTTFNKRGEGERVFLTSQIEFELLKDSIPHLVIDNSLPDGVSKKLYDIAYSACMNIYIFTSNLLIELLPRILPPEWQHAKQLSWFPEQQGQPSMEWMVSLWNFLRHSCDDISVFAKWPIIPLVDGKVVQLGNAANVIRDYGWSENMHSLLQKLGCLFLRSDLQIEHPQLANFVQESTAAGVLNAVQSVASNLQDIKELFMSTSLAEAHELRSFIFQSKWFSGNQISSSHMNTIRNLPIFESYKSRELVSLTNPRKWLKPEGVHEDLLDASFIRTESVKERSILVSYFDIKEPQKVEFYKDHVLPRMSEFLLQPAIISAVIRDVKLLIDNDDSARAALCETPFVLAANGAWVQPFRLYDPRVPELLKLLHQDTFFPSEKFMMTEVIELLGSFGLKRNFGFSTLLDMARSVSLVQNSGQGDAFDYGQKLLAYLNILESKTSKMEGGETFLEDGNLEASEISETLEPNNHGDVCDPSDQTSVSLFSNFDYDMPEDLFWSELKNISWCPVHVAPLLKGLPWFISEDIIAPPVITRPKSQMWLVSSKMRILSADSCSMYLQRKLGWCDPPNVSTLSSQLVELSKSHDELKMFSADTDIDAILQKEVQVMYSKLQDIIGTPSGNALKKYLDGFQWVYVGDRFVAPQALAFDSPVKYHPYLYTVPSELSEFKKLLSELGVRQTFDGMDYLNALRRLEGDVKGEPLSTDQLSFVHCVLEAFVDCYPDSQAPDVLLNSLAIPDSLGVLTPARNLVYNDAPWMNANPTSKNFIHLSIGNELANRLGVRSLRGSSLLDDELMRNLPCMEYAKISELLALYGESDFLLFDLIELADYCNAKKVHLIYDKREHPKQSLLQQSLGDLQGSSLTVVFEGTIMNREEVCSFQLPPPWKLRGNILNYGLGLLSSYFVCDALTILSGGYFYIFDPLGLTGGTTSTATSSARYFSLLGNDLVERFYDQFLPMRVTQDASLCTANSTIIRMPLSSKCLKELEAGCNIVQRVFDRFTQNPSSTLLFLRSIIQVSLSTWEDGASQSTLNYSVLVDPSVASLRNPFSEKKWRKFQISRIFSSTSAAIKMQAIDVHVIESGCSYIDKWFVALSLGSGQTRNMALDRRYLAYNLTPVAGVAAHIARNGVSTNIHPSSCILSPLPLSGFISMPVTTLGHFIVRHSGGRYIFDSPRDASLPELKEDRVRLVEAWNKELMLCVRDSYVEMVLEFQKLKTDPLSSAIEPRSAQSVSAILQTYGDRVYSFWPRSKQNPTSFTGRVSTGTNMDSPRASKADWQSLIEQVIKPFYVRLADLPVWQLYHGNLVKVDEGMFLAHSGNGDDDNLPSDSVCSFIKERYPVFSVPWELVSEIQAVGVTIREIRPKMVRGLLKASPSILLRSIETYIDVLEYCFSDMDPYRFSDDLPDESRVNSQHVGTTNSSISHSMPSSSSSLSYQSSTQMAGTSGGDALEIMTYFGKALYDFGRGVVEDISKTNSPAFHRTQAAETNVLSSIISELKGVPFPTSTMRLTKLGMAELWIANEQQQLLMSPLLDQFIHYKCLEKPFLALLLSTQVIHRPLKLRSFSPHLLAGYLKRILDERWIRIVLENKSSWIPWDNNAESSTTPTPKWIRSFWKIFSSLNGDLSLLSDWPLVPAYLDKPVLCRVKERHLIFVPPISDSPDPPGDDVAGQLDTPDSPREDTRAEQNAVLDTAFRSMNSEFPWLTSLLNQLNVPIFDPSFPECGAMCNLFPPNGRTLGQTIVYKLVAAKNAAHLPSLISLSSEDCDKLFGLFVSEFILTNNHLYQREELDVLRTLPMYKTVTGTYTSLLGSDHCILSPTAFFHPSDARCLSCSSNAHLFLQALGVEQLNDHEILVKFALPGFGNKTAQEQEDILTYLYASWKDLQLNSAVVETLKETNFVANANEFCKEFFKPEELLDPSDALLTSVFSGERNKFPAERFMSDGWLVILRKAGLRTSTEADMIIQCARKIETMGHDIMSSLEDADDFEADFTDSKNEIPFEICSLAESVVNVLFANFATLYDSAFCEKIGKIAFVPAEKGFPSIGGKRGGRRVLASYNGAILLKDWPLAWSSAPILTKQTIVPPEYSWGAFRLRSPPAFSTVFRHLQVNVTKKLNK

SEQ ID NO: 168660 - protein, 1878 aa, Zea Mays
MNREEVCSFQLPPPWKLRGNILNYGLGLLSSYFVCDALTILSGGYFYIFDPLGLTGGTTSTATSSARYFSLLGNDLVERFYDQFLPMRVTQDASLCTANSTIIRMPLSSKCLKELEAGCNIVQRVFDRFTQNPSSTLLFLRSIIQVSLSTWEDGASQSTLNYSVLVDPSVASLRNPFSEKKWRKFQISRIFSSTSAAIKMQAIDVHVIESGCSYIDKWFVALSLGSGQTRNMALDRRYLAYNLTPVAGVAAHIARNGVSTNIHPSSCILSPLPLSGFISMPVTTLGHFIVRHSGGRYIFDSPRDASLPELKEDRVRLVEAWNKELMLCVRDSYVEMVLEFQKLKTDPLSSAIEPRSAQSVSAILQTYGDRVYSFWPRSKQNPTSFTGRVSTGTNMDSPRASKADWQSLIEQVIKPFYVRLADLPVWQLYHGNLVKVDEGMFLAHSGNGDDDNLPSDSVCSFIKERYPVFSVPWELVSEIQAVGVTIREIRPKMVRGLLKASPSILLRSIETYIDVLEYCFSDMDPYRFSDDLPDESRVNSQHVGTTNSSISHSMPSSSSSLSYQSSTQMAGTSGGDALEIMTYFGKALYDFGRGVVEDISKTNSPAFHRTQAAETNVLSSIISELKGVPFPTSTMRLTKLGMAELWIANEQQQLLMSPLLDQFIHYKCLEKPFLALLLSTQVIHRPLKLRSFSPHLLAGYLKRILDERWIRIVLENKSSWIPWDNNAESSTTPTPKWIRSFWKIFSSLNGDLSLLSDWPLVPAYLDKPVLCRVKERHLIFVPPISDSPDPPGDDVAGQLDTPDSPREDTRAEQNAVLDTAFRSMNSEFPWLTSLLNQLNVPIFDPSFPECGAMCNLFPPNGRTLGQTIVYKLVAAKNAAHLPSLISLSSEDCDKLFGLFVSEFILTNNHLYQREELDVLRTLPMYKTVTGTYTSLLGSDHCILSPTAFFHPSDARCLSCSSNAHLFLQALGVEQLNDHEILVKFALPGFGNKTAQEQEDILTYLYASWKDLQLNSAVVETLKETNFVANANEFCKEFFKPEELLDPSDALLTSVFSGERNKFPAERFMSDGWLVILRKAGLRTSTEADMIIQCARKIETMGHDIMSSLEDADDFEADFTDSKNEIPFEICSLAESVVNVLFANFATLYDSAFCEKIGKIAFVPAEKGFPSIGGKRGGRRVLASYNGAILLKDWPLAWSSAPILTKQTIVPPEYSWGAFRLRSPPAFSTVFRHLQIVGRGNGADTLAHWPTSAEIMTVEDAFLQVLQYLDKIWGTISSSEKKELEKLAFIPVANGTRLVPVKSLFARLTINMSPFAFELPSRYLPFVSLLREIGMQESLTNSYARELLLDIQKACGYQRLNPNELRAVMEILEFMCNGINQSITDGSDGPFDSVIPDDGCRLVTAASCVYVDPYGSRLLSNIITSRLRFTHPDLPQNICKALSIKKLSDVIVEELDGKEEIKVVNSIHSVTLDRIKEKLRSKSLQDALRIVMISVTNHFPSFEALALVQIERTLEDISQKLQLVQRLHTRFLLLPNLQDVTRTIQRPSIHEWSSNGMHRSICFVNKATGYILIAEPPSFLTIYDVIAIIVSHRLGAPMILPIASVFACPDGSEKEVLQILHLGSDFGVSKREGRYDASLGAELLSQDARQVQFLPLRPFYSGEIVAWKTGKEGEKLRYGRVPEDVRPSAGQALYRFPVETAPGETRMMLSSHVYSFKSVSMADLLSAPSQVNGDVALGGQENLLATNTGTEVTKDADAGLEYGKVSSTELVQAVHDMLSAAGVRMDAEKETLFEATLSLQDQLKESQVALLVEQEKAEAAVKEADVAKAAWACRICLNAEVNMTIIPCGHVLCNRCSSSVSRCPFCRTQVARMMKIFRP

SEQ ID NO: 168661 - protein, 4685 aa, Zea Mays
MDPGGGGGMLLEDFGQRVDLTRRIREVLANYPEGTTALRELIQNADDAGAGRVRLCLDRRSHGRASLLSPALAQWQGPALLAYNDAVFTDEDFASISRIGDSRKVAQTWKTGRFGVGFNSVYHLTDLPSFVSGKYVVLFDPQGAYLPNVSASNPGKRIDYVSSSAITMYHDQFSPYCAFGCDMKASFQGTLFRFPLRSSEQASSSRLSRQSYTEDDILSLFAQLYQEGVYNLLFLKNVLSLEMYVWESGMTEPKIIYSCYLGPQSEKLSWHRQALVRFSGTPVESSKQKLDSFSMDFISEAFLGNKIEKKSSTYFIIQGMASASSKIGIFATAAAKEYDLHLLPWASVAACISNTGLEDTVLRQGQAFCFLPLPVRTGLSVHVNGYFEVSSNRRDIWYGADMDRGGKLRSDWNRLLLEDVVAPLFRELLMKLRTLSDSTISYYSLWPTGLYEDPWSILVEQIYKVIYTSPVLHSEIEGGTWISPADALLHDEGFSGSNNLNEALVLVGMPIVRVSNAIGDMFSKFYMQSMLKIVSPAIVRHFLKDYAKLATLGKSHKLILLEYCLTDVYNTDIGKCMNGLPLIPLANMRYGTFSASSQEDYYYVCDNIEYELLAEVGDRIVDRSIPPVLLDKLYQIASDSQANIRFIDGPIFCQLLPRLFPPGWKLKDQVPWNPGLGGSSPTAAWFKLFWQYIGGRSYDLHLFSDWPILPSTFGHLHRACTSSKLIKTESLSSLMNELLAKFGCKILDAEYLSDHKQLSFYVYDGDATGVLQSIFEVISLEGVDLQSLFQRITPGEKNELYQFLLDPKWYLGACLSVVSINQCKKLPIFRVFDGGSPSTYGFSDLFSSRKYLPPLGVPDHLLNDDFIFSICPSDEDIIMRYYGIERMPKSNFYQRYVLNRLDKLQTELRDSVLLTILQDLPQLSLEDPMFKETLKILRFVPTINGTLKSPQSLYDPRVEELYVLLQESGCFPHGLFQNPDVLDMLLCLGLRTSVSTDTILESARQIDSLVNIDQQKAHSRAKVLLSYLEVHAHKWYVNKLFDGRKKVNMLAKVTTALRPRDKSWEFDLEKFWSDLRLICWCPVLATAPSPALPWPSVSSMIAPPKQVRMQEDMWIVSASSRILDGECTSSALSYSLGWLSPPSGSVIAAQLLELGKNNEIVTDQVLRQELALVMPKIYSLLTNLIGSDEMDIVKVVLEGCRWIWVGDGFAKTDEVVLSGHLHLAPYIRVVPIDLAVFKDLFLELGIKEHLYPVDYASILGRMAIRKASASLEAEELRTAILVVQHLSEFRFQDQQTQIYLPDSSSRLCLSSELVFNDAPWLLDFGHDISGSASSIALSSKKYVHNFVHGNISNDVAERLGVRSLRRLLLAESSDSMNLSLSGVAEAFGQHEDLTTRLKHIVEMYADGPGILFELVQNAEDAKASEVVFLLDKTQYGTSSILSPEMAEWQGPALYCFNDSVFSPQDLYAISRIGQDSKLEKPFAIGRFGLGFNCVYHFTDIPGFVSGENIVMFDPHACYLPGISPSHPGLRIQFVGRRILDQFPDQFAPFLHFGCNLQQPFPGTLFRFPLRNAAAASRSQIKREQYAPQDVEMLFSSFSEVVSEALLFLRNVKKVTLYVKENNSKEMRLVHRVSRHNSSQIGKEPHALGAMLAFIHGSQPSGMDRNQFFSKLNKTKDSDLPWSCQKVTILEENPSSHLLHSWILAECIGGGHARKLSTASVSKSHFFVPWASVAAYLHSVSVDDTKGLSAEAEVNHDNSVFTNPDLGSSKFRKNFEARAFCFLPLPINTSIPVHVNAYFELSSNRRDIWIGNDMAGGGRVRSEWNLALLEDVVAPAYGHLLAAVAEELGPSDLFLSFWPSAAGVEPWSSMVRKLYVSIAELGIHVLYTKARGGHWLSTRQAIFPDFSFSKAMELAEVLSQAGLPVVSVTKPIIDSFINAYPSVHLLNPHLLRNLLIRRKRGFRSREEAILVLEYCLSDMGDPSFCDKLQGLALLPVANGSFTTFNKRGEGERVFLTSQIEFELLKDSIPHLVIDNSLPDGVSKKLYDIAYSACMNIYIFTSNLLIELLPRILPPEWQHAKQLSWFPEQQGQPSMEWMVSLWNFLRHSCDDISVFAKWPIIPLVDGKVVQLGNAANVIRDYGWSENMHSLLQKLGCLFLRSDLQIEHPQLANFVQESTAAGVLNAVQSVASNLQDIKELFMSTSLAEAHELRSFIFQSKWFSGNQISSSHMNTIRNLPIFESYKSRELVSLTNPRKWLKPEGVHEDLLDASFIRTESVKERSILVSYFDIKEPQKVEFYKDHVLPRMSEFLLQPAIISAVIRDVKLLIDNDDSARAALCETPFVLAANGAWVQPFRLYDPRVPELLKLLHQDTFFPSEKFMMTEVIELLGSFGLKRNFGFSTLLDMARSVSLVQNSGQGDAFDYGQKLLAYLNILESKTSKMEGGETFLEDGNLEASEISETLEPNNHGDVCDPSDQTSVSLFSNFDYDMPEDLFWSELKNISWCPVHVAPLLKGLPWFISEDIIAPPVITRPKSQMWLVSSKMRILSADSCSMYLQRKLGWCDPPNVSTLSSQLVELSKSHDELKMFSADTDIDAILQKEVQVMYSKLQDIIGTPSGNALKKYLDGFQWVYVGDRFVAPQALAFDSPVKYHPYLYTVPSELSEFKKLLSELGVRQTFDGMDYLNALRRLEGDVKGEPLSTDQLSFVHCVLEAFVDCYPDSQAPDVLLNSLAIPDSLGVLTPARNLVYNDAPWMNANPTSKNFIHLSIGNELANRLGVRSLRGSSLLDDELMRNLPCMEYAKISELLALYGESDFLLFDLIELADYCNAKKVHLIYDKREHPKQSLLQQSLGDLQGSSLTVVFEGTIMNREEVCSFQLPPPWKLRGNILNYGLGLLSSYFVCDALTILSGGYFYIFDPLGLTGGTTSTATSSARYFSLLGNDLVERFYDQFLPMRVTQDASLCTANSTIIRMPLSSKCLKELEAGCNIVQRVFDRFTQNPSSTLLFLRSIIQVSLSTWEDGASQSTLNYSVLVDPSVASLRNPFSEKKWRKFQISRIFSSTSAAIKMQAIDVHVIESGCSYIDKWFVALSLGSGQTRNMALDRRYLAYNLTPVAGVAAHIARNGVSTNIHPSSCILSPLPLSGFISMPVTTLGHFIVRHSGGRYIFDSPRDASLPELKEDRVRLVEAWNKELMLCVRDSYVEMVLEFQKLKTDPLSSAIEPRSAQSVSAILQTYGDRVYSFWPRSKQNPTSFTGRVSTGTNMDSPRASKADWQSLIEQVIKPFYVRLADLPVWQLYHGNLVKVDEGMFLAHSGNGDDDNLPSDSVCSFIKERYPVFSVPWELVSEIQAVGVTIREIRPKMVRGLLKASPSILLRSIETYIDVLEYCFSDMDPYRFSDDLPDESRVNSQHVGTTNSSISHSMPSSSSSLSYQSSTQMAGTSGGDALEIMTYFGKALYDFGRGVVEDISKTNSPAFHRTQAAETNVLSSIISELKGVPFPTSTMRLTKLGMAELWIANEQQQLLMSPLLDQFIHYKCLEKPFLALLLSTQVIHRPLKLRSFSPHLLAGYLKRILDERWIRIVLENKSSWIPWDNNAESSTTPTPKWIRSFWKIFSSLNGDLSLLSDWPLVPAYLDKPVLCRVKERHLIFVPPISDSPDPPGDDVAGQLDTPDSPREDTRAEQNAVLDTAFRSMNSEFPWLTSLLNQLNVPIFDPSFPECGAMCNLFPPNGRTLGQTIVYKLVAAKNAAHLPSLISLSSEDCDKLFGLFVSEFILTNNHLYQREELDVLRTLPMYKTVTGTYTSLLGSDHCILSPTAFFHPSDARCLSCSSNAHLFLQALGVEQLNDHEILVKFALPGFGNKTAQEQEDILTYLYASWKDLQLNSAVVETLKETNFVANANEFCKEFFKPEELLDPSDALLTSVFSGERNKFPAERFMSDGWLVILRKAGLRTSTEADMIIQCARKIETMGHDIMSSLEDADDFEADFTDSKNEIPFEICSLAESVVNVLFANFATLYDSAFCEKIGKIAFVPAEKGFPSIGGKRGGRRVLASYNGAILLKDWPLAWSSAPILTKQTIVPPEYSWGAFRLRSPPAFSTVFRHLQIVGRGNGADTLAHWPTSAEIMTVEDAFLQVLQYLDKIWGTISSSEKKELEKLAFIPVANGTRLVPVKSLFARLTINMSPFAFELPSRYLPFVSLLREIGMQESLTNSYARELLLDIQKACGYQRLNPNELRAVMEILEFMCNGINQSITDGSDGPFDSVIPDDGCRLVTAASCVYVDPYGSRLLSNIITSRLRFTHPDLPQNICKALSIKKLSDVIVEELDGKEEIKVVNSIHSVTLDRIKEKLRSKSLQDALRIVMISVTNHFPSFEALALVQIERTLEDISQKLQLVQRLHTRFLLLPNLQDVTRTIQRPSIHEWSSNGMHRSICFVNKATGYILIAEPPSFLTIYDVIAIIVSHRLGAPMILPIASVFACPDGSEKEVLQILHLGSDFGVSKREGRYDASLGAELLSQDARQVQFLPLRPFYSGEIVAWKTGKEGEKLRYGRVPEDVRPSAGQALYRFPVETAPGETRMMLSSHVYSFKSVSMADLLSAPSQVNGDVALGGQENLLATNTGTEVTKDADAGLEYGKVSSTELVQAVHDMLSAAGVRMDAEKETLFEATLSLQDQLKESQVALLVEQVPVFVCF

SEQ ID NO: 168662 - protein, 90 aa, Zea Mays
MHSPANRGENHARLPRAGAAIYSTPHGGCSCALQIQSLPAPARRIGGGRAAADAEQMTGDRPDLPRGMRDIPILAVCPRSLATMLLQPCS

SEQ ID NO: 168663 - protein, 240 aa, Zea Mays
MVTAVLAVFTITSYCLASSKSAGAPTNVRWGSYPLVGKRDLENYTFCTYCNKPKPPRAHHCRSCKMCVVDMDHHCPFIGNCVGASNHQVFVIFLISVVISCSYAAGMTIYASYQIWPSVDFPNLASSRDSMSFWKIWLEIITTVAGSAFFLSARGLVLVYLAFASLSVNAGIGVLLCQQLSYIYEGNTYLNHLSSPNALHGERGLHNIIRFFGCPYPISRVLLRYSNAGKLQDNSGSKLL

SEQ ID NO: 168664 - protein, 158 aa, Zea Mays
MGGFAEVQSSAANSQDSVQSVTVKAKKASWSMGSSFPLKKTTKALPKIQIDDDSDLIDEDSLLTEEDLKKPQLPVVGDCEVGAAKKACKNCTCGRAEAEEKVGKLELTAEQINNPQSACGSCGLGDAFRCGTCPYRGLPPFKPGEKVSLSGNFLAADI

SEQ ID NO: 168665 - protein, 259 aa, Zea Mays
MPSTSLAVPTGAVGVAGSRRYPFISNRSASSAPRLRRAPRLVMVSASASLEALIFDCDGVILESEHLHRQAYNDAFANFGVRCPPGSADLLYWDEAFYDNLQNRIGGGKPKMRWYFGENGWPPSKIFETPPSTDSDKEKLVDIIQDWKTERYKEIINSGTVKPRPGVLQLMDEVKDAGIKLAVCSAATKSSVIMCLENLIGLERFNGLDCFLAGDDVKLKKPDPTIYITASEVWKARTALWLRIVSLDYRLQKEQECHV

SEQ ID NO: 168666 - protein, 220 aa, Zea Mays
MPSTSLAVPTGAVGVAGSRRYPFISNRSASSAPRLRRAPRLVMVSASASLEALIFDCDGVILESEHLHRQAYNDAFANFGVRCPPGSADLLYWDEAFYDNLQNRIGGGKPKMRWYFGENGWPPSKIFETPPSTDSDKEKLVDIIQDWKTERYKEIINSGTVKPRPGVLQLMDEVKDAGIKLAVCSAATKSSVIMCLENLIGLERFNGLDCFLAGKVMMLN

SEQ ID NO: 168667 - protein, 68 aa, Zea Mays
MAQLQTNHVQKARSILRTQQPAASGSSWPLLCLPLMISFLVRSSCCSSSSPPFISIRFEPLRDKALCR

SEQ ID NO: 168668 - protein, 342 aa, Zea Mays
MPDKSQWPHVDLPFAVAAPLDKRGRGRYKKLRIKSCLEGGNSKSKKAAAEKGKEADKEAANEVDMQAENQTEKGKKKMIRGKRRCKKCGELGHGETSYKCPLNGTKKRKRKPRKNTTKYRENAKVPTQKKSKECAAVQEMEEGACVQEMEEVAAIQEMEEGAAVQNPTKPTMETIINDSPIRVTRSRLAMLLGVGPTSQEVCIRFAATDHCKVLLFSKSRGGWRPWGLQTVGVGVGAGAGKSTGRMLLKERLFDGKKDNMFLLLDECLHERRESTKDAKSLKTQRPCHCGPVNLALATSVVLIPFLEESLPKFVDFLEYRLWYINGRTSRSSAKGWEVVVSI

SEQ ID NO: 168669 - protein, 189 aa, Zea Mays
MPDKSQWPHVDLPFAVAAPLDKRGRGRYKKLRIKSCLEGGNSKSKKAAAEKGKEADKEAANEVDMQAENQTEKGKKKMIRGKRRKRKPRKNTTKYRENAKVPTQKKSKECAAVQEMEEVAAIQEMEEGAAVQNPTKPTMETIINDSPIRVTRSRLAMLLGVGPTSQEGLPSASDKMTTPTKLTPRKLRC

SEQ ID NO: 168670 - protein, 213 aa, Zea Mays
MPDKSQWPHVDLPFAVAAPLDKRGRGRYKKLRIKSCLEGGNSKSKKAAAEKGKEADKEAANEVDMQAENQTEKGKKKMIRGKRRCKKCGELGHGETSYKCPLNGTKKRKRKPRKNTTKYRENAKVPTQKKSKECAAVQEMEEVAAIQEMEEGAAVQNPTKPTMETIINDSPIRVTRSRLAMLLGVGPTSQEGLPSASDKMTTPTKLTPRKLRC

SEQ ID NO: 168671 - protein, 69 aa, Zea Mays
MIVNLSKLEKKHTANTKSSKQNYKVVKEEAQQEILIFYVKLHWQGYGLTTTKLQPTFRGQTIKLHIYTV

SEQ ID NO: 168672 - protein, 62 aa, Zea Mays
MERVDRCNSSLVLSTGAARADRPYRKRTSPAEARPPEAAAEEAERGAGRWGASVAMEEEAAE

SEQ ID NO: 168673 - protein, 114 aa, Zea Mays
MHAQKKGEGGSSKQIPSTSSSSSRRTRCTYYYYMHASETDQCNATHTLPFHHLQKNSESHSLQQTMNHASPYLHPGRSVGLSVDTWIMLSSEPRYSRPAATDDGSHNERRRGGR

SEQ ID NO: 168674 - protein, 253 aa, Zea Mays
MLNRDTWGNDAVAQLIRSNFIFWQVYYDTSEGRKVCTYYHLVSMPAILLIDPVTGQKMHAWNGMVHPDRLLEDLLPYLDKGPKEHHAAQPQKRPRKVDPEASTGKQGKIAVEDEDEELARAVAASLEESKEVIEASDASDDMVEAEPEEENEPTLNTKPDYPPLPEEPTGSRDLLCRVAIRLPNNRRIQRNFLHTDPIKLLWSFCAPQVEDGERRAFHFVQAIPGASQKLELGSDLTFKEAGLANSMINLLLD

SEQ ID NO: 168675 - protein, 305 aa, Zea Mays
MAAAAAWTGAASPNSLLLSRSPPHAAALAPSPGSSMRRRLLLGVGTPAVAALAAAAPPAVLQDGAVTVLITAGAYSLVRVFDELTERRLIEKSLSRKVVHVLSGVLFMSSWPLFSNSTEARYFAAVVPFLNSMRLLIYGLRLYTDEALLAALTITTLLLYRELLRGPLYYVLVLLFSVLVFWRESPIGIVSLSMMSGGDGFADIVGRRYGSAKLPFNRKKSWAGSISMFISGFLLSAMMMLYFSSLGYIDVIWEEALGKLALVALAATVVECVPVTEVVDDNISVPLATMLVAFLLFSSNRTIVN

SEQ ID NO: 168676 - protein, 159 aa, Zea Mays
MATGPRSLHALLGGGAVADLLLCRRRNASAAAVVGATAVWFVFERAGYSFPSVLSNALLLLVAILFFWAKSALLLNRPLPPLPNLEVSDAVVEKAADYALVWINRLLAVGHDIAIKRNRKVFIKDQVDEKVGVAHSIISRHINTIVIRAGQSAKEKKTE

SEQ ID NO: 168677 - protein, 213 aa, Zea Mays
MASSLARLGAALPRAAARALPPGRWAAAVLGIGASRRAERCQVHSDIKVAPTSDVKDDSKSETRRIKMLYDGDCPLCMREVNMLRERNKSYGAIKFVDISSKDYSPDDNQGLDYETVMGKIHAILSDGTVITDVESMSVMPRQIKDQVRILILFSLSIRHLENCSYDGKCNIWRVGEIPNANYRANVKMTKYARCEHKKCSTVLHTSLTYIHA

SEQ ID NO: 168678 - protein, 188 aa, Zea Mays
MASSLARLGAALPRAAARALPPGRWAAAVLGIGASRRAERCQVHSDIKVAPTSDVKDDSKSETRRIKMLYDGDCPLCMREVNMLRERNKSYGAIKFVDISSKDYSPDDNQGLDYETVMGKIHAILSDGTVITDVEAFRKLYEEVGLDWVYAVRLSPATSSIYILYIRPLQSSLKDSISYIYFLFNNVL

SEQ ID NO: 168679 - protein, 131 aa, Zea Mays
MYARLRHFFSTIYTRMQIKPSTQPVIVVLPLCHSDDTESARASRKQYKETLYSVLFDMNVPAVCAVDQAVLSLYASKRTSGIVVHIGFNTTSVVPIFQGRVMYEIGVETVGQGALKLTGFLKELMQRRNIS

SEQ ID NO: 168680 - protein, 220 aa, Zea Mays
MYARLRHFFSTIYTRMQIKPSTQPVIVVLPLCHSDDTESARASRKQYKETLYSVLFDMNVPAVCAVDQAVLSLYASKRTSGIVVHIGFNTTSVVPIFQGRVMYEIGVETVGQGALKLTGFLKELMQRRNISCESLYTVRTIKELLIMKLNCVKIHKRPARSMVKGVSLCRKRDSRLQKSYFSPIWEECVLWACIKQYLYVWITAMFQERLVMTAGTRRSF

SEQ ID NO: 168681 - protein, 220 aa, Zea Mays
MVDLVIASMAGASMLLLPGVVLHSWNSVTLKHLCMQGFVTSSLQYIRDTESARASRKQYKETLYSVLFDMNVPAVCAVDQAVLSLYASKRTSGIVVHIGFNTTSVVPIFQGRVMYEIGVETVGQGALKLTGFLKELMQRRNISCESLYTVRTIKEKLCYVAADYEAELRKDTQASCEIDGEGCFTLSEERFKTPEILFQPHMGGMCEIFRYCLICASITV

SEQ ID NO: 168682 - protein, 187 aa, Zea Mays
MYARLRHFFSTIYTRMQIKPSTQPVIVVLPLCHSDDTESARASRKQYKETLYSVLFDMNVPAVCAVDQAVLSLYASKRTSGIVVHIGFNTTSVVPIFQGRVMYEIGVETVGQGALKLTGFLKELMQRRNISCESLYTVRTIKELLIMKLNCVKIHKRPARSMVKGVSLCRKRDSRLQKSYFSPIWEE

SEQ ID NO: 168683 - protein, 132 aa, Zea Mays
MTVGHMLNQPAQCHRHIHHWLLFLVFFLSILCPSLVNVTKIVLCESSNQYVFIMTSTTALFSWHAQCWLGGQSSRSREERRHGGGEEQRHPCRFAGGELHFAVVGGGEEQSRWRSSVAGDVWARVGCPSREA

SEQ ID NO: 168684 - protein, 114 aa, Zea Mays
MDDCGGGGKRPFQLARSLTYHHHPGHRPAAASRWRRQHQQHQLADEPRAPRPQAVVLYTTSLRGVRRTFADCAAVRAILRGFRVAARRSRRQMEDDGECWWGRGRSDDDGAEEL

SEQ ID NO: 168685 - protein, 284 aa, Zea Mays
MAAVVALAPASPALLPVPFRGRRDGRVALSPRRTRCSAGRCRATAQTFQGGAAASYAREMERLSAKESLLLAFKDAGGFEALVSGKTTEMQRIDVNERIVGLERLNPTPRPTTSPFLEGRWNFEWFGDSSPGAFAARLLFERSPTAVAHFMGLDVLIKDGYSKLSSNLKFVNTIQSKFLLTTQLSVEGPIRMKEEYVEGLIEIPRINEESLPEQLKGLLGQTAGALQQLPSPIRDAVSEGLKLPLSGSFQRLFMISYLDEEILVCFFTSSILAGAHYQRCCWST

SEQ ID NO: 168686 - protein, 285 aa, Zea Mays
MAAVVALAPASPALLPVPFRGRRDGRVALSPRRTRCSAGRCRATAQTFQGGAAASYAREMERLSAKESLLLAFKDAGGFEALVSGKTTEMQRIDVNERIVGLERLNPTPRPTTSPFLEGRWNFEWFGDSSPGAFAARLLFERSPTAVAHFMGLDVLIKDGYSKLSSNLKFVNTGPIRMKEEYVEGLIEIPRINEESLPEQLKGLLGQTAGALQQLPSPIRDAVSEGLKLPLSGSFQRLFMISYLDEEILIIRDAAGAPDVLTRLEGPQPNPGDGTADAVISEYES

SEQ ID NO: 168687 - protein, 177 aa, Zea Mays
MEGTAAARKRSRPETANGAAAAGKRSKDTESFQTGLSSKSKPCTKFFSVDASLAGGIIGKGGVNTKQISRITGVKLSIRDHESNPNLKNIELEGNFDQIKQASDLVRDLIATISASMPAKNPSAAAAPAGGGRGGGPGGKSSNYKTKLCENFLKGACTFGDRCHFAHGETEQRRGAA

SEQ ID NO: 168688 - protein, 56 aa, Zea Mays
MATAQAASASPTHHRASPGMSPPQPPYPSAARIADSACFPQYTASLKCTSPAAHPP

SEQ ID NO: 168689 - protein, 235 aa, Zea Mays
MMSLMVQSWCGDLPSITNIMIPDLPCQNLRDGPGAAGALGGGGEAGHAEAPPPRRRVHPHHRRRERHLLHAPGEAPRAYTMGTRKRRKVHNVDDGGETRWHKTGKTRPVLSNGRPHGYKKFLVLYTNYGKQRKPKKTNWVMHQYHLGSDEEERDGELVVSKVFFQTHPRQCGYTMARESAVVVPAAAAVTGSSNAFIAGHHQSGGGGSSVLREANGGADQLYSPGAMMGYDQGAW

SEQ ID NO: 168690 - protein, 142 aa, Zea Mays
MHHAGDMSNTLMSVIVEYFNSISGALFDTVSRPSTISKYDICPFLLEKVKKGCNFKVKDSLLKTLEETQKRDMIMLPILDGSHWQLVCINFLHREINYFDSLGSDFCAAESLVRPDSLGSDFCAAESLMRPFTSCYKYSCFA

SEQ ID NO: 168691 - protein, 166 aa, Zea Mays
MIAWNGKHLRLDDKIKASEIVACRMKLTHMLIKSKQNSADPCNVVKKLDVNIKKYSVSSRKVITSKNLTMLMGLIDQEIEEINAKKRKRSGHPAGQPELKDDDGQLRANAVKARDAELGCEILHHLLCYPGPRLESEDRLLSSTCLATQMLWRSAWKHSFRRSNTP

SEQ ID NO: 168692 - protein, 128 aa, Zea Mays
MPATSINGMIRLASVTEPETITPFAMLSRATAGIRGSTLIINMPGNPNAVAECLEALLPALKHALKQIKGDKREKHPRHTPHAAVAPVDQWERSFRAASIGSCRGRWCDLVLTSTAYSSLYLYSDFTL

SEQ ID NO: 168693 - protein, 130 aa, Zea Mays
MHHAGDMSNTLMSVIVEYFNSISGALFDTVSRPSTISKYDICPFLLEKVKKGCNFKVKDSLLKTLEETQKRDMIMLPILDGSHWQLLANFIELLKIHKCMKFDVNSFEKVRVKCPKQSNKNGCFTSHTFH

SEQ ID NO: 168694 - protein, 159 aa, Zea Mays
MHHAGDMSNTLMSVIVEYFNSISGALFDTVSRPSTISKYDICPFLLEKVKKGCNFKVKDSLLKTLEETQKRDMIMLPILDGSHWQLVCINFLHREINYFDSLGSDFCAAESLIKASEIVACRMKLTHMLIKSKQNSADPCNVVKKLDVNIKVKSCQFHR

SEQ ID NO: 168695 - protein, 181 aa, Zea Mays
MHHAGDMSNTLMSVIVEYFNSISGALFDTVSRPSTISKYDICPFLLEKVKKGCNFKVKDSLLKTLEETQKRDMIMLPILDGSHWQLVCINFLHREINYFDSLGSDFCAAESLKYSVSSRKVITSKNLTMLMGLIDQEIEEINAKKRKRSGHPAGQPELKDDDGQLRANAVKARDAELGCEM

SEQ ID NO: 168696 - protein, 217 aa, Zea Mays
MHHAGDMSNTLMSVIVEYFNSISGALFDTVSRPSTISKYDICPFLLEKVKKGCNFKVKDSLLKTLEETQKRDMIMLPILDGSHWQLLANFIELLKIHKCMKFDVNSFEKIKASEIVACRMKLTHMLIKSKQNSADPCNVVKKLDVNIKKYSVSSRKVITSKNLTMLMGLIDQEIEEINAKKRKRSGHPAGQPELKDDDGQLRANAVKARDAELGCEM

SEQ ID NO: 168697 - protein, 100 aa, Zea Mays
MKSVNAMLEVPSTGQILAAGTSIEAILISDIISSLDKLPAPSNPHPSRFGSSAESIFTDVSQIASPQDAEVKVAILTLSDTVSSGAGPDRSGPRAVSVVN

SEQ ID NO: 168698 - protein, 439 aa, Zea Mays
MWFKTRRRRCDVHARMFAEHELLQLTTIARMAEEEENMPHRGSVVGRRTIPRDRYSGYFRLMQDYFIQQPVYGDNLFRRRFRMSKNMFNDICEAVAAANRYFRLTHNAAGQAGFSTIQKVTAALRMLAYGGPADSLDEYFRMGESTIIETVNKFTRTIVVIYGEEYLRQPNTEDIARLLRKAEERGFPGMLGSIDCMHWEWEKCPTAWHGQYRGHHKKPTIILEAVASHDLWVWHAFFGMPGSCNDINVLHRSPVFDNLSSGHAPEVNFTVNGREYNMGYYLADGIYPPWATLITPIPAAVSNKQNRFNEKQQEYRKDVERTFGVLQAKYAIIKGPSRMWDPGDMKYIVQCVIILHNMGIKYERGMEQLEIEDYEGASRPSLDPNRNVSEVQQLINAHRQIQSRTTNEQLKNDLVDHIWNLHGSSTEILYKSLAHQIPS

SEQ ID NO: 168699 - protein, 557 aa, Zea Mays
MQTASDGGHVKRDSASHPESNSRGRRRRPPSHPLSLLSRRPCRLLRLFVFSLVFATCGRRDLLPPAKTRKPTTSGRRSSFWAARFAASLLPATASSHLKIRGSADFAALFQTRSPAGSMWFKTRRRRCDVHARMFAEHELLQLTTIARMAEEEENMPHRGSVVGRRTIPRDRYSGYFRLMQDYFIQQPVYGDNLFRRRFRMSKNMFNDICEAVAAANRYFRLTHNAAGQAGFSTIQKVTAALRMLAYGGPADSLDEYFRMGESTIIETVNKFTRTIVVIYGEEYLRQPNTEDIARLLRKAEERGFPGMLGSIDCMHWEWEKCPTAWHGQYRGHHKKPTIILEAVASHDLWVWHAFFGMPGSCNDINVLHRSPVFDNLSSGHAPEVNFTVNGREYNMGYYLADGIYPPWATLITPIPAAVSNKQNRFNEKQQEYRKDVERTFGVLQAKYAIIKGPSRMWDPGDMKYIVQCVIILHNMGIKYERGMEQLEIEDYEGASRPSLDPNRNVSEVQQLINAHRQIQSRTTNEQLKNDLVDHIWNLHGSSTEILYKSLAHQIPS

SEQ ID NO: 168700 - protein, 153 aa, Zea Mays
MSSTSSASSCRHSTIWTTRWLHCPIPLTTKGPKRPFSTCARTSISQATTWPIRGHQQDDSHVPPLCHKEPTTCMGRLASVGRILLQYLIPHDAPRHPLPGGVGHPMSPFLPHMAEATQMEVVGSILRDSDAFLMEVHRRLSKPSSTPSVPNFL

SEQ ID NO: 168701 - protein, 344 aa, Zea Mays
MKIVHRDLVRNGPGSVKLVPEEEDDLWHAYNLIAIGDSLQAVTVRKVLREVASGGRDAERVKLKLEIVVESVDYDKEGSVLRVRGKNITENDHVKIGQFHTLELELKRPFVLRKEIWDWLALETIQQACDPAASADLAVILMQEGLAHLFLIGKSITATRARIETSIPRKHGPAIAGYETALKKFFEYVLQAFLKHIDFEVVQCTVIASPGFTKDQFRDYLFLEAARRDLRVIIENKQRLVLAHATSGYKHSLKEVLDTPGVMALIKDTKAAQEVRALQDFFNMLTNESARACYGPKHVEFALQQFAIQTLLITDTLFRNADIATRQRVGATDRNSGYTSFSSS

SEQ ID NO: 168702 - protein, 170 aa, Zea Mays
MLSSSPAPSQEGAAVPSSWAEAASSAALRHYRSLAKKGKPQGRESTVLAAILLSAPQDSHSLTVLSMGTGTKCLGASMLSARGDLVHDAHAEVIARRALLRLVYSEIGRGAPPDWLVASGDAGRWRLRDGHCLHLYITQLPCGVMPVPPSQSDLPRKQLNSMNVGMLILS

SEQ ID NO: 168703 - protein, 122 aa, Zea Mays
MMKPSCVLLLSSLLVATLAATSSSSPPYSVGKHPGWLLVLGRKGRELGQSSGYHYYQHQSKQPEGVAMEVKKPEEEATARRTADQSGDAETGLIYSADYSSVAMHAASPPTAKPKHRHPTRP

SEQ ID NO: 168704 - protein, 77 aa, Zea Mays
MMKPSCVLLLSSLLVATLAATSSSSPPYSVGKHPGWLLVLGRKGRELGQSSGYHYYQHQSKQPETENLTQLSVHGVQ

SEQ ID NO: 168705 - protein, 144 aa, Zea Mays
MLYTSLSCERDRGTERCDASGSGRQAAHAFLRPPERWMPAMHGPWLPPAVHLSHCSQSQHEQRQQQPAFDGSHQGQDWSLVTGDKKGSEYSYRQKKSISINQSRQAGRQACSWRDYNIHSFTHTRTTRRSSSFNYLDAGVLMNE

SEQ ID NO: 168706 - protein, 126 aa, Zea Mays
MYTQPQMSGSRITGQGCTGWHGSWQAKPKGQQEEGKASGCRRRPPPQQRRRGSILWWRRSQTSARAPFGEGSRASLSVSARCSISHITCTSSYAHVWTSSWSFTRTPWPPSACTHSWSYVVHLSFV

SEQ ID NO: 168707 - protein, 411 aa, Zea Mays
MAAPQQRRRQPSAPQQQHQNGRIDLRDLKAQMLKRLGPDRSRRYFGYLNGYLSERLSRQDFEKLCLQTLGQENLQLHNRLIRAILYNAYQGKCPPPPLDAGRPVGSSVKKASQAAEVLNTCNSDAKLLQVQGLRSVATAQDHTLKDSMNNMGPKCRVAAVNHNQVTHGASGSLENGTINPIELKRLHFQQCEPVEPPAKHPRVEQLPPNNMLLQRSMSSTAERSAEILRSPVRAPLGIPFCSASVGGARKFPPPPIVTGEDHFNSCFEDGGLFSTELLHRRMEKTAETLGLAGVTMHSAELLNIALDEYMKNLIRSSVELVGGSVQRDARKGTLPHKNQVYGNRINGVWLPNHVHMQSGSGSSGTTNEIGSNQLISVSDFKVAMQLNPQHLGENWPVLLEKICLCSSEEND

SEQ ID NO: 168708 - protein, 91 aa, Zea Mays
MKFTRFHIFFVTVVWNPWDKKAKAMSDFGDDEYKRMVCVEAAAIEKTVTLKPGEEWTGKLELSAVPSSYYSGQLDPDRVIQDSTVPEDSIS

SEQ ID NO: 168709 - protein, 92 aa, Zea Mays
MLPATSSNLARNSASASAALRSRVHCSVSGRCPRYTSVPLSPIGPEAMDMKPSASVTGVTLARKSDSVTSAPASGPGTGRVVMEGPFGTKPR

SEQ ID NO: 168710 - protein, 939 aa, Zea Mays
MQENIPIEEVFEQLKCTREGLSSSEGQQRLEIFGPNRLEEKKESKVLKFLGFMWNPLSWVMEMAAIMAIALANGGGKPPDWQDFVGIIVLLVINSTISFIEENNAGNAAAALMANLAPKTKVLRDGRWGEQEAAILVPGDIISIKLGDIVPADARLLEGDALKVDQSALTGESLPVTKGPGDEVFSGSTCKQGEIEAVVIATGVHTFFGKAAHLVDSTNQVGHFQQVLTAIGNFCICSIGVGILVEIIVMFPIQHRKYRSGIENLLVLLIGGIPIAMPTVLSVTMAIGSHKLSQQGAITKRMTAIEEMAGMDVLCSDKTGTLTLNKLSVDKNLVEVFCKGVDKDHVLLLAARASRTENQDAIDAAMVGMLADPKEARAGIREIHFLPFNPVDKRTALTYIDADGNWHRVSKGAPEQILDLCHCKEDLRRKVHSIIDKYAERGLRSLAVARQEVPEKNKESPGGPWQFVGLLPLFDPPRHDSAETIRKALVLGVNVKMITGDQLAIGKETGRRLGMGTNMYPSSALLGQNKDATLEALPVDELIEKADGFAGVFPEHKYEIVKRLQEKKHIVGMTGDGVNDAPALKKADIGIAVADATDAARSASDIVLTEPGLSVIISAVLTSRCIFQRMKNYTIYAVSITIRIVLGFMLIALIWQYDFSPFMVLIIAILNDGTIMTISKDRVKPSPLPDSWKLKEIFATGIVLGSYLALMTVIFFWAMHKTDFFSDKFGVRSIRDSEHEMMSALYLQVSIVSQALIFVTRSRSWSFVERPGLLLVTAFLLAQLVATFLAVYANWGFARIKGIGWGWAGVVWLYSIVFYFPLDLLKFFIRFVLSGRAWDNLLENKTAFTTKKDYGREEREAQWATAQRTLHGLQPPEASSNTLFNDKSSYRELSEIAEQAKRRAEIARLRELNTLKGHVESVVKLKGLDIDTIQQNYTV

SEQ ID NO: 168711 - protein, 426 aa, Zea Mays
MGGLEEIKNEAVDLENIPIEEVFEQLKCTREGLSSSEGQQRLEIFGPNRLEEKKKHIVGMTGDGVNDAPALKKADIGIAVADATDAARSASDIVLTEPGLSVIISAVLTSRCIFQRMKNYTIYAVSITIRIVLGFMLIALIWQYDFSPFMVLIIAILNDGTIMTISKDRVKPSPLPDSWKLKEIFATGIVLGSYLALMTVIFFWAMHKTDFFSDKFGVRSIRDSEHEMMSALYLQVSIVSQALIFVTRSRSWSFVERPGLLLVTAFLLAQLVATFLAVYANWGFARIKGIGWGWAGVVWLYSIVFYFPLDLLKFFIRFVLSGRAWDNLLENKTAFTTKKDYGREEREAQWATAQRTLHGLQPPEASSNTLFNDKSSYRELSEIAEQAKRRAEIARLRELNTLKGHVESVVKLKGLDIDTIQQNYTV

SEQ ID NO: 168712 - protein, 578 aa, Zea Mays
MASLFGAGRRRSPEDDGEDDRSGRGRTKRFRLSPEEDAASPAEAGPGAATETGWLSGFVYGAKRVISSVLLFSSPEETGSGEDEEEEKDDDDDEEGIHLNEHEATHDTHGAIVPYSEPKLTIEQMVMKETFSRDECDRMVELIKSRVRDSTFPEAHEYVKPEEIPSRNAGITHDFTGTWRSLSRDRNVPESVPLSSMRTRPGSFSQGSPLQASPELCTAAVTEAKKWLEEKRQGLGFKPEDNGPCTLNTDILSSHDDSVSDLGSPVDLAKSYMQSLPPWKSPFLGRQKFNTPPSKYFISSAEVTTKEDYLSSFWTKLEESQRARIGSSGGSADAPKFWNYGSNSRLFENDTSIFSLGTDEKVGDPTKIYNGSGKFAATEPVGGCCLPITPTEDRTDGITEPVDLARNNGNAPQENQVASEILPDKVPEGNDVSSTGITKDTTGHSGDVKAPTSEPHLGETRINSASESIPNDAGPPTQNKKNGSTTKKTLVNGLVDQSNANSGLESSGNDNPSYTNSSSAVPPASTQPVESAAAAVDVDSVEKGPGTTPEQPAKRRAPNVRRGQRRVLRSATREGRAT

SEQ ID NO: 168713 - protein, 478 aa, Zea Mays
MASLFGAGRRRSPEDDGEDDRSGRGRTKRFRLSPEEDAASPAEAGPGAATETGWLSGFVYGAKRVISSVLLFSSPEETGSGEDEEEEKDDDDDEEGIHLNEHEATHDTHGAIVPYSEPKLTIEQMVMKETFSRDECDRMVELIKSRVRDSTFPEAHEYVKPEEIPSRNAGITHDFTGTWRSLSRDRNVPESVPLSSMRTRPGSFSQGSPLQASPELCTAAVTEAKKWLEEKRQGLGFKPEDNGPCTLNTDILSSHDDSVSDLGSPVDLAKSYMQSLPPWKSPFLGRQKFNTPPSKYFISSAEVTTKEDYLSSFWTKLEESQRARIGSSGGSADAPKFWNYGSNSRLFENDTSIFSLGTDEKVGDPTKIYNGSGKFAATEPVGGCCLPITPTEDRTDGITEPVDLARNNGNAPQENQVASEILPDKVPEGNDVSSTGITKDTTGHSGDVKAPTSEPHLGETRINSASVQAVASRHHCMV

SEQ ID NO: 168714 - protein, 498 aa, Zea Mays
MASLFGAGRRRSPEDDGEDDRSGRGRTKRFRLSPEEDAASPAEAGPGAATETGWLSGFVYGAKRVISSVLLFSSPEETGSGEDEEEEKDDDDDEEGIHLNEHEATHDTHGAIVPYSEPKLTIEQMVMKETFSRDECDRMVELIKSRVRDSTFPEAHEYVKPEEIPSRNAGITHDFTGTWRSLSRDRNVPESVPLSSMRTRPGSFSQGSPLQASPELCTAAVTEAKKWLEEKRQGLGFKPEDNGPCTLNTDILSSHDDSVSDLGSPVDLAKSYMQSLPPWKSPFLGRQKFNTPPSKYFISSAEVTTKEDYLSSFWTKLEESQRARIGSSGGSADAPKFWNYGSNSRLFENDTSIFSLGTDEKVGDPTKIYNGSGKFAATEPVGGCCLPITPTEDRTDGITEPVDLARNNGNAPQENQVASEILPDKVPEGNDVSSTGITKDTTGHSGDVKAPTSEPHLGETRINSASEIIQLRAGSDWPHIMDNLACRLRKGIIADVSQ

SEQ ID NO: 168715 - protein, 364 aa, Zea Mays
MRFSSEQLAACTKNYSSELGSGGYGVVYKGELPNGLLVAVKVLKVSMNKKVQEAFMAEIGTIGRTYHVHLVRLYGFCFDADTKALVYEFLEKGSLEKYLYCDEGSTATRLEWATLHGIAVGTAKGIRYLHEECQQRIVHYDIKPANILLTADYTPKVADFGLARLGERENTHMSLTGGGRGTPGYAAPELWMALPASEKCDVYSFGMVLFEILGRRRNYDPCQGESKEWFPRWVWERYAQGEIEDVVACDGIVGDADREKAEMMCKVALWCVQFQPSARPTMSSVVRMLEGEMAIVPPVNPFHYVMESSSASTSSGLWSGTYQSSRDTTARESELSASPAAKSTDAMIEDVERAYASVLAKQSL

SEQ ID NO: 168716 - protein, 157 aa, Zea Mays
MLPMSNVSANPSQLTIFYGGSVCVYDSVPPEKAQAIMLIAAAAAAAAATKSSAAPTVKPPMVPAATVAPAAVVSPVLTRSPSLQSTSVATGQPQVVAEPSSICKLQADLPIARRHSLQRFLEKRRDRVVSKAPYSTAKSSDGMESPRIEVTAEGKAQ

SEQ ID NO: 168717 - protein, 134 aa, Zea Mays
MLPMSNVSANPSQLTIFYGGSVCVYDSVPPEKAQAIMLIAAAAAAAAATKSSAAPTVKPPMSTSVATGQPQVVAEPSSICKLQADLPIARRHSLQRFLEKRRDRVVSKAPYSTAKSSDGMESPRIEVTAEGKAQ

SEQ ID NO: 168718 - protein, 131 aa, Zea Mays
MLPMSNVSANPSQLTIFYGGSVCVYDSVPPEKAQAIMLIAAAAAAAAATKSSAAPTVKPPMVPAATVAPAAVVSPVLTRSPSLQSTSVATGQPQVVAEPSSICKLQADLPIARRHSLQRFLEKRRDRLQTS

SEQ ID NO: 168719 - protein, 338 aa, Zea Mays
MKIFSFEELEQATNMFDQNRIIGDGGHGTVYKGILSDQRVVAIKKSRVVVQREIDQFINEVVILSQTNHRNVVTLFGCCLETEVPLLVYEFISNRTLSYHLHGQYENPLSWNDRLRIALETARAIAYLHSAASISVFHRDIKSANILLTDTLTAKVSDFGASRSISIDETGIHTAIQGTHGYLDPEYYYTSRLTEKSDVYSFGVILAELLTRIKPVFSTHSSEGKSLASHFVSVIKDCSLLDILDPQIVEEGRAKDAEAVARLAEVCLSLKGEERPTMRQVEITLEDVLGPNVHSSCRVSRTSQGALKDQTQNQNKGNEGTRLYSLEKEFIQSSEIPR

SEQ ID NO: 168720 - protein, 591 aa, Zea Mays
MAAPSPTTTAAAAAAATTHHRVLLPSARPRAAPSSLRLPLRAQPHAHAHAQRARLAAPVAAAAPAPAASTASPESPASGAVAGKPTVLVAEKLGAAGLALLREFANVDCSYGLSPEDLRAKISLCDALIVRSGTKVGRDVFEASGGRLRVVGRAGVGIDNVDLAAATEHGCLVVNAPTANTVAAAEHGIALLTAMARNIAQADASLKAGLGMHVIAHDPYASADRARAIGVELVSMEEAMTTADFISLHMPLTPATDKMLNDEAFAKMKKGVRIINVARGGVIDEEALVRALDSGVVAQAALDVFTKEPPAADNKLVLHGNVTVTPHLGASTVEAQEGVAIEIAEAVIGALKGELAASAVNAPMVPAEVLSELAPFVVLAEKLGRLAVQLVAGGGGIKSVKVTYASARAPDDLDTRLLRAMITKGLIEPISSVFVNLVNADFTAKQRGVRITEERILLDGSPETPIDYIQVQIANVESKFPSAISETGEITVEGRVKDGVPHLTKVGAFQVDVSLEGSLILCRQVDQPGMIGSVGSVLGEENVNVSFMSVGRIAPRKHAVMAIGVDEEPSKGTLTKIGEIPAIEEFVFLKL

SEQ ID NO: 168721 - protein, 82 aa, Zea Mays
MTTSATASRSASTRDSPASSPSPAPARWRTDSTAPACSGAAPPRTGSWRSASGSELEAPPSKHKSKSVCVQLHVAILRLPCV

SEQ ID NO: 168722 - protein, 90 aa, Zea Mays
MLFLWLWILNRLWSLLWLWILSISHKVISLLLLNPLGMLFLWLWILSRLWSLPWNFDLFGPGIVYHLPNIEAHDISIVKLQQYMLLKSPT

SEQ ID NO: 168723 - protein, 428 aa, Zea Mays
MGCCIYYLFVCYSWMLIFLHYRKLLYSHLAQMKHLFPEAIQIKRILVHDEKSLCMYADMEITLLMDVVECTSPDQSPSMTICEAFYSKLLSFLDAHHKGADIPEAILPELFNSKPREKLYLEAVHNGYAAESPLQGATEERFLNASHFPQSFRKLMSQKIIADGIQKTQLLSDPADLSSVIAYGTKGSNGNPKKEDEHAPVPGKYEISATPSRHLISCCQEGTPKQGTSESPLFSGTPVMQTPKRQLPTSLDKPKATCGHISEPCSASSARRSLNTLLKFEVGSPYYDGVEHTDTTKKGMISEDSSNFNKSFEEDSPVLFIDKDKIDEVDSVDSQEKIASLHTTFDIVCDISHPTKNSLITKQELFHNILANNLEIEEIGEIEEQLNILEDLAPDLISKKMINGGEILYSIQPISDQNSVRVRLVEPV

SEQ ID NO: 168724 - protein, 126 aa, Zea Mays
MTGVVHHAGAGCTKSVQHRACDMKPTRLSPLPTCVVPRRIVHIESTSALDLPCHQRLQTPSGGSEEQQQMVVERKHWVWCAVVGERMEWETVNVVTAAGAVEVRWWCVLVRIWWWVVVEGGHRPLS

SEQ ID NO: 168725 - protein, 67 aa, Zea Mays
MARSDSCLARVGAGVAIGGAVGGAVGACYGTFEAFRYKIPLLLRSDISGKLLLAALQFLGFSWGLGA

SEQ ID NO: 168726 - protein, 54 aa, Zea Mays
MHSLHENLVRNLPIAFRLLSIPCALPLLSLGNDDWRRRCQTSLGISPATSSHQD

SEQ ID NO: 168727 - protein, 492 aa, Zea Mays
MWDLNDSPAAEAAPPSPSADDSGASSSSAAALVEIPDDADDDSAAAAAEAVVTRQFFPAPAAVGAAPGPGSSSARAGWLRLAAAAPPPAAGGSNGVAQTGGPAAAAAAAGKKSRRGPRSRSSQYRGVTFYRRTGRWESHIWDCGKQVYLGGFDTAHAAARAYDRAAIKFRGVEADINFSLEDYQDDMKQMGHLSKEEFVHVLRRQSTGFPRGSSKYRGVTLHKCGRWEARMGQFLGKKYVYLGLFDTEEEAARAYDRAAIKCNGKDAVTNFDPSIYAEELEPAASTGGGGDDHNHNLDLSLGSSAGNKRGSLDDGGGGGGGGDDETSDQRVPMAFDVDWQTAAPRSTKAKLDASSKQPQTQMLPPPPPAVLRVAHQLPLPFGPRHPQFLSNGGDPGTSGGLSLAIGGAGGGHWPPQLQHLQQQRLHGAWANGGGTSWPPPPHPHPHPHPPPPSTAATAAAASSRFPPYVVTTTQGPAGWAQKNGFHSLARPT

SEQ ID NO: 168728 - protein, 549 aa, Zea Mays
MQGQRNSMEHFADVFGFDVASSSGNPVMDQQSYWNNVLGSVESHNLQGYQMAHSDAAMPYGNEPQQDGTFLGFWESGEASSSASALNYGSSNNVKTEHLNIGGGGGLRIGESRLVADNGISLDVDINLNANVNDLCGQSSNVNCASQGPEQYCGSDRNAINSQPTDLGLHPFRTFLLDAQQAESFTLNPSENPLGDFSSMQESIEQRPGGSLDGRRLACKRKNIEGANGQSSAGASTSFPHRNDNAFHNIASSSYNPAPIRNSSSPKCLPVPSSIEDQLPRYGTNVGLSAGTYDLHGGVNNAVNSQRSFRARTTTSQQVAPCSVWPSSNAIRLSNSWNHQPPHFQSAFDDPQEVIPVVSSLNLQYQHPMNVPGVPQAANRFTDHGASSSRAGSLENRIIGSEEVPRRYAAPTNYSDLVPPPAVDLRRLVPEPFNWSSDVRGTAISGSIIPPVSRTNNSSTVNPPAGFNHQNLTRRHPRNLSEEIGRLSGALRGHQPPRLRSGFLLERQGDGVWGVPLSTRGREGRRLMEIRNALEMIQRGENVRLEESY

SEQ ID NO: 168729 - protein, 186 aa, Zea Mays
MCNACEQSQYKNPSNTWRRPPVEEVLCKLATHYINVHSRQCIDEAEVVEHLVGLTSSLAKCKFRKPLTWLSVQANGAVIPKGFVHKDLAKKDTWLKALIAIPDIQPRYAFAIWKKYPCMRSLLNEYMDGSKTVAEKELLLSDLKWEDRLGDEGKRLGNKCSRRVYRMLMAQNGDLDADDPEAGGRS

SEQ ID NO: 168730 - protein, 188 aa, Zea Mays
MNYINKCEQSQYKNPSNTWRRPPVEEVLCKLATHYINVHSRQCIDEAEVVEHLVGLTSSLAKCKFRKPLTWLSVQANGAVIPKGFVHKDLAKKDTWLKALIAIPDIQPRYAFAIWKKYPCMRSLLNEYMDGSKTVAEKELLLSDLKWEDRLGDEGKRLGNKCSRRVYRMLMAQNGDLDADDPEAGGRS

SEQ ID NO: 168731 - protein, 321 aa, Zea Mays
MEKAIQKWESGKFALECITVEIDNSVIQRGSIGGPLLSSLTENGLSYEPTKNRISGSILWKLDVPDDIAQAFSDLNNSCDMNQNPLSQVKYVAIVLEAEEFCNLISNGSFFDHVQRVCDGYPGFTICYIINKLMNYINKCEQSQYKNPSNTWRRPPVEEVLCKLATHYINVHSRQCIDEAEVVEHLVGLTSSLAKCKFRKPLTWLSVQANGAVIPKGFVHKDLAKKDTWLKALIAIPDIQPRYAFAIWKKYPCMRSLLNEYMDGSKTVAEKELLLSDLKWEDRLGDEGKRLGNKCSRRVYRMLMAQNGDLDADDPEAGGRS

SEQ ID NO: 168732 - protein, 1172 aa, Zea Mays
MAPKAGRGKGRGGKGDKRKKEEKVVPSVVDVTVVTPDESQVTLKGISTDRVLDVRKLLGSNVETCHLTNYSLSHVARGHRLEDGAEVVALKPCALRIVEEEYATAEQAEAHVRRLLDILACTTAFARPRDGAAKHRASRHGRPATPPSSPTPASTGAHGVASGEAAPPISEAHDMAAIRPPPKLGEFYDFFSFAHLTPPVHFIRRKEANGASQEGDHFEIEVKVCNGKLLHVVASVKGFYLSGKPHNVSHSLVDLLQQLSNAFANAYEALMKAFVDHNKFGNLPYGFRANTWLIPPIYVDSATRCPALPVEDENWGGNGGGCGRDGKYDRRRWSKEFSVLARMPCKTEEERVIRDRKAFLLHNLFVDTAIFRAASTIRRLIDQSMNSVGSHSGTHGSNVFEERIGDMNITVKKDGADASLKVEDKVDGVAFCQTGAMDIAQRNLLKGLTSDENVVAKDSSTLGVVIVKHCGYTATVKVSGRAKDSNDVKQTNDISGKFDGMLTIDVHDHPDGGSNALNVNSLRIPLPRVIHPETVVGNQHHSPKSHASNPAKKLARKILKDSLVKLDSMPSINSRIIRWELGSSWLQQLQKKDTPASENGKGNAMKTDKEPAVRGLGKHFEQLRKLKKKECNNEGSSSEKEECSNNYSSMNGTQVSDMIAADEANNGADISKLMSEDAFLSLKSLGAGLHEKSLEELTKMAHNFYDDTALPKLVADFASLELSPVDGRTMTDFMHARGLNMSSLGRVVELAEKLPHIQSICIHEMVIRSFKHIIRAVIAAVDDMQNMSAAIAETLNILLGSPRLENGADTDAHIDNNLRLKWVESFLSKRFCWKLKDEFAHLRKCIILRGLCSKVGLELAARDYDMNSPNPFDKSDIVSIVPVCKHVVYSSIDGRNLLESSKMALDKGKLDDAVSYGTKALSKIIAVCGPYHRLAANAYSLLAVVLYHTGDFNQATIYQQKALDINERELGLDHPETMKSYGDLSVFYYRLQHIEMALKYVNRALYLLQFSCGLSHPNSAATYINVAMMEEGMGNVHVALRYLHEALKCNKRLLGADHIQTAASYHAIAIALSMMDAYSLSVQHEQTTMQILQEKLGEDDLRTQDAAAWLEYFESKALEQQEAARRGMPKPDSSIASKGHLRYETTNNLSSFIYKIFKFRLKHLPFQCIRSS

SEQ ID NO: 168733 - protein, 765 aa, Zea Mays
MAPKAGRGKGRGGKGDKRKKEEKVVPSVVDVTVVTPDESQVTLKGISTDRVLDVRKLLGSNVETCHLTNYSLSHVARGHRLEDGAEVVALKPCALRIVEEEYATAEQAEAHVRRLLDILACTTAFARPRDGAAKHRASRHGRPATPPSSPTPASTGAHGVASGEAAPPISEAHDMAAIRPPPKLGEFYDFFSFAHLTPPVHFIRRKEANGASQEGDHFEIEVKVCNGKLLHVVASVKGFYLSGKPHNVSHSLVDLLQQLSNAFANAYEALMKAFVDHNKFGNLPYGFRANTWLIPPIYVDSATRCPALPVEDENWGGNGGGCGRDGKYDRRRWSKEFSVLARMPCKTEEERVIRDRKAFLLHNLFVDTAIFRAASTIRRLIDQSMNSVGSHSGTHGSNVFEERIGDMNITVKKDGADASLKVEDKVDGVAFCQTGAMDIAQRNLLKGLTSDENVVAKDSSTLGVVIVKHCGYTATVKVSGRAKDSNDVKQTNDISGKFDGMLTIDVHDHPDGGSNALNVNSLRIPLPRVIHPETVVGNQHHSPKSHASNPAKKLARKILKDSLVKLDSMPSINSRIIRWELGSSWLQQLQKKDTPASENGKGNAMKTDKEPAVRGLGKHFEQLRKLKKKECNNEGSSSEKEECSNNYSSMNGTQVSDMIAADEANNGADISKLMSEDAFLSLKSLGAGLHEKSLEELTKMAHNFYDDTALPKLVADFASLELSPVDGRTMTDFMHARGLNMSSLGRVELAEKLPHIQSICIHEMT

SEQ ID NO: 168734 - protein, 748 aa, Zea Mays
MAPKAGRGKGRGGKGDKRKKEEKVVPSVVDVTVVTPDESQVTLKGISTDRVLDVRKLLGSNVETCHLTNYSLSHVARGHRLEDGAEVVALKPCALRIVEEEYATAEQAEAHVRRLLDILACTTAFARPRDGAAKHRASRHGRPATPPSSPTPASTGAHGVASGEAAPPISEAHDMAAIRPPPKLGEFYDFFSFAHLTPPVHFIRRKEANGASQEGDHFEIEVKVCNGKLLHVVASVKGFYLSGKPHNVSHSLVDLLQQLSNAFANAYEALMKAFVDHNKFGNLPYGFRANTWLIPPIYVDSATRCPALPVEDENWGGNGGGCGRDGKYDRRRWSKEFSVLARMPCKTEEERVIRDRKAFLLHNLFVDTAIFRAASTIRRLIDQSMNSVGSHSGTHGSNVFEERIGDMNITVKKDGADASLKVEDKVDGVAFCQTGAMDIAQRNLLKGLTSDENVVAKDSSTLGVVIVKHCGYTATVKVSGRAKDSNDVKQTNDISGKFDGMLTIDVHDHPDGGSNALNVNSLRIPLPRVIHPETVVGNQHHSPKSHASNPAKKLARKILKDSLVKLDSMPSINSRIIRWELGSSWLQQLQKKDTPASENGKGNAMKTDKEPAVRGLGKHFEQLRKLKKKECNNEGSSSEKEECSNNYSSMNGTQVSDMIAADEANNGADISKLMSEDAFLSLKSLGAGLHEKSLEELTKMAHNFYDDTALPKLVADFASLELSPVDGRTMTDFMHARGLNMSSLGRVS

SEQ ID NO: 168735 - protein, 698 aa, Zea Mays
MAPKAGRGKGRGGKGDKRKKEEKVVPSVVDVTVVTPDESQVTLKGISTDRVLDVRKLLGSNVETCHLTNYSLSHVARGHRLEDGAEVVALKPCALRIVEEEYATAEQAEAHVRRLLDILACTTAFARPRDGAAKHRASRHGRPATPPSSPTPASTGAHGVASGEAAPPISEAHDMAAIRPPPKLGEFYDFFSFAHLTPPVHFIRRKEANGASQEGDHFEIEVKVCNGKLLHVVASVKGFYLSGKPHNVSHSLVDLLQQLSNAFANAYEALMKAFVDHNKFGNLPYGFRANTWLIPPIYVDSATRCPALPVEDENWGGNGGGCGRDGKYDRRRWSKEFSVLARMPCKTEEERVIRDRKAFLLHNLFVDTAIFRAASTIRRLIDQSMNSVGSHSGTHGSNVFEERIGDMNITVKKDGADASLKVEDKVDGVAFCQTGAMDIAQRNLLKGLTSDENVVAKDSSTLGVVIVKHCGYTATVKVSGRAKDSNDVKQTNDISGKFDGMLTIDVHDHPDGGSNALNVNSLRIPLPRVIHPETVVGNQHHSPKSHASNPAKKLARKILKDSLVKLDSMPSINSRIIRWELGSSWLQQLQKKDTPASENGKGNAMKTDKEPAVRGLGKHFEQLRKLKKKECNNEGSSSEKEECSNNYSSMNGTQVSDMIAADEANNGADISKLMSEDAFLSLKSLGAGLHEKKSSAKV

SEQ ID NO: 168736 - protein, 55 aa, Zea Mays
MGRCILTLTKVLLEEEYKESFNLEGAKSGKLNLHLKWSPQPIMRDSREAGSLRSR

SEQ ID NO: 168737 - protein, 532 aa, Zea Mays
MTIEDSRKLLPADLYPSWVVFSSQQKLKWLNQELTKIWPFVNDAASELIKTSVEPVLEQYRPIIIASLKFSKLTLGTVAPQFTGISIIENTKESGIVMELEMNWDANPSIILAVKTRLGVALPIQVKDIGFTGVFRLIFKPLIEELPCFGAVCFSLRQKKKLDFRLKVIGGEISAVPGISDALEDTIKNAIEDSITWPVRKVIPIIPGDYSDLELKPVGTLEVKLVQARDLTNKDLIGKSDPFAIVYVRPLPDKMKRSKTINNDLNPIWNEHFEFTVEDADTQSVTVKIYDDDGIQESELIGCAQVRLKDLQPGKVKDVWLKLVKDLEIQRDRKDRGQVHLELLYCPFDMKDEAPNPFSQHFSMTSLERTLTNMENGSGGSSFDRLSSRKKREIIIRGVLSVTVISGEDLPAMDMNGKSDPYVILSLKKTKTKYKTRVVTESLNPVWNQTFDFVVEDGLHDMLMLEVYDHDTFRRDYMGRCILTLTKVLLEEEYKESFNLEGAKSGKLNLHLKWSPQPIMRDSREAGSLRSR

SEQ ID NO: 168738 - protein, 558 aa, Zea Mays
MGFWVGLVLGVAAGLALIVGFVRCENSRSARRRQLAATVASFSRMTIEDSRKLLPADLYPSWVVFSSQQKLKWLNQELTKIWPFVNDAASELIKTSVEPVLEQYRPIIIASLKFSKLTLGTVAPQFTGISIIENTKESGIVMELEMNWDANPSIILAVKTRLGVALPIQVKDIGFTGVFRLIFKPLIEELPCFGAVCFSLRQKKKLDFRLKVIGGEISAVPGISDALEDTIKNAIEDSITWPVRKVIPIIPGDYSDLELKPVGTLEVKLVQARDLTNKDLIGKSDPFAIVYVRPLPDKMKRSKTINNDLNPIWNEHFEFTVEDADTQSVTVKIYDDDGIQESELIGCAQVRLKDLQPGKVKDVWLKLVKDLEIQRDRKDRGQVHLELLYCPFDMKDEAPNPFSQHFSMTSLERTLTNMENGSGGSSFDRLSSRKKREIIIRGVLSVTVISGEDLPAMDMNGKSDPYVILSLKKTKTKYKTRVISSSNTNYLVLCTYLCLNMLSQFILCTTKVNISLVSYILCLILFIFGSVENHNNAMVRNCLGKVFNCPYDVTDHRL

SEQ ID NO: 168739 - protein, 826 aa, Zea Mays
MAPRDPKEDGFGVGGAADPEADIEAPLLVSSGSSFLLDPALEDGGGGDEEQRRRRRRFLHGSHTHSNTTSQVALVGADVCPIESLDYLIENDVFKQDWRARGRGHILRYVALKWALCFLVGALAAAAGFVANLGVENVAGAKFVVTSDLMLDGRHGSAFAVFLASNFALTMLAAVLTVYVAPAAAGSGIPEVKAYLNGVDAPNIFSLKTLIVKIVGCIAAVSSSLHVGKAGPLVHTGACIASILGQGGSRKYRMTCRWLRYFKNDRDRRDLVTCGSAAGIAAAFRAPVGGVLFALETVSSWWRSALLWRAFFTTAMVAVVLRALIDFCQSGKCGLFGKGGLIMFDVTADYVTYHLIDLPPVITLGVFGGILGSLYNFFLDKVLRLYNLINEKGKAYKLLLAATVTVCTSCCLFGLPWIAACKPCPTDTREACPSIGRSGNFKKFQCATDEYNDLASLFFNTNDDTIRNLYSAGTDDEFHISSILVFFIASYFLGIFSYGLALPSGLFVPVILTGAAYGRLVGMLIGSQSTLDHGLFAVLGSAALLGGSMRMTVSVCVIILELTNNLRMLPLVMLVLLISKVVADAFNANVYDLLVRLKGFPHLEGYAEPYMRQLSVSDVVTGPLQTFNGIEKVGHIVHVLKTTGHNGFPVVDEPPFSDTPTLYGLILRDHLLVLLRKKDFIRSCTASTLNALNHFSHAEFAKRGSGKHDRIEDIELCPEELEMFVDLHPFTNTSPYTVLETMSLAKALILFREVGLRHLLVLPKSSKRAPVVGILTRHDFMPEHILGLHPFLFKSRWKKVRLGKVQCSCADNVCHFTQSSGKNTVF

SEQ ID NO: 168740 - protein, 811 aa, Zea Mays
MAPRDPKEDGFGVGGAADPEADIEAPLLVSSGSSFLLDPALEDGGGGDEEQRRRRRRFLHGSHTHSNTTSQVALVGADVCPIESLDYLIENDVFKQDWRARGRGHILRYVALKWALCFLVGALAAAAGFVANLGVENVAGAKFVVTSDLMLDGRHGSAFAVFLASNFALTMLAAVLTVYVAPAAAGSGIPEVKAYLNGVDAPNIFSLKTLIVKIVGCIAAVSSSLHVGKAGPLVHTGACIASILGQGGSRKYRMTCRWLRYFKNDRDRRDLVTCGSAAGIAAAFRAPVGGVLFALETVSSWWRSALLWRAFFTTAMVAVVLRALIDFCQSGKCGLFGKGGLIMFDVTADYVTYHLIDLPPVITLGVFGGILGSLYNFFLDKVLRLYNLINEKGKAYKLLLAATVTVCTSCCLFGLPWIAACKPCPTDTREACPSIGRSGNFKKFQCATDEYNDLASLFFNTNDDTIRNLYSAGTDDEFHISSILVFFIASYFLGIFSYGLALPSGLFVPVILTGAAYGRLVGMLIGSQSTLDHGLFAVLGSAALLGGSMRMTVSVCVIILELTNNLRMLPLVMLVLLISKVVADAFNANVYDLLVRLKGFPHLEGYAEPYMRQLSVSDVVTGPLQTFNGIEKVGHIVHVLKTTGHNGFPVVDEPPFSDTPTLYGLILRDHLLVLLRKKDFIRSCTASTLNALNHFSHAEFAKRGSGKHDRIEDIELCPEELEMFVDLHPFTNTSPYTVLETMSLAKALILFREVGLRHLLVLPKSSKRAPVVGILTRHDFMPEHILGLHPFLFKSRWKKVRLGKVKVTNIF

SEQ ID NO: 168741 - protein, 808 aa, Zea Mays
MAPRDPKEDGFGVGGAADPEADIEAPLLVSSGSSFLLDPALEDGGGGDEEQRRRRRRFLHGSHTHSNTTSQVALVGADVCPIESLDYLIENDVFKQDWRARGRGHILRYVALKWALCFLVGALAAAAGFVANLGVENVAGAKFVVTSDLMLDGHGSAFAVFLASNFALTMLAAVLTVYVAPAAAGSGIPEVKAYLNGVDAPNIFSLKTLIVKIVGCIAAVSSSLHVGKAGPLVHTGACIASILGQGGSRKYRMTCRWLRYFKNDRDRRDLVTCGSAAGIAAAFRAPVGGVLFALETVSSWRSALLWRAFFTTAMVAVVLRALIDFCQSGKCGLFGKGGLIMFDVTADYVTYHLIDLPPVITLGVFGGILGSLYNFFLDKVLRLYNLINKGKAYKLLLAATVTVCTSCCLFGLPWIAACKPCPTDTREACPSIGRSGNFKKFQCATDEYNDLASLFFNTNDDTIRNLYSAGTDDEFHISSILVFFIASYFLGIFSYGLALPSGLFVPVILTGAAYGRLVGMLIGSQSTLDHGLFAVLGSAALLGGSMRMTVSVCVIILELTNNLRMLPLVMLVLLISKVVADAFNANVYDLLVRLKGFPHLEGYAEPYMRQLSVSDVVTGPLQTFNGIEKVGHIVHVLKTTGHNGFPVVDEPPFSDTPTLYGLILRDHLLVLLRKKDFIRSCTASTLNALNHFSHAEFAKRGSGKHDRIEDIELCPEELEMFVDLHPFTNTSPYTVLETMSLAKALILFREVGLRHLLVLPKSSKRAPVVGILTRHDFMPEHILGLHPFLFKSRWKKVRLGKVKVTNIF

SEQ ID NO: 168742 - protein, 810 aa, Zea Mays
MAPRDPKEDGFGVGGAADPEADIEAPLLVSSGSSFLLDPALEDGGGGDEEQRRRRRRFLHGSHTHSNTTSQVALVGADVCPIESLDYLIENDVFKQDWRARGRGHILRYVALKWALCFLVGALAAAAGFVANLGVENVAGAKFVVTSDLMLDGRHGSAFAVFLASNFALTMLAAVLTVYVAPAAAGSGIPEVKAYLNGVDAPNIFSLKTLIVKIVGCIAAVSSSLHVGKAGPLVHTGACIASILGQGGSRKYRMTCRWLRYFKNDRDRRDLVTCGSAAGIAAAFRAPVGGVLFALETVSSWWRSALLWRAFFTTAMVAVVLRALIDFCQSGKCGLFGKGGLIMFDVTADYVTYHLIDLPPVITLGVFGGILGSLYNFFLDKVLRLYNLINKGKAYKLLLAATVTVCTSCCLFGLPWIAACKPCPTDTREACPSIGRSGNFKKFQCATDEYNDLASLFFNTNDDTIRNLYSAGTDDEFHISSILVFFIASYFLGIFSYGLALPSGLFVPVILTGAAYGRLVGMLIGSQSTLDHGLFAVLGSAALLGGSMRMTVSVCVIILELTNNLRMLPLVMLVLLISKVVADAFNANVYDLLVRLKGFPHLEGYAEPYMRQLSVSDVVTGPLQTFNGIEKVGHIVHVLKTTGHNGFPVVDEPPFSDTPTLYGLILRDHLLVLLRKKDFIRSCTASTLNALNHFSHAEFAKRGSGKHDRIEDIELCPEELEMFVDLHPFTNTSPYTVLETMSLAKALILFREVGLRHLLVLPKSSKRAPVVGILTRHDFMPEHILGLHPFLFKSRWKKVRLGKVKVTNIF

SEQ ID NO: 168743 - protein, 810 aa, Zea Mays
MAPRDPKEDGFGVGGAADPEADIEAPLLVSSGSSFLLDPALEDGGGGDEEQRRRRRRFLHGSHTHSNTTSQVALVGADVCPIESLDYLIENDVFKQDWRARGRGHILRYVALKWALCFLVGALAAAAGFVANLGVENVAGAKFVVTSDLMLDGRHGSAFAVFLASNFALTMLAAVLTVYVAPAAAGSGIPEVKAYLNGVDAPNIFSLKTLIVKIVGCIAAVSSSLHVGKAGPLVHTGACIASILGQGGSRKYRMTCRWLRYFKNDRDRRDLVTCGSAAGIAAAFRAPVGGVLFALETVSSWRSALLWRAFFTTAMVAVVLRALIDFCQSGKCGLFGKGGLIMFDVTADYVTYHLIDLPPVITLGVFGGILGSLYNFFLDKVLRLYNLINEKGKAYKLLLAATVTVCTSCCLFGLPWIAACKPCPTDTREACPSIGRSGNFKKFQCATDEYNDLASLFFNTNDDTIRNLYSAGTDDEFHISSILVFFIASYFLGIFSYGLALPSGLFVPVILTGAAYGRLVGMLIGSQSTLDHGLFAVLGSAALLGGSMRMTVSVCVIILELTNNLRMLPLVMLVLLISKVVADAFNANVYDLLVRLKGFPHLEGYAEPYMRQLSVSDVVTGPLQTFNGIEKVGHIVHVLKTTGHNGFPVVDEPPFSDTPTLYGLILRDHLLVLLRKKDFIRSCTASTLNALNHFSHAEFAKRGSGKHDRIEDIELCPEELEMFVDLHPFTNTSPYTVLETMSLAKALILFREVGLRHLLVLPKSSKRAPVVGILTRHDFMPEHILGLHPFLFKSRWKKVRLGKVKVTNIF

SEQ ID NO: 168744 - protein, 811 aa, Zea Mays
MAPRDPKEDGFGVGGAADPEADIEAPLLVSSGSSFLLDPALEDGGGGDEEQRRRRRRFLHGSHTHSNTTSQVALVGADVCPIESLDYELIENDVFKQDWRARGRGHILRYVALKWALCFLVGALAAAAGFVANLGVENVAGAKFVVTSDLMLDGRHGSAFAVFLASNFALTMLAAVLTVYVAPAAAGSGIPEVKAYLNGVDAPNIFSLKTLIVKIVGCIAAVSSSLHVGKAGPLVHTGACIASILGQGGSRKYRMTCRWLRYFKNDRDRRDLVTCGSAAGIAAAFRAPVGGVLFALETVSSWRSALLWRAFFTTAMVAVVLRALIDFCQSGKCGLFGKGGLIMFDVTADYVTYHLIDLPPVITLGVFGGILGSLYNFFLDKVLRLYNLINEKGKAYKLLLAATVTVCTSCCLFGLPWIAACKPCPTDTREACPSIGRSGNFKKFQCATDEYNDLASLFFNTNDDTIRNLYSAGTDDEFHISSILVFFIASYFLGIFSYGLALPSGLFVPVILTGAAYGRLVGMLIGSQSTLDHGLFAVLGSAALLGGSMRMTVSVCVIILELTNNLRMLPLVMLVLLISKVVADAFNANVYDLLVRLKGFPHLEGYAEPYMRQLSVSDVVTGPLQTFNGIEKVGHIVHVLKTTGHNGFPVVDEPPFSDTPTLYGLILRDHLLVLLRKKDFIRSCTASTLNALNHFSHAEFAKRGSGKHDRIEDIELCPEELEMFVDLHPFTNTSPYTVLETMSLAKALILFREVGLRHLLVLPKSSKRAPVVGILTRHDFMPEHILGLHPFLFKSRWKKVRLGKVKVTNIF

SEQ ID NO: 168745 - protein, 810 aa, Zea Mays
MAPRDPKEDGFGVGGAADPEADIEAPLLVSSGSSFLLDPALEDGGGGDEEQRRRRRRFLHGSHTHSNTTSQVALVGADVCPIESLDYELIENDVFKQDWRARGRGHILRYVALKWALCFLVGALAAAAGFVANLGVENVAGAKFVVTSDLMLDGHGSAFAVFLASNFALTMLAAVLTVYVAPAAAGSGIPEVKAYLNGVDAPNIFSLKTLIVKIVGCIAAVSSSLHVGKAGPLVHTGACIASILGQGGSRKYRMTCRWLRYFKNDRDRRDLVTCGSAAGIAAAFRAPVGGVLFALETVSSWRSALLWRAFFTTAMVAVVLRALIDFCQSGKCGLFGKGGLIMFDVTADYVTYHLIDLPPVITLGVFGGILGSLYNFFLDKVLRLYNLINEKGKAYKLLLAATVTVCTSCCLFGLPWIAACKPCPTDTREACPSIGRSGNFKKFQCATDEYNDLASLFFNTNDDTIRNLYSAGTDDEFHISSILVFFIASYFLGIFSYGLALPSGLFVPVILTGAAYGRLVGMLIGSQSTLDHGLFAVLGSAALLGGSMRMTVSVCVIILELTNNLRMLPLVMLVLLISKVVADAFNANVYDLLVRLKGFPHLEGYAEPYMRQLSVSDVVTGPLQTFNGIEKVGHIVHVLKTTGHNGFPVVDEPPFSDTPTLYGLILRDHLLVLLRKKDFIRSCTASTLNALNHFSHAEFAKRGSGKHDRIEDIELCPEELEMFVDLHPFTNTSPYTVLETMSLAKALILFREVGLRHLLVLPKSSKRAPVVGILTRHDFMPEHILGLHPFLFKSRWKKVRLGKVKVTNIF

SEQ ID NO: 168746 - protein, 564 aa, Zea Mays
MASEGAPTPAAERIRVVGKWAGALEVDLGSWTVSMLRAEVARRVGDGVEPECVGLIFGGRVLKDDPPASLREAGLKANAKVLSSLTSPDRAKEIDAQAAKAKAEEEHAAKLVRLWEAAKALSQRHTDGSYLAEEDYNLDLEDQSGQKVMFGSVDDKKALTMALMLHQKAKTQMKKGMYKEALDVLIMAEEAFSLCDPKLIEKVDNVPMLQLDIVWCYFVLRDVSCLEVAGARLEKARLGFERSHGKDSTRFRILQAGRQADLAIYVRLELLEGVVAYHNGHVEKARESLTSAHAKYLQLQVPDEAISMLMDMGYEARSAKRALKMTGYDIQSSVELLCEEREKKLRRREEDRVRQREILKQMAYGKTPMNKAVDMQKLKGLTAIGFEKYLAAEALRINENDADKALDLLTNPEQNCILQARRSRASCGFGAGSSRSRAAVARAAPAINNSQTLDNAPPHPADGDAPPHAADGGAPPHAADGDAPPMNNEEIANQDEIMIGEVAVDDEDEDANSHPVPARDASMESELANELKGDALDDYDIDVSNEGQAIAEYLSLLEAAPSSS

SEQ ID NO: 168747 - protein, 390 aa, Zea Mays
MASEGAPTPAAERIRVVGKWAGALEVDLGSWTVSMLRAEVARRVGDGVEPECVGLIFGGRVLKDDPPASLREAGLKANAKVLSSLTSPDRAKEIDAQAAKAKAEEEHAAKLVRLWEAAKALSQRHTDGSYLAEEDYNLDLEDQSGQKVMFGSVDDKKALTMALMLHQKAKTQMKKGMYKEALDVLIMAEEAFSLCDPKLIEKVDNVPMLQLDIVWCYFVLRDVSCLEVAGARLEKARLGFERSHGKDSTRFRILQAGRQADLAIYVRLELLEGVVAYHNGHVEKARESLTSAHAKYLQLQVPDEAISMLMDMGYEARSAKRALKMTGYDIQSSVELLCEEREKKLRRREEDRVRQREILKQMAYGKTPMNKAVDMQKLKGLTAIGSTAHK

SEQ ID NO: 168748 - protein, 157 aa, Zea Mays
MKMRTPAVAFAALLLLLLQITTRAHGIRMDRQLHEAINSKKKMMADPKSGGGGEAASIAAAGDSVRKHCAPDGRRRCSGKVKKAAAHADAAAGAKQQQSNVSTGNVQSSTTVDGEGRRGAGAAWAPPKRGGGGGDDVRGFFFFFFPGRGRGVLPGHH

SEQ ID NO: 168749 - protein, 100 aa, Zea Mays
MKMRTPAVAFAALLLLLLQITTRAHGIRMDRQLHEAINSKKKMMADPKSGGGGEAASIAAAGDSVRKHCAPDGRRRCSGKVKKAAAHADAAAGAKQQQAI

SEQ ID NO: 168750 - protein, 305 aa, Zea Mays
MQSYLQSVAIRLEEMRVKKRDAEQWMHHRSLPLDIRHRVRKYERYRWLETRGVDEETLVQTLPKDLRRDIKRHLCLGLVKRVPLFENMDERLLDAICERLRPALYTENEFILREGDPVDEMHFILHGCLESVTTDGGRSGFFNKVQLKEGSFCGDELLTWALDPKSAANFPVSSRTVQALTEVEAFALCAEELKFVASQFRRLHSRQVQHTFRFYSQQWRTWAACFIQAAWRRYYKRKMAEQRRKEEEAASRPSSSHPSLGATIYASRFAANAMRGVHRLRSKAVPTIVRLPKPPEPDFGVDDAD

SEQ ID NO: 168751 - protein, 449 aa, Zea Mays
MLAGHNVGTLWYFLTIEREDDCWHLYCDDPNFGLGCNSSYLYCNNHHHGSYDSWLTNNSAQVFNMCNGGQDNPFNFGIYEQALVSKILSPGNFISKLCYCFWWGLQNLSTLGQGLLTSTYPGEVLFSIAICVLGLILFALLIGNMQSYLQSVAIRLEEMRVKKRDAEQWMHHRSLPLDIRHRVRKYERYRWLETRGVDEETLVQTLPKDLRRDIKRHLCLGLVKRVPLFENMDERLLDAICERLRPALYTENEFILREGDPVDEMHFILHGCLESVTTDGGRSGFFNKVQLKEGSFCGDELLTWALDPKSAANFPVSSRTVQALTEVEAFALCAEELKFVASQFRRLHSRQVQHTFRFYSQQWRTWAACFIQAAWRRYYKRKMAEQRRKEEEAASRPSSSHPSLGATIYASRFAANAMRGVHRLRSKAVPTIVRLPKPPEPDFGVDDAD

SEQ ID NO: 168752 - protein, 539 aa, Zea Mays
MLIAKRYIKSYFAMDFVALLPLPQIVVWRYLHIPDGPDVLTTKTALVWVVLIQYIPRLLRIFPVITDLKRTAGVFIETAWAGAAYYLLWFMLAGHNVGTLWYFLTIEREDDCWHLYCDDPNFGLGCNSSYLYCNNHHHGSYDSWLTNNSAQVFNMCNGGQDNPFNFGIYEQALVSKILSPGNFISKLCYCFWWGLQNLSTLGQGLLTSTYPGEVLFSIAICVLGLILFALLIGNMQSYLQSVAIRLEEMRVKKRDAEQWMHHRSLPLDIRHRVRKYERYRWLETRGVDEETLVQTLPKDLRRDIKRHLCLGLVKRVPLFENMDERLLDAICERLRPALYTENEFILREGDPVDEMHFILHGCLESVTTDGGRSGFFNKVQLKEGSFCGDELLTWALDPKSAANFPVSSRTVQALTEVEAFALCAEELKFVASQFRRLHSRQVQHTFRFYSQQWRTWAACFIQAAWRRYYKRKMAEQRRKEEEAASRPSSSHPSLGATIYASRFAANAMRGVHRLRSKAVPTIVRLPKPPEPDFGVDDAD

SEQ ID NO: 168753 - protein, 269 aa, Zea Mays
MAGVKAEDVDLVLLCTSTPDDLFGGAAQVLSEVGCTKAFGFDITAACSGFLVGLITATRFIKGGGFQNVLVIGADALSKYVDWTDRGTCILFGDAAGAVLVQACSADEDGMLGFCVQSDGNGQKHLSAIAANDESILSNTNGVPGFPPKKATYSCIQMNGKEVFRFAVRCVPQSIEKALQEAGLPASSIDWLLLHQANQRIIDAAASRLDIPSDKVISNLANYGNTSAASIPLALDEAVRSGKVKTGDIIAASGFGAGLTWGSAIVKWG

SEQ ID NO: 168754 - protein, 72 aa, Zea Mays
MGHALNKILKDFINRYKLLQNHKVSFVPGWDCHGLLIELKGKFICTKVACANEAWQSMSSGKPKNLQKPRQK

SEQ ID NO: 168755 - protein, 243 aa, Zea Mays
MAASIGIMDGAYFVGRGEILHWINATLQLSLAKVEEVNFDAKTEYDMIQNYKVLQDVFNKLRIGKNIEVNKLVKGRPLDNLEFLQWLKRYCDSVNGGIMNENYNPVERRSKGCKERVSKGSNKPSKSLQANRLSGADPTDGGHGVGKVCNTFSEEHYIEQIQKLSEKIADLKVSVDSTEKERDFYFSKLRDIEILCQRPELEHLPMTKAVRKILYAADAKDSPLPEANDIITKSPSLFSNETE

SEQ ID NO: 168756 - protein, 527 aa, Zea Mays
MMSDLRKTRQRVAYAGKAGDARYPNPSYWGKLCFMSTPDGENCGLVKNLAVTAIVSSRVMQPLIESFISCGMSKLNDIPTEHIQRMDKIFLNGNWVGSCENSASFVFRLRCMRRSSLIDPQVEIKRDKHHNEVRVFTDAGRILRPLLVVENLNKIRKPKGRSFSFHELMQQEIIEFIGVEEEEDIQCAWGIRHLFESEGAISSYTHCELDPSFLLGLSCGIIPFANHNFARRVLYQSEKHSQQAIGYSTTNPHIRVDTLSHQLYYPQRPLFKTVIADCLGRSDYASFGRKNDFARPEYFNGQNAIVAVNVHQGFNQEDSLVMNRASLERGMFRTEHLRSYKADVENKDGTKRLKLKEKIDFGKTESKRGRVDNLDDDGLPYVGASLQTNDIVIGKVSESGEDHSIKLKHTEKGMVQKVLLSANDEGKNFAVVTLRQVRTPCLGDKFSSMHGQKGVVGFLESQENFPFTHEGIVPDIVINPHAFPTRQTPGQLLEAALGKGIACKGTMRYATPFTTASVDVIAEQLHR

SEQ ID NO: 168757 - protein, 827 aa, Zea Mays
MKLIGYLLASFRLWSNQTYVCCIASTKVSACSTQVDTFWSREWRRNKRLDLPGELLGRELRAQLRLAEKRMVKAIQRDLNSDRELQDLERYIDASIVTNGLNRAFSTGSWCHPYKRAERCSGIVATLRRTNPLQMMSDLRKTRQRVAYAGKAGDARYPNPSYWGKLCFMSTPDGENCGLVKNLAVTAIVSSRVMQPLIESFISCGMSKLNDIPTEHIQRMDKIFLNGNWVGSCENSASFVFRLRCMRRSSLIDPQVEIKRDKHHNEVRVFTDAGRILRPLLVVENLNKIRKPKGRSFSFHELMQQEIIEFIGVEEEEDIQCAWGIRHLFESEGAISSYTHCELDPSFLLGLSCGIIPFANHNFARRVLYQSEKHSQQAIGYSTTNPHIRVDTLSHQLYYPQRPLFKTVIADCLGRSDYASFGRKNDFARPEYFNGQNAIVAVNVHQGFNQEDSLVMNRASLERGMFRTEHLRSYKADVENKDGTKRLKLKEKIDFGKTESKRGRVDNLDDDGLPYVGASLQTNDIVIGKVSESGEDHSIKLKHTEKGMVQKVLLSANDEGKNFAVVTLRQVRTPCLGDKFSSMHGQKGVVGFLESQENFPFTHEGIVPDIVINPHAFPTRQTPGQLLEAALGKGIACKGTMRYATPFTTASVDVIAEQLHRAGYSRWGSENVLNGRTGERVQSLVFMGPTFYQRLIHMSEDKVKFRNTGPVHPLTRQPVADRKRFGGVKFGEMERDCLLAHGSAANLHERLFLLSDFSQMHICQTCERVANVVMRSVPGGKKIRGPYCGFCKSSENIVRINVPYGAKLLYQELFSMGICLKFETQVC

SEQ ID NO: 168758 - protein, 1106 aa, Zea Mays
MEEPQKDSGQPSKSSDSELEAMVLDDNGAGKSHSMEENRDSPIDVDGGQSSMDVDIKGKSSLSDDVNGKSSSEPYSNAPIDMSVESLEKFCKEASRSFFDEVGLISHQINSYNEFVSHGLQELFDSLGEVIVEPGYDPSKKGSGGWKHAIIKFGRVKLEKPVFWTGKDEGSVDFKPWHARLQNMTYASRLIVEVTIQVYSLEKSDKSKTGNDGFVQKRNFMNETHWIFIGLLPVMVKSNLCLLHSLNESECLFDAGGYFLVKGMEKVFIAQEQRCLRRLWISDRPCWTISFMSEIKRRRIYIKLVESTRSEDFSESKIITISFLNKRLDLPGELLGRELRAQLRLAEKRMVKAIQRDLNSDRELQDLERYIDASIVTNGLNRAFSTGSWCHPYKRAERCSGIVATLRRTNPLQMMSDLRKTRQRVAYAGKAGDARYPNPSYWGKLCFMSTPDGENCGLVKNLAVTAIVSSRVMQPLIESFISCGMSKLNDIPTEHIQRMDKIFLNGNWVGSCENSASFVFRLRCMRRSSLIDPQVEIKRDKHHNEVRVFTDAGRILRPLLVVENLNKIRKPKGRSFSFHELMQQEIIEFIGVEEEEDIQCAWGIRHLFESEGAISSYTHCELDPSFLLGLSCGIIPFANHNFARRVLYQSEKHSQQAIGYSTTNPHIRVDTLSHQLYYPQRPLFKTVIADCLGRSDYASFGRKNDFARPEYFNGQNAIVAVNVHQGFNQEDSLVMNRASLERGMFRTEHLRSYKADVENKDGTKRLKLKEKIDFGKTESKRGRVDNLDDDGLPYVGASLQTNDIVIGKVSESGEDHSIKLKHTEKGMVQKVLLSANDEGKNFAVVTLRQVRTPCLGDKFSSMHGQKGVVGFLESQENFPFTHEGIVPDIVINPHAFPTRQTPGQLLEAALGKGIACKGTMRYATPFTTASVDVIAEQLHRAGYSRWGSENVLNGRTGERVQSLVFMGPTFYQRLIHMSEDKVKFRNTGPVHPLTRQPVADRKRFGGVKFGEMERDCLLAHGSAANLHERLFLLSDFSQMHICQTCERVANVVMRSVPGGKKIRGPYCGFCKSSENIVRINVPYGAKLLYQELFSMGICLKFETQVC

SEQ ID NO: 168759 - protein, 893 aa, Zea Mays
MSRGVISAIQRNADMQDCDASVINTISATIKESDKLCEDFRKSDKARQYVDELVKSSRFPPAESFDDYIARFLFPDISGNRNKALFLGYMVKCLLMAFTGKRKCDNKDDFRNKRLDLPGELLGRELRAQLRLAEKRMVKAIQRDLNSDRELQDLERYIDASIVTNGLNRAFSTGSWCHPYKRAERCSGIVATLRRTNPLQMMSDLRKTRQRVAYAGKAGDARYPNPSYWGKLCFMSTPDGENCGLVKNLAVTAIVSSRVMQPLIESFISCGMSKLNDIPTEHIQRMDKIFLNGNWVGSCENSASFVFRLRCMRRSSLIDPQVEIKRDKHHNEVRVFTDAGRILRPLLVVENLNKIRKPKGRSFSFHELMQQEIIEFIGVEEEEDIQCAWGIRHLFESEGAISSYTHCELDPSFLLGLSCGIIPFANHNFARRVLYQSEKHSQQAIGYSTTNPHIRVDTLSHQLYYPQRPLFKTVIADCLGRSDYASFGRKNDFARPEYFNGQNAIVAVNVHQGFNQEDSLVMNRASLERGMFRTEHLRSYKADVENKDGTKRLKLKEKIDFGKTESKRGRVDNLDDDGLPYVGASLQTNDIVIGKVSESGEDHSIKLKHTEKGMVQKVLLSANDEGKNFAVVTLRQVRTPCLGDKFSSMHGQKGVVGFLESQENFPFTHEGIVPDIVINPHAFPTRQTPGQLLEAALGKGIACKGTMRYATPFTTASVDVIAEQLHRAGYSRWGSENVLNGRTGERVQSLVFMGPTFYQRLIHMSEDKVKFRNTGPVHPLTRQPVADRKRFGGVKFGEMERDCLLAHGSAANLHERLFLLSDFSQMHICQTCERVANVVMRSVPGGKKIRGPYCGFCKSSENIVRINVPYGAKLLYQELFSMGICLKFETQVC

SEQ ID NO: 168760 - protein, 98 aa, Zea Mays
MIPGLRDVCQCGYSSGCKTIFVPCLFRCMNCELQSIKGGHVTSIKRYDPGLIIIIARKQHFSGLKYNYIKVAKPYRSRYIMERIIHRLYYSRRQPYLH

SEQ ID NO: 168761 - protein, 128 aa, Zea Mays
MCVRTTWRPCHVSAVRFQQSRPLHDLKSVCLFCFLLRHLKSNGPSTILPEEQNDKNKIPEINSGDFDLDALAEALEQSATLASNSKKKNKSKHANAPVKRPVLKAQACDLSIPGVHKFKRTRYHACKI

SEQ ID NO: 168762 - protein, 100 aa, Zea Mays
MIPGLRDVCQCGYSSGCKTIFVPCLFRCMNCELQSIKGGHVTSIKRYDPVCTMFLRFWPVNPPISLPLPLSKGNHFYCFLGPDNNNCKKAAFLWIKVQLY

SEQ ID NO: 168763 - protein, 194 aa, Zea Mays
MEAIVGVRAPPRGRAWAGLEKPPRAACRARVPTARLAVAADRPRRLVLLGADTRRAADPALRCAAQSAGTGKVHYSADDALILQQKAQDVLPYLDGRCVYLVGMMGSGKTTVGKILSEVLGYSFFDSDKLVEKAVGISSVAEIFQLHSETFFRDNEELHEERADRMVRCPTGCTCKKNRCCRNRVSTTLASGIR

SEQ ID NO: 168764 - protein, 118 aa, Zea Mays
MTDMLKLQQKAQDVLPYLDGRCVYLVGMMGSGKTTVGKILSEVLGYSFFDSDKLVEKAVGISSVAEIFQLHSETFFRDNEELHEERADRMVRCPTGCTCKKNRCCRNRVSTTLASGIR

SEQ ID NO: 168765 - protein, 162 aa, Zea Mays
MEAIVGVRAPPRGRAWAGLEKPPRAACRARVPTARLAVAADRPRRLVLLGADTRRAADPALRCAAQSAGTGKVHYSADDALILQQKAQDVLPYLDGRCVYLVGMMGSGKTTVGKILSEVLGYSFFDSDKLVEKAVGISSVAEIFQLHSETFFRDNEVICLSL

SEQ ID NO: 168766 - protein, 148 aa, Zea Mays
MRSRSKAQHDPKESVDPELRGMAAPHAHAPSYVASPVAALARPSLPCYVCYCYPSTIDHRGHKLIRPAAAAATHRQSCSINSGELHRRVSSLGDQAGRAPPSGPLLLLVSSLLSELGIQGYYTCLHPSFMHGAYNGMRICTALFVQNK

SEQ ID NO: 168767 - protein, 248 aa, Zea Mays
MVHEASNMQRRLKNEPTIPLPRSASLVEPGKVVSNGQVKEQHKTAAAILADKIAASSNSQQILQSALSKFAAEEAKNSSETRSDKRQKAEQLSQVPSVANAAAFVPMPQVVATTAQQQPQAILVQQAPMQSQATASQPQYNIYQAPPQQFVPQPGGVMMGMPYNMSSMTPPPPPPPQMMSLGRPSPSAPQPQMAVMPQTQPPAPPMLQQQMPMNLGPQMQFTLQPPGVPPFRPMQPPPGMQYFHPQSQ

SEQ ID NO: 168768 - protein, 329 aa, Zea Mays
MRHVGKMEKDVDSACSKAEDPRREVLCTELKDEEANMKKCIEKLKAVEKNRAAIVFELKEALQEQESELEKVRTQLQLAEAMVHEASNMQRRLKNEPTIPLPRSASLVEPGKVVSNGQVKEQHKTAAAILADKIAASSNSQQILQSALSKFAAEEAKNSSETRSDKRQKAEQLSQVPSVANAAAFVPMPQVVATTAQQQPQAILVQQAPMQSQATASQPQYNIYQAPPQQFVPQPGGVMMGMPYNMSSMTPPPPPPPQMMSLGRPSPSAPQPQMAVMPQTQPPAPPMLQQQMPMNLGPQMQFTLQPPGVPPFRPMQPPPGMQYFHPQSQ

SEQ ID NO: 168769 - protein, 147 aa, Zea Mays
MFQGPICGVPDFKMRGKKSDELEPVDAGDEDDDGGDDGDEDGDFGEEGEEDVSEGEGYDNPKGNETKKQRGDPEENGEEDEEEPEDQEGGGDDDDDDDDDDENGDDEDDDNGDDDEEGVDEEDDDQDEDEEEDDDEDSLQPPKKRKK

SEQ ID NO: 168770 - protein, 67 aa, Zea Mays
MITFFLKKKFLPVIIYPAKKGYVCMDPTHTVTAVYHFVLIHLDLVSSGRPTHHTTHPQSPIRYTLCA

SEQ ID NO: 168771 - protein, 130 aa, Zea Mays
MAGAAKASWMVAMSVGAVEALKDQGGLCRWNYALRSVHRTAKQKARERKNKQETQMAAAAKASWMVAMSVGAVEALKDQAGLCRWNYALRSVHRAAKANAPSFAQARKLAPPAADKAAAEEGMRTVMYLC

SEQ ID NO: 168772 - protein, 91 aa, Zea Mays
MCGRRAPGIQENQRPRPLVCSPPSRIYQPAHHTSTPNRQTHNTTNHLTRSLITRKSSDHQPELGSKPPTPTQGDRYVRRWRVQRRRRGWWP

SEQ ID NO: 168773 - protein, 175 aa, Zea Mays
MVCIRQATIDDLLAMQACNLMCLPENYQMKYYLYHMLSWPQLLFVAEDYGGRIVGYVLAKMEEDPSEPCHGHITSLAVLRSHRKLGLATKLMSAAQAAMDQVFGAESTTSRPSTTPMERTRSTCASLSGSRNLRSTTITTTTAPVGAAPTTHLRRRLVLLLSLLVRRIRRLTLDG

SEQ ID NO: 168774 - protein, 496 aa, Zea Mays
MESCKHRSRNHAMGSSKRVPPYLLLVLLAVGAAAVSVGILHKMRERRVLAVLLQERDQQLISFQVLLEKEKEINKEMRRKVDELEAKTSVLSIERAELKNKLMDSETTTTYLTNTQKELEAALVEKESHINQIKENAVASNPDQTITIKELLQQKEAEPDLDKSENSSDPIPATVEDNSNNTTISESSHNDESIVVGANTENATSETVVDKSENSNDSMPAPEKENSSNTNASDSSHQNENIIVEAKEDNETSDLVVLDKSESTNGSVPVTAEEQNSYNTTAWESNQQDNSSSQEQFLKLTTNIEDGQFQQNKGDANEQSDDASEGSHLDRSELQRGNQKLIDNQEASKEEPDGTRQVEDPQGEASNHGRESKVLEKENEKERNPEGTSSVDTLSEANQNKTQAVEPVVDPTDVNPSTSTNNEERRETRKRRRRRRSRSRRNRKAAVEDANILDVFVSRVRQAYLFYLDYAKLAGFSVRTKRCNCNCWCGVIATPH

SEQ ID NO: 168775 - protein, 308 aa, Zea Mays
MPYHMHINLELLEATHLICAMLIEVPNMAASTYDKRRPMSKTFRRLLEVSERQTFVGPPENVRDHVMAATRALNKGDHQKAFSVINSLEIWKLLRNREHVLEMLELKIKEEALRTYLFSYSSSYESLSLNQLTTMFDLSEQHAHSIVSKMMMHEELHASWDQPTKCIVFHSVDQTRLQGLLFQMADKLSVLVEINERAYEARTGGTLEGVPPRRRGEGQDNMGKWQDNFVSSQGRQGGGNRFGYSGRGAISGQSGGGHQRDRGNQGYRGGYGGVSRFQDARGRNQSIPSGRGGDGGARMVNLNRMGRV

SEQ ID NO: 168776 - protein, 618 aa, Zea Mays
MASRFWGQGDSESEEEEVEEVESEQGSDSDDDGGRGGAGRGAQNRYLKNQEDDSDESDTGHRVIRSLRDKRNEEMRSIVDQMRNAMKINDWVSLQESFEKLNKHLEKVVRVNESTEVPKMYIKALVLLEDFLAEALANKEARKKMSSSNSKALNAMRQKLKKNNKQYEEQIQKCREHPESFEDEAADDKDVDDDDADESDAEIEDPDKIAMSESEEEQDEEDDDKDGWEQKRSKKDKLMDKQFLKDPSEITWDIVDKKLKEIIASRGKKGTGRIERVEQLTFLTRVAKTPAQKLEILFHVISAQFDVNPSLLGHMPVNVWKKCVNNMLLVLDILQQYPNIVVDTSFEPDENETQKGADYNGTIHVVGDLVAFLERLDSEFLKTLQCTDPYTKDYVQRLREEPLFLVVAQNVQDYLERVGNFKAAAKVALRRVELVYYKPQEVYDAMRKLAEQPEDCVDDDDAEAGDEHKAVDDNRGPSPFVVIPEAVHRKPTFPESGRTLMDGLMFLIYKYGDERTKARAMLCDIYHHAISDEFSVARDLLLMSHLQDGIQLMDISSQILFNRVMAQLGLCAFRAGLINEAHGCLTELYSTGRVKELLAQGVQQSRYHEKTPEQTWLA

SEQ ID NO: 168777 - protein, 702 aa, Zea Mays
MDTIFVHLLLLSFMILRPIAIAADVPESDTLGKGRNITDGETLVSADGTFTLGFFSPGASTKRYLGIWFSASSVAVCWVANGGRPVNGNSGVLVVRDTGSLLLLDGSGQTIWSSNSTSSSSSAEAQLLNSGNLVVRDGGSSSSSDAILWQSFDHPSNTLLSGMKLGKNKWTGAEWYLTSWRSADDPSPGAYRRALDTSGLPELVVWEGNVRTYRTGPWNGRWFSGVPEVSAYRNLIWYQVTTSPAEVSYGYTSNPGAALTRVVLTDAGVAKRLVWDAGARTWQTFFQGPRDVCDAYGKCGAFGLCDAGAASTWFCTCLTGFSPASPPAWSLRDTSGGCKRNVKLDCANNGSGTTTTTDGFLLVRGVKLPDTHNATVDMSITVEDCAARCLANCSCLAYAAADIRGGDVRSGCVMWTDDIVDLRYVDKGQDLYLRLARSELPAAAGPSPQRPFRTAPVVGASAAAVAVVLIVLSVVLVIRRRRRPIIPAAQSASPSVPSTELRRPPSVPSVDLSSLRRATNDFSADNVIGRGGFSTVFEGNLADGTKVAVKRLTQSYLTDGGGETFMREVEVMSELKHENLARLLAYCKDGNERILVYEYMENRSLNLCIFARDANQRAVLNWERRLEIIVGVARGVAYLHGLSKVVIHRDLKPSNVLLDGNWRAKIADFGTAKVFVDGQTNPTLGSRVHGARAEPDAEVRRV

SEQ ID NO: 168778 - protein, 830 aa, Zea Mays
MDTIFVHLLLLSFMILRPIAIAADVPESDTLGKGRNITDGETLVSADGTFTLGFFSPGASTKRYLGIWFSASSVAVCWVANGGRPVNGNSGVLVVRDTGSLLLLDGSGQTIWSSNSTSSSSSAEAQLLNSGNLVVRDGGSSSSSDAILWQSFDHPSNTLLSGMKLGKNKWTGAEWYLTSWRSADDPSPGAYRRALDTSGLPELVVWEGNVRTYRTGPWNGRWFSGVPEVSAYRNLIWYQVTTSPAEVSYGYTSNPGAALTRVVLTDAGVAKRLVWDAGARTWQTFFQGPRDVCDAYGKCGAFGLCDAGAASTWFCTCLTGFSPASPPAWSLRDTSGGCKRNVKLDCANNGSGTTTTTDGFLLVRGVKLPDTHNATVDMSITVEDCAARCLANCSCLAYAAADIRGGDVRSGCVMWTDDIVDLRYVDKGQDLYLRLARSELPAAAGPSPQRPFRTAPVVGASAAAVAVVLIVLSVVLVIRRRRRPIIPAAQSASPSVPSTELRRPPSVPSVDLSSLRRATNDFSADNVIGRGGFSTVFEGNLADGTKVAVKRLTQSYLTDGGGETFMREVEVMSELKHENLARLLAYCKDGNERILVYEYMENRSLNLCIFARDANQRAVLNWERRLEIIVGVARGVAYLHGLSKVVIHRDLKPSNVLLDGNWRAKIADFGTAKVFVDGQTNPTLVQTEAPEYTARGPSLTLKCDVYSFGVVLIEIVSGQRNSSNQTLVSDARESWSQNKIKENLLDPAVGQPGPEILLRLERCVQVGLLCVQQSPADRPSMAEVVAMLTVNGTSSSQIRSHRSAAAAAAATPLATQDASSGAHGDSIYLT

SEQ ID NO: 168779 - protein, 272 aa, Zea Mays
MSSSVSKMVEAMRAVAQIWKTLNNMYSRKENVMMMMEIRSKADAVKHTGRPVEQYASEIQYLWRELDHYAPLQMVCPQDAQVVHKWVEDRRVTHFLKNLDPEFESRRDAFCHQESLPTMDEAVSAMINEESRLRVMTSNDPAKSAYTANDDRDCYNCGEKGHLSYNCPHPRGSGERGGGTRGATCSTYGRGRGGYGRGRGGRARGRGRGGPHVNVAVTEDTPSITLTREQAKRWEEWHKGKESECPTSTPLGSVATTSTQHFGEENWEEDWD

SEQ ID NO: 168780 - protein, 75 aa, Zea Mays
MLLHHRLGHVSFESLSKLYPDSFKGMEKGTLVCDACELAKHTRSTYPSVGLRSSDSFMLIHSDVWGSCSITSKWF

SEQ ID NO: 168781 - protein, 109 aa, Zea Mays
MADRSHLRRCGSAIFHWYLFSFPTTQPWDKARRGAGTLRNHSRCSRRRWCHDLADVGGLCSRAGRRTTRRERVGRKMRQKGKEARGDVHSPSVVSNGSIQSKLILSARR

SEQ ID NO: 168782 - protein, 498 aa, Zea Mays
MGYNKATPRRNVLSALNNAEANGGTPSVPADGGGGGGAAEAAPVIEFSGREDVERLLAEKMKGKSKNDFKGRVDQMSDYIKKLRACIRWYMELEDGYLAEQEKLLGAMDSENTRHTELEAQLSTAIEELKATNLDLTRRCESLEESFNKEKSEKLIAVESYEKEKQERESAESSRDVLTVDLERVTHDAKRFSEQLKMVQDTNKRLQEYNTSLQQYNSNLQADASKSGETISKLQKEKSAMMETMATLRECNSSMGNQLESSRVSQQEAIRVKEELRKEVECLRVELKQVRDDRDHSAIQLNSLNIELGNYKEQIGKTSKECERFRTKVSELEETCSTQQEQIRTFQKQLAVATEKLKLADVTAIEAMTGYEEQKEKIKYLEERLAQAESQIVEGDELRKKLHNTILELKGNIRVFCRVRPLLRFEGDSNGPEGASISFPTSVESTGRSIDLINQGQKLSFSYDKVFDHGASQEDVFVEISQLVQSALDGYKEMIKKG

SEQ ID NO: 168783 - protein, 686 aa, Zea Mays
MGYNKATPRRNVLSALNNAEANGGTPSVPADGGGGGGAAEAAPVIEFSGREDVERLLAEKMKGKSKNDFKGRVDQMSDYIKKLRACIRWYMELEDGYLAEQEKLLGAMDSENTRHTELEAQLSTAIEELKATNLDLTRRCESLEESFNKEKSEKLIAVESYEKEKQERESAESSRDVLTVDLERVTHDAKRFSEQVSQQEAIRVKEELRKEVECLRVELKQVRDDRDHSAIQLNSLNIELGNYKEQIGKTSKECERFRTKVSELEETCSTQQEQIRTFQKQLAVATEKLKLADVTAIEAMTGYEEQKEKIKYLEERLAQAESQIVEGDELRKKLHNTILELKGNIRVFCRVRPLLRFEGDSNGPEGASISFPTSVESTGRSIDLINQGQKLSFSYDKVFDHGASQEDVFVEISQLVQSALDGYKVCIFAYGQTGSGKTYTMMGKPGNDQKGIIPRSLEQIFKTSRFLESQGWNYSMQASMLEIYNETIRDLLAPGRSNSFESSKQCTIKHDPHGNIVSDLTIIDVFGIADVTSLLEKASQSRSVGKTQMNEQSSRSHFVFTLKISGSNENTGQNVQGVLNLIDLAGSERLAKSGSTGDRLKETQSINKSLSALSDVIFAIAKGDDHVPFRNSKLTYLLQPCLGGDSKALMFVNISPEASSVGETICSLRFASRVNACEIGIPRRHT

SEQ ID NO: 168784 - protein, 284 aa, Zea Mays
MIKKSKDQDAIGEMKSRVTWIDKQLKSHPPKNVESEILREHIKKEREAAKAGKRPYYLRKPELRERKLMNKYNELKEECLQRSSVHAVPTLGNNELRGRLPAGLSGLRDLQYLILENNPMGGVPLPPELGNIPRLQELRLANSGYSGPIPDTFGLLSSLTTLSLENNNLTGRIPPGLSRLKRMYHLNLSKNGLDGVVPFDAAFLRRLGRNLDLSGNPGLCVTDRAVMPGVGVGVCGDDVVDCERSAAAESSVVGRVVRGEVTTGRWPAGLLRPAAVALCSCLLL

SEQ ID NO: 168785 - protein, 173 aa, Zea Mays
MPPIVLSPHDAHKEPPSPVHVEFLYGSSSPLMASLLRHWNCSLGAADFLPPVSRPAPNPTFCARPSPVRPGPRCPNRGKEACARLSPPVRASPIAWLTGAPLLRARPTEPWPWRPARNRPCPCVPPVKCPLADSHASPPLAMATCYSASYRSVQQGSRRVDPPPAAVGRALSV

SEQ ID NO: 168786 - protein, 81 aa, Zea Mays
MENFHMKQMAATDAKQFNDRPQLMAKYLEAMSSKQQVTTGADHQAPISSSSAEEKAIHESNELRKRGLCLVPISMLINYLG

SEQ ID NO: 168787 - protein, 231 aa, Zea Mays
MRRRSHAGRCLHRRAAPLLVVALEKVERSSGTLIGSSIATIQKSAAPEMLLALMDEAYTGSAVEEPSGNSGSDDSGPLDLTDPMFLDLLKDENDGIAAKHWISPTISSTLQAAFNSPQSDRLKQSLEMAPRFLTLYFATALRDVNDSLLCALIPVVMSRYAAMFPDKVFSFKVRERLSDFILAAFQRSPNIIAVLKKPITDRLGEAHDNLAKASISFNADRVSIALVLGHW

SEQ ID NO: 168788 - protein, 150 aa, Zea Mays
MMSAGSFLPLFLSLMDLPMLVVALEKVERSSGTLIGSSIATIQKSAAPEMLLALMDEAYTGSAVEEPSGNSGSDDSGPLDLTDPMFLDLLKDENDGIAVSSFSYTMVYIPSELLVLVISSSVSPFRQNIGYPLRYLQRYKQHLTAHSRTD

SEQ ID NO: 168789 - protein, 344 aa, Zea Mays
MASPDLAAGDGSYDFHLRSLSAASRDSAAASDPASDPNLLQSVRRVCEMCRTAKEAKDEMVARAFPVMGKLFQRCAAAPTQAVASTGVLLLTILQFFLDFGEAVLHDADGSLKTFFRSCLSREFADPIVAERTVEFLVTNKTKILSSFPNLIPQFYPLLLKLIASNGERLENKFSEVLPLMMSAGSFLPLFLSLMDLPMLVVALEKVERSSGTLIGSSIATIQKSAAPEMLLALMDEAYTGSAVEEPSGNSGSDDSGPLDLTDPMFLDLLKDENDGIAAKHWISPTISSTLQAAFNSPQSDRLKQSLEMAPRFLTLYFATALRDVNDCRLHTFFCMLFFATHVK

SEQ ID NO: 168790 - protein, 202 aa, Zea Mays
MMSAGSFLPLFLSLMDLPMLVVALEKVERSSGTLIGSSIATIQKSAAPEMLLALMDEAYTGSAVEEPSGNSGSDDSGPLDLTDPMFLDLLKDENDGIAAKHWISPTISSTLQAAFNSPQSDRLKQSLEMAPRFLTLYFATALRDVNDCSTAVCSYSSSYVKICCNVPRQSFLFQGEGKAFRLHFGCIPAVSQHHCSTEETYY

SEQ ID NO: 168791 - protein, 217 aa, Zea Mays
MMSAGSFLPLFLSLMDLPMLVVALEKVERSSGTLIGSSIATIQKSAAPEMLLALMDEAYTGSAVEEPSGNSGSDDSGPLDLTDPMFLDLLKDENDGIAAKHWISPTISSTLQAAFNSPQSDRLKQSLEMAPRFLTLYFATALRDVNDSLLCALIPVVMSRYAAMFPDKVFSFKVRERLSDFILAAFQRSPNIIAVLKKPITDRLGEAHDNLAKCRQS

SEQ ID NO: 168792 - protein, 572 aa, Zea Mays
MASPDLAAGDGSYDFHLRSLSAASRDSAAASDPASDPNLLQSVRRVCEMCRTAKEAKDEMVARAFPVMGKLFQRCAAAPTQAVASTGVLLLTILQFFLDFGEAVLHDADGSLKTFFRSCLSREFADPIVAERTVEFLVTNKTKILSSFPNLIPQFYPLLLKLIASNGERLENKFSEVLPLMMSAGSFLPLFLSLMDLPMLVVALEKVERSSGTLIGSSIATIQKSAAPEMLLALMDEAYTGSAVEEPSGNSGSDDSGPLDLTDPMFLDLLKDENDGIAAKHWISPTISSTLQAAFNSPQSDRLKQSLEMAPRFLTLYFATALRDVNDSLLCALIPVVMSRYAAMFPDKVFSFKVRERLSDFILAAFQRSPNIIAVLKKPITDRLGEAHDNLAKTELALHLCWAIGEHGAGGVGHKDVARELFENLELLLYENLATSRLGLSQEPGSDSMGASSRKSSQARLLCFVVTAIAKLATCHSELLPRARVSLGKVARSRTSDRRVWQRACDYLGLMNEPAICLSVLGPSTAQGNGPGIVNWSEGGTKMVAHVPFYLLAQQKGPPSHNFSFADLLPTE

SEQ ID NO: 168793 - protein, 300 aa, Zea Mays
MPLFAEHFRWGRQEDAHEFLRYVVDACHTADLRMHKRLRAAAASGNCGEDVRGQGVCLVMRETFGGALLRQVKCLECKGESNETDEIMDISLDLPGSSSVADALARLCPMLQLTPSVCSHYWVGSAWRAHHHARGIPRTSLLRVGRSHRNSLLRPAEFAQVTSIYVLASSCSLVVHPCSSLLVIASARSGKTELIKKKAKPYSSCIHLVWNWCYEFWGRNSEKLVDGDDDVRAILVRRSTKKPNSGVATPSFSSCGNRRADTSIPSIVIPCSISSSSFASALVVVFHPAARHETSPSSSS

SEQ ID NO: 168794 - protein, 434 aa, Zea Mays
MARPRKAKPPPPPPRAAAPSIAEALLMATICMVGLPVEVRVRDGSTYSGVLHTACVDAGYGVVLKKAKKIANGKGDANLSLGSFVDTLVVHPDDLVQVIAKGLSLPVKGVCKPLDSNVVASNGSLKRQNSHANDPKMSKPENISPLMQTEKCTSVGQGKNTSVKKNGQNSGSATSLSSSTGLMGPCFSMNGVSGSATMVPKVDAATSSAIAAPLVASDVKPSQPVSNSATKMIMSSKSTAKEFKLNPCARVFSPSFASSRQVLAAMAPVDTYYISHSAPEVPMGVPVYESKSVPGVSPLTNKIVGHNTSRLDPARVGTPYHPMQVGATYTTPSPQPAMTGKFSPVVYVHPVPQDPLHGTPSGFQGWPRPVLLNSYQASMQKFQGNTPVYLAPPIMATGNLPLVVPSPAPLVQPFQAIHPIMVPAASSVVPGKYM

SEQ ID NO: 168795 - protein, 105 aa, Zea Mays
MLRSLLGRDVVLFSSLPGALIGAQNVRLSWGRSLSNKQAQPQQESNQWGAAAGAGGYYGGYGQGYEAYGSGYAQPQDPNMYGYGAYGGYPNYQQQPAAQQQQQQQ

SEQ ID NO: 168796 - protein, 280 aa, Zea Mays
MMQQPPPQQPQPGMAPPPPPQAAGGQPPQWGGIPPPMAQQYGAPPPQQPPAMWGQPPPQAHYGQAPTPQQYYAAPPVPVQAPAAPAAADEVRTLWIGDLQYWMDENYVFGCFSNTGEVQNVKLIRDKNSGQLQGYGFVEFTSRAAAERVLQTYNGQMMPNVDLTFRLNWASAGEKRDDTPEYTIFVGDLAADVTDYLLQETFRVHYPSVKGAKVVTDKLTMRTKGYGFVKFGDPTEQARAMTEMNGMPCSSRPMRIGPAASRKNTGGVVQERGYQWALFI

SEQ ID NO: 168797 - protein, 420 aa, Zea Mays
MMQQPPPQQPQPGMAPPPPPQAAGGQPPQWGGIPPPMAQQYGAPPPQQPPAMWGQPPPQAHYGQAPTPQQYYAAPPVPVQAPAAPAAADEVRTLWIGDLQYWMDENYVFGCFSNTGEVQNVKLIRDKNSGQLQGYGFVEFTSRAAAERVLQTYNGQMMPNVDLTFRLNWASAGEKRDDTPEYTIFVGDLAADVTDYLLQETFRVHYPSVKGAKVVTDKLTMRTKGYGFVKFGDPTEQARAMTEMNGMPCSSRPMRIGPAASRKNTGGVVQERVPNSQGAQSENDPNNTTIFVGGLDPNVTEDTLKQVFSPYGEVVHVKIPVGKRCGFVQFVTRMFDFHGVEACRTSRLSLSRNPINGVRLLVLVATMGAMDKVMRLMAVGMHNPRILTCMVMALMAVIPITNSNQLHSSNSNNSDACLLG

SEQ ID NO: 168798 - protein, 346 aa, Zea Mays
MMQQPPPQQPQPGMAPPPPPQAAGGQPPQWGGIPPPMAQQYGAPPPQQPPAMWGQPPPQAHYGQAPTPQQYYAAPPVPVQAPAAPAAADEVRTLWIGDLQYWMDENYVFGCFSNTGEVQNVKLIRDKNSGQLQGYGFVEFTSRAAAERVLQTYNGQMMPNVDLTFRLNWASAGEKRDDTPEYTIFVGDLAADVTDYLLQETFRVHYPSVKGAKVVTDKLTMRTKGYGFVKFGDPTEQARAMTEMNGMPCSSRPMRIGPAASRKNTGGVVQERVPNSQGAQSENDPNNTTIFVGGLDPNVTEDTLKQVFSPYGEVVHVKIPVGKRCGFVQFVTRGLDWCTECSTFMG

SEQ ID NO: 168799 - protein, 429 aa, Zea Mays
MMQQPPPQQPQPGMAPPPPPQAAGGQPPQWGGIPPPMAQQYGAPPPQQPPAMWGQPPPQAHYGQAPTPQQYYAAPPVPVQAPAAPAAADEVRTLWIGDLQYWMDENYVFGCFSNTGEVQNVKLIRDKNSGQLQGYGFVEFTSRAAAERVLQTYNGQMMPNVDLTFRLNWASAGEKRDDTPEYTIFVGDLAADVTDYLLQETFRVHYPSVKGAKVVTDKLTMRTKGYGFVKFGDPTEQARAMTEMNGMPCSSRPMRIGPAASRKNTGGVVQERVPNSQGAQSENDPNNTTIFVGGLDPNVTEDTLKQVFSPYGEVVHVKIPVGKRCGFVQFVTRPSAEQALLMLQGALIGAQNVRLSWGRSLSNKQAQESNQWGAAAGAGGYYGGYGQGYEAYGSGYAQPQDPNMYGYGAYGGYPNYQQQPAAQQQQQQQ

SEQ ID NO: 168800 - protein, 290 aa, Zea Mays
MRPLCSNPPLHSKSHGGSHRSLARLRFPCSLGMELITNVTEYEKLAKERLPKMVYDYYASGAEDQWTLKENREAFSRILFRPRVLIDVSRIDMATNILGFSISMPIMIAPSAMQKMAHPDGELATARAAASAGTIMTLSSWSTSSVEEVNSVGPGIRFFQLYVYKDRNIVRQLVKRAEMAGFKAIALTVDTPILGRREADIKNRFALPPHLVLKNFQALDLGTMDKTNDSGLASYVAGQVDRTLSWKDVKWLQTITSLPILVKGIVTAEDSLRSNMALLGSSCPTTARAS

SEQ ID NO: 168801 - protein, 50 aa, Zea Mays
MPVHTQITKDLNISICSLLMSKTSQHYYNKTGTVTTSTNIRKFSRTHLLI

SEQ ID NO: 168802 - protein, 170 aa, Zea Mays
MLDSLGDLLKLLDVSSAENVLPTTYGSLQPPLGKHRLKIVEFISVLLSIGSAAAETRLIQLGAIKHAIDLFFEYPFNNFLHHHVENIIGSCLESKQDRLIGHVLDDCKLVTRILEAEKNSALSSDLTKHTMSSEGRSPPRIGIVGHMTRIANRLLQLVNTNIMVQSHLQA

SEQ ID NO: 168803 - protein, 371 aa, Zea Mays
MFWHVPGLSAASPVDTILDKENFKLECLLDEDEIIQECKALNTRLINFLRDKVQVEQLLRYIVEEAPEDAEKKRIFRFPFIACEIFTCEVDVIMKTLVEDEDLMNLLFSFLKPDHPHGTLSAGYFAKVVICLMIRKTLPLVSYVQGHPEIVSQLVDLIGITSIMEVLIRLIGADETMYSSYADSMQWLDDIQVLEMIVDKFSTSDSPEVHANAAEILCAVTRYAPPALAAKISSPSFVGRLFQHAFEDSRPKSVLVHSLSVCISLLDPKRLVSASYQAFRSQLSHGTLVTASPETVNGMLDSLGDLLKLLDVSSAENVLPTTYGSLQPPLGKHRLKIVEFISVLLSIGSAAAETRLIQLGAIKHAIDLFFE

SEQ ID NO: 168804 - protein, 633 aa, Zea Mays
MNLLFSFLKPDHPHGTLSAGYFAKVVICLMIRKTLPLVSYVQGHPEIVSQLVDLIGITSIMEVLIRLIGADETMYSSYADSMQWLDDIQVLEMIVDKFSTSDSPEVHANAAEILCAVTRYAPPALAAKISSPSFVGRLFQHAFEDSRPKSVLVHSLSVCISLLDPKRLVSASYQAFRSQLSHGTLVTASPETVNGMLDSLGDLLKLLDVSSAENVLPTTYGSLQPPLGKHRLKIVEFISVLLSIGSAAAETRLIQLGAIKHAIDLFFEYPFNNFLHHHVENIIGSCLESKQDRLIGHVLDDCKLVTRILEAEKNSALSSDLTKHTMSSEGRSPPRIGIVGHMTRIANRLLQLVNTNIMVQSHLQQNSDWIEWHASTLTKRNALENVYQWACGRPTSLQDRGRDSDDEDFRDRDYDVAALASNLSQAFKYGIYSSEDIDEAQASLERDDEDVYFDDESAEVVISSLRLGDDQESGSLFTNSNWFAFDEDKALNDGLVSSEASPSPNSEISALKEDDEHDEVILGEIIDEIKGSEPTLPVFNKDANKESGSTGLANGTVDKFEDDIRPPTPDVKESQPEFVEWKEEEAEPGDIAEKDTAVPDIEVENEKQLDSMDDVMLCDAKLGEEKKSDELGI

SEQ ID NO: 168805 - protein, 373 aa, Zea Mays
MFWHVPGLSAASPVDTILDKENFKLECLLDEDEIIQECKALNTRLINFLRDKVQVEQLLRYIVEEAPEDAEKKRIFRFPFIACEIFTCEVDVIMKTLVEDEDLMNLLFSFLKPDHPHGTLSAGYFAKVVICLMIRKTLPLVSYVQGHPEIVSQLVDLIGITSIMEVLIRLIGADETMYSSYADSMQWLDDIQVLEMIVDKFSTSDSPEVHANAAEILCAVTRYAPPALAAKISSPSFVGRLFQHAFEDSRPKSVLVHSLSVCISLLDPKRLVSASYQAFRSQLSHGTLVTASPETVNGMLDSLGDLLKLLDVSSAENVLPTTYGSLQPPLGKHRLKIVEFISVLLSIGSAAAETRLIQLGAIKHAIDLFFEID

SEQ ID NO: 168806 - protein, 643 aa, Zea Mays
MKTLVEDEDLMNLLFSFLKPDHPHGTLSAGYFAKVVICLMIRKTLPLVSYVQGHPEIVSQLVDLIGITSIMEVLIRLIGADETMYSSYADSMQWLDDIQVLEMIVDKFSTSDSPEVHANAAEILCAVTRYAPPALAAKISSPSFVGRLFQHAFEDSRPKSVLVHSLSVCISLLDPKRLVSASYQAFRSQLSHGTLVTASPETVNGMLDSLGDLLKLLDVSSAENVLPTTYGSLQPPLGKHRLKIVEFISVLLSIGSAAAETRLIQLGAIKHAIDLFFEYPFNNFLHHHVENIIGSCLESKQDRLIGHVLDDCKLVTRILEAEKNSALSSDLTKHTMSSEGRSPPRIGIVGHMTRIANRLLQLVNTNIMVQSHLQQNSDWIEWHASTLTKRNALENVYQWACGRPTSLQDRGRDSDDEDFRDRDYDVAALASNLSQAFKYGIYSSEDIDEAQASLERDDEDVYFDDESAEVVISSLRLGDDQESGSLFTNSNWFAFDEDKALNDGLVSSEASPSPNSEISALKEDDEHDEVILGEIIDEIKGSEPTLPVFNKDANKESGSTGLANGTVDKFEDDIRPPTPDVKESQPEFVEWKEEEAEPGDIAEKDTAVPDIEVENEKQLDSMDDVMLCDAKLGEEKKSDELGI

SEQ ID NO: 168807 - protein, 506 aa, Zea Mays
MFWHVPGLSAASPVDTILDKENFKLECLLDEDEIIQECKALNTRLINFLRDKVQVEQLLRYIVEEAPEDAEKKRIFRFPFIACEIFTCEVDVIMKTLVEDEDLMNLLFSFLKPDHPHGTLSAGYFAKVVICLMIRKTLPLVSYVQGHPEIVSQLVDLIGITSIMEVLIRLIGADETMYSSYADSMQWLDDIQVLEMIVDKFSTSDSPEVHANAAEILCAVTRYAPPALAAKISSPSFVGRLFQHAFEDSRPKSVLVHSLSVCISLLDPKRLVSASYQAFRSQLSHGTLVTASPETVNGMLDSLGDLLKLLDVSSAENVLPTTYGSLQPPLGKHRLKIVEFISVLLSIGSAAAETRLIQLGAIKHAIDLFFEYPFNNFLHHHVENIIGSCLESKQDRLIGHVLDDCKLVTRILEAEKNSALSSDLTKHTMSSEGRSPPRIGIVGHMTRIANRLLQLVNTNIMVQSHLQQNSDWIEWHASTLTKRNALENVYQWACGVSLMLRYRLGP

SEQ ID NO: 168808 - protein, 345 aa, Zea Mays
MFWHVPGLSAASPVDTILDKENFKLECLLDEDEIIQECKALNTRLINFLRDKVQVEQLLRYIVEEAPEDAEKKRIFRFPFIACEIFTCEVDVIMKTLVEDEDLMNLLFSFLKPDHPHGTLSAGYFAKGHPEIVSQLVDLIGITSIMEVLIRLIGADETMYSSYADSMQWLDDIQVLEMIVDKFSTSDSPEVHANAAEILCAVTRYAPPALAAKISSPSFVGRLFQHAFEDSRPKSVLVHSLSVCISLLDPKRLVSASYQAFRSQLSHGTLVTASPETVNGMLDSLGDLLKLLDVSSAENVLPTTYGSLQPPLGKHRLKIVEFISVLLSIGSAAAETRLIQLGAIK

SEQ ID NO: 168809 - protein, 125 aa, Zea Mays
MGIVDWLEIVKEVQVLLSLSVMVSKRDQDIGCKSEAGAEVRGDAGRAQGVQRAAAGGGGDDQMGDVRRGGHHDEVGALRLRSVQCSRALQPRGYVYTCMVFYFLVSPGFIWCTLLNSRVVINHVR

SEQ ID NO: 168810 - protein, 63 aa, Zea Mays
MGDVRRGGHHDEVGALRLRSVQCSRALQPRGYVYTCMVFYFLVSPGFIWCTLLNSRVVINHVR

SEQ ID NO: 168811 - protein, 264 aa, Zea Mays
MRRMMVCLDQSWTQNSVSGEEHLASRGLITNTKHQQRGVYFVKSWEPLISECTHQIELVHQGWFLHPIRCKQNESEAKKRVFHGQLKKLLAPRTGLQPADQQLSYRGRARGNAEYLDACGVKNKSKVALAEDPASVERRYIERQRNATAESANRAIGAVALEVDKLADQVTSIEKSISRGNKVPEVQITTLIELLMRHAVKLESIPAAGDSSSQKNIQAKRVQKCVETLDVLKVSNARLQAVVVTTKWETFDAAATTTKWELFD

SEQ ID NO: 168812 - protein, 425 aa, Zea Mays
MEELQDCNSRSLVALPGSLVLRLFRLFGQQDQSSWQKYILAYFLLVRNEYFSGESKKHSDVFCDISELDFFLYATDLDSEELELKEQKPITKAQSGGDSSGNRSNDCYFPGLHDDLSQDCLAWASRSDYPSLSCLNKRFNLLINSGYLYRLRRKYDIVEHWVYLACSLMPWEAFDPSRKRWMRLPRMPCDECFSCADKESLAVGTQLLVFGREYTGLAIWMYNLLTRSWSPCTPMNLPRCLFASGSSEIGHWETIPDMNLPRRLSSGFFMDGKFYVIGGVSSQRDSLTCGEEYNLETRTWRRILDMYPGGTSASQSPPLVAVVNNQLYAADQSTNVVKKYDKANNAWNILKPLPVRADSSNGWGLAFKACGDRLLVIGGHRGPRGEVILLHSWCPEGGEDGADWEVLSVKERAGVFVYNCAIMGC

SEQ ID NO: 168813 - protein, 216 aa, Zea Mays
MSLISMMEARLPPGFRFHPRDDELVLDYLCRKLSGKGGGGAYGGIAMVDVDLNKCEPWDLPDEACVGGREWYFFSLHDRKYATGQRTNRATRTGYWKATGKDRPISVSGRRGAGDTAALVGMRKTLVFYQGRAPRGSKTEWVMHEFRVDGPPVADRPGSPLLQLQLQVRTYVHARFMGALARPSLSASVSCDLLECSIDVLITPRMHFVREHVKNT

SEQ ID NO: 168814 - protein, 62 aa, Zea Mays
MAIAAVGSIGGVDFPIEEPWVLFFRNWRSDFSFSEMDGNHGMLCCPPHNSVLICMFVPGAAF

SEQ ID NO: 168815 - protein, 186 aa, Zea Mays
MEDGSAPRRSTPPTRRSRSAEFHNFSERRRRDKINEKLKALQELLPNCNKTDKVSMLDEAIDYLKSLQLQLQMLVMGKGMSPVVPLELQQYMHYITADPAQLPPLRPSGQQHRQFQITQANPQRQSNVESDFLSQMQNLHSSEPPQNFLRPPKLQLYTPVCCGKENQQSKGLQYYHFRPIPSGSMG

SEQ ID NO: 168816 - protein, 370 aa, Zea Mays
MCIIVLKQSPSFSGTSVFSRHETGVTHVLVTGGAGYIGSHATLRLLSDKYRVTIVDNLSRGNIGAVRVLQRLFPEPGRLQFIYADLGDAKAVNKIFSENAFDAVMHFAAVAYVGESTMEPLRYYHNITSNTLTVLEAMAAHNVNTLIYSSTCATYGEPDTMPIVETTPQNPINPYGKAKKMAEDIILDFTKSKKQSNMAVMILRYFNVIGSDPEGRLGEAPRPELREHGRISGACFDAALGIIPGLKVRGTDYSTADGTCVRDYIDVTDLVDAHVKALGKAQPGKVGIYNVGTGQGRSVTEFVEACKKATGASIKVEYLARRPGDYAEVYSDPSKIHMELNWTAQYTDLGQSLAQAWKWQKAHPNGYGPA

SEQ ID NO: 168817 - protein, 52 aa, Zea Mays
MTLHIRQLAGKNSHHIIEASFKAFARALRQATEYDLRRQGTVPSSKGVLSRS

SEQ ID NO: 168818 - protein, 266 aa, Zea Mays
MTTARLVSTSPARLPSTSASPIPRTSLCVVGRAPAFSARALGFSLRLKPSPAMAAAGPPTAHGDSIGGSSRIGEVKRVTKETNVHVKINLDGTGVAECSTGIPFLDHMLDLASHGLFDVYVKAIGDTHIDDHHSNEDIALAIGTALLEALGDRKGINRFGHFTAPLDEAAVEVILDLSGRPHLSCGLDIPTQRVGTYDTQLVEHFFQSVVNTSGMTLHIRQLAGKNSHHIIEASFKAFARALRQATEYDLRRQGTVPSSKGVLSRS

SEQ ID NO: 168819 - protein, 94 aa, Zea Mays
MLILWEHPLCSLHLYRNKNPQQLHPRAILSEKVIGCVIWVQLSYPHCHKGSSPFAGFAVGSETSCGVDNVLAEHVNSNFTLMPASCYIVHFCIL

SEQ ID NO: 168820 - protein, 220 aa, Zea Mays
MPNCFSKTKQARMMIMYLLENKLSKTYLLLHFSKTIDHTQEVQIRKQAVATPVRFSDGSRQGLTMEKSTVVVSVPVVVMAETAETDYSSSFSLLVVDSHLLPGDAESQKDVGKGDKSRDKGTAEKFAIYQKHRSSLADTVQFRRPAAPTSSVNADIVGTSTLQSASLPKQEPSTATSKSYTFREGDRVRYMGPAQLSSLSQRLLSFCWLRCWKRDIMWCG

SEQ ID NO: 168821 - protein, 54 aa, Zea Mays
MCSTNDVIVSVFSLKKKVTLLMFETTSYGFDISLNMTWLRTIQMTASWMQKISN

SEQ ID NO: 168822 - protein, 136 aa, Zea Mays
MCVIALHCRRHINKLMIQNILLQHNYLPLALLKASAILMRMVFIVFSFSPSGLSSPCACDVKLCCTKYSSSASHLSNNLSSELLSRIKLRNAMQAIIICFCVRVEKLGMPFKIRHFCFKTPKALSITFRRDECKKL

SEQ ID NO: 168823 - protein, 241 aa, Zea Mays
MDPKGKGMVINDKESLLNEPRENKPTDSGSSHKKRDGKKKRRIKKIIYYDSDASSSTSRDDDDDSSSKKKTVNQNYSFDYSRISYNSNAHLLSIPLGNPPHFDGEDYSFWSRKMRSHLFSLHPSIWKIVESGMHFDSTDNPVFINEQIHKNAQATTVLLASLCRDEYNKVSGLDNAKQIWDTLKISHEGNDTTMITKMQLVEGELGRFAMIRGEEPTQTYNRLKTLVNKIRKRPEATTTSF

SEQ ID NO: 168824 - protein, 140 aa, Zea Mays
MTSLGFVEAKSSTSLFIFCHSSNTIYVLVYVDAIILTASNIELLCRTIAALQREFAAKDLGLLHHFLGITLERHFDDLFLHQRTCMLDAIQRTTMTDHNPCTTPVDLQRKLATDFGPPIQDASQFRSIFGALRVPKLHLS

SEQ ID NO: 168825 - protein, 61 aa, Zea Mays
MLRIQLEDRCTLLCCLHQISQMENLILETINDVCSYRMIPEERILLLSGPGPIQTITIPSY

SEQ ID NO: 168826 - protein, 555 aa, Zea Mays
MEYERGGGGGRGRGRGRGGGGGGGRGGGGGYGRQHGGGGDARGGRDEYGGGGGGYGYDEGEGYGGGRRGGGGGYGYDVGGRRGGGGYHQGPRGGYGTGGGGYHQGPRGGYGTGGRGGNAWAPAPGAGRGRGVGGGAAEYAPVRGPAPAQAPVASPLAPKDKEAPRSSGSVERIASSEMARVEPIGSTLAATSSVNTRVPMQRPDSGGSLSQATVKLLVNHFIVSYRKVTTIFHYDINIKLDEASSNASGKELSKAEFLSVKDELFRESSLRRLSSCVAYDGGRNLYTSAELPAGLFRVRVRSKTYIVSVDLKKQLPLSQLSDLPVPREVLQGLDVVVREASRWNKIILGRGFYSPSSSIDIGQGAVAMKGTQQSLKSTQQGLILCVDYSVMPFYKAGPVMDLVQKLVRYLDYRTTLNKRQMENLVDELKGRRVTVIHRRTNQKYTVQGLTPLPASQMTFVDAESGQTRRLVDYYAQKHGKVIEYQMLPCLDLSKSKDKPNHVPIELCTLLEGQRFPKANLNQNSERILKGSALIRASDRRKEIQNLVNASDGPCR

SEQ ID NO: 168827 - protein, 666 aa, Zea Mays
MKGTQQSLKSTQQGLILCVDYSVMPFYKAGPVMDLVQKLVRYLDYRTTLNKRQMENLVDELKGRRVTVIHRRTNQKYTVQGLTPLPASQMTFVDAESGQTRRLVDYYAQKHGKVIEYQMLPCLDLSKSKDKPNHVPIELCTLLEGQRFPKANLNQNSERILKGSALIRASDRRKEIQNLVNASDGPCRGEIAQQFGISLDVRMTEVTGRILPPPNLKLGASNGQTSKLSIDHGCQWNLVKKRLVEGRVLQCWGIVDFSAEPSGSGARQEPLDTRMFVEKIVRKCCELGIRMNPNPCFVHITRMAVLFDPHGLHEELNKAKQAAVSKKQRLQLLFCPMSEQHSGYKTLKLICDTQLGILTQCLLSDRANNRKGQDQYMTNLALKINGKLGGSNVQLFDSLPRVGGGVPFMFIGADVNHPSPGNVESPSIAAVVASVNSGVNKYVTRIRAQPHRCEVIQQLGEICRELIGVFEKQNRVKPQKIIYFRDGVSDGQFDMVLNEELADLEKAIKVNGYAPTITVVVAKKRHHTRLFPRDEQQPQTKTGNVPPGTVVDTGVVDPSAYDFYLCSHTGILGTSRPTHYYTLVDEHGFGSDDLQKLIYNLCFVFARCTKPVSLATPVYYADLAAYRGRLYYEAAMMASQAQRGGSFDVTNFPRLHKDVEDNMFFI

SEQ ID NO: 168828 - protein, 73 aa, Zea Mays
MCGLTKRCSSSSTILLHGTAAVHDYQRSTSLFFACVHVLTTKMTQYIKVSIGVGPAPKVYCAFNSRTLTQKKD

SEQ ID NO: 168829 - protein, 459 aa, Zea Mays
MDDGVDGERWGARSTKQTHMNLHASVAVLQGCCDKIIGDDTVYYYHDMIVEMIKWGYQEGKTLFGFGYDFRQSNRLSETLDRFSKKLESVYTASGGKKINLITHSMGGLLVKCFISLHSDTFEKYVKSWIAIAAPFQGAPGYITTSLLNGMSFVEGWESRFFISKWCMQQLLLECPSIYELLANPNFQWKDIPLLQIWRENLDNSGKKSALLESYEPEEAIMMIKEALSSNEIIADGMHIPVPLNLDILNWAKETYDLLCSTKLPESVKFYNIYGIDYDTPHTVCYGSEQHPVSSLSSLLYAQGKYVYVDGDGSVPAESAKADGFNAVARVGVAADHRGIVCSRRVFRIVQHWLHAGEPDPFYDPLSDYVILPTLYEIEKHREKHGDVTSVAEDWEIISPNDGKTLRPGELPPMVSTLTTSREGKEGALEEAQATVVVHPEKKGRQHVQVRAVGVSHGG

SEQ ID NO: 168830 - protein, 273 aa, Zea Mays
MRRQTRRNPALRRSWRGRDGQQGGKATGPDMDNPRCRIPRQASPRQTRQESTRSAGGAAPEIIGDDTVYYYHDMIVEMIKWGYQEGKTLFGFGYDFRQSNRLSETLDRFSKKLESVYTASGGKKINLITHSMGGLLVKCFISLHSDTFEKYVKSWIAIAAPFQGAPGYITTSLLNGMSFVEGWESRFFISKWCMQQLLLECPSIYELLANPNFQWKDIPLLQIWRENLDNSGKKSALLESYEPEEAIMMIKEALSSNEYKASGISEILQHLWD

SEQ ID NO: 168831 - protein, 366 aa, Zea Mays
MTDPLLSCNIIYSIYPHLVLFLAQHVTLNISPRLLFCFTKQPAAGAPGYITTSLLNGMSFVEGWESRFFISKWCMQQLLLECPSIYELLANPNFQWKDIPLLQIWRENLDNSGKKSALLESYEPEEAIMMIKEALSSNEIIADGMHIPVPLNLDILNWAKETYDLLCSTKLPESVKFYNIYGIDYDTPHTVCYGSEQHPVSSLSSLLYAQGKYVYVDGDGSVPAESAKADGFNAVARVGVAADHRGIVCSRRVFRIVQHWLHAGEPDPFYDPLSDYVILPTLYEIEKHREKHGDVTSVAEDWEIISPNDGKTLRPGELPPMVSTLTTSREGKEGALEEAQATVVVHPEKKGRQHVQVRAVGVSHGG

SEQ ID NO: 168832 - protein, 395 aa, Zea Mays
MFTELVDKLCGSDECIGSGSQVASQDTFGTLGAIVKRRTGNKQIGFLTNRHVAVDLDYPNQKMYHPLPPNLGPGVYLGAVERATSFITDDVWYGIYAGTNPETFVRADGAFIPFAHDFDISTVTTTVRGVGDIGDVKVIDLQSPLNSLIGRQVCKIGRSSGHTTGTVVAYALEYNDEKGISFFTDLLVVGENRQTFDLEGDSGSLIILTGQDNEKPCPIGIIWGGTANRGRLKLRCDHGPENWTSGVDLGRLLDRLELDLIITNESLKDAVQQQRLALVAAANSAVGESSTAAVPAPEEKVEIFEPLGIKIEQLPRHDVSATTEGDEAAVINVEERQFISNFVGMSPVRDDQDAPRQIANLNNPSEEELAMSLHLGDREAKRLRTDTESELDLEK

SEQ ID NO: 168833 - protein, 92 aa, Zea Mays
MVRLMFRLLLKLARLCRLMMGSTAYAYSAAPTSGSLGRRCSLQTTNACCKSKESESSKALDWWNLYKVRGNRRYSVAMCRVYACLFVRLGIS

SEQ ID NO: 168834 - protein, 193 aa, Zea Mays
MFGCDYYNIKPDLVSLAKALSNAYVPIGATLVSPEISDVIHSQSNKLGSFAHGFTYSGHPVACAVAIEALKLYRERDIPGHVKQIAPKFQDGIRALADSPIIGEIRGLGMIMGTEFTNNKSPTDLFPAEWGVGAIFGEECQKRGMLVRVAGDAIMMSPTLIMTPGEVDELVRIYGEALKATEERVAALQSKKN

SEQ ID NO: 168835 - protein, 441 aa, Zea Mays
MMIARRLLRSNNAPAQGSYVYDINGNKYLDSLAGLWCTALGGSEPRLVKAATEQLNKLPFYHSFWNRTTKPSLDLAQEILSMFTAREMGKVFFTNSGSEANDSQVKLVWYYNNALGRPNKKKFIARSKAYHGSTLISASLTGLPALHQKFDLPAPFVLHTDCPHYWRYHLPGETEEDFATRLATNLENLILKEGPETIAAFIAEPVMGAGGVIPPPKTYFDKVQAIVKKYDILFIADEVITAFGRLGTMFGCDYYNIKPDLVSLAKALSNAYVPIGATLVSPEISDVIHSQSNKLGSFAHGFTYSGHPVACAVAIEALKLYRERDIPGHVKQIAPKFQDGIRALADSPIIGEIRGLGMIMGTEFTNNKSPTDLFPAEWGVGAIFGEECQKRGMLVRVAGDAIMMSPTLIMTPGEVDELVRIYGEALKATEERVAALQSKKN

SEQ ID NO: 168836 - protein, 317 aa, Zea Mays
MMIARRLLRSNNAPAQATSLLKHVTGTASLQGNADSLLDGTVRHFGSAPSAQPEENGFKGHGMLAPFTAGWQSNDLHPLIIERSEGSYVYDINGNKYLDSLAGLWCTALGGSEPRLVKAATEQLNKLPFYHSFWNRTTKPSLDLAQEILSMFTAREMGKVFFTNSGSEANDSQVKLVWYYNNALGRPNKKKFIARSKAYHGSTLISASLTGLPALHQKFDLPAPFVLHTDCPHYWRYHLPGETEEDFATRLATNLENLILKEGPETIAAFIAEPVMGAGGVIPPPKTYFDKVQAIVKKYDILFIADEAGNYVWMRLL

SEQ ID NO: 168837 - protein, 508 aa, Zea Mays
MMIARRLLRSNNAPAQATSLLKHVTGTASLQGNADSLLDGTVRHFGSAPSAQPEENGFKGHGMLAPFTAGWQSNDLHPLIIERSEGSYVYDINGNKYLDSLAGLWCTALGGSEPRLVKAATEQLNKLPFYHSFWNRTTKPSLDLAQEILSMFTAREMGKVFFTNSGSEANDSQVKLVWYYNNALGRPNKKKFIARSKAYHGSTLISASLTGLPALHQKFDLPAPFVLHTDCPHYWRYHLPGETEEDFATRLATNLENLILKEGPETIAAFIAEPVMGAGGVIPPPKTYFDKVQAIVKKYDILFIADEVITAFGRLGTMFGCDYYNIKPDLVSLAKALSNAYVPIGATLVSPEISDVIHSQSNKLGSFAHGFTYSGHPVACAVAIEALKLYRDIPGHVKQIAPKFQDGIRALADSPIIGEIRGLGMIMGTEFTNNKSPTDLFPAEWGVGAIFGEECQKRGMLVRVAGDAIMMSPTLIMTPGEVDELVRIYGEALKATEERVAALQSKKN

SEQ ID NO: 168838 - protein, 53 aa, Zea Mays
MTKSFCLRLWMIAGLSLLIDKENREEEDDREAGGVRGDEGPRERSEKFCASSC

SEQ ID NO: 168839 - protein, 130 aa, Zea Mays
MVAAKGTMDGIMNTASASMSMYAYLALLKPQGKMILLGLPEKPLQISAFSLVTGGKTLAGSCMGSIRDTQEMMDFAAKHGLAADIELIGTEEVNEAMERLAKGEVRYRFVIDIGNTLNAASLGSSPVPAL

SEQ ID NO: 168840 - protein, 448 aa, Zea Mays
MPDVMAAALTGFSPRGVIPSRGRASLPGVARAYAERRLVAENTSLPNMHKEQLETIIRNQLRKPQLPPSSYDTAWVSMVPVRGSHQTPRFPQCVEWILQNQQDDGSWGVSQSDSSVSKDVLLSTLACVLALKRWNVGRENIWRGLHFIGRNFSVAMDEQFTSPIGFNFTFPGLLSLGIDMGLEFPVRQIDVCGILHRREMELKRLAVDSSFGRKAYMAFIPEGFGNMLDWDQVMKFQRKNGSLFSTPSTTAVALIHKYNDQALQYLNLLVNEFGSAAMYPSRVHCQLSMVDALEKMGISQRFVSEIESILDMAYNCWLQNDEELMMDIATFAMAFRLLRMNGYDVSSDELSHVAGASTFHDSLQGYLNDTKSLLELYKTSKVTLSENDLILDRIGSWSGNLLKDKMCCSRVQKDSIFGEVLQTKFKFSFSPWRFSLCLCFVISDRVCC

SEQ ID NO: 168841 - protein, 358 aa, Zea Mays
MPDVMAAALTGFSPRGVIPSRGRASLPGVARAYAERRLVAENTSLPNMHKEQLETIIRNQLRKPQLPPSSYDTAWVSMVPVRGSHQTPRFPQCVEWILQNQQDDGSWGVSQSDSSVSKDVLLSTLACVLALKRWNVGRENIWRGLHFIGRNFSVAMDEQFTSPIGFNFTFPGLLSLGIDMGLEFPVRQIDVCGILHRREMELKRLAVDSSFGRKAYMAFIPEGFGNMLDWDQVMKFQRKNGSLFSTPSTTAVALIHKYNDQALQYLNLLVNEFGSAVPAMYPSRVHCQLSMVDALEKMGISQRFVSEIESILDMAYNCWLQNDEELMMDIATFAMAFRLLRMNGYDVSSDLFVSIKNS

SEQ ID NO: 168842 - protein, 322 aa, Zea Mays
MPDVMAAALTGFSPRGVIPSRGRASLPGVARAYAERRLVAENTSLPNMHKEQLETIIRNQLRKPQLPPSSYDTAWVSMVPVRGSHQTPRFPQCVEWILQNQQDDGSWGVSQSDSSVSKDVLLSTLACVLALKRWNVGRENIWRGLHFIGRNFSVAMDEQFTSPIGFNFTFPGLLSLGIDMGLEFPVRQIDVCGILHRREMELKRLAVDSSFGRKAYMAFIPEGFGNMLDWDQVMKFQRKNGSLFSTPSTTAVALIHKYNDQALQYLNLLVNEFGSAVPAMYPSRVHCQLSMVDALEKMGISQRFVSEIESILDMAYKMMRNS

SEQ ID NO: 168843 - protein, 350 aa, Zea Mays
MLTTKSSSFRINQEFLALAVEDFSFSQRVYRDELRHLDSWVKENKLDQLQFARQKLTYCYLSAAATVFSSELSDARISWAKNGVLTTVVDDFFDVGGSKEELENLIALVEKWHGHHAVEFYSEQVKIVFSAIYTTVNHLGAMASAAQGRDLTNHLVEIWLDLLRSMMVEAEWQRCQYVPTVEEYMTNAVVSFALGPIVLPALYFVGQELLEHAVKDEEYDKLFRLVSTCGRLLNDYQSLEREGNQGKLNSVSLLVLHSGGSMSIEAAKKAMQKSIDVSRRDLLRLVLRKESAVPRPCKELFWKMCKILHLFYSQNDGFSSPKEMVSAVNAVINEPLKVQNSTTFLSSSSR

SEQ ID NO: 168844 - protein, 450 aa, Zea Mays
MPDVMAAALTGFSPRGVIPSRGRASLPGVARAYAERRLVAENTSLPNMHKEQLETIIRNQLRKPQLPPSSYDTAWVSMVPVRGSHQTPRFPQCVEWILQNQQDDGSWGVSQSDSSVSKDVLLSTLACVLALKRWNVGRENIWRGLHFIGRNFSVAMDEQFTSPIGFNFTFPGLLSLGIDMGLEFPVRQIDVCGILHRREMELKRLAVDSSFGRKAYMAFIPEGFGNMLDWDQVMKFQRKNGSLFSTPSTTAVALIHKYNDQALQYLNLLVNEFGSAVPAMYPSRVHCQLSMVDALEKMGISQRFVSEIESILDMAYNCWLQNDEELMMDIATFAMAFRLLRMNGYDVSSDELSHVAGASTFHDSLQGYLNDTKSLLELYKTSKVTLSENDLILDRIGSWSGNLLKDKMCCSRVQKDSIFGEVLQTKFKFSFSPWRFSLCLCFVISDRVCC

SEQ ID NO: 168845 - protein, 65 aa, Zea Mays
MAKQAARSTWDAAKDTAHGVKERVVPDAEDVDAAVKERDRIARDVDRVERERNMREAREKGSGLP

SEQ ID NO: 168846 - protein, 276 aa, Zea Mays
MSRLMAAMLLGGARVAGAAKLTGNGNAAGMQALPMPACFLPPRPQAATWTRLCLQAAPRSSQAYDNAPEDRREIGDKYKDAAEEAKDATGDAKEHAKRMAGETKSRAQDKAGRVADQASGMAERAKDQAKGVAEDAADTASRATERAKNETRDAAREAADRAGHVKERAKEAGHEAKDRAVEGTASYGEKVVEMTKEGAGKVAETAQAIGDMAKQAARSTWDAAKDTAHGVKERVVPDAEDVDAAVKERDRIARDVDRVERERNMREAREKGSGLP

SEQ ID NO: 168847 - protein, 70 aa, Zea Mays
MLKRGSINTWHNGIPRRQSNSRNIKGIYCDYLHDHQKHRRTLSRYQDLALLNDVWMYRLVNIMSWNNFKK

SEQ ID NO: 168848 - protein, 523 aa, Zea Mays
MVPSEPQTVVENKHSTSVGAEELLLTKDESTSTTVVQGAGSLMSPKGVQEEASFMGYSNHLDQWEGYPYAVSAEGLDAAYPVTYGAYSPLSAIGDSHTYFSLLCPLSRPCYQPPASPNMRYSSPGTGISQFYPMHQYYSPDEVHYSVTPSFYQPFGSFNGVPMQPSSFPGFFGQGNIPLTSRMESMSNSGSHKAFQQGGKFGGSTQSWSTASCKFGTFKDEKCSPDFLNEQCRGPRATKTRKEVGSSSTEDKNKNVLPIADSDKYNHPGFVTEYKDARFYVIKSYTEDHIHKSIKYNVWASTPRGNRKLNAGYHEAKAKEDHCPIFLFFSVNSSGHFCGVAEMIGPVNFDKSVDYWQNERWNGQFPVKWHIVKDVPNNIVRHIILENNENKRVTNSRDTQEVKLKQGLQMLAIFKNHEAQTNILEDFDFYEQREKAMLDDRQQQKPECSDTGKQVQASAPVDIVTGMSDAFAQAVQLEKTNDKENKPRIEDADAADNAPAAPVKIEEDMLKTAEVGGLLKESG

SEQ ID NO: 168849 - protein, 550 aa, Zea Mays
MVPSEPQTVVENKHSTSVGAEELLLTKDESTSTTVVQGAGSLMSPKGVQEEASFMGKGKGGEQQLGYQPNVYVSQPHTPFSGGYSNHLDQWEGYPYAVSAEGLDAAYPVTYGAYSPLSAIGDSHTYFSLLCPLSRPCYQPPASPNMRYSSPGTGISQFYPMHQYYSPDEVHYSVTPSFYQPFGSFNGVPMQPSSFPGFFGQGNIPLTSRMESMSNSGSHKAFQQGGKFGGSTQSWSTASCKFGTFKDEKCSPDFLNEQCRGPRATKTRKEVGSSSTEDKNKNVLPIADSDKYNHPGFVTEYKDARFYVIKSYTEDHIHKSIKYNVWASTPRGNRKLNAGYHEAKAKEDHCPIFLFFSVNSSGHFCGVAEMIGPVNFDKSVDYWQNERWNGQFPVKWHIVKDVPNNIVRHIILENNENKRVTNSRDTQEVKLKQGLQMLAIFKNHEAQTNILEDFDFYEQREKAMLDDRQQQKPECSDTGKQVQASAPVDIVTGMSDAFAQAVQLEKTNDKENKPRIEDADAADNAPAAPVKIEEDMLKTAEVGGLLKESG

SEQ ID NO: 168850 - protein, 541 aa, Zea Mays
MVPSEPQTVVENKHSTSVGAEELLLTKDESTSTTVVQGAGSLMSPKGVQEEASFMGKGKGGEQQLGYQPNVYVSQPHTPFSGGYSNHLDQWEGYPYAVTYGAYSPLSAIGDSHTYFSLLCPLSRPCYQPPASPNMRYSSPGTGISQFYPMHQYYSPDEVHYSVTPSFYQPFGSFNGVPMQPSSFPGFFGQGNIPLTSRMHQESMSNSGSHKAFQQGGKFGGSTQSWSTASCKFGTFKDEKCSPDFLNEQCRGPRATKTRKEVGSSSTEDKNKNVLPIADSDKYNHPGFVTEYKDARFYVIKSYTEDHIHKSIKYNVWASTPRGNRKLNAGYHEAKAKEDHCPIFLFFSVNSSGHFCGVAEMIGPVNFDKSVDYWQNERWNGQFPVKWHIVKDVPNNIVRHIILENNENKRVTNSRDTQEVKLKQGLQMLAIFKNHEAQTNILEDFDFYEQREKAMLDDRQQQKPECSDTGKQVQASAPVDIVTGMSDAFAQAVQLEKTNDKENKPRIEDADAADNAPAAPVKIEEDMLKTAEVGGLLKESG

SEQ ID NO: 168851 - protein, 547 aa, Zea Mays
MVPSEPQTVVENKHSTSLLLTKDESTSTTVVQGAGSLMSPKGVQEEASFMGKGKGGEQQLGYQPNVYVSQPHTPFSGGYSNHLDQWEGYPYAVSAEGLDAAYPVTYGAYSPLSAIGDSHTYFSLLCPLSRPCYQPPASPNMRYSSPGTGISQFYPMHQYYSPDEVHYSVTPSFYQPFGSFNGVPMQPSSFPGFFGQGNIPLTSRMHQESMSNSGSHKAFQQGGKFGGSTQSWSTASCKFGTFKDEKCSPDFLNEQCRGPRATKTRKEVGSSSTEDKNKNVLPIADSDKYNHPGFVTEYKDARFYVIKSYTEDHIHKSIKYNVWASTPRGNRKLNAGYHEAKAKEDHCPIFLFFSVNSSGHFCGVAEMIGPVNFDKSVDYWQNERWNGQFPVKWHIVKDVPNNIVRHIILENNENKRVTNSRDTQEVKLKQGLQMLAIFKNHEAQTNILEDFDFYEQREKAMLDDRQQQKPECSDTGKQVQASAPVDIVTGMSDAFAQAVQLEKTNDKENKPRIEDADAADNAPAAPVKIEEDMLKTAEVGGLLKESG

SEQ ID NO: 168852 - protein, 530 aa, Zea Mays
MVPSEPQTVVENKHSTSVGAEELLLTKDESTSTTVVQGAGSLMSPKGVQEEASFMGKGKGGEQQLGYQPNVYVSQPHTPFSGGYSNHLDQWEGYPYAVSAEGLDAAYPVTYGAYSPLSAIGDSHTYFSLLCPLSRPCYQPPASPNMRYSSPVTPSFYQPFGSFNGVPMQPSSFPGFFGQGNIPLTSRMHQESMSNSGSHKAFQQGGKFGGSTQSWSTASCKFGTFKDEKCSPDFLNEQCRGPRATKTRKEVGSSSTEDKNKNVLPIADSDKYNHPGFVTEYKDARFYVIKSYTEDHIHKSIKYNVWASTPRGNRKLNAGYHEAKAKEDHCPIFLFFSVNSSGHFCGVAEMIGPVNFDKSVDYWQNERWNGQFPVKWHIVKDVPNNIVRHIILENNENKRVTNSRDTQEVKLKQGLQMLAIFKNHEAQTNILEDFDFYEQREKAMLDDRQQQKPECSDTGKQVQASAPVDIVTGMSDAFAQAVQLEKTNDKENKPRIEDADAADNAPAAPVKIEEDMLKTAEVGGLLKESG

SEQ ID NO: 168853 - protein, 517 aa, Zea Mays
MVPSEPQTVVENKHSTSVGAEELLLTKDESTSTTVVQGAGSLMSPKGVQEEASFMGKGKGGEQQLGYQPNVYVSQPHTPFSGGYSNHLDQWEGYPYAVTYGAYSPLSAIGDSHTYFSLLCPLSRPCYQPPASPNMRYSSPVTPSFYQPFGSFNGVPMQPSSFPGFFGQGNIPLTSRMESMSNSGSHKAFQQGGKFGGSTQSWSTASCKFGTFKDEKCSPDFLNEQCRGPRATKTRKEVGSSSTEDKNKNVLPIADSDKYNHPGFVTEYKDARFYVIKSYTEDHIHKSIKYNVWASTPRGNRKLNAGYHEAKAKEDHCPIFLFFSVNSSGHFCGVAEMIGPVNFDKSVDYWQNERWNGQFPVKWHIVKDVPNNIVRHIILENNENKRVTNSRDTQEVKLKQGLQMLAIFKNHEAQTNILEDFDFYEQREKAMLDDRQQQKPECSDTGKQVQASAPVDIVTGMSDAFAQAVQLEKTNDKENKPRIEDADAADNAPAAPVKIEEDMLKTAEVGGLLKESG

SEQ ID NO: 168854 - protein, 58 aa, Zea Mays
MARLHFDQAVVARDRLIRSAEKGDPLPATSGGLENLDGKKHPHFPKAREVSGRPVSTN

SEQ ID NO: 168855 - protein, 127 aa, Zea Mays
MQSPPSLVVLLPFASRQARLPVRGGRGASVGGLEGLVVRSTSNLFAWATIAAAWGTKASVESSGWRCSANRPSNHQASNGPPATGGEEANVVKLLLQEPRGILSCSACCTSIWPFRLYRHQANRGYK

SEQ ID NO: 168856 - protein, 246 aa, Zea Mays
MILDSGTLEVLLNGVPGKRFHCKCGVRQGDPLSPLLFVLAADLLQLIVNKACECGILRLPLPSNCGPDFPIIQYADDTILIMEACPRQLFFLKAMLNSFAESIGLHVNYHKSNIYPINVTYQKMEILANTFHCKIGSMPFTYLGLPLGSQRPNMGAFLPLIQKIEKRLASTSIFLSQADMLQMVNAIFSSLPTYYMCTLKLPKTVIKHIDKLRRHCLWRGADLNAKKPQVAWKSACKPKFQGDWVS

SEQ ID NO: 168857 - protein, 169 aa, Zea Mays
MATPNGPSASPMVYPVYLSGVFPQQGGDDQAQGPGIYAIQQNQLAAAMGMGCYAPTTLIPLTYNIPTESIGAPAGEENVQDARQQNVPQRQVVVRRFHFAFQLDLTLIFLLAAVVFLLARKAQNKGYFFSYCLHHSIYFVSTLLKSSPKYLMLFHSLFFITCIAYIWCC

SEQ ID NO: 168858 - protein, 107 aa, Zea Mays
MIRLKVQGYMPYNRTSAAAHPPQAPARAENRAALPAQNDGNEQPNDPANPDQAAENREQDAAAGNENPQEAEVEGNRRNWLEGVLKEIQLVVVGFVASLLPGFQHND

SEQ ID NO: 168859 - protein, 136 aa, Zea Mays
MATPNGPSASPMVYPVYLSGVFPQQGGDDQAQGPGIYAIQQNQLAAAMGMGCYAPTTLIPLTYNIPTIGAPAGEENVQDARQQNVPQRQVVVRRFHFAFQLDLTLIFLLAAVVFLLARKAQNKGYFFSYCLHHSIY

SEQ ID NO: 168860 - protein, 224 aa, Zea Mays
MWETSMEGLLSLTKKTTPSNYYYICEKNGGSLSDKMDELACFAPGMLALGASGYGPEKSEQIMNLAKELARTCYNFYQTTPTKLAGENYFFHTGQDMGVGTSWNILRPETVESLMYLWRLTGNKTYQDWGWDIFQAFEKNSRIESGYVGLRDVNTGEKDNMMQSFFLAETLKYLYLLFSPPSVISFDEWVFNTEAHPLRIVPVSDNKGIGTPVRQFGRKQGKPE

SEQ ID NO: 168861 - protein, 410 aa, Zea Mays
MGLKDEFQKARDWVAESLDFDKDYDASVFETTIRVVGGLLSSYDLSGDKVFLDKAKDITDRLLPAWDTTSGIPYNRINLAHGRAHNPGWTNGDSILADSGTEQLEFIALSQRTGDPKYQQKAENVIKQLQKIYPSDGLLPIYINPHSGTASYSTITFGAMGDSFYEYLLKVWIQGNKTEHVKHYRQMWETSMEGLLSLTKKTTPSNYYYICEKNGGSLSDKMDELACFAPGMLALGASGYGPEKSEQIMNLAKELARTCYNFYQTTPTKLAGENYFFHTGQDMGVGTSWNILRPETVESLMYLWRLTGNKTYQDWGWDIFQAFEKNSRIESGYVGLRDVNTGEKDNMMQSFFLAETLKYLYLLFSPPSVISFDEWVFNTEAHPLRIVPVSDNKGIGTPVRQFGRKQGKPE

SEQ ID NO: 168862 - protein, 543 aa, Zea Mays
MARRSSSSSSGTWRYLNPAYYLKRPKRLALLFFVFVAATFAFWDRQSLVSEYESEISRLEDDINRLHDQLRKAGVNLDENPVVSNKNSRKDLVVEIDPVNNERREKVKEAMLHAWNSYVKYAWGMDELQPQSKNGINSFGGLGATLVDSLDTLYIMGLKDEFQKAREVVGGLLSSYDLSGDKVFLDKAKDITDRLLPAWDTTSGIPYNRINLAHGRAHNPGWTNGDSILADSGTEQLEFIALSQRTGDPKYQQKAENVIKQLQKIYPSDGLLPIYINPHSGTASYSTITFGAMGDSFYEYLLKVWIQGNKTEHVKHYRQMWETSMEGLLSLTKKTTPSNYYYICEKNGGSLSDKMDELACFAPGMLALGASGYGPEKSEQIMNLAKELARTCYNFYQTTPTKLAGENYFFHTGQDMGVGTSWNILRPETVESLMYLWRLTGNKTYQDWGWDIFQAFEKNSRIESGYVGLRDVNTGEKDNMMQSFFLAETLKYLYLLFSPPSVISFDEWVFNTEAHPLRIVPVSDNKGIGTPVRQFGRKQGKPE

SEQ ID NO: 168863 - protein, 263 aa, Zea Mays
MPRKRSRPTSSRTARAAPRAVRRIRPRRGNQKAKIGDVESEESGPSECQDDENLDTDDTSKIEEGITNKNKGLPAPASKPAWRTGATKGNQHTKIDDSGSEESGPCETAQDDYISKMEVDNIDNDRGPPPGAQLFTLGEQEVKGVKLNTVEEKQDSPFQRTTAAEAMSSTPGEKIEQMADPLHAMLLDMLPLLGQKRTEDTSKAPLAKAEKDPPAIGSSTSNSEILLPDAGTSGVPAPEPSAAPPKKKKVSYRDVVSELLKDW

SEQ ID NO: 168864 - protein, 372 aa, Zea Mays
MHGGQVCSSIAPATHLVVVSVLQVYNFDNLYKSFPPAERRYLHDKRLHVVSNKWLEDSVEKQMKLSETAYSLKPDTLEELEIKRSEENVQPPEHKFEEHKEVERSHAENMPRKRSRPTSSRTARAAPRAVRRIRPRRGNQKAKIGDVESEESGPSECQDDENLDTDDTSKIEEGITNKNKGLPAPASKPAWRTGATKGNQHTKIDDSGSEESGPCETAQDDYISKMEVDNIDNDRGPPPGAQLFTLGEQEVKGVKLNTVEEKQDSPFQRTTAAEAMSSTPGEKIEQMADPLHAMLLDMLPLLGQKRTEDTSKAPLAKAEKDPPAIGSSTSNSEILLPDAGTSGVPAPEPSAAPPKKKKVSYRDVVSELLKDW

SEQ ID NO: 168865 - protein, 192 aa, Zea Mays
MKWLLMIILKDLKLGISEKSIFEEFHPDAQDLFNVTCDLKFVCEKLNDRSQRHKRQDIEIGKAVRPQLALRVRDSSVAWKKLHGKQVVAECKFDGDRIQIHKNGEEIHFFSRSFLDHTEYAPGMSKIIKENILVDRCILDGEMLVWDTVLNRFAEFGSNQEIAKAAREGLETDRQLCCILYFLYYLHSYFLS

SEQ ID NO: 168866 - protein, 342 aa, Zea Mays
MFQAMSGDKSSAKKRGRLRAFLDRAYVPCGGRDDYFSALRLVLPGLDRERGSYGLKEAALAAVLVDALGIAKDSTDAVRLTNWRRGGGGRNAGNFSLVAAEILQRRQGITSGGLTIKEVNDALDRLATTENRSEKALILSNLIKKTNALEMKWLLMIILKDLKLGISEKSIFEEFHPDAQDLFNVTCDLKFVCEKLNDRSQRHKRQDIEIGKAVRPQLALRVRDSSVAWKKLHGKQVVAECKFDGDRIQIHKNGEEIHFFSRSFLDHTEYAPGMSKIIKENILVDRCILDGEMLVWDTVLNRFAEFGSNQEIAKAAREGLETDRQLCCILYFLYYLHSYFLS

SEQ ID NO: 168867 - protein, 130 aa, Zea Mays
MSLALQVAQFLVGLAVPSDDNSYPKRFLSFCRVGTGLSDEERDALVTKLNPYFRKNEYPKKPPKFYEVTNNSKERPDVWIESPDKSVIISVTSDIRTIKSEVFAAPYCLRFPRIQRVRYDKPWHECLDVQ

SEQ ID NO: 168868 - protein, 433 aa, Zea Mays
MKWLLMIILKDLKLGISEKSIFEEFHPDAQDLFNVTCDLKFVCEKLNDRSQRHKRQDIEIGKAVRPQLALRVRDSSVAWKKLHGKQVVAECKFDGDRIQIHKNGEEIHFFSRSFLDHTEYAPGMSKIIKENILVDRCILDGEMLVWDTVLNRFAEFGSNQEIAKAAREGLETDRQLCYVVFDILYAGDTSVIHQSLTERHQILQKVVKQLKGHLEILIPRRGLNVPRPSDEPCWSIIAHNAEDVDKFFKETIENRDEGIVLKDLDSKWEPGDRNGKWLKLKPDYIHAGADLDVIIIGGYYGSGRQGGEVAQFLVGLAVPSDDNSYPKRRFLSFCRVGTGLSDEERDALVTKLNPYFRKNEYPKKPPKFYEVTNNSKERPDVWIESPDKSVIISVTSDIRTIKSEVFAAPYCLRFPRIQRVRYDKPWHECLDVQ

SEQ ID NO: 168869 - protein, 330 aa, Zea Mays
MAAKVRFGLLVAMFQAMSGDKSSAKKRGRLRAFLDRAYVPCGGRDDYFSALRLVLPGLDRERGSYGLKEAALAAVLVDALGIAKDSTDAVRLTNWRRGGGGRNAGNFSLVAAEILQRRQGITSGGLTIKEVNDALDRLATTENRSEKALILSNLIKKTNALEMKWLLMIILKDLKLGISEKSIFEEFHPDAQDLFNVTCDLKFVCEKLNDRSQRHKRQDIEIGKAVRPQLALRVRDSSVAWKKLHGKQVVAECKFDGDRIQIHKNGEEIHFFSRSFLDHTEYAPGMSKIIKENILVDRCILDGEMLVWDTVLNRFAEFGSNQEIGFWIFH

SEQ ID NO: 168870 - protein, 594 aa, Zea Mays
MAAKVRFGLLVAMFQAMSGDKSSAKKRGRLRAFLDRAYVPCGGRDDYFSALRLVLPGLDRERGSYGLKEAALAAVLVDALGIAKDSTDAVRLTNWRRGGGGRNAGNFSLVAAEILQRRQGITSGGLTIKEVNDALDRLATTENRSEKALILSNLIKKTNALEMKWLLMIILKDLKLGISEKSIFEEFHPDAQDLFNVTCDLKFVCEKLNDRSQRHKRQDIEIGKAVRPQLALRVRDSSVAWKKLHGKQVVAECKFDGDRIQIHKNGEEIHFFSRSFLDHTEYAPGMSKIIKENILVDRCILDGEMLVWDTVLNRFAEFGSNQEIAKAAREGLETDRQLCYVVFDILYAGDTSVIHQSLTERHQILQKVVKQLKGHLEILIPRRGLNVPRPSDEPCWSIIAHNAEDVDKFFKETIENRDEGIVLKDLDSKWEPGDRNGKWLKLKPDYIHAGADLDVIIIGGYYGSGRQGGEVAQFLVGLAVPSDDNSYPKRFLSFCRVGTGLSDEERDALVTKLNPYFRKNEYPKKPPKFYEVTNNSKERPDVWIESPDKSVIISVTSDIRTIKSEVFAAPYCLRFPRIQRVRYDKPWHECLDVQ

SEQ ID NO: 168871 - protein, 235 aa, Zea Mays
MSSEAVKVAVPESVLRKRKREEQWAAEKKEKSLAERKKSIENRKLIFTRAKQYAEEYDAQEKELVQLKREARLKGGFYVSPEAKLLFVIRIRGKILQLLRLRQIFNGVFLKVNKATINMLRRVEPYVAYGYPNLKSVRELIYKRGYGKLNKQRIPLSNNQVIEEGLGKHNIICIEDLVHEIMTVGPHFKEANNFLWPFKLKAPLGGLKKKRNHYVEGGDAGNRENYINELIKRMN

SEQ ID NO: 168872 - protein, 61 aa, Zea Mays
MVTLEVKGETQLNNLAEKLAAAGVRHKLWIEQPENIPTCIATAPCPKSQVSSFFKKLKLCK

SEQ ID NO: 168873 - protein, 382 aa, Zea Mays
MAASGAWLARATATAVLGFVLAVASAEAASGDVEMVFLKAAVAKGAVCLDGSPPVYHFSPGSGSGANNWVVHMEGNFRGSSKFMKPLSFSGILGGNQKSNPDFYNWNRVKIRYCDGSSFTGDVEAVDTAKDLRYRGFRVWRAVIDDLLTVRGMSKAQNALLSGCSAGGLAAILHCDRFHDLFPAKTKVKCFSDAGYFFDGKDISGNFYARSIYKSVVNLHGSAKNLPASCTSKPKQSPELCMFPQYVVPTMRTPLFILNAAYDSWQVKNVLAPSPADPKKTWAQCKLDIKSCSASQLTTLQNFRTDFLAALPKTQSVGMFIDSCNAHCQSGSQDTWLADGSPTVNKTQIGKAVGDWYYDREVPRQIDCPYPCNPTCKNRDDD

SEQ ID NO: 168874 - protein, 229 aa, Zea Mays
MALNDAMTYDKTTKTGGANGSIRLETSRPENSGLSSALDLLTEAKKEIDSFSKGGPISFADLIQFAAQSALKRSFLDAAIAKCGGNEEKGRTLYSAYGSNGQWGLFDRTFGRADAQEADPEGRVPDWSKASVQEMKDRFVAVGLGPRQLAVMSAFLGPDQAATEGRLIADPDCRPWVEKYQRSRETVSRTDYEVDLITTLTKLSSLGQKINYEAYTYPKQKIDLGKLKL

SEQ ID NO: 168875 - protein, 241 aa, Zea Mays
MAGANFLSTAALVARGVAACSSISTPTRRHPQIRVCCRADVEAMEAYAHEERLRFRRRDFIGTCVGTAIGLEMIDGSTSFSGVATAADLIERRQRSEFQSKIKDTLYVAIKAKPELVPSLLTMALNDAMTYDKTTKTGGANGSIRLETSRPENSGLSSALDLLTEAKKEIDSFSKGGPISFADLIQFAAQSALKRSFLDAAIAKCGGNEEKGRTLYSAYGSNGQNVRESRRTGSRSRGKSA

SEQ ID NO: 168876 - protein, 339 aa, Zea Mays
MAGANFLSTAALVARGVAACSSISTPTRRHPQIRVCCRADVEAMEAYAHEERLRFRRRDFIGTCVGTAIGLEMIDGSTSFSGVATAADLIERRQRSEFQSKIKDTLYVAIKAKPELVPSLLTMALNDAMTYDKTTKTGGANGSIRLETSRPENSGLSSALDLLTEAKKEIDSFSKGGPISFADLIQFAAQSALKRSFLDAAIAKCGGNEEKGRTLYSAYGSNGQWGLFDRTFGRADAQEADPEGRVPDWSKASVQEMKDRFVAVGLGPDQAATEGRLIADPDCRPWVEKYQRSRETVSRTDYEVDLITTLTKLSSLGQKINYEAYTYPKQKIDLGKLKL

SEQ ID NO: 168877 - protein, 169 aa, Zea Mays
MATAARALVAARPARPLLPSRRLPSSSSIRPARQRAGVGCVRCMARRPDSTYSPLRSGQGGDRAPTEMAPLFPGCDYEHWLIVMDKPGGEGATKQQMIDCYIQTLAQVVGSEEEAKKRIYNVSCERYFGFGCEIDEETSNKLEGLPGVLFVLPDSYVDAENKDYGLSYL

SEQ ID NO: 168878 - protein, 339 aa, Zea Mays
MAGANFLSTAALVARGVAACSSISTPTRRHPQIRVCCRADVEAMEAYAHEERLRFRRRDFIGTCVGTAIGLEMIDGSTSFSGVATAADLIERRQRSEFQSKIKDTLYVAIKAKPELVPSLLTMALNDAMTYDKTTKTGGANGSIRLETSRPENSGLSSALDLLTEAKKEIDSFSKGGPISFADLIQFAAQSALKRSFLDAAIAKCGGNEEKGRTLYSAYGSNGQWGLFDRTFGRADAQEADPEGRVPDWSKASVQEMKDRFVAVGLGPRQAATEGRLIADPDCRPWVEKYQRSRETVSRTDYEVDLITTLTKLSSLGQKINYEAYTYPKQKIDLGKLKL

SEQ ID NO: 168879 - protein, 313 aa, Zea Mays
MDDLIDASAATPATDNAAEPQVDLFADADFQSATASTETAANTDVKVNVDLFAEKASFPAAFPPQAGFIPPPSAGTSSEVNTSVSKKAAPEPFDPFGAIPLNNFDGPDPFGGFSSNAGSSTAAAPTHGSTGNISTSNQNLHAASDFAAFVSNNEGAAKDPFDLSSSANVGKTPLAAPKIDASDFGAFVSSTEEAAKDPLDLSSGSNLGKTGQAPAAASKPSAKKDNFQVKSGIWADSLSRGLIDLNITAPKKVNLADIGIVGGLGDGSDEKALPSWTMGAGSGLGMSGIPPSTQQAGGIESLANYNKHHFGFK

SEQ ID NO: 168880 - protein, 536 aa, Zea Mays
MVMNVLWTRLSERGANWRHVYKALTIIEYFIANGSERAVDDILDHYSKISVLSSFEYVEPNGKDAGINVRKKVETIVGIINDKEKIKAVRDKAASNRDKYIGLSSTGITYKSSSASFGSNCSSGERYGSISGTKEADSYGDSYRDKESVKTSTSNSGSRKFGSKLRKDAKPDRRNEDYSSPSSLRPPSNTNNTEDDFDDFDPRGSNGKTTAKSNEVDLFGPNLMDDLIDASAATPATDNAAEPQVDLFADADFQSATASTETAANTDVKVNVDLFAEKASFPAAFPPQAGFIPPPSAGTSSEVNTSVSKKAAPEPFDPFGAIPLNNFDGPDPFGGFSSNAGSSTAAAPTHGSTGNISTSNQNLHAASDFAAFVSNNEGAAKDPFDLSSSANVGKTPLAAPKIDASDFGAFVSSTEEAAKDPLDLSSGSNLGKTGQAPAAASKPSAKKDNFQVKSGIWADSLSRGLIDLNITAPKKVNLADIGIVGGLGDGSDEKALPSWTMGAGSGLGMSGIPPSTQQAGGIESLANYNKHHFGFK

SEQ ID NO: 168881 - protein, 589 aa, Zea Mays
MDFMKVFDQTVREIKREVNLKVLKVPEIEQKVLDATSDEPWGPHGSALSELAHATKKFAECQMVMNVLWTRLSERGANWRHVYKALTIIEYFIANGSERAVDDILDHYSKISVLSSFEYVEPNGKDAGINVRKKVETIVGIINDKEKIKAVRDKAASNRDKYIGLSSTGITYKSSSASFGSNCSSGERYGSISGTKEADSYGDSYRDKESVKTSTSNSGSRKFGSKLRKDAKPDRRNEDYSSPSSLRPPSNTNNTEDDFDDFDPRGSNGKTTAKSNEVDLFGPNLMDDLIDASAATPATDNAAEPQVDLFADADFQSATASTETAANTDVKASFPAAFPPQAGFIPPPSAGTSSEVNTSVSKKAAPEPFDPFGAIPLNNFDGPDPFGGFSSNAGSSTAAAPTHGSTGNISTSNQNLHAASDFAAFVSNNEGAAKDPFDLSSSANVGKTPLAAPKIDASDFGAFVSSTEEAAKDPLDLSSGSNLGKTGQAPAAASKPSAKKDNFQVKSGIWADSLSRGLIDLNITAPKKVNLADIGIVGGLGDGSDEKALPSWTMGAGSGLGMSGIPPSTQQAGGIESLANYNKHHFGFK

SEQ ID NO: 168882 - protein, 2720 aa, Zea Mays
MREEMDLGDIVLSWSVQEITNDDLYKTKVERIPFSFGSLDDYLRSYMTPLIEETRSCLNSCLELIAEAPSSKILSFKVAGKSGLHSMDVDFWDNGAGFSTETYTARNGDIFVLSNMKPEAADDFNRYGLTYCLAMVTEVSMNDEYQKGFKVKVSNSTGLEGDFSKLVHATFLDNIMANMRIWKALCFDSSMNNNFTIIKSLLAPRNMGEDVCSVCAKKDDCLMSSAELPPVNLNQSQLDAIESIISAVRCRHLNLTKLIWGPPGTGKTKTVSALLWALACLKCRTLTCTPTNVAVVGVCTRFLQNLKEFSKQIDICGLPLSLGDVLLLGNRDNMDISEEIQEVFLDYRVDELTECFSLLSGWRHIIVSMISFFEECGSRYDMLLECDGGSDSVCFLDFLKKQFDVAAKAVKKCMMTLWVHLPKKCFSHENVSNISMVLRLLEKINAFLCDGDLTDESAKRGFDFRSTENSIYEPISYIEKELGDARSLCLKLLKDLQSSLNLPVASSSYRLHNAEIAPLDMLIVDEAAQVKECELVIPLRLCWLKHVVLVGDDCQLRPLVRSQVCKEAGFGISLFERLVILNFEKHLLNIQYRMSPCISLFPNAKFYDKKILDGPNVHSSYNKDCTGLLFGSYAFINITDGREQKEGAGNSWQNLVEVAVVMHLIRTIFKSWRKRDQGISIGVVSPYSSQVAAIKDRLGKKYDTSDNFHVRVKSIDGFQGEEDDIIILSTVRSNERGNVGFLADIQRTNVALTRARHCLWILGNANTLYKSGTVWTDLVSDAQRRKCISNATTDPELCKLILHVKNELDELDDLLCSSSAVFSNTRWKVVLSDNFRRSFMKLKSPLLKKEVLQKLVKLGGGWRIPIKNLDVTDAFQLAKAYRIRDLYLVWSIDLEKNERYFQMIRVWDLLSQQHVARTVQHLENLFSMYTDEYLDHCRSVQTEGKLEFPIVWDAEHDIVRYKKDCKVDDQVDHDHLDFSCALENTKVSESFLLMKFYSLSSGVAHHLLTATDGTEIEIPFELTDEEEAIIRFPLTSFILGRSGTGKTTVLTMKLYQIEQHSFIASQGIELEVDLSVVDPKDRLAMDTRKGESFVKQVLITVSPKLCSAIKNHICRLKRFCSGDVSDQPNPLHMYDVIDDPEEFTDVPDNFSDLQHEHYPLTITYRKFLMMLDGTMKSSFFDMFYGDFNPSIERGHSKTRAMQAFIESKEVTFEKFAAFYWPHFNGELTKKLDASTVFTEIISHIKGGYRANMPCSGKLERLDYVMLSDKRFSSLNSKMREKIYDVFLDYESMKRTAREFDLSDFVNSLHRSLVSEGYNGALVDFIYIDEVQDLTMSQIALLKYVCRNFKEGFVFAGDTAQTIARGVDFRFEDVRSLFYTSFISESEACNQVIKHGNHAHLTDMFQLSQNFRTHCGVLRMAQSIMSLLYYFFPSCVDKLNPETGLVYGEAPVLLESGNDENAIMTIFGESRGEHADQHGFGAEQVILVRDVATKKQIVNLVGKQALVLTIVECKGLEFQDVLLYNFFSSSPLRNKWRVVYDYMKTRDVTSSSEVISHPGFDRNKHYLLCSELKQLYVAITRTRQRLWICENADDYCQPMFDYWKKLCIVEVRLLDSSLIQAMQTGSSTDDWRLRGTKLFNEGQFEMATMCFEKAGDAYRENWARAAGLLATADRVISTNLERGQANLQKASEIYESIGMHEKAATCYIKLGDYKRAGMIYMEKFGTKRLEDAGDCFAITECWSLAAEVYFRARCYTKCFSCCSKGKALSLGLQFLRQLEKEQCENFSSDFVAVRKTYLESCALHYFKCGDIKHMMPYVKAFNNVDHIRAFLSSRNLLDELLSIEMEMGNFLEAAGIAQRKGDVLLEVNILEKAESFVNATHLLLLYVTANSLWSPHSRGWPPESFEKKEQLLTKVKEMAKKVSEDFFCLACFEADLLSDSHRSLASLTCSLLEGRKCGNMLVELISARYIIDVHLQSQTSRYNLELEPVSDQLCYNMMACDQMSLETLSCIWNQWKLILVKVLAHLNPSEDIKSNDSAAVCEDLCAKLFGLRKDSDNRYVVLNVDSGWLTNTGRSSLEQDGNRCWLHTVHCQSCARTFMVNELSSVGLSVLRKLESIIETSREIASSPYAQWRSIVILYEIAMFLKEFCLANSLRKTVNFCEQKFFELLFRAWGDETAECFSDILDSSPAYGLIVDSVGSYTMAGNQNLTHGHLGRIAMFLLYTAKYGDMLNLTLEQYLNRDAEWAQFFQSLKSFLDTGVGRCSLVQTFKVALEFTTNVKWWIEKDYMSPICYMNLMECLGFFAMSCFMVNGCALCTKSLLVKMLKCRTSKAFLGNCLVSGLGDQDMDLDCMTFSPGVFICQSIRSILTNKHAIQEWIREIAPAIRYVPVLLRLVIMLYLLTLTLQLGDCYEVTDFLAKHRIFEDLPPDFSKKIVPTLKFRNGTVAHFTRVFGDALAAIGDTMVILGLPKGPLISSGLKAYRFSYTDLSDISKVMALLCPEEQKFSMQKDTKAWNDTCGNLSIARIQDNEMVSRIETHLSDESITFWEKFESFQVFMHDQKDSRVIILFLESLLSWLERRDLPENMDVQLFVEIRHICSQFQEKYLRDKKVYLTVEDLYSTWDDGENKLQKIISFLRYEKTSGKESVKRKDKAPAAQFPTHMADEWSGCSDNDEPDTAGMDAVEPAKEEDVTSCSTATATATKRTQNKKGKKKSRKRGGKK

SEQ ID NO: 168883 - protein, 2766 aa, Zea Mays
MRLSTEHQSHCLHFTCSNSSSSTPLHPFPATVNICGLLVLARAGEQSSSAMREEMDLGDIVLSWSVQEITNDDLYKTKVERIPFSFGSLDDYLRSYMTPLIEETRSCLNSCLELIAEAPSSKILSFKVAGKSGLHSMDVDFWDNGAGFSTETYTARNGDIFVLSNMKPEAADDFNRYGLTYCLAMVTEVSMNDEYQKGFKVKVSNSTGLEGDFSKLVHATFLDNIMANMRIWKALCFDSSMNNNFTIIKSLLAPRNMGEDVCSVCAKKDDCLMSSAELPPVNLNQSQLDAIESIISAVRCRHLNLTKLIWGPPGTGKTKTVSALLWALACLKCRTLTCTPTNVAVVGVCTRFLQNLKEFSKQIDICGLPLSLGDVLLLGNRDNMDISEEIQEVFLDYRVDELTECFSLLSGWRHIIVSMISFFEECGSRYDMLLECDGGSDSVCFLDFLKKQFDVAAKAVKKCMMTLWVHLPKKCFSHENVSNISMVLRLLEKINAFLCDGDLTDESAKRGFDFRSTENSIYEPISYIEKELGDARSLCLKLLKDLQSSLNLPVASSSYRLHNAEIAPLDMLIVDEAAQVKECELVIPLRLCWLKHVVLVGDDCQLRPLVCKEAGFGISLFERLVILNFEKHLLNIQYRMSPCISLFPNAKFYDKKILDGPNVHSSYNKDCTGLLFGSYAFINITDGREQKEGAGNSWQNLVEVAVVMHLIRTIFKSWRKRDQGISIGVVSPYSSQVAAIKDRLGKKYDTSDNFHVRVKSIDGFQGEEDDIIILSTVRSNERGNVGFLADIQRTNVALTRARHCLWILGNANTLYKSGTVWTDLVSDAQRRKCISNATTDPELCKLILHVKNELDELDDLLCSSSAVFSNTRWKVVLSDNFRRSFMKLKSPLLKKEVLQKLVKLGGGWRIPIKNLDVTDAFQLAKAYRIRDLYLVWSIDLEKNERYFQMIRVWDLLSQQHVARTVQHLENLFSMYTDEYLDHCRSVQTEGKLEFPIVWDAEHDIVRYKKDCKVDDQVDHDHLDFSCALENTKVSESFLLMKFYSLSSGVAHHLLTATDGTEIEIPFELTDEEEAIIRFPLTSFILGRSGTGKTTVLTMKLYQIEQHSFIASQGIELEVDLSVVDPKDRLAMDTRKGESFVKQVLITVSPKLCSAIKNHICRLKRFCSGDVSDQPNPLHMYDVIDDPEEFTDVPDNFSDLQHEHYPLTITYRKFLMMLDGTMKSSFFDMFYGDFNPSIERGHSKTRAMQAFIESKEVTFEKFAAFYWPHFNGELTKKLDASTVFTEIISHIKGGYRANMPCSGKLERLDYVMLSDKRFSSLNSKMREKIYDVFLDYESMKRTAREFDLSDFVNSLHRSLVSEGYNGALVDFIYIDEVQDLTMSQIALLKYVCRNFKEGFVFAGDTAQTIARGVDFRFEDVRSLFYTSFISESEACNQVIKHGNHAHLTDMFQLSQNFRTHCGVLRMAQSIMSLLYYFFPSCVDKLNPETGLVYGEAPVLLESGNDENAIMTIFGESRGEHADQHGFGAEQVILVRDVATKKQIVNLVGKQALVLTIVECKGLEFQDVLLYNFFSSSPLRNKWRVVYDYMKTRDVTSSSEVISHPGFDRNKHYLLCSELKQLYVAITRTRQRLWICENADDYCQPMFDYWKKLCIVEVRLLDSSLIQAMQTGSSTDDWRLRGTKLFNEGQFEMATMCFEKAGDAYRENWARAAGLLATADRVISTNLERGQANLQKASEIYESIGMHEKAATCYIKLGDYKRAGMIYMEKFGTKRLEDAGDCFAITECWSLAAEVYFRARCYTKCFSCCSKGKALSLGLQFLRQLEKEQCENFSSDFVAVRKTYLESCALHYFKCGDIKHMMPYVKAFNNVDHIRAFLSSRNLLDELLSIEMEMGNFLEAAGIAQRKGDVLLEVNILEKAESFVNATHLLLLYVTANSLWSPHSRGWPPESFEKKEQLLTKVKEMAKKVSEDFFCLACFEADLLSDSHRSLASLTCSLLEGRKCGNMLVELISARYIIDVHLQSQTSRYNLELEPVSDQLCYNMMACDQMSLETLSCIWNQWKLILVKVLAHLNPSEDIKSNDSAAVCEDLCAKLFGLRKDSDNRYVVLNVDSGWLTNTGRSSLEQDGNRCWLHTVHCQSCARTFMVNELSSVGLSVLRKLESIIETSREIASSPYAQWRSIVILYEIAMFLKEFCLANSLRKTVNFCEQKFFELLFRAWGDETAECFSDILDSSPAYGLIVDSVGSYTMAGNQNLTHGHLGRIAMFLLYTAKYGDMLNLTLEQYLNRDAEWAQFFQSLKSFLDTGVGRCSLVQTFKVALEFTTNVKWWIEKDYMSPICYMNLMECLGFFAMSCFMVNGCALCTKSLLVKMLKCRTSKAFLGNCLVSGLGDQDMDLDCMTFSPGVFICQSIRSILTNKHAIQEWIREIAPAIRYVPVLLRLVIMLYLLTLTLQLGDCYEVTDFLAKHRIFEDLPPDFSKKIVPTLKFRNGTVAHFTRVFGDALAAIGDTMVILGLPKGPLISSGLKAYRFSYTDLSDISKVMALLCPEEQKFSMQKDTKAWNDTCGNLSIARIQDNEMVSRIETHLSDESITFWEKFESFQVFMHDQKDSRVIILFLESLLSWLERRDLPENMDVQLFVEIRHICSQFQEKYLRDKKVYLTVEDLYSTWDDGENKLQKIISFLRYEKTSGKESVKRKDKAPAAQFPTHMADEWSGCSDNDEPDTAGMDAVEPAKEEDVTSCSTATATATKRTQNKKGKKKSRKRGGKK

SEQ ID NO: 168884 - protein, 165 aa, Zea Mays
MRVREFCGGCRSDQGGTFKELSVRIQGSRRLLRTRRPFVAEITDAMGNEIFKVRRPFWWINSSIYAEVDGKEIGVVHRRWHLWQRIYDLYLGNRQFAVVENPGFWNWTFSLVDEDDKLLAQIDRNWRGIGFEVISFSSYNDQSIPFCYTRWTSMSIHDLMNQLHV

SEQ ID NO: 168885 - protein, 272 aa, Zea Mays
MRVREFCGGCRSDQGGTFKELSVRIQGSRRLLRTRRPFVAEITDAMGNEIFKVRRPFWWINSSIYAEVDGKEIGVVHRRWHLWQRIYDLYLGNRQFAVVENPGFWNWTFSLVDEDDKLLAQIDRNWRGIGFEPFIQYWALPLPDDTAMMVLSHKSQQIHVALFTDAGQYAIRFGDDVQSDKFAHLPFIISGYVGAHFSQLVNVSQKLQTKELHVVRQLTLPERVVALALAISLDSDYFSRRGGCFSNVLLDLLSGKHVQPNHFFVGVLVYQW

SEQ ID NO: 168886 - protein, 191 aa, Zea Mays
MRVREFCGGCRSDQGGTFKELSVRIQGSRRLLRTRRPFVAEITDAMGNEIFKVRRPFWWINSSIYAEVDGKEIGVVHRRWHLWQRIYDLYLGNRQFAVVENPGFWNWTFSLVDEDDKLLAQIDRNWRGIGFEPFIQYWALPLPDDTAMMVLSHKSQQIHVALFTDAGQYAIRFGDDVQSDKFAHLPFIISG

SEQ ID NO: 168887 - protein, 162 aa, Zea Mays
MRVREFCGGCRSDQGGTFKELSVRIQGSRRLLRTRRPFVAEITDAMGNEIFKVRRPFWWINSSIYAEVDGKEIGVVHRRWHLWQRIYDLYLGNRQFAVVENPGFWNWTFSLVDEDDKLLAQIDRNWRGIGFELFTDAGQYAIRFGDDVQSDKFAHLPFIISG

SEQ ID NO: 168888 - protein, 264 aa, Zea Mays
MRWLPRLLSHSIEVGRASAAGRSNPSLVKAGSHGFASGGWDGSPAVPREWLRKLWVDVLKKQKEDARRWGIGASPGNAGSGAEPSLCAFANSVEAAGATREAPSRSYQYEYRGLAGLVVQMSKSNPLLFMFQLLRTRRPFVAEITDAMGNEIFKVRRPFWWINSSIYAEVDGKEIGVVHRRWHLWQRIYDLYLGNRQFAVVENPGFWNWTFSLVDEDDKLLAQIDRNWRGIGFELFTDAGQYAIRFGDDVQSDKFAHLPFIISG

SEQ ID NO: 168889 - protein, 244 aa, Zea Mays
MRVREFCGGCRSDQGGTFKELSVRIQGSRRLLRTRRPFVAEITDAMGNEIFKVRRPFWWINSSIYAEVDGKEIGVVHRRWHLWQRIYDLYLGNRQFAVVENPGFWNWTFSLVDEDDKLLAQIDRNWRGIGFEPFIQYWALPLPDDTAMMVLSHKSQQIHVALFTDAGQYAIRFGDDVQSDKFAHLPFIISGYVGAHFSQLVNVSQKLQTKELHVVRQLTLPERVVALALAISLDSDYFSRRGGW

SEQ ID NO: 168890 - protein, 254 aa, Zea Mays
MRWLPRLLSHSIEVGRASAAGRSNPSLVKAGSHGFASGGWDGSPAVPREWLRKLWVDVLKKQKEDARRWGIGASPGNAGSGAEPSLCAFANSVEAAGATREAPSRSYQYEYRGLAGLVVQMSKSNPLLFMFQLLRTRRPFVAEITDAMGNEIFKVRRPFWWINSSIYAEVDGKEIGVVHRRWHLWQRIYDLYLGNRQFAVVENPGFWNWTFSLVDEDDKLLAQIDRNWRGIGFENGNPRLQCPGLLKNNRDGKS

SEQ ID NO: 168891 - protein, 345 aa, Zea Mays
MRWLPRLLSHSIEVGRASAAGRSNPSLVKAGSHGFASGGWDGSPAVPREWLRKLWVDVLKKQKEDARRWGIGASPGNAGSGAEPSLCAFANSVEAAGATREAPSRSYQYEYRGLAGLVVQMSKSNPLLFMFQLLRTRRPFVAEITDAMGNEIFKVRRPFWWINSSIYAEVDGKEIGVVHRRWHLWQRIYDLYLGNRQFAVVENPGFWNWTFSLVDEDDKLLAQIDRNWRGIGFEPFIQYWALPLPDDTAMMVLSHKSQQIHVALFTDAGQYAIRFGDDVQSDKFAHLPFIISGYVGAHFSQLVNVSQKLQTKELHVVRQLTLPERVVALALAISLDSDYFSRRGG

SEQ ID NO: 168892 - protein, 856 aa, Zea Mays
MPSRSPACRPRGRNRRSAADAVARPLALALILVSTLPRAAHSQDLALPPVQPRGVRRTMTCDNIPEPFGTRSRGASRLPGFEVTCGPNREAMLSIGGDAYMIDFVSVSGSYVVVFAEPITQVCYDGKGKPTPDTGTGAKSSEGTTTTFTWSLEGTPFTFSKSNKLVNFGCNRTLMANFFIVPGDSSPLYTSCTTTCNTLQISGSCLGEACCEAPMDQVNGAKAFSLSFERTTANGTGEEDGTCSAAFFLDKDETVFTFSGDEVRPLKTALLPPGERRMVLDWAIGSTSCEQTQSYTFEKLCKYGTCVDAPTGAGYLCKCPSGYDGNPYVSDGCQDINECRNYNSNNCTYQNLCNNTLGGYTCSCPENNIGDGYRTGTGCNTTLATPVSPSQQPQGINVCDHPEKNPCTYIKYCIDLEGVVSCACPEGMSGDGRKNGRGCCFSCQKHFPLDTVLGVSLVLMVTTTTAASCYCWAVKKRELGRKRAELFRKNGGLLLQQRFSTITSQGEDQYSSKIFSAEELKAATDNYSESRILGRGGQGTVYKGILPDQTVVAIKKSKVFDESQVEQFVNEIAILSQIDHPNVVKLLGCCLETQVPLLVYEFISNGTLFQHIHNRNATRPLTWEDCLRIAAETADALAYLHSASSIPIIHRDIKSSNILLDGNFVAKIADFGASRSVPFDQTHITTLIQGTIGYLDPEYFQSSQLTEKSDVYSFGVVLAELLTRQKPISAARPEDSCNLAMHLVVLFNKGRLLQEIEPHILAEAGEDQCYAVAELSVRCLNVKGEERPAMVVVASVLQELRRSFTIDQAVGIKDESIQENSEQEEKHLHESRSIPSLQSSEVSTQCSMEAKMSSFC

SEQ ID NO: 168893 - protein, 480 aa, Zea Mays
MHIDLSFETSLMILGYLSGINVCDHPEKNPCTYIKYCIDLEGVVSCACPEGMSGDGRKNGRGCCFSCQKHFPLDTVLGVSLVLMVTTTTAASCYCWAVKKRELGRKRAELFRKNGGLLLQQRFSTITSQGEDQYSSKIFSAEELKAATDNYSESRILGRGGQGTVYKGILPDQTVVAIKKSKVFDESQVEQFVNEIAILSQIDHPNVVKLLGCCLETQVPLLVYEFISNGTLFQHIHNRNATRPLTWEDCLRIAAETADALAYLHSASSIPIIHRDIKSSNILLDGNFVAKIADFGASRSVPFDQTHITTLIQGTIGYLDPEYFQSSQLTEKSDVYSFGVVLAELLTRQKPISAARPEDSCNLAMHLVVLFNKGRLLQEIEPHILAEAGEDQCYAVAELSVRCLNVKGEERPAMVVVASVLQELRRSFTIDQAVGIKDESIQENSEQEEKHLHESRSIPSLQSSEVSTQCSMEAKMSSFC

SEQ ID NO: 168894 - protein, 416 aa, Zea Mays
MPSRSPACRPRGRNRRSAADAVARPLALALILVSTLPRAAHSQDLALPPVQPRGVRRTMTCDNIPEPFGTRSRGASRLPGFEVTCGPNREAMLSIGGDAYMIDFVSVSGSYVVVFAEPITQVCYDGKGKPTPDTGTGAKSSEGTTTTFTWSLEGTPFTFSKSNKLVNFGCNRTLMANFFIVPGDSSPLYTSCTTTCNTLQISGSCLGEACCEAPMDQVNGAKAFSLSFERTTANGTGEEDGTCSAAFFLDKDETVFTFSGDEVRPLKTALLPPGERRMVLDWAIGSTSCEQTQSYTFEKLCKYGTCVDAPTGAGYLCKCPSGYDGNPYVSDGCQDINECRNYNSNNCTYQNLCNNTLGGYTCSCPENNIGDGYRTGTGCNTTLATPVSPSQQPQGKTVEAAVLAVKSTSLLTQFWV

SEQ ID NO: 168895 - protein, 123 aa, Zea Mays
MPKDGRWGPADADASGPGRTVERVPFFPLSENQSKRAMAAKIGRWVGVSDWPLHCPLVRVRVEPSDNYRAPDPPINPPFGKRCDGTRKAIRRGRLLFAARLDVHVLRASTAPHLLCVGAPAAC

SEQ ID NO: 168896 - protein, 510 aa, Zea Mays
MAEAGGPNSCSPMAMAALELQKILETEDTHDHGSPRRFGGRRLAGRLGLELKPWMEGSHRWPPLVGLMGGVGPSKYTSVYRLGEKLRSLRARPRPSRSFRRAFVLRFFPCSSSWPGRKKRGTLAVDGSGVGVPGGAGRDPAGARGMVRGARRPVPAKAMAPAHPQAGAVPRPRRRPGDALIHLYNHFISDFETKISLLKFAHFTVVVSHQYLDKNAGINYLEGVISKLRDTRESRVEEPILYVKMQIATFLLEKGNQKDCKNLLEEGKTTLDSMVDVDPSVHGTYYWVCSQYHKARQEYSEFYKSCLLYLAYTTVSLLLQFLINLALDLSLAALLGENIYNFGELLAHPIIHSLLGTQAEWIFHMLQAFNSGNLSLYQEICKAHSNALSAQLALVQNERNLLEKINMLCLMEIIFSRSSENRTIPMRDIAEQTKLPVEDVEYLLMKSLSARLIEGIIDQVDGVVHVSRVKPRVLGIDQVKCLHDRLDTWIGKVDTILLSVEAETPDLVSS

SEQ ID NO: 168897 - protein, 334 aa, Zea Mays
MFSLTHPPMAEAGGPNSCSPMAMAALELQKILETEDTHDHGSPRRFGGRRLAGRLGLELKPWMEGSHRWPPLVGLMGGVGPSKYTSVYRLGEKLRSLRARPRPSRSFRRAFVLRFFPCSSSWPGRKKRGTLAVDGSGVGVPGGAGRDPAGARGMVRGARRPVPAKAMAPAHPQAGAVPRPRRRPGDALIHLYNHFISDFETKISLLKFAHFTVVVSHQYLDKNAGINYLEGVISKLRDTRESRVEEPILYVKMQIATFLLEKGNQKDCKNLLEEGKTTLDSMVDVDPSVHGTYYWVCSQYHKARQEYSEFYKSCLLYLAYTTVSLLLQFLIGFV

SEQ ID NO: 168898 - protein, 202 aa, Zea Mays
MAAALEFLEAQGATQPELAEWYAALADLYQRKLWHQLTLKLEQFLALAVVQAGDALIHLYNHFISDFETKISLLKFAHFTVVVSHQYLDKNAGINYLEGVISKLRDTRESRVEEPILYVKMQIATFLLEKGNQKDCKNLLEEGKTTLDSMVDVDPSVHGTYYWVCSQYHKARQEYSEFYKSCLLYLAYTTVSLLLQFLIGFV

SEQ ID NO: 168899 - protein, 325 aa, Zea Mays
MMRYNDNKHHEAFLHAIHDCMICLSECPGVDFIKLPCHHFFCWKCMQTYCKMNVKEGNVVKLLCPDTKCEGAVPPNVLKRLLGEDEYERWEGLLLQKTLDAMKDVVYCPRCQTACLEDVGNEAVCSSCLFSFCTLCRNRRHIGEQCMSPEERLMILEKRQESGNVQGDQMKVLQELRSLKEIMKDSKQCPKCRMAISKTEGCNKMHCENCGEYFCYQCNRAITGYEHFRGSCVLFPQEELDRWEMQMNQRVGRQIVAHAHAAIHGQNGQAHPCPTCRQPSPKIGNNNHLFCWACQKHFCALCHKAVQKPAQHYGPKGCKQHTADP

SEQ ID NO: 168900 - protein, 399 aa, Zea Mays
MISPLCRMLDMLWEEQQGMEVTYQWVQWLQSCSLSHLGFTNEVVLRKSYVTCYADGEDKRACPDYASPDVIIPRMMRYNDNKHHEAFLHAIHDCMICLSECPGVDFIKLPCHHFFCWKCMQTYCKMNVKEGNVVKLLCPDTKCEGAVPPNVLKRLLGEDEYERWEGLLLQKTLDAMKDVVYCPRCQTACLEDVGNEAVCSSCLFSFCTLCRNRRHIGEQCMSPEERLMILEKRQESGNVQGDQMKVLQELRSLKEIMKDSKQCPKCRMAISKTEGCNKMHCENCGEYFCYQCNRAITGYEHFRGSCVLFPQEELDRWEMQMNQRVGRQIVAHAHAAIHGQNGQAHPCPTCRQPSPKIGNNNHLFCWACQKHFCALCHKAVQKPAQHYGPKGCKQHTADP

SEQ ID NO: 168901 - protein, 750 aa, Zea Mays
MQGSNTKSSSAEAKSNSKPDKEKKGGGGGTPPTPKDSKPRKPAVPKASAAGHGTPRAADKSPGSGSADRKAPTPKAAASRLATPPEPAKRPQEQQAQLAEIREELVKAKEQLLENEKEKCRVLAELERAKKVADEANAKLQDALDVQRRAIEAQEADKLPAGESKQASIHDQQEDDDAVLRSTVEQLEKARYELADAVDAKNEALSQVDDAVRASEVKAQEVEHLIAEVTRLKGLVDSKVDGNRKKTAERIQNLEEENFALKLELQKKKAAEEKAVRLERMIDELESDVDDARNFGSKSKQLADEWQKKAQLLEVRLEEADQSNILKGESLNSAMEELDSTSSLLRDRESEVAALRDKVRFFEDEQTKLKNDIVVSGQRADAAEKEAADLWTEVEGLRLKLHTVEEEKMEALNSDKSTTLETETLNEQKNQLTDKLEANKDELEKTKKAMEGLASALQEMSAESREAQEKYLLKQDEIERAQAQVEELSLSLKNTKENYELLLDEANYEKVCLTKTVERLKAEAKSAHEEWHSKELSFVNSIKNSEEEIVAIRVQMIRTLEVVKEKERENTELQEKLQQLESQLMEANRIREEASAETIRWKENILDQENELQNIKQENDDLQAKELAASEKVKELSFQLANVKDSLINGNTKEGDNEKGGTEEDDEPVVVVAKMWENGKFADCDSSKEKDNDGDSQVDLESNKGDAGLDSNGLHSTNESSGRASTKQPQQHKKPLLKRFGGLLKKKSEK

SEQ ID NO: 168902 - protein, 702 aa, Zea Mays
MLGSKTKSGSAEAKSNGKPDKEKKGGGGGTPPTPKDSKPRKPAEQHAQLAAIREELVKAKEQLVENEKEKCKVFAELERAKKVADEANAKLQDALDVQRRAIEAQEADKLPARESEQASIHGQQEADDAVLRSTVEQLEKARYELADAIDAKNEALSQVDDAVRASEVKAQEVEHLTVEVTRLKGLVDSKVDGNRKKTAERIQNLEEENFALKLELEKKKAAEEKAVRLERMIDELKSDVDDARNFGSKSKQLADEWQKKAQLLEVRLEEADQSNILKGESLNSAMEELDSTSSLLRDRESEVAALRDKVRFLEDELTKLKSDIVVSGQRADAAEKETTDLWTEIEGLRLKLHTVEEEKMEALNSDKNTSSEIETLNEQKNQLADELEASKDELEKIKKAMEGLASALQEMSAESREAQEKYLLKQDEMERAQAQVEELNLSLKNIKENYELLLDEANYEKVCLTKAVERLEAEAKRAHEEWQSKELSFVSSIKNSEEEIVAVRVQMDRTLEVVKEKENENTELQEKLQQLESQLMEANRIREEGNTETIRWKENILDQENELQNIKQENDDLQAKESAASEKIKELSSQLTNAKDGTINSNTKDGDNEKGGTEEDDEPVVVVAKMWENSKFADYDSAKEENDGDSQVDLESNKGDAGLDSNGLHSTKENSGRASPTKQHQQYKKKPLLKRFGGLLKKKSEN

SEQ ID NO: 168903 - protein, 427 aa, Zea Mays
MVAQHQPMPNGGWWRTGPIYGRSMVAPAGAERSGGGGANAGGAERLIVDAACQLAAHDHDVHVFTSHHDKKRCFEETLSGLFPVTVHGDFLPRHVFYRFHAVCAYLRCIFVALCVLLRWPFFDVILVDQVSVVIPLLKLMASSKIIFYCHFPDLLLAQHTTMLRRLYRKPIDMIEESTTGMADLILVNSKFTAATFARTFSGLHARGIEPGVLYPAVSVEQFHEPHAYKLNFLSINRFERKKNLDLAISAFALLRSAAWTLPGDALQEATLTVAGGYDKRLKENVEYLEELKRLALTEGVSGQVNFVTSCSTSERNELLSNCLCVLYTPKDEHFGIVPLEAMAAHKPVIACNSGGPVETVVNEVTGFLCDPSPAEFSKAMLKLVNDHDLAVRLGEQARDHVVQKFSTKTFGDLLNSYVLNIYHERME

SEQ ID NO: 168904 - protein, 235 aa, Zea Mays
MLEESSLVFFIQLSLLSSFTNPMLISNFMLAYLLTFRLNFLSINRFERKKNLDLAISAFALLRSAAWTLPGDALQEATLTVAGGYDKRLKENVEYLEELKRLALTEGVSGQVNFVTSCSTSERNELLSNCLCVLYTPKDEHFGIVPLEAMAAHKPVIACNSGGPVETVVNEVTGFLCDPSPAEFSKAMLKLVNDHDLAVRLGEQARDHVVQKFSTKTFGDLLNSYVLNIYHERME

SEQ ID NO: 168905 - protein, 90 aa, Zea Mays
MASSKIIFYCHFPDLLLAQHTTMLRRLYRKPIDMIEESTTGMADLILVNSKFTAATFARTFSGLHARGIEPGVLYPAVSVEQFHEPHAYK

SEQ ID NO: 168906 - protein, 170 aa, Zea Mays
MAAAGEVAGASSGTRTKRLKIAVIHPDLGIGGAERLIVDAACQLAAHDHDVHVFTSHHDKKRCFEETLSGLFPVTVHGDFLPRHVFYRFHAVCAYLRCIFVALCVLLRWPFFDVILVDQVSVVIPLLKLMASSKIIFYCHFPDLLLAQHTTMLRRLYRKPIDMIEESTTG

SEQ ID NO: 168907 - protein, 1498 aa, Zea Mays
MQEWQDLYSPCFWMVTFALIQLMFIMSILAQFLFKKFRWWRQRLKGSAPESNKQHQEHKITDIKLDISYKACKACCLLILGSHVLRAVFLQLHERISDCKYPPFIICEGLQVLSWIILSLAVFSFQKAKSTKIPKVIRTWWIFSFLQSVAIVVFDLRSILATHEDIGFEEWIDMCMLVVCTYLFAISVRGKTGIRFTDSSVTEALLNPSVGQQAEVKRPCPYGRANILELVTFSWMNPVFSIGYKKPLEKNEVPDVDGKDAAEFLSDSFKKIIGDVEHRHGLSTLSIYRAMFLFIGRKAIINAGFAILSASASYVGPSLINDLVKFLGGERQYGLKRGYILAVVFLSAKVVETIAQRQWIFGARQLGMRLRAALISHIYQKGLRLSCSSRQKHTSGEIINYMSVDIQRITDVIWYTNYIWMLPIQLSLAVYVLHTNLGVGAWAGLAATLAIMACNIPLTRMQKRLQAKIMVAKDNRMKATTEVLRSMKILKLQAWDMKYLQKLESLRGEEYNWLWRSVRLSALTTFIFWGSPAFISSITFGSCILMGIPLTAGTVLSALATFRMLQDPIFTLPDLLSVFAQGKVSADRVAKYLEEEELKCDAVTQVPRNDTDYDVEIDHGIFSWELETTSPTLTDVELKVKRGMKVAICGIVGSGKSSLLSCILGEMPKLDGTVRVSGRKAYVPQTAWILSGNIRENILFGNTHDKEKYENIIQACALTKDFELFANGDLTEIGERGINMSGGQKQRIQIARSVYEDADIYLFDDPFSAVDAHTGSQLFKDCVMGILKDKTVLYVTHQVEFLPAADLILVMQDGKIVQKGKFDELLQQNIGFEAIVGAHSQALESVINAESSSRIQSGNQKSADSEDEFDTENETDDQLQGITKQESAHDVSQDISDKGRLTQEEEREKGGIGKKVYWTYLRAVHGGALVPVTIAAQSFFQIFQVASNYWMAWASPPTTATTPTVGLGLLFSVYIALSMGSALCVLFRSLLVSLIGLLTSERFFKNMLHCILRAPMSFFDSTPTGRILNRASNDQSVLDLEIANKLGWCVFSIIQILGTIGVMSQVAWPVFAIFVPVTVICFLCQRYYIPTARELARLSQIQRAPILHHFAESLAGASSIRAYAQKDRFRKANLGLVDNHSRPWFHNVSAMEWLSFRLNMLSNFVFAFSLTLLVSLPEGFINPSIAGLAVTYALNLNSQLASIIWNICNTENKMISVERIMQYSRIPSEAPLIVDHYRPPNSWPDAGTINIRSLEVRYAEHLPSVLRNISCTIPGRKKVGIVGRTGSGKSTFIQALFRIIEPRGGTIQIDNVDILKIGLHDLRGRLSIIPQDPTMFEGTVRGNLDPLNEYPDHRVWEILDKCQLGDIVRQNPKKLDSIVVENGENWSVGQRQLFCLGRVLLKRSNVLVLDEATASVDSSTDAVIQGTIREEFRKCTVLTIAHRIHTVIDSDLILVFSEGRIIEYDTPSKLLENESSEFSRLIKEYSRRSHGFSGTANN

SEQ ID NO: 168908 - protein, 127 aa, Zea Mays
MVFAVAYGGHIRMFDARKFEKGPFEIFSVGNNDSEAHVIKFSSDGRRILLTTKAGRVHVLDSFHGNSIASCNVKPVVTNSTLEASFSPDGNHIISGSGDGSVYAWNVRSGKVARWGSTDDEPPLVSK

SEQ ID NO: 168909 - protein, 133 aa, Zea Mays
MVFAVAYGGHIRMFDARKFEKGPFEIFSVGNNDSEAHVIKFSSDGRRILLTTKAGRVHVLDSFHGNSIASCNVKPVVTNSTLEASFSPDGNHIISGRALGKHRRRTAAGKVGSRILDVRDRIIRTVMLGSGPV

SEQ ID NO: 168910 - protein, 209 aa, Zea Mays
MLICCVLSRVVCISFCSEKENFLSGSLDRTVLLWDQRAEKSQGLLRVQGRPAVSYDDQGMVFAVAYGGHIRMFDARKFEKGPFEIFSVGNNDSEAHVIKFSSDGRRILLTTKAGRVHVLDSFHGNSIASCNVKPVVTNSTLEASFSPDGNHIISGSGDGSVYAWNVRSGKVARWGSTDDEPPLQVGENDERWTALANPVRPCMVCRVAG

SEQ ID NO: 168911 - protein, 503 aa, Zea Mays
MYKRNNKSLSHNDSNSLSEQEDLTREIWRIDKDEFSSSFGIMRLNIVQLFAQNPQNSHLRKLIVDLEAPRFDSGGLFSQDPALSYIRSLPNLNNDQQRSLHKILGAKDYALILGMPGTGKTYTMVHAVKSLLIRGESILLTSYTNSAIDTLLMKLKTEGVDFIRIGRPEAVHPDVRAHCLSTTEAQSVDAIKARMEQVQVVGVTCLGMYHPLLAHKKFDTCIMDEAGQITLPVSLGPLMLATKFVLVGDHYQLPPLVQSSEARENGMGISLFWRLSEAHSQAISALRCQYRMSSGIMELSNSLIYGNRLCCGSLEIANAKLKFSGREPMQLKLKEILNPDRAVIFANTDQIPALEAKEHRTVNNPTEAHIISWIIKELLRRGVAQDAIGIITPYNAQVNIIQQYTDCLVEVHTIDKYQGRDKECIIVSFVRSTANSRASGSSLLGDWHRINVLLTRAKKKLIMVGSRGTLSTIPLLRLLVDKVAEIGGLLDLTNKDAHSFSRT

SEQ ID NO: 168912 - protein, 698 aa, Zea Mays
MPPKKRAAAAASSKKPQPSQPSQPAKFGILHFFERQTQASQNAKRQKPDPPAPPPPPPPPPEKEPSEVSPEVTKTLAPKRVRFSPGMLIKQSQDDGVAEVVTWKISPVNHRLGTTKSKQFLGMAPHPYSSEKNSSLDAMKKWHSSPLGLSRCTTLGSNSGVLGSAIVGCDGVGDTQSPFRTPPSLSYGCNEQQVSSGVTSEGGAEPSGAGQHKKALLDLLDQVEDAIMEEELPADPGNKGGQTTNEDITNNSRSPVADTDLTIPSKKTIHVPPFNSFLVLEVSEKHKADDSSCDRYPVKVLRLLNEHSGTECAVHLCDEWFDSIVGPGDTVNVIGEFSNHGKCIVDHDNNLVIVHPEQLISGTRAASSFQCLRRSVLDERLKSNEYSTSALTGTLLHQVFQAGLLNDAPSWQFLEQQAKEVLLKNIETLYACGVNESNMYSTLIEAIPKMLNWFKCFLKGSKCSDVDFGHNEVRKTVGVTEVMDIEEMAWAPRYGMKGVIDASVRSRVESHNGGSYDRIMPLEFKTGKATSGQAAMEHSAQVMLYTLLMTERYLNEDIDLGLLYYLHTDQTLGIKVKRTDLIGLIMRRNELATEILKASMSQSFPPMLQSPSTCNRCRHLISCTIYHKAHGGSGTTSGLGDLFDNLVNHLTVTHHNFLKHWDRLIDLEARASQILQEKAKDTYIILFSKRCSLKQLIS

SEQ ID NO: 168913 - protein, 653 aa, Zea Mays
MPPKKRAAAAASSKKPQPSQPSQPAKFGILHFFERQTQASQNAKRQKPDPPAPPPPPPPPPEKEPSEVSPEVTKTLAPKRVRFSPGMLIKQSQDDGVAEVVTWKISPVNHRLGTTKSKQFLGMAPHPYSSEKNSSLDAMKKWHSSPLGLSRCTTLGSNSGVLGSAIVGCDGVGDTQSPFRTPPSLSYGCNEQQVSSGVTSEGGAEPSGAGQHKKALLDLLDQVEDAIMEEELPADPGNKGGQTTNEDITNNSRSPVADTDLTIPSKKTIHVPPFNSFLVLEVSEKHKADDSSCDRYPVKVLRLLNEHSGTECAVHLCDEWFDSIVGPGDTVNVIGEFSNHGKCIVDHDNNLVIVHPEQLISGTRAASSFQCLRRSVLDERLKSNEYSTSALTGTLLHQVFQAGLLNDAPSWQFLEQQAKEVLLKNIETLYACGVNESNMYSTLIEAIPKMLNWFKCFLKGSKCSDVDFGHNEVRKTVGVTEVMDIEEMAWAPRYGMKGVIDASVRSRVESHNGGSYDRIMPLEFKTGKATSGQAAMEHSAQVMLYTLLMTERYLNEDIDLGLLYYLHTDQTLGIKVKRTDLIGLIMRRNELATEILKASMSQSFPPMLQSPSTCNRCRHLISCTIYHKILQEKAKDTYIILFSKRCSLKQLIS

SEQ ID NO: 168914 - protein, 964 aa, Zea Mays
MPPKKRAAAAASSKKPQPSQPSQPAKFGILHFFERQTQASQNAKRQKPDPPAPPPPPPPPPEKEPSEVSPEVTKTLAPKRVRFSPGMLIKQSQDDGVAEVVTWKISPVNHRLGTTKSKQFLGMAPHPYSSEKNSSLDAMKKWHSSPLGLSRCTTLGSNSGVLGSAIVGCDGVGDTQSPFRTPPSLSYGCNEVTFLFLEQQVSSGVTSEGGAEPSGAGQHKKALLDLLDQVEDAIMEEELPADPGNKGGQTTNEDITNNSRSPVADTDLTIPSKKTIHVPPFNSFLVLEVSEKHKADDSSCDRYPVKVLRLLNEHSGTECAVHLCDEWFDSIVGPGDTVNVIGEFSNHGKCIVDHDNNLVIVHPEQLISGTRAASSFQCLRRSVLDERLKSNEYSTSALTGTLLHQVFQAGLLNDAPSWQFLEQQAKEVLLKNIETLYACGVNESNMYSTLIEAIPKMLNWFKCFLKGSKCSDVDFGHNEVRKTVGVTEVMDIEEMAWAPRYGMKGVIDASVRSRVESHNGGSYDRIMPLEFKTGKATSGQAAMEHSAQVMLYTLLMTERYLNEDIDLGLLYYLHTDQTLGIKVKRTDLIGLIMRRNELATEILKASMSQSFPPMLQSPSTCNRCRHLISCTIYHKAHGGSGTTSGLGDLFDNLVNHLTVTHHNFLKHWDRLIDLEARASQVKKNILQPHNSNYGSGSSAVPYFVLDIKNGHSIDSSGKSKRYIYNFVQQKMQPETADQLDAQFDSIDFSLKVGDFVVLSTQSGRIAVANGCIREIISHSHITVSLPRRLRIPDSNSLSEQEDLTREIWRIDKDEFSSSFGIMRLNIVQLFAQNPQNSHLRKLIVDLEAPRFDSGGLFSQDPALSYIRSLPNLNNDQQRSLHKILGAKDYALILGMPGTGKTYTMVHAVKSLLIRGESILLTSYTNSAIDTLLMKLKTEGVDFIRIGRPEAVHPDVRAHCLSSQN

SEQ ID NO: 168915 - protein, 740 aa, Zea Mays
MPPKKRAAAAASSKKPQPSQPSQPAKFGILHFFERQTQASQNAKRQKPDPPAPPPPPPPPPEKEPSEVSPEVTKTLAPKRVRFSPGMLIKQSQDDGVAEVVTWKISPVNHRLGTTKSKQFLGMAPHPYSSEKNSSLDAMKKWHSSPLGLSRCTTLGSNSGVLGSAIVGCDGVGDTQSPFRTPPSLSYGCNEQQVSSGVTSEGGAEPSGAGQHKKALLDLLDQVEDAIMEEELPADPGNKGGQTTNEDITNNSRSPVADTDLTIPSKKTIHVPPFNSFLVLEVSEKHKADDSSCDRYPVKVLRLLNEHSGTECAVHLCDEWFDSIVGPGDTVNVIGEFSNHGKCIVDHDNNLVIVHPEQLISGTRAASSFQCLRRSVLDERLKSNEYSTSALTGTLLHQVFQAGLLNDAPSWQFLEQQAKEVLLKNIETLYACGVNESNMYSTLIEAIPKMLNWFKCFLKGSKCSDVDFGHNEVRKTVGVTEVMDIEEMAWAPRYGMKGVIDASVRSRVESHNGGSYDRIMPLEFKTGKATSGQAAMEHSAQVMLYTLLMTERYLNEDIDLGLLYYLHTDQTLGIKVKRTDLIGLIMRRNELATEILKASMSQSFPPMLQAHGGSGTTSGLGDLFDNLVNHLTVTHHNFLKHWDRLIDLEARASQVKKNILQPHNSNYGSGSSAVPYFVLDIKNGHSIDSSGKSKRYIYNFVQQKMQPETADQLDAQFDSIDFSLKVGDFVIAIPCQSKRI

SEQ ID NO: 168916 - protein, 861 aa, Zea Mays
MPPKKRAAAAASSKKPQPSQPSQPAKFGILHFFERQTQASQNAKRQKPDPPAPPPPPPPPPEKEPSEVSPEVTKTLAPKRVRFSPGMLIKQSQDDGVAEVVTWKISPVNHRLGTTKSKQFLGMAPHPYSSEKNSSLDAMKKWHSSPLGLSRCTTLGSNSGVLGSAIVGCDGVGDTQSPFRTPPSLSYGCNEQQVSSGVTSEGGAEPSGAGQHKKALLDLLDQVEDAIMEEELPADPGNKGGQTTNEDITNNSRSPVADTDLTIPSKKTIHVPPFNSFLVLEVSEKHKADDSSCDRYPVKVLRLLNEHSGTECAVHLCDEWFDSIVGPGDTVNVIGEFSNHGKCIVDHDNNLVIVHPEQLISGTRAASSFQCLRRSVLDERLKSNEYSTSALTGTLLHQVFQAGLLNDAPSWQFLEQQAKEVLLKNIETLYACGVNESNMYSTLIEAIPKMLNWFKCFLKGSKCSDVDFGHNEVRKTVGVTEVMDIEEMAWAPRYGMKGVIDASVRSRVESHNGGSYDRIMPLEFKTGKATSGQAAMEHSAQVMLYTLLMTERYLNEDIDLGLLYYLHTDQTLGIKVKRTDLIGLIMRRNELATEILKASMSQSFPPMLQSPSTCNRCRHLISCTIYHKAHGGSGTTSGLGDLFDNLVNHLTVTHHNFLKHWDRLIDLEARASQVKKNILQPHNSNYGSGSSAVPYFVLDIKNGHSIDSSGKSKRYIYNFVQQKMQPETADQLDAQFDSIDFSLKVGDFVVLSTQSGRIAVANGCIREIISHSHITVSLPRRLRIPDSNSLSEQEDLTREIWRIDKDEFSSSFGIMRLNIVQLFAQNPQNSHLRKLIVDLEAPRFDSGGLFSQDPALSYIRF

SEQ ID NO: 168917 - protein, 860 aa, Zea Mays
MPPKKRAAAAASSKKPQPSQPSQPAKFGILHFFERQTQASQNAKRQKPDPPAPPPPPPPPPEKEPSEVSPEVTKTLAPKRVRFSPGMLIKQSQDDGVAEVVTWKISPVNHRLGTTKSKQFLGMAPHPYSSEKNSSLDAMKKWHSSPLGLSRCTTLGSNSGVLGSAIVGCDGVGDTQSPFRTPPSLSYGCNEQVSSGVTSEGGAEPSGAGQHKKALLDLLDQVEDAIMEEELPADPGNKGGQTTNEDITNNSRSPVADTDLTIPSKKTIHVPPFNSFLVLEVSEKHKADDSSCDRYPVKVLRLLNEHSGTECAVHLCDEWFDSIVGPGDTVNVIGEFSNHGKCIVDHDNNLVIVHPEQLISGTRAASSFQCLRRSVLDERLKSNEYSTSALTGTLLHQVFQAGLLNDAPSWQFLEQQAKEVLLKNIETLYACGVNESNMYSTLIEAIPKMLNWFKCFLKGSKCSDVDFGHNEVRKTVGVTEVMDIEEMAWAPRYGMKGVIDASVRSRVESHNGGSYDRIMPLEFKTGKATSGQAAMEHSAQVMLYTLLMTERYLNEDIDLGLLYYLHTDQTLGIKVKRTDLIGLIMRRNELATEILKASMSQSFPPMLQSPSTCNRCRHLISCTIYHKAHGGSGTTSGLGDLFDNLVNHLTVTHHNFLKHWDRLIDLEARASQVKKNILQPHNSNYGSGSSAVPYFVLDIKNGHSIDSSGKSKRYIYNFVQQKMQPETADQLDAQFDSIDFSLKVGDFVVLSTQSGRIAVANGCIREIISHSHITVSLPRRLRIPDSNSLSEQEDLTREIWRIDKDEFSSSFGIMRLNIVQLFAQNPQNSHLRKLIVDLEAPRFDSGGLFSQDPALSYIRF

SEQ ID NO: 168918 - protein, 983 aa, Zea Mays
MPPKKRAAAAASSKKPQPSQPSQPAKFGILHFFERQTQASQNAKRQKPDPPAPPPPPPPPPEKEPSEVSPEVTKTLAPKRVRFSPGMLIKQSQDDGVAEVVTWKISPVNHRLGTTKSKQFLGMAPHPYSSEKNSSLDAMKKWHSSPLGLSRCTTLGSNSGVLGSAIVGCDGVGDTQSPFRTPPSLSYGCNEQQVSSGVTSEGGAEPSGAGQHKKALLDLLDQVEDAIMEEELPADPGNKGGQTTNEDITNNSRSPVADTDLTIPSKKTIHVPPFNSFLVLEVSEKHKADDSSCDRYPVKVLRLLNEHSGTECAVHLCDEWFDSIVGPGDTVNVIGEFSNHGKCIVDHDNNLVIVHPEQLISGTRAASSFQCLRRSVLDERLKSNEYSTSALTGTLLHQVFQAGLLNDAPSWQFLEQQAKEVLLKNIETLYACGVNESNMYSTLIEAIPKMLNWFKCFLKGSKCSDVDFGHNEVRKTVGVTEVMDIEEMAWAPRYGMKGVIDASVRSRVESHNGGSYDRIMPLEFKTGKATSGQAAMEHSAQVMLYTLLMTERYLNEDIDLGLLYYLHTDQTLGIKVKRTDLIGLIMRRNELATEILKASMSQSFPPMLQSPSTCNRCRHLISCTIYHKAHGGSGTTSGLGDLFDNLVNHLTVTHHNFLKHWDRLIDLEARASQVKKNILQPHNSNYGSGSSAVPYFVLDIKNGHSIDSSGKSKRYIYNFVQQKMQPETADQLDAQFDSIDFSLKVGDFVVLSTQSGRIAVANGCIREIISHSHITVSLPRRLRIPDSNSLSEQEDLTREIWRIDKDEFSSSFGIMRLNIVQLFAQNPQNSHLRKLIVDLEAPRFDSGGLFSQDPALSYIRSLPNLNNDQQRSLHKILGAKDYALILGMPGTGKTYTMVHAVKSLLIRGESILLTSYTNSAIDTLLMKLKTEILFGLEGLRLYILMSGPTACQQLRHNRLMPLKQGWSKYRLLELLAWECIILY

SEQ ID NO: 168919 - protein, 792 aa, Zea Mays
MPPKKRAAAAASSKKPQPSQPSQPAKFGILHFFERQTQASQNAKRQKPDPPAPPPPPPPPPEKEPSEVSPEVTKTLAPKRVRFSPGMLIKQSQDDGVAEVVTWKISPVNHRLGTTKSKQFLGMAPHPYSSEKNSSLDAMKKWHSSPLGLSRCTTLGSNSGVLGSAIVGCDGVGDTQSPFRTPPSLSYGCNEVTFLFLEQQVSSGVTSEGGAEPSGAGQHKKALLDLLDQVEDAIMEEELPADPGNKGGQTTNEDITNNSRSPVADTDLTIPSKKTIHVPPFNSFLVLEVSEKHKADDSSCDRYPVKVLRLLNEHSGTECAVHLCDEWFDSIVGPGDTVNVIGEFSNHGKCIVDHDNNLVIVHPEQLISGTRAASSFQCLRRSVLDERLKSNEYSTSALTGTLLHQVFQAGLLNDAPSWQFLEQQAKEVLLKNIETLYACGVNESNMYSTLIEAIPKMLNWFKCFLKGSKCSDVDFGHNEVRKTVGVTEVMDIEEMAWAPRYGMKGVIDASVRSRVESHNGGSYDRIMPLEFKTGKATSGQAAMEHSAQVMLYTLLMTERYLNEDIDLGLLYYLHTDQTLGIKVKRTDLIGLIMRRNELATEILKASMSQSFPPMLQSPSTCNRCRHLISCTIYHKAHGGSGTTSGLGDLFDNLVNHLTVTHHNFLKHWDRLIDLEARASQVKKNILQPHNSNYGSGSSAVPYFVLDIKNGHSIDSSGKSKRYIYNFVQQKMQPETADQLDAQFDSIDFSLKVGDFVVLSTQSGRIAVANGCIREIISHSHITIAIPCQSKRI

SEQ ID NO: 168920 - protein, 1273 aa, Zea Mays
MPPKKRAAAAASSKKPQPSQPSQPAKFGILHFFERQTQASQNAKRQKPDPPAPPPPPPPPPEKEPSEVSPEVTKTLAPKRVRFSPGMLIKQSQDDGVAEVVTWKISPVNHRLGTTKSKQFLGMAPHPYSSEKNSSLDAMKKWHSSPLGLSRCTTLGSNSGVLGSAIVGCDGVGDTQSPFRTPPSLSYGCNEQQVSSGVTSEGGAEPSGAGQHKKALLDLLDQVEDAIMEEELPADPGNKGGQTTNEDITNNSRSPVADTDLTIPSKKTIHVPPFNSFLVLEVSEKHKADDSSCDRYPVKVLRLLNEHSGTECAVHLCDECIVGPGDTVNVIGEFSNHGKCIVDHDNNLVIVHPEQLISGTRAASSFQCLRRSVLDERLKSNEYSTSALTGTLLHQVFQAGLLNDAPSWQFLEQQAKEVLLKNIETLYACGVNESNMYSTLIEAIPKMLNWFKCFLKGSKCSDVDFGHNEVRKTVGVTEVMDIEEMAWAPRYGMKGVIDASVRSRVESHNGGSYDRIMPLEFKTGKATSGQAAMEHSAQVMLYTLLMTERYLNEDIDLGLLYYLHTDQTLGIKVKRTDLIGLIMRRNELATEILKASMSQSFPPMLQSPSTCNRCRHLISCTIYHKAHGGSGTTSGLGDLFDNLVNHLTVTHHNFLKHWDRLIDLEARASQVKKNILQPHNSNYGSGSSAVPYFVLDIKNGHSIDSSGKSKRYIYNFVQQKMQPETADQLDAQFDSIDFSLKVGDFVVLSTQSGRIAVANGCIREIISHSHITVSLPRRLRIPDSNSLSEQEDLTREIWRIDKDEFSSSFGIMRLNIVQLFAQNPQNSHLRKLIVDLEAPRFDSGGLFSQDPALSYIRSLPNLNNDQQRSLHKILGAKDYALILGMPGTGKTYTMVHAVKSLLIRGESILLTSYTNSAIDTLLMKLKTEGVDFIRIGRPEAVHPDVRAHCLSTTEAQSVDAIKARMEQVQVVGVTCLGMYHPLLAHKKFDTCIMDEAGQITLPVSLGPLMLATKFVLVGDHYQLPPLVQSSEARENGMGISLFWRLSEAHSQAISALRCQYRMSSGIMELSNSLIYGNRLCCGSLEIANAKLKFSGREPMQLKLKEILNPDRAVIFANTDQIPALEAKEHRTVNNPTEAHIISWIIKELLRRGVAQDAIGIITPYNAQVNIIQQYTDCLVEVHTIDKYQGRDKECIIVSFVRSTANSRASGSSLLGDWHRINVLLTRAKKKLIMVGSRGTLSTIPLLRLLVDKVAEIGGLLDLTNKDAHSFSRT

SEQ ID NO: 168921 - protein, 330 aa, Zea Mays
MVFDMSDESTLLTLQSWAASVDIQRFEILLCVGNKADLVPGHSVHVEYRRRMQNLGESSSDPHPDYFNFGINESEGCSLLSEEEPCIKIRNSTAQWCIEQNIEYIEACASNADFDKCLSVDGDSQGLERLLGALSAHMWPGMILKSGNRITVPSLVEKQESTDDESNYDFEYEVLSHGSDDQWEFIGETSTSRRFERPNEPDGAQDHTHQVVNAGTDSSASNSPPTNTPTETAEENTVTQSNKTDNSDHVDKTTAYSTEDHQSDLREANHLFEDEHYGLDDLEKIMSEIGNMRSNLRLMPDFQRREMAAKLAMKMAAMFGDDDEEAFDDI

SEQ ID NO: 168922 - protein, 232 aa, Zea Mays
MNPPCLLCKAGLPVLISRGLSVDGDSQGLERLLGALSAHMWPGMILKSGNRITVPSLVEKQESTDDESNYDFEYEVLSHGSDDQWEFIGETSTSRRFERPNEPDGAQDHTHQVVNAGTDSSASNSPPTNTPTETAEENTVTQSNKTDNSDHVDKTTAYSTEDHQSDLREANHLFEDEHYGLDDLEKIMSEIGNMRSNLRLMPDFQRREMAAKLAMKMAAMFGDDDEEAFDDI

SEQ ID NO: 168923 - protein, 738 aa, Zea Mays
MGNACSGALRSKYLHSFKHAASQRHDSEYSASADDSPRKPTPPATTDAHAPAPPAAAMRRGAAGATPDLGSVLGHPTPNLRDLYALGRKLGQGQFGTTYLCTELATGIDYACKSISKRKLITKEDVDDVRREIQIMHHLSGHKNVVAIKGAYEDQVYVHIVMELCAGGELFDRIIQRGHYSERKAAALTRIIVGVVEACHSLGVMHRDLKPENFLLANRDDDLSLKAIDFGLSVFFKPGQVFTDVVGSPYYVAPEVLLKSYGPAADVWTAGVILYILLSGVPPFWAETQQGIFDAVLKGAIDFDSDPWPVISDSAKDLIRRMLNPRSAERLTAHEVLCHPWIRDHGVAPDRPLDPAVLSRIKQFSAMNKLKKMALRVIAESLSEEEIAGLKEMFQIMDTDNSGAITYDELKEGLRKYGSTLKDTEIRDLMEAADIDNSGTIDYIEFIAATLHLNKLEREEHLVAAFSYFDKDGSGYITVDELQQACKEHNMPDAFLDDVINEADQDNDGRIDYGEFVAMMTKGNMGVGRRTMRNSLNISMRDAPEFLGAEIPDVHDLSSGVLCQGWTIETKYYSADLSIWTANLGEEFSLDSLPHLDRVAALVMVFDMSDESTLLTLQSWAASVDIQSEGCSLLSEEEPCIKIRNSTAQWCIEQNIEYIEACASNADFDKCLSVDGDSQGLERLLGALSAHMWPGMILKSGNRITVPSLVEKQGGNFVDHGAIEQNGDIVEPKTKKKR

SEQ ID NO: 168924 - protein, 553 aa, Zea Mays
MGNACSGALRSKYLHSFKHAASQRHDSEYSASADDSPRKPTPPATTDAHAPAPPAAAMRRGAAGATPDLGSVLGHPTPNLRDLYALGRKLGQGQFGTTYLCTELATGIDYACKSISKRKLITKEDVDDVRREIQIMHHLSGHKNVVAIKGAYEDQVYVHIVMELCAGGELFDRIIQRGHYSERKAAALTRIIVGVVEACHSLGVMHRDLKPENFLLANRDDDLSLKAIDFGLSVFFKPGQVFTDVVGSPYYVAPEVLLKSYGPAADVWTAGVILYILLSGVPPFWAETQQGIFDAVLKGAIDFDSDPWPVISDSAKDLIRRMLNPRSAERLTAHEVLCHPWIRDHGVAPDRPLDPAVLSRIKQFSAMNKLKKMALRVIAESLSEEEIAGLKEMFQIMDTDNSGAITYDELKEGLRKYGSTLKDTEIRDLMEAADIDNSGTIDYIEFIAATLHLNKLEREEHLVAAFSYFDKDGSGYITVDELQQACKEHNMPDAFLDDVINEADQDNDGRIDYGEFVAMMTKGNMGVGRRTMRNSLNISMRDAPESSDFPASA

SEQ ID NO: 168925 - protein, 529 aa, Zea Mays
MGNACSGALRSKYLHSFKHAASQRHDSEYSASADDSPRKPTPPATTDAHAPAPPAAAMRRGAAGATPDLGSVLGHPTPNLRDLYALGRKLGQGQFGTTYLCTELATGIDYACKSISKRKLITKEDVDDVRREIQIMHHLSGHKNVVAIKGAYEDQVYVHIVMELCAGGELFDRIIQRGHYSERKAAALTRIIVGVVEACHSLGVMHRDLKPENFLLANRDDDLSLKAIDFGLSVFFKPGQVFTDVVGSPYYVAPEVLLKSYGPAADVWTAGVILYILLSGVPPFWAETQQGIFDAVLKGAIDFDSDPWPVISDSAKDLIRRMLNPRSAERLTAHEVLCHPWIRDHGVAPDRPLDPAVLSRIKQFSAMNKLKKMALRVIAESLSEEEIAGLKEMFQIMDTDNSGAITYDELKEGLRKYGSTLKDTEIRDLMEAADIDNSGTIDYIEFIAATLHLNKLEREEHLVAAFSYFDKDGSGYITVDELQQACKEHNMPDAFLDDVINEADQDNVRAAGQGSNTSGTKKNAPLWWP

SEQ ID NO: 168926 - protein, 964 aa, Zea Mays
MAPPPPSLLRELLTADGFKNRRKPLDSSAPPTSRAASMPLQHRRPGKPPSRSQSDVLTRSRLRQANADADDGSRDAAGAERRRAATATRGLSASLTSVRKVHSNKGEGDSGSGAGARRGASASDPSAVPALDESALTALISLAAGPLKRFALDEAFRASLRAGCASCLGDSSHRAVLDLRVQSQTVERAAREGLDPRELKRASLRLHEVASLQGKDADAVTAAGVPHTRLAACAHLYMSAVSKLQKRDHSAAVHALEAFCLAPREARTVLLPALWDRLFRPGLSHLRTWRDRESASASADERVEEVEKVFLGVLDDGTRALACYYRDWLLGRTDAMALPDVPAPPSTVHPSTPRCSASTSYDISSEVMFGSGSSSLAKFAYDDIMRASEEIEEEEEAVYPEAAAEAVTVLHQDQERDGAGGEERSYTPTPLAEENEPVPNNVDRETFDPHVEQEPNKQSDARASHPPISDNSAIDLLTLEFCEAPLQSDTNGNELSIFSTVPSDFLCPLTRQIFSNPVTIETGQTFERHAIVQWLDRGFRTCPVTGQDLSSSTVPDTNRVLKRLVDSWRSEHFKHLTSGGAGLDVKLTVSAIDKALGSARDVSEKFDRARHLMAIGGIDFLLCKFQEGGGDEQPRVAEHLLSCIRAEGSCRDYVAIKMDGSSILRLLQSKVLSTRRTAVDLLMELVCLRRREMVELLLHGSRAESIVEAMDVLLEYLRSLPAEEQAPIAALLMRLDALVEPNRNNTYREEAIKAITRSLRCCLSEDTVVPSTRRALLLLGGQFTFSGDLHAEDWMLEHAGFVDPSRATTATSDAVVHDKKAAENDAWLRHVAAALLGSRSGIRRPFLEALSRCLGSPNAGLVGACLTTAAWLSRSLASLDEDGATDTSLAAFSALVPRLKQCLAPGRPVRHRVLAAVSLHNFSRIPDCRELLMLLADGMRDHLAELAQLTWTAGQLSAELHSND

SEQ ID NO: 168927 - protein, 92 aa, Zea Mays
MYMYREDCENSVQMLSSRLCLCEEVRQLKLKGHVAKSNDITLHLGPSPRHINTNMFSEPMLRQTTSYADSTSQTREELAHKLKHQNPQVPSQ

SEQ ID NO: 168928 - protein, 53 aa, Zea Mays
MDGVDRNLQQRARSRFKEMRGRNSSLPSRFCTVQEVHSSEQGAAAGGTWRGGR

SEQ ID NO: 168929 - protein, 233 aa, Zea Mays
MCSEALPAEGSGSPASSVHMEDKCLTPNTSVGESSVQVALSTDSNDAACEIPEAEGPVLRLFGKRVVVSNLDQQPSSNTGSLQHAADMELDDASAETPTSGTGKLSSHAAEEAETWCPWLVGSTQQFLYYLPRGEVFSMHPGCQFLNYGNGSISYTALDAQTVTSNKQRSRPWTESIETSSSVPVPGSRKCAGAIPACRRGFVPYKKCTARSKVLQPVAPGEEADRELTRLCL

SEQ ID NO: 168930 - protein, 533 aa, Zea Mays
MAKCYSDWPPIPPFHPSRRTPPQSHASPITIRRQLASFVLHCSRSCAPLLEPKNLPDEFEAVPATPPPPLPDAAPKLGISNKFIRGLCGDPQTEQLAFEGYRRALLQPEFRLEKKTANALTLQLIREKQWGSLELLVEDFRAHGVLPEKRTCARLVACCIRAGRFGLADAVLGVVEAKKGAPAAMAFSAAMQAYNRLHMYRRTVLLYGQARVARLPLNADAYRAAMAACGALGEPDMVASLFKLYRSHKWYPSDSCVETYGVVCDALGKAGRALDALRSLREMEADGLSPDAAIYSSVIGALADAREKAAAEDLYHEAWDRKMLGDPDMFLKLTIMHAEAGLVESTIEVAKDMRQIGLRVTDCILSTIVNGFVKRRGLKPAIRAYDKLVLIGCEPGQVTYASVINVYCRLGRSDRAEAIFSEMIERGFDSRRGASPTCWCTTPCSTCTAGWGTRSRPRRSGRRWCGARSGPTGSATRPSSWRTTGRGSWTAAWSSTRSSGRPEGRWTWSWLASWLGCSPRPAASTSSSSCSRK

SEQ ID NO: 168931 - protein, 82 aa, Zea Mays
MRERCISTQHCSYYYRNSSVSTEAGPLRLFPNKSSIRRTKKLRPVAMPSPLAHPLLYRLPEGHKELLESIPLKAQTNQTYYT

SEQ ID NO: 168932 - protein, 108 aa, Zea Mays
MIVNRSRANWRASVTKIPIRIEDIEKVPSASEEIKTMLRSNQNVSFDSDVPYCYLSRLESSYGELIIGCNLKNMRKDEWLSAQQEILLGAARIIKSHGIELGSTMQCC

SEQ ID NO: 168933 - protein, 288 aa, Zea Mays
MSGITAIWRRSCPLAASQILMETYFGPSVSSGVLRWFSSGTKHSRKPEFSVANHIRVVDLHSASAVNYVSTIRRLPLSCRMDTNWLITSKSRHGALPGFLGVSSFYRGYSSDTGIKPEASQSGVSNLPSTESSEVGTAGAGGGSWIEILDNARKSTIDATTDAGKKVKELTDAVAPHVQQLFDTYPNLEKVVVPLGGTIFGTMMAWLVMPIILRRLHKYASQSPISALLGNSTKNDVLYQTSLWCALEDPAKYLITFMAFSEMHGEVHLFCLLYGSFRGGKPTSLLKL

SEQ ID NO: 168934 - protein, 160 aa, Zea Mays
MIEYYDISGCYILRPWAMEIWELMKEFFDAEIKKLKLKPYYFPLFVTENVLQKEKDHIEGFAPEVAWVTKSGKSDLEAPIAIRPTSETVMYPYFSKWIRSHRDLPLRCNQWCNVVRWEFSNPTPFIRSREFLWQEGHTAFANKEEADEEVEVELHIFAQF

SEQ ID NO: 168935 - protein, 376 aa, Zea Mays
MAAGLSGAAMTSFVAKNPLLAAAARRRALPPLAGRALPFSPLTTARAPRRRGLGTVTCFVPQDTEHPAAAAPAPVAPVPETALDEEARAAAARRVAERKARKRSERRTYLVAAVMSSLGVTSMAVAAVYYRFSWQMEGGAVPVSEMFGTFALSVGAAVGMEFWARWAHRALWHASLWHMHESHHRPREGPFELNDVFAIVNAVPAISLLAYGFFHRGLVPGLCFGAGLGITLFGMAYMFVHDGLVHRRFPVGPIANVPYFRRVAAAHKVRTDDGDERPASDPSLTTSSSFSKLLYTTWTSLRASRMGCSWDQRSWRRSVAWTSWKRSSRESAGPSDGFVRIPARRSPLRSVIPAQPHGWGADDQNLQKGFGLDARA

SEQ ID NO: 168936 - protein, 203 aa, Zea Mays
MNARNIAMVFAPNMTQMADPLTALIHAVQVMNFLKTLILKTLKERNKKDEALEALQPCSSSPNDQDEHQVSEHLEKPSVLPNQKGFGFHMNDSATPVQVLGAEKTLHHHSQIRSHEPKKFGTDMDHKKRQSDASSLLGSDSSNRFNSSGREFGSRNGASDRFSFRKGVERLCRHPVFQLNRSMKKSTDAVVFDAPRETRQAWV

SEQ ID NO: 168937 - protein, 317 aa, Zea Mays
MMQRKLYDRGGLKVEGIFRINAENSQEVYVRDQLNSGVVPNEVDLHCLAGLIKAWFRELPSGVLDALTPEQVMHCNTEGGCALLASMLPPVEAALLDWAINLMADVVEQENYNKMNARNIAMVFAPNMTQMADPLTALIHAVQVMNFLKTLILKTLKERNKKDEALEALQPCSSSPNDQDEHQVSEHLEKPSVLPNQKGFGFHMNDSATPVQVLGAEKTLHHHSQIRSHEPKKFGTDMDHKKRQSDASSLLGSDSSNRFNSSGREFGSRNGASDRFSFRKGVERLCRHPVFQLNRSMKKSTDAVVFDAPRETRQAWV

SEQ ID NO: 168938 - protein, 481 aa, Zea Mays
MAPFQMRFGLQISPARSDDDEEEDDDDDNEEEYDEMASEGTASPPMMLRPGRGGGGLVSAVVGALRRSLVMCSAGAVDIDDDDDEEEGGIEIGRPTDVHHVSHVTFDRFGGFLGLPADLEPEVPRRTPSARSNSTCSVSVFGVSPTSLQCSYDPRGNSVPTILLMMQRKLYDRGGLKVEGIFRINAENSQEVYVRDQLNSGVVPNEVDLHCLAGLIKAWFRELPSGVLDALTPEQVMHCNTEGGCALLASMLPPVEAALLDWAINLMADVVEQENYNKMNARNIAMVFAPNMTQMADPLTALIHAVQVMNFLKTLILKTLKERNKKDEALEALQPCSSSPNDQDEHQVSEHLEKPSVLPNQKGFGFHMNDSATPVQVLGAEKTLHHHSQIRSHEPKKFGTDMDHKKRQSDASSLLGSDSSNRFNSSGREFGSRNGASDRFSFRKGVERLCRHPVFQLNRSMKKSTDAVVFDAPRETRQAWV

SEQ ID NO: 168939 - protein, 305 aa, Zea Mays
MFYGGYAYHGNSFEQTYRCYPASFFDKPHLEGGDKVIMPPSALDRLASLHIEYPMLFELHNDATQRISHCGVLEFVAEEGMIIMPYWMMQNMLLQEGDTVHVKNATLPKGTYVKLQPHTTDFLDISNPKAIIMVAYNNKQYYIDIVETKPASAVSIIETDCEVDFAPPLDYKEPEKPRQPTVPASKAPAEDGNTAVEDEPKFKPFTGFGKRLDGKASKLQASEVPSTALSAPSDSNKRANQQISAPAASGASNYSRQKTGKLVFGSSASNNKEPQKAPAKEEQPAKKDDELRFQAFSGKSYSLKR

SEQ ID NO: 168940 - protein, 439 aa, Zea Mays
MSLLSAAKSFYFPVSMYVVRAKAGKRQSGKDATGKVAHSAGSSLRRYNEAALKKEVQELIVSWKSYFETCVCAFIYAPSRNRQMLFDGEKTQSVIQSCDVRPVPLTVHRPTMKEAKRVYCNLTQLYYEMECSTTDETLPDAGSVKNVEQGQGKKNEVTADPGESISDLSARLELLNKNEAATIPSSKNETTPLHEAAKCGNAQLTLELLEQGLDPCVKDARGKTSYSLASDKEVRNTFRRFMALNLDKWDWHAADVPSALTKEMEESQAAKQADKDAKRKARAKELKKLKKEREKEEKEKEKEKAKAQASQSQSDVKGTSSGQMANRTATAPGLVPKHQTPQQILIAKEEERQRKQAEEREKRAAAAERRLAALAVQSAGTSASGAAATNCSAKRAAPDDNSCSCCFGSLVGKVPFHRYNYKYCSTTCMHLHSEMLQDD

SEQ ID NO: 168941 - protein, 518 aa, Zea Mays
MAPLPLPLPPPSEKRPPRSLFELPSDFFDSSVLLRAHPSTAPSAVEPSEPSRPPPTQQQHQQLSEAAGSRWTCNTCASEFESLQEQREHFKSDLHRLNVKLSMAGKTIIKEEDLDKADSDSLFDDLEISSVSGSEDEQENGPASERVLSVKGKEEFRKKLYFRCASGEMISIYRCMLLKEHEEPLIDCKSGQMENASCVQEEEMINRVKCLACEPRDTSHLRIVLLTSGGHFAGCVFDGNSIIAHKTFHRYVVRAKAGKRQSGKDATGKVAHSAGSSLRRYNEAALKKEVQELIVSWKSYFETCVCAFIYAPSRNRQMLFDGEKTQSVIQSCDVRPVPLTVHRPTMKEAKRVYCNLTQLYYEMECSTTDETLPDAGSVKNVEQGQGKKNEVTADPGESISDLSARLELLNKNEAATIPSSKNETTPLHEAAKCGNAQLTLELLEQGLDPCVKDARGKTSYSLASDKEVRNTFRRFMALNLDKWDWHAADVPSALTKEMEESQAAKQTRTPKGKHVQRN

SEQ ID NO: 168942 - protein, 644 aa, Zea Mays
MAPLPLPLPPPSEKRPPRSLFELPSDFFDSSVLLRAHPSTAPSAVEPSEPSRPPPTQQQHQQLSEAAGSRWTCNTCASEFESLQEQREHFKSDLHRLNVKLSMAGKTIIKEEDLDKADSDSLFDDLEISSVSGSEDEQENGPASERVLSVKGKEEFRKKLYFRCASGEMISIYRCMLLKEHEEPLIDCKSGQMENASCVQEEEMINRVKCLACEPRDTSHLRIVLLTSGGHFAGCVFDGNSIIAHKTFHRYVVRAKAGKRQSGKDATGKVAHSAGSSLRRYNEAALKKMLFDGEKTQSVIQSCDVRPVPLTVHRPTMKEAKRVYCNLTQLYYEMECSTTDETLPDAGSVKNVEQGQGKKNEVTADPGESISDLSARLELLNKNEAATIPSSKNETTPLHEAAKCGNAQLTLELLEQGLDPCVKDARGKTSYSLASDKEVRNTFRRFMALNLDKWDWHAADVPSALTKEMEESQAAKQADKDAKRKARAKELKKLKKEREKEEKEKEKEKAKAQASQSQSDVKGTSSGQMANRTATAPGLVPKHQTPQQILIAKEEERQRKQAEEREKRAAAAERRLAALAVQSAGTSASGAAATNCSAKRAAPDDNSCSCCFGSLVGKVPFHRYNYKYCSTTCMHLHSEMLQDD

SEQ ID NO: 168943 - protein, 509 aa, Zea Mays
MIWRYLVSLVQRTNKKMDLHQNVYSRLKMENASCVQEEEMINRVKCLACEPRDTSHLRIVLLTSGGHFAGCVFDGNSIIAHKTFHRYVVRAKAGKRQSGKDATGKVAHSAGSSLRRYNEAALKKEVQELIVSWKSYFETCVCAFIYAPSRNRQMLFDGEKTQSVIQSCDVRPVPLTVHRPTMKEAKRVYCNLTQLYYEMECSTTDETLPDAGSVKNVEQGQGKKNEVTADPGESISDLSARLELLNKNEAATIPSSKNETTPLHEAAKCGNAQLTLELLEQGLDPCVKDARGKTSYSLASDKEVRNTFRRFMALNLDKWDWHAADVPSALTKEMEESQAAKQADKDAKRKARAKELKKLKKEREKEEKEKEKEKAKAQASQSQSDVKGTSSGQMANRTATAPGLVPKHQTPQQILIAKEEERQRKQAEEREKRAAAAERRLAALAVQSAGTSASGAAATNCSAKRAAPDDNSCSCCFGSLVGKVPFHRYNYKYCSTTCMHLHSEMLQDD

SEQ ID NO: 168944 - protein, 438 aa, Zea Mays
MLVAICSYLAIHFFRYVVRAKAGKRQSGKDATGKVAHSAGSSLRRYNEAALKKEVQELIVSWKSYFETCVCAFIYAPSRNRQMLFDGEKTQSVIQSCDVRPVPLTVHRPTMKEAKRVYCNLTQLYYEMECSTTDETLPDAGSVKNVEQGQGKKNEVTADPGESISDLSARLELLNKNEAATIPSSKNETTPLHEAAKCGNAQLTLELLEQGLDPCVKDARGKTSYSLASDKEVRNTFRRFMALNLDKWDWHAADVPSALTKEMEESQAAKQADKDAKRKARAKELKKLKKEREKEEKEKEKEKAKAQASQSQSDVKGTSSGQMANRTATAPGLVPKHQTPQQILIAKEEERQRKQAEEREKRAAAAERRLAALAVQSAGTSASGAAATNCSAKRAAPDDNSCSCCFGSLVGKVPFHRYNYKYCSTTCMHLHSEMLQDD

SEQ ID NO: 168945 - protein, 395 aa, Zea Mays
MLLEKLHTQQEVQELIVSWKSYFETCVCAFIYAPSRNRQMLFDGEKTQSVIQSCDVRPVPLTVHRPTMKEAKRVYCNLTQLYYEMECSTTDETLPDAGSVKNVEQGQGKKNEVTADPGESISDLSARLELLNKNEAATIPSSKNETTPLHEAAKCGNAQLTLELLEQGLDPCVKDARGKTSYSLASDKEVRNTFRRFMALNLDKWDWHAADVPSALTKEMEESQAAKQADKDAKRKARAKELKKLKKEREKEEKEKEKEKAKAQASQSQSDVKGTSSGQMANRTATAPGLVPKHQTPQQILIAKEEERQRKQAEEREKRAAAAERRLAALAVQSAGTSASGAAATNCSAKRAAPDDNSCSCCFGSLVGKVPFHRYNYKYCSTTCMHLHSEMLQDD

SEQ ID NO: 168946 - protein, 501 aa, Zea Mays
MIWRYLVSLVQRTNKKMDLHQNVYSRLKEEEMINRVKCLACEPRDTSHLRIVLLTSGGHFAGCVFDGNSIIAHKTFHRYVVRAKAGKRQSGKDATGKVAHSAGSSLRRYNEAALKKEVQELIVSWKSYFETCVCAFIYAPSRNRQMLFDGEKTQSVIQSCDVRPVPLTVHRPTMKEAKRVYCNLTQLYYEMECSTTDETLPDAGSVKNVEQGQGKKNEVTADPGESISDLSARLELLNKNEAATIPSSKNETTPLHEAAKCGNAQLTLELLEQGLDPCVKDARGKTSYSLASDKEVRNTFRRFMALNLDKWDWHAADVPSALTKEMEESQAAKQADKDAKRKARAKELKKLKKEREKEEKEKEKEKAKAQASQSQSDVKGTSSGQMANRTATAPGLVPKHQTPQQILIAKEEERQRKQAEEREKRAAAAERRLAALAVQSAGTSASGAAATNCSAKRAAPDDNSCSCCFGSLVGKVPFHRYNYKYCSTTCMHLHSEMLQDD

SEQ ID NO: 168947 - protein, 218 aa, Zea Mays
MVDMKCEGCVTAVKNKLQTLEGIKNIEVDLSNQVVRVLGSLPVKTMLDALHQTGRDARLIGQGNPNDFLVSAAVAEFKGPVVFGVVRLAQVNMELARVEATFSGLSPGKHGWSINQFGDLTRGAESTGNVYNPPDHLSDKPLGDLGTLEAGENGEAHFSGPKEKLRVVDLIGRSIALYATEDRSDPGIAAAVIARSAGVGENYKKLCTCDGVTIWESS

SEQ ID NO: 168948 - protein, 295 aa, Zea Mays
MVGFLRAFAAASAVPAAAAAAYALFSSSAPSSSKLRFPLPDSFLSAAASSTSGRAPNAVPPMATAAATADLSAADDKQRDSALPELTTEFMVDMKCEGCVTAVKNKLQTLEGIKNIEVDLSNQVVRVLGSLPVKTMLDALHQTDFLVSAAVAEFKGPVVFGVVRLAQVNMELARVEATFSGLSPGKHGWSINQFGDLTRGAESTGNVYNPPDHLSDKPLGDLGTLEAGENGEAHFSGPKEKLRVVDLIGRSIALYATEDRSDPGIAAAVIARSAGVGENYKKLCTCDGVTIWESS

SEQ ID NO: 168949 - protein, 56 aa, Zea Mays
MTSDYLLTRARISGRRYGYPTAADGLQLEDVTEIPSYWPCLAQLLLVEKAAYLISW

SEQ ID NO: 168950 - protein, 259 aa, Zea Mays
MFADKKNTSSDSSKPAFQFGGNNVIFGGKKDAPVDSSKPFQFGPNNGIFGDKKDTPSDSSKPFHFGANKGIFGDKKTTSVAQSFNPQSPPLFSMNQQSVLPGNQNTSEASADADEDAEPEKPSSPSVKKAEEKGVVVVHETKCKVYVKHDDATKGWKDIGVGQLSIRSKEGTEKASKESTPTIVIRNDVGKILLNALIYKGIKMNLQKNTVASIFHTSDAQSSESAGDTVVARTYLFRLKNVEEATKLSTAIKENAPSD

SEQ ID NO: 168951 - protein, 289 aa, Zea Mays
MASSSSSFQNSSLPNLFSSPSQQKTPDYSGMFADKKNTSSDSSKPAFQFGGNNVIFGGKKDAPVDSSKPFQFGPNNGIFGDKKDTPSDSSKPFHFGANKGIFGDKKTTSVAQSFNPQSPPLFSMNQQSVLPGNQNTSEASADADEDAEPEKPSSPSVKKAEEKGVVVVHETKCKVYVKHDDATKGWKDIGVGQLSIRSKEGTEKASKESTPTIVIRNDVGKILLNALIYKGIKMNLQKNTVASIFHTSDAQSSESAGDTVVARTYLFRLKNVEEATKLSTAIKENAPSD

SEQ ID NO: 168952 - protein, 445 aa, Zea Mays
MDGPSFDVHRAESSHQHVMAGPASLDPRRAEAASKHVRALNTQFASWVQLQLQNHPAELWEDGLKDYISHASEIMEKFKDVVNWLRQNQAGSIVVSSPSSLKDDKSNLPAADDSKLLVQPSSDNKQKAPIMASSSSSFQNSSLPNLFSSPSQQKTPDYSGMFADKKNTSSDSSKPAFQFGGNNVIFGGKKDAPVDSSKPFQFGPNNGIFGDKKDTPSDSSKPFHFGANKGIFGDKKTTSGDSSNPFQFGANNGFPTSNAPSIFSSVAQSFNPQSPPLFSMNQQSVLPGNQNTSEASADADEDAEPEKPSSPSVKKAEEKGVVVVHETKCKVYVKHDDATKGWKDIGVGQLSIRSKEGTEKASKESTPTIVIRNDVGKILLNALIYKGIKMNLQKNTVASIFHTSDAQSSESAGDTVVARTYLFRLKNVEEATKLSTAIKENAPSD

SEQ ID NO: 168953 - protein, 345 aa, Zea Mays
MEKFKDVVNWLRQNQAGSIVVSSPSSLKDDKSNLPAADDSKLLVQPSSDNKQKAPIMASSSSSFQNSSLPNLFSSPSQQKTPDYSGMFADKKNTSSDSSKPAFQFGGNNVIFGGKKDAPVDSSKPFQFGPNNGIFGDKKDTPSDSSKPFHFGANKGIFGDKKTTSVAQSFNPQSPPLFSMNQQSVLPGNQNTSEASADADEDAEPEKPSSPSVKKAEEKGVVVVHETKCKVYVKHDDATKGWKDIGVGQLSIRSKEGTEKASKESTPTIVIRNDVGKILLNALIYKGIKMNLQKNTVASIFHTSDAQSSESAGDTVVARTYLFRLKNVEEATKLSTAIKENAPSD

SEQ ID NO: 168954 - protein, 371 aa, Zea Mays
MEKFKDVVNWLRQNQAGSIVVSSPSSLKDDKSNLPAADDSKLLVQPSSDNKQKAPIMASSSSSFQNSSLPNLFSSPSQQKTPDYSGMFADKKNTSSDSSKPAFQFGGNNVIFGGKKDAPVDSSKPFQFGPNNGIFGDKKDTPSDSSKPFHFGANKGIFGDKKTTSGDSSNPFQFGANNGFPTSNAPSIFSSVAQSFNPQSPPLFSMNQQSVLPGNQNTSEASADADEDAEPEKPSSPSVKKAEEKGVVVVHETKCKVYVKHDDATKGWKDIGVGQLSIRSKEGTEKASKESTPTIVIRNDVGKILLNALIYKGIKMNLQKNTVASIFHTSDAQSSESAGDTVVARTYLFRLKNVEEATKLSTAIKENAPSD

SEQ ID NO: 168955 - protein, 410 aa, Zea Mays
MAESSHQHVMAGPASLDPRRAEAASKHVRALNTQFASWVQLQLQNHPAELWEDGLKDYISHASEIMEKFKDVVNWLRQNQAGSIVVSSPSSLKDDKSNLPAADDSKLLVQPSSDNKQKAPIMASSSSSFQNSSLPNLFSSPSQQKTPDYSGMFADKKNTSSDSSKPAFQFGGNNVIFGGKKDAPVDSSKPFQFGPNNGIFGDKKDTPSDSSKPFHFGANKGIFGDKKTTSVAQSFNPQSPPLFSMNQQSVLPGNQNTSEASADADEDAEPEKPSSPSVKKAEEKGVVVVHETKCKVYVKHDDATKGWKDIGVGQLSIRSKEGTEKASKESTPTIVIRNDVGKILLNALIYKGIKMNLQKNTVASIFHTSDAQSSESAGDTVVARTYLFRLKNVEEATKLSTAIKENAPSD

SEQ ID NO: 168956 - protein, 165 aa, Zea Mays
MTAIVKLAVFLHRCGAATRIRIERTRTGLEPLVIAAIPTMKYNCEAFNSKDDVQCSICLGEYREKEILRIIPTCRHSFHLACLDLWLEKQTTCPICRVSLEELQAAMPSVCSIQQLPPEPDPDPDPENSDNPAPQCFQPARQHPRDQNNSQETHESVEVIIEIRR

SEQ ID NO: 168957 - protein, 293 aa, Zea Mays
MVWPVELKENWATGGYPTVSNRIEKKVLHSPDKVPNSPRIARVEFLQTAWGLGRRAWWRRTGTAGGGGRRRWATCRRAASRRCCSTSARLRSARWPASTGRSGTRPPPTASGPPSCPPTTGTSPHSRPRPTTTALAMTRPKAVAGAAPLRRSRRRYTRASAGPPGSTAAPSYLSRNFGSTRTREVSACPSAQRLCRSQGEMIGGIGATYPQRNQDFTASLIFSRFGGLRSAGRLTSAFLPVHTAYSSGYVWADRTSGWAADAMAPRISTVGTSNRHGSSFQPQMTSTLHLSLT

SEQ ID NO: 168958 - protein, 172 aa, Zea Mays
MSICSKAMSITGRDDRRYWSHLSTEESRFHGVAYLQQIWWLEVGGEIDFCFPAGSYSLFFRLRLGRPHKRMGRRCHGSENIHGWDIKPTRFQLSTSDDQHTTSESHLVNPGRWTLYHVGDFIVSSSDEVTGLKFSMMQIDCTHTKGGLCVDSVCIYPKDLGYEDCVFCQKVL

SEQ ID NO: 168959 - protein, 313 aa, Zea Mays
MESKLANTSLNDNNGRKTTSSSAFDRGNNSASRPPQVLEEDVIDPDNMTYEELQQLGEAIGTQSKGLPESVIALLPTSTYKTGIFSRKEKHDECVICCMAYKNRDRLTKLPCGHHYHQACVAKWLQINKEFWIDKNKGGFCMSICSKAMSITGRDDRRYWSHLSTEESRFHGVAYLQQIWWLEVGGEIDFCFPAGSYSLFFRLRLGRPHKRMGRRCHGSENIHGWDIKPTRFQLSTSDDQHTTSESHLVNPGRWTLYHVGDFIVSSSDEVTGLKFSMMQIDCTHTKGGLCVDSVCIYPKDLGYEDCVFCQKVL

SEQ ID NO: 168960 - protein, 273 aa, Zea Mays
MGSGRNGAVVRRCTELQALAQKEEEIDFANGKPNTFLSWHHRSGTPAQLLQRRYSCSGDERGGPKEEFLCCPPPPPLKRARMGYESMQGSHGVSDARTTAGGGGLYCIDDYMQAMAVGWRIKEEGLIRWQRRDAAAATPSNLQAMGCLVQESGPFKVRRPEAHRLGSALKQQDGDDSSKEDGNDGRPQSSNAATKEDEASEQCSLSLSLGNLDAKCGRGMAAAASSRSGESSCILTASPARRSSSDCSGHSGCFVVGPGGVVSLELSLSICGS

SEQ ID NO: 168961 - protein, 349 aa, Zea Mays
MALSLSQVGSHLTSTLQDGHHHHPSAELLRLGATAGGGSSIAARLDHLLSPNGASAFRPPQGPPSSASFFLNAGASVGPDFGDDVGNGPHSFLQGNKPFHGLMQLPDLQGNGAGGPGGSGPSLFNLSFFANNGNSSGSSHEHASQGLMNNNDHFNGGAGGGGGGSEASEAGIFGGNFVGGGDQVPPPGLYSDQASMLPQMSATALLQKAAQMGATSSANGGAASMFRGFVGSSPHVRPATPHMEQSDANLNDLMNSLAGGGVGAGGMFGSSNGAGGPGMFDPRQLCDMEHEVKFGHGGGDMTRDFLGVGGGGIVRGISTPRGDHQSSSDMSSLEAEMKSASSFNGGRMP

SEQ ID NO: 168962 - protein, 510 aa, Zea Mays
MATNRFVCEVCNKGFQREQNLQLHRRGHNLPWKLKQKNPLQAQRRRVYLCPEPTCVHHDPARALGDLTGIKKHFCRKHGEKKWKCDKCSKRYAVQSDWKAHSKICGTREYRCDCGTLFSRRDSFITHRAFCDALAQESARLPPTSLSSLTSHLYGATSTGNMALSLSQVGSHLTSTLQDGHHHHPSAELLRLGATAGGGSSIAARLDHLLSPNGASAFRPPQGPPSSASFFLNAGASVGPDFGDDVGNGPHSFLQGNKPFHGLMQLPDLQGNGAGGPGGSGPSLFNLSFFANNGNSSGSSHEHASQGLMNNNDHFNGGAGGGGGGSEASEAGIFGGNFVGGGDQVPPPGLYSDQASMLPQMSATALLQKAAQMGATSSANGGAASMFRGFVGSSPHVRPATPHMEQSDANLNDLMNSLAGGGVGAGGMFGSSNGAGGPGMFDPRQLCDMEHEVKFGHGGGDMTRDFLGVGGGGIVRGISTPRGDHQSSSDMSSLEAEMKSASSFNGGRMP

SEQ ID NO: 168963 - protein, 921 aa, Zea Mays
MHRAFEEISDEEWSNHTFEPSRVLKRPNQRPSQPPPSIDSFIYNPKACSAAGTSTATVVLSDDDSDFDLGADGGSRRAAKSQRVLKRPHNGAPSRPSLPVKSSRRNPQPSNAAAAFGFSDSEDDDFDLPTSPLRTSSLRRKGKNQRPLKAPQLKPHLRAPPPPNSSSHNPKRSKFASDVKLSNSEDDDFDLTKTLSLNSSTNRQHIQKRPQHKPRLQHRQSFGSSCGNQKHSKAVATTRLSDSDDDDFNITDNDFDLPASHSRISRPRRTTSCRRLTSFAIDISEEDEEDLADDDFDYQDPRPPQQRSSGRRFVVGDDDDSDVPVALEEEDGVNWSELEKEDVDEDYNGVRSVHVEEPEGDVVGMALHKCSRISSDLRKELFGSSAQNCESYCEIDASTCGIVTQEDVNAACTREKSGFEPVLKPYQLVGVNFLLLLHRKSIGGAILADEMGLGKTVQAVTYLNLLQHLYNDPGPHLIVCPASVLENWERELRKWCPSFSIIMFHGAARTTYSKELSSLGKAGCPAPFNVLLVGYSLFERRSAQQKDDRRALKRWRWSCVLMDEAHVLKDKGSFRWRNLMAVAQHARQRLMLTGTPLQNDLHELWSLLEFMMPDIFATGDVDLKKLLNAEDRELISQIKSILGPFILRRLKSDVMQQLVPKIQHVKFVVMGTEQSEAYKNAINEYRAACQARSAKSSDGISNNVAGLIPKRQISNYFTQFRKIANHPLLIRCIYGDKDVDRIARLLYPKGAFGFECSLERAIQELKNYSDFNIHQLLLSYGDVGTKGALKDEHVFASAKCQALGELLPSLANDGHRVLIFSQWTTMLDILEWALEIIGVTYRRLDGGTAVTERQTIVDTFNNDLSIFACLLSTRAGGQGLNLVGADTVIIHDMDFNPQMDRQAEDRCHRIGQQKPVTIYRC

SEQ ID NO: 168964 - protein, 361 aa, Zea Mays
MDEAHVLKDKGSFRWRNLMAVAQHARQRLMLTGTPLQNDLHELWSLLEFMMPDIFATGDVDLKKLLNAEDRELISQIKSILGPFILRRLKSDVMQQLVPKIQHVKFVVMGTEQSEAYKNAINEYRAACQARSAKSSDGISNNVAGLIPKRQISNYFTQFRKIANHPLLIRCIYGDKDVDRIARLLYPKGAFGFECSLERAIQELKNYSDFNIHQLLLSYGDVGTKGALKDEHVFASAKCQALGELLPSLANDGHRVLIFSQWTTMLDILEWALEIIGVTYRRLDGGTAVTERQTIVDTFNNDLSIFACLLSTRAGGQGLNLVGADTVIIHDMDFNPQMDRQAEDRCHRIGQQKPVTIYRCY

SEQ ID NO: 168965 - protein, 558 aa, Zea Mays
MHRAFEEISDEEWSNHTFEPSRVLKRPNQRPSQPPPSIDSFIYNPKACSAAGTSTATVVLSDDDSDFDLGADGGSRRAAKSQRVLKRPHNGAPSRPSLPVKSSRRNPQPSNAAAAFGFSDSEDDDFDLPTSPLRTSSLRRKGKNQRPLKAPQLKPHLRAPPPPNSSSHNPKRSKFASDVKLSNSEDDDFDLTKTLSLNSSTNRQHIQKRPQHKPRLQHRQSFGSSCGNQKHSKAVATTRLSDSDDDDFNITDNDFDLPASHSRISRPRRTTSCRRLTSFAIDISEEDEEDLADDDFDYQDPRPPQQRSSGRRFVVGDDDDSDVPVALEEEDGVNWSELEKEDVDEDYNGVRSVHVEEPEGDVVGMALHKCSRISSDLRKELFGSSAQNCESYCEIDASTCGIVTQEDVNAACTREKSGFEPVLKPYQLVGVNFLLLLHRKSIGGAILADEMGLGKTVQAVTYLNLLQHLYNDPGPHLIVCPASVLENWERELRKWCPSFSIIMFHGAARTTYSKELSSLGKAGCPAPFNVLLVGYSLFERRSKRMIVGPSKDGDGAVF

SEQ ID NO: 168966 - protein, 68 aa, Zea Mays
MSVVDPQASLPADKHPERRLKSTFKAFEEAELPKLKEEKPGLTLHQYKDMIWKLWKKSPDNPLNQAAD

SEQ ID NO: 168967 - protein, 64 aa, Zea Mays
MFWRKEDPKDLEQQNLRFQHCRHTRVQHAPTLLQLSALKIRTRISRALSRLALCGRCISVRSPR

SEQ ID NO: 168968 - protein, 367 aa, Zea Mays
MRSLVTGELLHDIPVDIGTVSGISGRRCDAEVFVEFASFLTPGIIYRCDVGSAVPEMDVYREISVPGFDRNEFEAKQVFYPSKDGTKIPMFIVSKKEISLDGSHPALLFGYGGFGVSVTPQFSVARVVLMRNLGFVACVANLRGGGEYGEGWHRAGSLANKQNCFDDFVAAGEFLVSAGYTSPARLCVEGGSNGGLLVAACVNQRPDLFGCALAHVGVMDMLRFHKFTIGRAWTCDFGCSENEEEFQWLIKYSPLHNVRRPWENKRAAAAANGDASCRGLGGQYPATMLLTADHDDRVVPSHTLKFLATMQHVLRPGADGSPQTNPVVARIERKSGHCCGRSTQKIIDEAADRYAFAAKMMGVSWMD

SEQ ID NO: 168969 - protein, 623 aa, Zea Mays
MDQQRRSSIRLYGSNASSRSGSFDFEHDQDKERADQPSDGDRREVVVKIDAEPHSPVSLHAAGGMSGHSSAVSTPRAGGAVSMLAASASGSSASTSSAGGDAPRSGESFSFKNRTPQSSAGGGESSEDPPSRLIGSFLRKQAAAGGELSIDPDFEVDEMRRPPRAPTSVNASRELRVSFQDPRKRFSPSTSSASSSSYDASHNRNQSTIDLDTAEVLRCTSTSTGSSLLARSKTRSRLMDPPPPSTSSAPASEVDPRKSFVSKGLPPKSGQLRSGLIGKSGLIGKSGPIGKSGAFEDEDDDPFMDEGMTSDFKRDTMDCLLIMEWVSLVVIVGALICSVTIPSLSIKKLSGLHLWKWELLVFVLICGRLVSGWVIRIAVFFVERNFLLRKKVLYFVYGVRRAVRNVLWLGVALVSWHLLFDKAAKRETHTLVLPYVTKVLCCLLVATVIRLIKTLLLKVLASSFHVSTYFDRIQEALFNQYVIETLSGPPLVDESRMMAEVQRLQSAGASIPSELEATAMPGKSGPTAQEWAPHDGHKTERHLDDGISIDQLHKLSQKNISAWSMKRLMKIVRYGALTTMDEQLKHATGEDELATEIHSEYEAKVAAKRIFQNVAKPGSKKKL

SEQ ID NO: 168970 - protein, 237 aa, Zea Mays
MCGCAALVAGARPPRPVLPRRLRRRRGSSVRAEVSPGGESQPKKVTVAGAGWAGFAAAHHLIKQGYDVTLLAAESGPTEEVGLRGFWQPYRNIFALVDELGISPFTGWNKAAYYSTEGLAVEFPIFHNQPRLPAPFGVFAYPEFPNLPLSDRLTSIPVIAAVIDFDNTDTAWRKYDAMTAKELFKMYGCSQRLYREIFELVIQAALFAPGEQCSAAATLGMLYYYVLSHQVLCSSAL

SEQ ID NO: 168971 - protein, 300 aa, Zea Mays
MMQENSDFLLCRGEVEEKIFSPWLQSLELKGLKFVENKVPTSLTTDVDSGCISSIVCGDDVYEADAFVLAMGLSSLQSIVKNSPFLRSDREFRNLLHLSTVDVISVKLWFDKKIIIPKVANVCSGFDDSSGWAFFDLTSVYDDYCEESITIVEAEFYNASHLVLLSDDDIVYEASSHLIKCIQDFEGAIVIRYSIRRSPNSVINFLPGSYKYTLRGSTSFPNLFIAGDWIVNRHGSFSKEKAYVTGLEAGNRVVDYFDIGDFAKIIAVEGDEPHIETLRSLNRRANELKSQIPFSEFFLQ

SEQ ID NO: 168972 - protein, 282 aa, Zea Mays
MYGCSQRLYREIFELVIQAALFAPGEQCSAAATLGMLYYYVLSHQENSDFLLCRGEVEEKIFSPWLQSLELKGLKFVENKVPTSLTTDVDSGCISSIVCGDDVYEADAFVLAMGLSSLQSIVKNSPFLRSDREFRNLLHLSTVDVISVKLWFDKKIIIPKVANVCSGFDDSSGWAFFDLTSVYDDYCEESITIVEAEFYNASHLVLLSDDDIVYEASSHLIKCIQDFEGAIVIRYSIRRSPNSVINFLPVEGDEPHIETLRSLNRRANELKSQIPFSEFFLQ

SEQ ID NO: 168973 - protein, 590 aa, Zea Mays
MTWYVLCAIVLNGDYLSPKWHIGSDTSNLMAQDKLKETLTKIQLLEKEVQEECNKQQNAERELQSALQKVQDLLIRYASPESRLNVCLLMKSHVFLQSKELEKSYMNELRQQKALKEMLEKQRQEIDVMRRQQEEAYAALYNANEQKVTLEQRISEIELYVKDKEDELARNKHQLEALQADCDRIQQERDAAIREATELHEKNRLGVFAPSEALNTKFSLIELQQATQDFNPMFKVGEGGFGSVYKGFLRNTTVAIKLLHPESMQRQSEFHQEASVLSTVRHPNLVTLIGTCPEAFGLVYEFFPNGSLEDCLGCKNNTRPLTWQTRTRIIGEMCSALIFLHSNKPHPVVHGDLKPDHILLDANYSSKLGDFGISRLLIQTNTCSTNLYRTTNPRGTFSYMDPEFLTTGELTPRSDVYSFGIIILRLLTGKQPQRIAEIVEDAIEKENLHSIIDSTAGSWPFIQANQLAHIALRCAELSRRRRPDLTVDVWKVVEPLMKAASMTARPLSCTAPSDETCIPSYFICPILQEIMRDPYVAADGFTYEGEAIRGWLDSGHSTSPMTNLDLERSLLVPNRALRSAILEWNQQERQ

SEQ ID NO: 168974 - protein, 658 aa, Zea Mays
MRSMMIHNSKDKASSSNLSMANDMGESRTDVPCSLYENAGDTLLQSFEDVESTFKGKPRRLRSLEDFTVDSGRSQTQNSDSSCPPNDGAASISRTAVVDNDNISEVASNMHLSTNNSYDHISPTPHDLDKLKETLTKIQLLEKEVQEECNKQQNAERELQSALQKSKELEKSYMNELRQQKALKEMLEKQRQEIDVMRRQQEEAYAALYNANEQKVTLEQRISEIELYVKDKEDELARNKHQLEALQADCDRIQQERDAAIREATELHEKNRLGVFAPSEALNTKFSLIELQQATQDFNPMFKVGEGGFGSVYKGFLRNTTVAIKLLHPESMQRQSEFHQEASVLSTVRHPNLVTLIGTCPEAFGLVYEFFPNGSLEDCLGCKNNTRPLTWQTRTRIIGEMCSALIFLHSNKPHPVVHGDLKPDHILLDANYSSKLGDFGISRLLIQTNTCSTNLYRTTNPRGTFSYMDPEFLTTGELTPRSDVYSFGIIILRLLTGKQPQRIAEIVEDAIEKENLHSIIDSTAGSWPFIQANQLAHIALRCAELSRRRRPDLTVDVWKVVEPLMKAASMTARPLSCTAPSDETCIPSYFICPILQEIMRDPYVAADGFTYEGEAIRGWLDSGHSTSPMTNLDLERSLLVPNRALRSAILEWNQQERQ

SEQ ID NO: 168975 - protein, 562 aa, Zea Mays
MTWYVLCAIVLNGDYLSPKWHIGSDTSNLMAQDKLKETLTKIQLLEKEVQEECNKQQNAERELQSALQKSKELEKSYMNELRQQKALKEMLEKQRQEIDVMRRQQEEAYAALYNANEQKVTLEQRISEIELYVKDKEDELARNKHQLEALQADCDRIQQERDAAIREATELHEKNRLGVFAPSEALNTKFSLIELQQATQDFNPMFKVGEGGFGSVYKGFLRNTTVAIKLLHPESMQRQSEFHQEASVLSTVRHPNLVTLIGTCPEAFGLVYEFFPNGSLEDCLGCKNNTRPLTWQTRTRIIGEMCSALIFLHSNKPHPVVHGDLKPDHILLDANYSSKLGDFGISRLLIQTNTCSTNLYRTTNPRGTFSYMDPEFLTTGELTPRSDVYSFGIIILRLLTGKQPQRIAEIVEDAIEKENLHSIIDSTAGSWPFIQANQLAHIALRCAELSRRRRPDLTVDVWKVVEPLMKAASMTARPLSCTAPSDETCIPSYFICPILQEIMRDPYVAADGFTYEGEAIRGWLDSGHSTSPMTNLDLERSLLVPNRALRSAILEWNQQERQ

SEQ ID NO: 168976 - protein, 439 aa, Zea Mays
MDISINRKLLISCNLQVKKKAEALKDNRDYSFLLSDDADLSSSPKEKPAARSSLTQRADREVMRTTVKSKAPTSQPARVSNGYGSKNKMSTQRHAEGRVDTMRKEAFLNRERVVSRDNERMHERVVSRGNERMHGSAINGSNQASTSKTTIQKLTSRGSIANKQASTDLNDAALRKSSVAPKHHFSEVDRSKSLQSQKMQSAGQRLQHSSHGQRPHQSMQHRPQQSLQSRRPQQMTQDQKPQQSLQSQRTQQSLQNKRQQQSSHIQKLQSSHTQKSQSSQAHRPQSLSNRSQELRGQRPLSSQGQYLEQRRVQANDRVKQAERHIRPPSKSMPSRPVSSNGIRDDHAKRKQVVKRRFDDDDDEDDPLAMIRNMFGYDPSRYAGRDEDVSDMEADFATIEMEEKRSARIARQEDEEQLRLIEEEERREQERKRRKMARGR

SEQ ID NO: 168977 - protein, 440 aa, Zea Mays
MDISINRKLLISSCNLQVKKKAEALKDNRDYSFLLSDDADLSSSPKEKPAARSSLTQRADREVMRTTVKSKAPTSQPARVSNGYGSKNKMSTQRHAEGRVDTMRKEAFLNRERVVSRDNERMHERVVSRGNERMHGSAINGSNQASTSKTTIQKLTSRGSIANKQASTDLNDAALRKSSVAPKHHFSEVDRSKSLQSQKMQSAGQRLQHSSHGQRPHQSMQHRPQQSLQSRRPQQMTQDQKPQQSLQSQRTQQSLQNKRQQQSSHIQKLQSSHTQKSQSSQAHRPQSLSNRSQELRGQRPLSSQGQYLEQRRVQANDRVKQAERHIRPPSKSMPSRPVSSNGIRDDHAKRKQVVKRRFDDDDDEDDPLAMIRNMFGYDPSRYAGRDEDVSDMEADFATIEMEEKRSARIARQEDEEQLRLIEEEERREQERKRRKMARGR

SEQ ID NO: 168978 - protein, 61 aa, Zea Mays
MRSTRTKALKSWLSHATSLVGRSLVPMRRLSSLPAHASRLSTPSSTRLMSTVAMLRPSTSS

SEQ ID NO: 168979 - protein, 851 aa, Zea Mays
MACKYCTSTVEFALQASPGVQRASVALATEEAEIRYDRRIISASQLIQAVEETGFEALLVTAGEDQSRIDLKMDGVLDERLIMILKSSIQALPGVENVKFNSELHKVTVSYNPDHTGPRDLIEVIKAATFGHVNASIYLEADGRDQHRYGEIKQYRQSFLWSLIFTIPVFLTSMVFMYIPWLKDGLEKKVVNMMSIGELLRWILSTPVQFVIGRKFYTGAYKAMCRGSPNMDVLIALGTNTAYLYSVYSVLRAATSGNYMSTDFFETSSMLISFILLGKYLEILAKGKTSEAIAKLMDLAPETATLLVYDYEGNVVGEKEIDSRLIQKNDVIKVVPGGKVASDGFVIWGQSHVNESMITGESQPVAKRKGDTVIGGTVNENGVLHVRATFVGSESALAQIVRLVESAQMAKAPVQKFADHISRVFVPLVILLSMVTWLAWFVAGRLHSYPQSWIPRFMDSFQLALQFGISVMVIACPCALGLATPTAVMVATGVGASHGVLIKGGQALESAQKVDCIVFDKTGTLTIGKPVVVDTRLLKNMVLREFYDYAAAAEVNSEHPLAKAIVEHAKKLRPEGNHMWPEAREFISVTGQGVKAEVSGKSVIVGNKGLMLSSGIGIPLEASEILVEEEGKARTGIIVAVDREVAGVISVSDPTKPNALQVISYLKSMNVESIMVTGDNWGTANAIGREVGIEKIIAEAKPEQKAERVKELQLSGRTVAMVGDGINDSPALVSADVGLAIGAGTDVAIEAADIVLMKSNLEDVVTAIDLSRKAFFRIRMNYVWALGYNVVGIPIAAGVLFPSTGFRLPPWVAGAAMAASSVSVVCWSLLLRYYKAPKIAGTAKEIGITTL

SEQ ID NO: 168980 - protein, 927 aa, Zea Mays
MPARFKPNHPDENPQPPPARLLRGRGVVGWLHRTAMVATTRRALFLSCFHGGSEMSPRLSLRPRYPSMPRRPKGVAAAGGGGNGDLEAAVGTGDDEEEKVAVFSVSGMTCAACAGSVEKAVKRLPGIHDAAVDVLWGRAQVVFYPAFVSENKITEAIEDVGFEAKLIDEEVKEKNILLCRLHIKGMACKYCTSTVEFALQASPGVQRASVALATEEAEIRYDRRIISASQLIQAVEETGFEALLVTAGEDQSRIDLKMDGVLDERLIMILKSSIQALPGVENVKFNSELHKVTVSYNPDHTGPRDLIEVIKAATFGHVNASIYLEADGRDQHRYGEIKQYRQSFLWSLIFTIPVFLTSMVFMYIPWLKDGLEKKVVNMMSIGELLRWILSTPVQFVIGRKFYTGAYKAMCRGSPNMDVLIALGTNTAYLYSVYSVLRAATSGNYMSTDFFETSSMLISFILLGKYLEILAKGKTSEAIAKLMDLAPETATLLVYDYEGNVVGEKEIDSRLIQKNDVIKVVPGGKVASDGFVIWGQSHVNESMITGESQPVAKRKGDTVIGGTVNENGVLHVRATFVGSESALAQIVRLVESAQMAKAPVQKFADHISRVFVPLVILLSMVTWLAWFVAGRLHSYPQSWIPRFMDSFQLALQFGISVMVIACPCALGLATPTAVMVATGVGASHGVLIKGGQALESAQKVDCIVFDKTGTLTIGKPVVVDTRLLKNMVLREFYDYAAAAEVNSEHPLAKAIVEHAKKLRPEGNHMWPEAREFISVTGQGVKAEVSGKSVIVGNKGLMLSSGIGIPLEASEILVEEEGKARTGIIVAVDREVAGVISVSDPTKPNALQVISYLKSMNVESIMVTGDNWGTANAIGREVGIEKIIAEAKPEQKAERVKELQVSCLEGPWRWLATGSTTPPRSSRPTWGWR

SEQ ID NO: 168981 - protein, 337 aa, Zea Mays
MDLTLVDLEGLLPSAIIMVVSVTASTTSGKPLSEDNLEKTTEACDRALTLDASKKKVLDFVESRMGYIAPNLSAIVGSAVASKLMGTAGGLGALAKMPACNVQLLGAKRKNLAGFSTATSQFRVGYLEQTEVFQSTPPPLRTRACRLIAAKSTLAARIDSIRGDPTGKAGRNLLEEIRKKIEKWQEPPPAKLPKPLPVPDSEPKKKRGGRRLRKMKERYAQTDMMKLANRMQFGIPEESSLGDGLGEGYGMLGQAGSGKLRVSAGQSKLAAKVAKKFKEKSYGSSGATSGLTSSLAFTPVQGIELSNPQVQGNLLGGGTQSTYFSETGTFSKIRRTQ

SEQ ID NO: 168982 - protein, 121 aa, Zea Mays
MSIVPTDPPLHEQVHATREHTTPFRRSFARRVRATLAISPLPVRDCLFMYGIAGFKLTLSHIQGMWLVKIVLDQQAYIRIQSLTNLGRTSPVRSPSPDLSTSILRIVYVPRMKRASKGTLQ

SEQ ID NO: 168983 - protein, 54 aa, Zea Mays
MSCSGRRQVLYTKQIGFESSTTYFFWIFCAGEEANRISLLPQHQLTSPAMKLLV

SEQ ID NO: 168984 - protein, 97 aa, Zea Mays
MIELSAPPHASRSPAPRGMTRRSAPPHGRAPQRRVGVGRPYARPDARRSLPDPTWRSSSRVTRGMIFLAGWSIVKKEIVMVREQSCYSVIYANAPDP

SEQ ID NO: 168985 - protein, 98 aa, Zea Mays
MPSSPTTRSQRWSWIRSPLGHPPRQPVADVPDGKLQQSSSTKTSSRAKFNLPNPNLFYIASQIAAMEPDLVAAGASSSPPPSPVSATSPPWQMRGTVS

SEQ ID NO: 168986 - protein, 187 aa, Zea Mays
MVHGSATSRASNSHPTPLPHPASLPHSSLPHRTRRPARPLPFPTPTYGGALRAPPRHRRRIPRRRVRPRQGLVREEHWLSSLRLRLHRSALAFYGSGGEGKARCTPRGRRSRRRRALSPPSSRTPLPRSSRATSRTCTSTMLSRWMLPGAGRLLSSTSHTACARPLGRSMSDSSGSWRRNSAARSQR

SEQ ID NO: 168987 - protein, 90 aa, Zea Mays
MYTARKKIQKEKGLEPSEFEDSVAQELKSDLKDLYINNAIQMDVTGSRKAVVIHVPYRLRKAFRKIHVRLVRELEKKFSGKVYMLIVATT

SEQ ID NO: 168988 - protein, 151 aa, Zea Mays
MERRTSNMTYNAWRREPEEGPIMYCSRTIFEDATPELVRDFFWDGDFRLKWDPMLAYCKSLDEFPQNGATIVHWIKKFPFFCSDREYIFGGRIWESGKTYYCVTKPPFRRVFHIHHCPRKKNRGVWSCTSQVGVLELFNRLNMWVSNLRVK

SEQ ID NO: 168989 - protein, 130 aa, Zea Mays
MAGWCEQAVALLQRPAVAEMAVDVLLCAVPIWAAVMIGLVVGWSWRPRWTGLLFLGLRSRLRILWVPPGLGARRLWFACTALSACSVATKLISSAFRRCRGKHQDRASPDDDAAATRDGGCRADGRLYRF

SEQ ID NO: 168990 - protein, 242 aa, Zea Mays
MGQKLVQKLRLMNTRYVAIHLRFEPDMLAFSGCYYGGGEKERKELGEIRKRWDTLPELSAEDERSRGKCPLTPHEVGLMLRALGFGNDTLLYVASGEIYGGDSTLQPLRGLFPNFYTKEKLAGDDLNPFLPFSSRLAAIDFIVCDESDVFVTNNNGNMAKVLAGRRRYMGHKRTIRPNAKKLNVLFQTRNQLSWDTFSRKVQRVQRGLMGEPDDIRPKQDDFHEFPSSCICSRKPGNISATT

SEQ ID NO: 168991 - protein, 282 aa, Zea Mays
MKFCQYSCEGELTSDLDEDLQKLRCRVNFHALKFTSSIHAMGQKLVQKLRLMNTRYVAIHLRFEPDMLAFSGCYYGGGEKERKELGEIRKRWDTLPELSAEDERSRGKCPLTPHEVGLMLRALGFGNDTLLYVASGEIYGGDSTLQPLRGLFPNFYTKEKLAGDDLNPFLPFSSRLAAIDFIVCDESDVFVTNNNGNMAKVLAGRRRYMGHKRTIRPNAKKLNVLFQTRNQLSWDTFSRKVQRVQRGLMGEPDDIRPKQDDFHEFPSSCICSRKPGNISATT

SEQ ID NO: 168992 - protein, 311 aa, Zea Mays
MNSSVNVLEHHLKLKSKNALDVVRQYDIVVDATNSPASRYMLSDCCVLLNKPLISGSTIGLEGQLMVYNHNGSPCYRCHFPNPTTTCQTASSANYTLGVVPGVNGCLQALETIKVATRVGEPLCGRMLLFDALSSRFKTVNKIHKRSSTCTVCGDNPDLTQDSFVTFDYDSLTQSTKSSKPMAIQTPLPKSARTSCREYKRVVDSGRTHLLLDVRPVHHFQIASIANSVNIPLHELRERLPRLRDALTEVAGVSHSHGKHYCPLYFVCQNGDDSEAAVGVLRESGFPYAGAIAGGLECWAREVDPGFPVYW

SEQ ID NO: 168993 - protein, 131 aa, Zea Mays
MEAQNGSCGGAPVVLNVYDLTPMNNYLYWFGLGIFHSGIEVHGMEYGFGAHQFPASGVFEVEPKSCPGFIYRRSVWMGTTDLSRAEFRSFIENLAGKYNGNTYHLISKNCNHFTDDVCKSLTKKSIPGFIF

SEQ ID NO: 168994 - protein, 192 aa, Zea Mays
MMTYWIPDEPNMLPANASHQVGVGGFVINDQMEVLVVQEKYRGSSLDGVWKLPTGFILASEEIYTGASREVKEETGVDTEFVDVVAFRHAHNVAFHKSDLFFICMLRPVSSEIKIDETEIQAAKWMALEEFVKQPFIQEDHMFQKIMDICIQRLRKCYCGLTPHHVVSKFDDRTSTLYYNVAEPEDVNCSAA

SEQ ID NO: 168995 - protein, 102 aa, Zea Mays
MFVQLDKYRNVEFGRCPRVNCSGQPCLPVGQSDVPRSSTVKIYCPRCEDIYTPRSKYLSNIDGTYFGTTFPHLFLMTYPHLKPQKPLQQYVPRVFGFKIRKP

SEQ ID NO: 168996 - protein, 239 aa, Zea Mays
MHRDRGVSAAAIPGDRKRIGEPMDRSSPSTSWGFSGGREKERIGVGKQPEMPRSGGGSTAMSKSKLSDESETDSEESDVSGSDGEDTSWISWFCSLKGNEFFCEVDDDYIQDDFNLCGLSNQVPYYDYALDLILDVESSHGDMLTEEQNELIESAAEMLYGLIHVRYIITSKGLSAMLDKYRNVEFGRCPRVNCSGQPCLPVGQSDVPRSSTVKIYCPRCEDIYTPRSKYLSSILSFPL

SEQ ID NO: 168997 - protein, 306 aa, Zea Mays
MGKQGPCRHCGVTSTPLWRNGPPDKPVLCNACGSRWRTKGSLANYTPMHRKDDIDDDEPRVSKLKPPTSKLKSQKKKPNHIIMENGPFSGQNFRKMGDVDQSYRSSSGSAVSYSESCAPYGAADASEMTGSAQSHAWESLVPSRKRSCVTRPKPSPVEKLAKDLNFIMHEEQLYYPSGSSEEDLLYHSETPVGSFEMGSGSVLLRHPNSKSLEKESEASSIPADNKSYITSESYSGSASFAIHNGNKAAINLNASNARLKKSPLHMEDNARRCYTFYIRISIEGSREHQWSGRLYQVYYETTQKTP

SEQ ID NO: 168998 - protein, 300 aa, Zea Mays
MGKQGPCRHCGVTSTPLWRNGPPDKPVLCNACGSRWRTKGSLANYTPMHRKDDIDDDEPRVSKLKPPTSKLKSQKKKPNHIIMENGPFSGQNFRKMGDVDQSYRSSSGSAVSYSESCAPYGAADASEMTGSAQSHAWESLVPSRKRSCVTRPKPSPVEKLAKDLNFIMHEEQLYYPSGSSEEDLLYHSETPVGSFEMGSGSVLLRHPNSKSLEKESEASSIPADNKSYITSESYSGSASFAIHNGNKAAINLNASNARLKKSPLHMEDNARSYFGNQGSREHQWSGRLYQVYYETTQKTP

SEQ ID NO: 168999 - protein, 384 aa, Zea Mays
MSLRLLRVQVKKKFGHQAEAFFVVLTAIQFHLLFYSSRPLPNIFALALVNLAYSFWFKGSYLCTLRALIVAAVVFRCDMILLLGPIGLALLLSRSVSLLEAIKCCISTTLVCIGFTVLIDSIMWRRILWPEFQVLWFNSVLNRSSEWGTHSIHWYFTSALPRSMIVAYPLCMVGALLDRRIVPYMFPVFLFVVLYSKLPHKELRFIIGSIPMFNVSASLTASRLYNNRKKAGWNLLFILMLGAFLVSLGYSTVTFMASYNNYPGGYALKALHEADSSVKEKMVHIDAFTAMSGVSRFCENEYPWRYSKEEEIPIEEFEKRNFTYLLNEHRSIGGYQCLFAVDGFSRVKLTPQIPPLSLVKEPKVFAHGNTRDPDILSLSWPGCP

SEQ ID NO: 169000 - protein, 384 aa, Zea Mays
MPRPKPAAAGGGWLSGWGWDLMLGSIAAFYAVMAPYTKVEESFNVQAIHDILYHTYHIEKYDHLEFPGVVPRTFIGAFVISILSSPTVFVLRLLRVPKFYSLLTVRLTLSCVTLMSLRLLRVQVKKKFGHQAEAFFVVLTAIQFHLLFYSSRPLPNIFALALVNLAYSFWFKGSYLCTLRALIVAAVVFRCDMILLLGPIGLALLLSRSVSLLEAIKCCISTTLVCIGFTVLIDSIMWRRILWPEFQVLWFNSVLNRSSEWGTHSIHWYFTSALPRSMIVAYPLCMVGALLDRRIVPYMFPVFLFVVLYSKLPHKELRFIIGSIPMFNVSASLTASRLYNNRKKAGWNLLFILMLGAFLVRIFYCDFHGILQQLSWWLCFKGST

SEQ ID NO: 169001 - protein, 360 aa, Zea Mays
MSLRLLRVQVKKKFGHQAEAFFVVLTAIQFHLLFYSSRPLPNIFALALVNLAYSFWFKGSYLCTLRALSRSVSLLEAIKCCISTTLVCIGFTVLIDSIMWRRILWPEFQVLWFNSVLNRSSEWGTHSIHWYFTSALPRSMIVAYPLCMVGALLDRRIVPYMFPVFLFVVLYSKLPHKELRFIIGSIPMFNVSASLTASRLYNNRKKAGWNLLFILMLGAFLVSLGYSTVTFMASYNNYPGGYALKALHEADSSVKEKMVHIDAFTAMSGVSRFCENEYPWRYSKEEEIPIEEFEKRNFTYLLNEHRSIGGYQCLFAVDGFSRVKLTPQIPPLSLVKEPKVFAHGNTRDPDILSLSWPGCP

SEQ ID NO: 169002 - protein, 360 aa, Zea Mays
MPRPKPAAAGGGWLSGWGWDLMLGSIAAFYAVMAPYTKVEESFNVQAIHDILYHTYHIEKYDHLEFPGVVPRTFIGAFVISILSSPTVFVLRLLRVPKFYSLLTVRLTLSCVTLMSLRLLRVQVKKKFGHQAEAFFVVLTAIQFHLLFYSSRPLPNIFALALVNLAYSFWFKGSYLCTLRALSRSVSLLEAIKCCISTTLVCIGFTVLIDSIMWRRILWPEFQVLWFNSVLNRSSEWGTHSIHWYFTSALPRSMIVAYPLCMVGALLDRRIVPYMFPVFLFVVLYSKLPHKELRFIIGSIPMFNVSASLTASRLYNNRKKAGWNLLFILMLGAFLVRIFYCDFHGILQQLSWWLCFKGST

SEQ ID NO: 169003 - protein, 234 aa, Zea Mays
MILLLGPIGLALLLSRSVSLLEAIKCCISTTLVCIGFTVLIDSIMWRRILWPEFQVLWFNSVLNRSSEWGTHSIHWYFTSALPRSMIVAYPLCMVGALLDRRIVPYMFPVFLFVVLYSKLPHKELRFIIGSIPMFNVSASLTASRLYNNRKKAGWNLLFILMLGAFLVSLGYSTVTFMASYNNYPGGYALKALHEADSSVKEKMVHIDAFTAMSGVSRFCENEYPWRYVSNRQN

SEQ ID NO: 169004 - protein, 210 aa, Zea Mays
MEQNDGSFLAVRRLSGGAIHHHRHHSSPAEVVGVSTAWIGKGLTSCVCAQGTESDGRLSFDLSPIQEECLHRLQNRIEVQYDGSNLEHQKSFHELLRKQNGDRALWEYPFAVAGVNITFMLIQMLDLQAAKPTSLVGAVFLNLLLENDRAFDILYCITFKLMDQKWLEMHASYMDFNVVIKSTRRQLERELLLEDIQRIQDMPSYMLLTC

SEQ ID NO: 169005 - protein, 117 aa, Zea Mays
MSTFPSTSPSGSGPLHVVVVAAVMGLNPRRGGGCDLHCRAGYPVIYKICCCCCCCCVFSFFSCQRSGLRLHHPSPVGSRVIDIGFDNIDSFIFFRLCRMAWLATFYERPHSVYAPLQ

SEQ ID NO: 169006 - protein, 485 aa, Zea Mays
MIIDYKLTYPSGTATAVLINGFHTTHGDATAKQQVNGFTKYFAISFFWSFFQWFYSGGDNCGFSQFPTFGLRAWKQTFFFDFSLTYVGAGMICSHLVNLSLLLGALLSWGIMWPLVSDLKGDWYPADMPESSMRSLQGYKAFICIALLLGDGLYNFVKVVAFTVKSLLGRSRLKNAKKEEDIPVLDEIQRNEIFTRDSIPTWLAYSGYLALSAVAVFAIPLMFHEMKWYYVIIAYLLAPALGFCNAYGAGLTDINMAYNYGKVALFILAAWAGKDSGVVAGLVGCGLVKSLVSISADLMHDFKTGHLTLTSPRSMIIAQAIGTAMGCVIGPLTFLLFYKAFDIGNPDGYWKAPYALIYRNMAILGVQGFSALPLHCLQLCYGFFGFAVAANLMRDLLPPKYGKWVPLPMAMGVPFLVGASFAIDMCVGSLMVFIWHIIDRSKASLMVPAVASGLICGDGLWIFPESLLALAKISPPLCMAFRSSH

SEQ ID NO: 169007 - protein, 440 aa, Zea Mays
MIIDYKLTYPSGTATAVLINGFHTTHGDATAKFFFDFSLTYVGAGMICSHLVNLSLLLGALLSWGIMWPLVSDLKGDWYPADMPESSMRSLQGYKAFICIALLLGDGLYNFVKVVAFTVKSLLGRSRLKNAKKEEDIPVLDEIQRNEIFTRDSIPTWLAYSGYLALSAVAVFAIPLMFHEMKWYYVIIAYLLAPALGFCNAYGAGLTDINMAYNYGKVALFILAAWAGKDSGVVAGLVGCGLVKSLVSISADLMHDFKTGHLTLTSPRSMIIAQAIGTAMGCVIGPLTFLLFYKAFDIGNPDGYWKAPYALIYRNMAILGVQGFSALPLHCLQLCYGFFGFAVAANLMRDLLPPKYGKWVPLPMAMGVPFLVGASFAIDMCVGSLMVFIWHIIDRSKASLMVPAVASGLICGDGLWIFPESLLALAKISPPLCMAFRSSH

SEQ ID NO: 169008 - protein, 627 aa, Zea Mays
MAHARGGGGHGHGHEEEAEAAVCLDGDSEAGEARSAGRAPPWRDQLTARGMVASLAVGAMYSVIVMKLGLTTGLVPTLNVSAALIAFVILRGWTQALARFGVATRPFTRQENTVVQTCAVACYSIAVGGGFGSFLLALNKRTYEMAGEDTEGNLPGSYKEPGIGWMTGFLFAVSFVGIVALIPLRKIMIIDYKLTYPSGTATAVLINGFHTTHGDATAKFFFDFSLTYVGAGMICSHLVNLSLLLGALLSWGIMWPLVSDLKGDWYPADMPESSMRSLQGYKAFICIALLLGDGLYNFVKVVAFTVKSLLGRSRLKNAKKEEDIPVLDEIQRNEIFTRDSIPTWLAYSGYLALSAVAVFAIPLMFHEMKWYYVIIAYLLAPALGFCNAYGAGLTDINMAYNYGKVALFILAAWAGKDSGVVAGLVGCGLVKSLVSISADLMHDFKTGHLTLTSPRSMIIAQAIGTAMGCVIGPLTFLLFYKAFDIGNPDGYWKAPYALIYRNMAILGVQGFSALPLHCLQLCYGFFGFAVAANLMRDLLPPKYGKWVPLPMAMGVPFLVGASFAIDMCVGSLMVFIWHIIDRSKASLMVPAVASGLICGDGLWIFPESLLALAKISPPLCMAFRSSH

SEQ ID NO: 169009 - protein, 395 aa, Zea Mays
MICSHLVNLSLLLGALLSWGIMWPLVSDLKGDWYPADMPESSMRSLQGYKAFICIALLLGDGLYNFVKVVAFTVKSLLGRSRLKNAKKEEDIPVLDEIQRNEIFTRDSIPTWLAYSGYLALSAVAVFAIPLMFHEMKWYYVIIAYLLAPALGFCNAYGAGLTDINMAYNYGKVALFILAAWAGKDSGVVAGLVGCGLVKSLVSISADLMHDFKTGHLTLTSPRSMIIAQAIGTAMGCVIGPLTFLLFYKAFDIGNPDGYWKAPYALIYRNMAILGVQGFSALPLHCLQLCYGFFGFAVAANLMRDLLPPKYGKWVPLPMAMGVPFLVGASFAIDMCVGSLMVFIWHIIDRSKASLMVPAVASGLICGDGLWIFPESLLALAKISPPLCMAFRSSH

SEQ ID NO: 169010 - protein, 109 aa, Zea Mays
MKEYDKALETYQAGLKHDPKNQELLDGVRRCVEQINKASRGELSEEELKERQNKAMQDPEIQNILTDPIMQQVLTDLQENPRAAQAHLKNPGVMQKIQKLVSAGIVQMK

SEQ ID NO: 169011 - protein, 427 aa, Zea Mays
MTEEAEAKAKGNAAFAAGRFEEAVQHFSDAIALAPDNHVLYSNRSAAYASLWRYAEALDDAKRTVALKPDWAKGYSRLGAAHLGLGDAPKAVEAYEKGLALEPSNEALKSGLAQARQSASAPRRPVGSGADAVGKMFQGPELWSKVAADPTTRGYLDQPDFVQMLREVQRNPGRLNSYLSDQRMVQVLTLMLNIKFQNQSSGAPDPAAAQSNPPPPKQQPEAKAREPEPDPEPEPMEVTEEDKEQKERKASAQKEKEAGNAAYKRKDFDTAIQHYTEAMELDDEDISYITNRAAVYLEMGKYDECIKDCDKAVERGRELHADFKMISRALTRKGTALAKLAKSSQDYDAAIEIFQKALTEHRNPDTLKKLNDAERAKKELEQQEYYDPRIADEEREKGNEFFKQQKYPEAVKHYTEALRRNPKDPRQ

SEQ ID NO: 169012 - protein, 354 aa, Zea Mays
MADLTDIGCCCCFSFLRKPSVPVCEHQDADGMLTEDLLKRQSAEDHDGSFYTGDDPGDDLDRSFYNGDDHDRSFYDRDDSDYLDGSDDGPSRKSSEDIIQLRAQNGFACREVPVKETKKVFRSEDENGNKMVNQYVHLGKIGSGSYGKVVLYRNIKDGKLYAVKVLNKPYMMKVHVVHTKTAMTDVLRENVIHGDIKPDNLLVTSTGNVKIGDFSVSQVFEDDDDMLWRSPGTPVFTAPECCQGSAYHGRASDTWAVGVTLYCMVSGHYPFLGDTLQETYDKIANDPVELPGDVNPQLADLLLRLLCKDPGDRITLRAAAEHPWVAGDEGPVPEFICRCGFGRRKRNDVREEVQ

SEQ ID NO: 169013 - protein, 127 aa, Zea Mays
MHYEARIQAIIKYHGAILREKVSKKDARTMKLTRDQYLEMIPYWCATHPECWERMVDKWCSDEWEEVHNTCRDRRLMMPGVPHHQGSRSLSGYAQAWSVSHGGQTCSIFKAFAMSHKAKATSDVNYN

SEQ ID NO: 169014 - protein, 233 aa, Zea Mays
MSNGDTLDKLVVFLAKRDGIDKLVKTFQYVSKLAHWGAESSLPELAQRAKSWETASGLSRKAFRSGRFLAGFNALRRGPVPVPGELGALAVLANAGEMVYFFFDHFTWLSRAGVLEPWLARRASFVSAFGEAVGYVFFIAMDFIMIRRGLRQERELLREGAKDAAEKEVRRIRVDRVMRLMATAANAADLIIAVAETDPNPFCNHAVTLGISGLVSAWAGWCSSNRQGGVFFK

SEQ ID NO: 169015 - protein, 228 aa, Zea Mays
MSNGDTLDKLVVFLAKRDGIDKLVKTFQYVSKLAHWGAESSLPELAQRAKSWETASGLSRKAFRSGRFLAGFNALRRGPVPVPGELGALAVLANAGEMVYFFFDHFTWLSRAGVLEPWLARRASFVSAFGEAVGYVFFIAMDFIMIRRGLRQERELLREGAKDAAEKEVRRIRVDRVMRLMATAANAADLIIAVAETDPNPFCNHAVTLGISGLVSAWAGCTLNLVLP

SEQ ID NO: 169016 - protein, 245 aa, Zea Mays
MSRPSHENVAKMVGYCKESDPFSRMLVFQYPPNGTLYEHLHDGDGWQLSWPRRMKLALAISRALRYLHTELQPPFAVAALTSSSVYLTEDFSPKIIDFERWRYLATKPGFGSLNGGSVNSVTDSRHKRFMDVQANTYAFGVILLELVSGRASVSKDTGGLVDWARKHLEHPEEFGKLVDPRLQSVNQESLGIVCNVVNLCIDLEPSRRPSMSMIAAILEEGIEASAATLLRNSSLAWAEAELAIS

SEQ ID NO: 169017 - protein, 427 aa, Zea Mays
MLTANPKYLNRSSLVGNCFQNNTSNRPLQQCETNQDRGKDNDADENVQKGLPEPLWLLILEVIAAVSLLCFLTLCTMTGLRRCRARSSGSETSVPWTRAVSWKENTVISIDDDLLVNVPKISRQELAEACEDFSNIIGSSQETVVYKGTLKDGREIAVVSLSVPVHYWNDYVELHFHKEVIEMSRPSHENVAKMVGYCKESDPFSRMLVFQYPPNGTLYEHLHDGDGWQLSWPRRMKLALAISRALRYLHTELQPPFAVAALTSSSVYLTEDFSPKIIDFERWRYLATKPGFGSLNGGSVNSVTDSRHKRFMDVQANTYAFGVILLELVSGRASVSKDTGGLVDWARKHLEHPEEFGKLVDPRLQSVNQESLGIVCNVVNLCIDLEPSRRPSMSMIAAILEEGIEASAATLLRNSSLAWAEAELAIS

SEQ ID NO: 169018 - protein, 412 aa, Zea Mays
MATAAADCRTRTVLKAALSRTTAAFLFVAVVAVGVVVSGRWITATTAGRLRRLPTTAAIPAAAVLHPSETQQLQPPRPHSTPPPSRPPSPSYSISCPSLNLSSPAKAPKTSQTLARALSSPSICPASPSPPPPYAASSPSSNTSCPSYFRFIHEDLRPWRAAGGITRAMLDRARLTATFRLVVLGGNAYVQRFRPAFQTRDLFTIWGVLQLLRRHPGRVPDLDLMFDTVDWPVVRSHLYRGKNAEMLPPLFRYCGDDKTLDIVFPDWSFWGWPEINIKPWDALKEDLKAGNNRVRWMDREPYAYWKGNPSVSGTRKELVKCNVSSTHDWNARIYAQDWFKESKAGYKDSDLSSQCAHRSLMPIQHYWPVRYDNKCASIKYAVDWGNSHKQLVTCIYIYFVIYICRLYSSAKH

SEQ ID NO: 169019 - protein, 349 aa, Zea Mays
MATAAADCRTRTVLKAALSRTTAAFLFVAVVAVGVVVSGRWITATTAGRLRRLPTTAAIPAAAVLHPSETQQLQPPRPHSTPPPSRPPSPSYSISCPSLNLSSPAKAPKTSQTLARALSSPSICPASPSPPPPYAASSPSSNTSCPSYFRFIHEDLRPWRAAGGITRAMLDRARLTATFRLVVLGGNAYVQRFRPAFQTRDLFTIWGVLQLLRRHPGRVPDLDLMFDTVDWPVVRSHLYRGKNAEMLPPLFRYCGDDKTLDIVFPDWSFWGWPEINIKPWDALKEDLKAGNNRVRWMDREPYAYWKGNPSVSGTRKELVKCNVSSTHDWNARIYAQVTYFCSLFIPSPQ

SEQ ID NO: 169020 - protein, 504 aa, Zea Mays
MATAAADCRTRTVLKAALSRTTAAFLFVAVVAVGVVVSGRWITATTAGRLRRLPTTAAIPAAAVLHPSETQQLQPPRPHSTPPPSRPPSPSYSISCPSLNLSSPAKAPKTSQTLARALSSPSICPASPSPPPPYAASSPSSNTSCPSYFRFIHEDLRPWRAAGGITRAMLDRARLTATFRLVVLGGNAYVQRFRPAFQTRDLFTIWGVLQLLRRHPGRVPDLDLMFDTVDWPVVRSHLYRGKNAEMLPPLFRYCGDDKTLDIVFPDWSFWGWPEINIKPWDALKEDLKAGNNRVRWMDREPYAYWKGNPSVSGTRKELVKCNVSSTHDWNARIYAQDWFKESKAGYKDSDLSSQCAHRSLMPIQHYWPVRYDNKCASIKYAVDWGNSHKQLAQRIGKQASNFIQDELSMDHVYDYMLHLLTEYAKLLKFKPTKPPDAVEVCSESLACQAEGLEKKFLMESMVKFPRDACDLPPPFNPHELKLLKQKKENSIKQIHMWEQKDLGA

SEQ ID NO: 169021 - protein, 136 aa, Zea Mays
MAAAGLGVKATPFTYAAHALAAVAAALVLVWCVHFRGGLALEAQNKNLIFNVHPVLMLIGYIILGSEAIMIYKVFPNLNHDTAKLTHLILHAVATVLGAFGIYCAFKYHNDSGIANLYSLHSWLGIGTIALGCSGS

SEQ ID NO: 169022 - protein, 84 aa, Zea Mays
MRRINLILNYTNYKAIDSIDSNHRNLSRSFRKELPNDDIVFQLLSIQWSVFCSSSQRVAELLSFCSENESGWSSEDPRPGHQHS

SEQ ID NO: 169023 - protein, 395 aa, Zea Mays
MGGAGPARDESGQVPGWGQLAAAMAAASRATAVGRTAAVLWARWTSWKWNGAVRSHVLKSLMSVGTASIALKRGVPHWVVRELLVLPYYMMEGDLPTPANARVVAVVTGGNKGIGLEVCRQLACSGVTVVLTARDDARGAAAVENLRGLGLSDVLFHRLDVTDAPSIARLAGFLETRFGKLDILVNNAAIGGVEYVHDQDCGSVTSEEKAKRLGWLWENCRETYDDAKTGLRTNYYGTKQVIETLLPLLQASSDGRIVNVSSHFGQLRLFRNEELKRELNDIDNLTPERLDGLLDMFLNDLEAGEVESSNGWPMYFSAYKVAKAAMNAYSRILARRHPELRVNCVHPGYVRTDMTIHSGLLTPEEGGSRVAMVALLPGGGPTGAFFEDFQQSSFV

SEQ ID NO: 169024 - protein, 188 aa, Zea Mays
MSTSSQCTLMEGAISLPRNTSRIAVVTGANRGIGLEVCRQLAGNGVTVVLTAVDEELGAKAVGNLQGLALSDVLSHQLDITDASSIARLANFLKARFGKLDILVNNAAVAGVVYSQDHLDDLEPREEKRLEWLWRNCRETYHAAKECLQTNYYGTKHVIEALLPLLKASDDGRIVNISSDFGLLRVPS

SEQ ID NO: 169025 - protein, 202 aa, Zea Mays
MSITFQKYHLEHHRFQGVDGVDMDIPSQAEARAVRSAAGKSAWVVLQLFFYALRPLFLKPKPPGLWELTNLAAQVGLDAGLVYLCGWRSLAYLVLSTFVGGGMHPMAGHFISEHYVFSPEQETYSYYGPLNLVAWHVGYHNEHHDFPRIPGTRLHRVKEMAPEYYDGLESYRSWSQVIYMYIMDRTVGPFSRMKRKAQKKDS

SEQ ID NO: 169026 - protein, 155 aa, Zea Mays
MQSSFGGACGYGTLVDVVPMKARVGSVSPVLFKDGEGCGACYKVRCLDRGVCSRRAVTVVVTDECPGGLCAFGRTHFDLSGAAFSRMAVAGAGGRLRDRGQLSVVYRRTACKYGGKNIAFRVNEGSTNFWLSLLVEFEDGEGDIGSMQIKQAVTQ

SEQ ID NO: 169027 - protein, 218 aa, Zea Mays
MQSSFGGACGYGTLVDVVPMKARVGSVSPVLFKDGEGCGACYKVRCLDRGVCSRRAVTVVVTDECPGGLCAFGRTHFDLSGAAFSRMAVAGAGGRLRDRGQLSVVYRRTACKYGGKNIAFRVNEGSTNFWLSLLVEFEDGEGDIGSMQIKQANSVEWLDMRHVWGATWCLVRGPLVGPFSVRLTTLSARKTLTARDVIPRNWTPKATYTSRLNFQPSL

SEQ ID NO: 169028 - protein, 296 aa, Zea Mays
MRAGGGEEEEEEEVFYESRDRVLSSSCSSTSASDDDDNDHPRRRRDGAASAAAAALDVWTSEPAPVQERRRKLLQMMGLAGDPALARLEMGRSVSYDGPVRPAPASPIPRSRSDGAVPVSSTKPPLGGRSRQASSGSSEATPEGEDAGPRCLIRNLDDGTEFVVKEEFQLREVGTGRHFTMEEFVDLCVGCSPIVQELMRRDNVGSSGSNNGASTPIQRSNSDSSNGATRHRRHSSWLRSLRNVAGSMAVTSRDRRSSDEKDTSSEKGGRRSSSATDDSQDSAGASVHHGRVRVKV

SEQ ID NO: 169029 - protein, 580 aa, Zea Mays
MRAGGGEEEEEEEVFYESRDRVLSSSCSSTSASDDDDNDHPRRRRDGAASAAAAALDVWTSEPAPVQERRRKLLQMMGLAGDPALARLEMGRSVSYDGPVRPAPASPIPRSRSDGAVPVSSTKPPLGGRSRQASSGSSEATPEGEDAGPRCLIRNLDDGTEFVVKEEFQLREVGTGRHFTMEEFVDLCVGCSPIVQELMRRDNVGSSGSNNGASTPIQRSNSDSSNGATRHRRHSSWLRSLRNVAGSMAVTSRDRRSSDEKDTSSEKGGRRSSSATDDSQDSAGASVHHGRVRVKVRQSGKSYKELSGLFMNQEIQAHNGSIWSIRFSPDGRYLASAGEDCVIHVWEVSEFERKREENGLCNPLVAMACNGSPETTLALASSLDGSNREKKRRARFLEGRRSVSSDRLMVPEHVFALSEKPIRTFVGHSEDVLDLCWSKSQYLLSSSMDKTVKLWHISSASCLKTFSHSDYVTCIQFNPVDDRYFISGSLDEKVRIWSIQNREIVDWKDLHEMVTAACYTPDGQSALIGSHKGSCHIYDTSDNKLLQKKQIDLQNKKKKSSQKKITGFQIQESGFLMALI

SEQ ID NO: 169030 - protein, 530 aa, Zea Mays
MRAGGGEEEEEEEVFYESRDRVLSSSCSSTSASDDDDNDHPRRRRDGAASAAAAALDVWTSEPAPVQERRRKLLQMMGLAGDPALARLEMGRSVSYDGPVRPAPASPIPRSRSDGAVPVSSTKPPLGGRSRQASSGSSEATPEGEDAGPRCLIRNLDDGTEFVVKEEFQLREVGTGRHFTMEEFVDLCVGCSPIVQELMRRDNVGSSGSNNGASTPIQRSNSDSSNGATRHRRHSSWLRSLRNVAGSMAVTSRDRRSSDEKDTSSEKGGRRSSSATDDSQDSAGASVHHGRVRVKVRQSGKSYKELSGLFMNQEIQAHNGSIWSIRFSPDGRYLASAGEDCVIHVWEVSEFERKREENGLCNPLVAMACNGSPETTLALASSLDGSNREKKRRARFLEGRRSVSSDRLMVPEHVFALSEKPIRTFVGHSEDVLDLCWSKSQYLLSSSMDKTVKLWHISSASCLKTFSHSDYVTCIQFNPVDDRYFISGSLDEKVRIWSIQNREIVDWKDLHEMVTAACYTPDGQVLIIYT

SEQ ID NO: 169031 - protein, 85 aa, Zea Mays
MSASSEKPSRWYTKVGQISLDQRCPTCKLTDKMFAELVIWFPFFHWKVCVLSHRTAIGISFACKDGWHPRTRNCVIVDLTPRHRR

SEQ ID NO: 169032 - protein, 66 aa, Zea Mays
MATSTAAATALLRPRPAVPAKRRCLHAVAGWTTMRRRGAAGVVRAFFNPLGDERILREAIKECLVL

SEQ ID NO: 169033 - protein, 836 aa, Zea Mays
MQVKSVSSSDIRISVSSALSTSSHGSGGEDSESFGDIYVWGEVICDTISRSGSDRSAYSPGTTTDVLVPKPLESNVMLDVSYVACGVKHAALVTRQAEVFTWGEECSGRLGHGIGTNVFQPRLVESLSTCNVELIACGEFHTCAVTATGDLYTWGDGTHNAGLLGHGSNVSHWIPKRVSGPLDGLPVSAVSCGTWHTALITSSGQLYTFGDGTFGVLGHGNRASCSYPKEVESLKGLRTISVSCGVWHTAAVVEVIISQSNASSGKLFTWGDGDKYRLGHGDRSSKLKPTCVPSLIDYNFHKAACGHTLTIGLTTSGHIFTVGSPVYGQLGNPNNDGRYPRLVEEQLGGGGVVEVACGSYHVAVLTNAGEVYTWGKGTNGRLGHGDIADRKVPTLVEALKDRSVKRVACGSSFTAAICQHKWVSGMEQSQCSACRQPFGFTRKRHNCYNCGLVHCHSCSSKKALRAALSPNPGKPYRVCDSCYVKLSKVLDSGVSYSRNTIPRLPGDTKAERIDTKATRVAQSNSSDMIRNLDVKAAKQTKKSEYSSQVPATLQLKDIPFISAPDLQNLSTVANQYPYDPRSTLPSLRMPYLNYSSSMSSESSESLKDANELLKQEVQKLQAEVNSLRQEREQQDAELQKADAKAREAMNLATEEASKLKTAKDVINSLTAQLKEMSERLPPGACDVKNNGRVMGDLAPEMGREKQMRYGDRFSGLPAQVYQTSNYSETAMVPPQGSSRSEHVDGVREFFSPVQQMANGGGSTTIGYRYRSDDHDRRETDRFQINLQSLNTRSSNSPSNQVDAEWIEQYEPGVYLTLVSLRDGTKELKRVRFSVVC

SEQ ID NO: 169034 - protein, 1021 aa, Zea Mays
MADPVDIDKALVALKKGTQLLKYGRKGKPKFIPFRLSNDESTLVWVSNNKDKSLKLASVSRILSGQRTLVFQRFLLPEKDHLSFSLIYNDGKRSLDLICKNKVEAEAWFTGLSALICRGQHGSQVQHIDGIRIAGLPFDGARESSLSGSSTFTSDSFENKLSSVNSSKDRSSGEYTYSERTDVSDMQVKSVSSSDIRISVSSALSTSSHGSGGEDSESFGDIYVWGEVICDTISRSGSDRSAYSPGTTTDVLVPKPLESNVMLDVSYVACGVKHAALVTRQAEVFTWGEECSGRLGHGIGTNVFQPRLVESLSTCNVELIACGEFHTCAVTATGDLYTWGDGTHNAGLLGHGSNVSHWIPKRVSGPLDGLPVSAVSCGTWHTALITSSGQLYTFGDGTFGVLGHGNRASCSYPKEVESLKGLRTISVSCGVWHTAAVVEVIISQSNASSGKLFTWGDGDKYRLGHGDRSSKLKPTCVPSLIDYNFHKAACGHTLTIGLTTSGHIFTVGSPVYGQLGNPNNDGRYPRLVEEQLGGGGVVEVACGSYHVAVLTNAGEVYTWGKGTNGRLGHGDIADRKVPTLVEALKDRSVKRVACGSSFTAAICQHKWVSGMEQSQCSACRQPFGFTRKRHNCYNCGLVHCHSCSSKKALRAALSPNPGKPYRVCDSCYVKLSKVLDSGVSYSRNTIPRLPGDTKAERIDTKATRVAQSNSSDMIRNLDVKAAKQTKKSEYSSQVPATLQLKDIPFISAPDLQNLSTVANQYPYDPRSTLPSLRMPYLNYSSSMSSESSESLKDANELLKQEVQKLQAEVNSLRQEREQQDAELQKADAKAREAMNLATEEASKLKTAKDVINSLTAQLKEMSERLPPGACDVKNNGRVMGDLAPEMGREKQMRYGDRFSGLPAQVYQTSNYSETAMVPPQGSSRSEHVDGVREFFSPVQQMANGGGSTTIGYRYRSDDHDRRETDRFQINLQSLNTRSSNSPSNQVDAEWIEQYEPGVYLTLVSLRDGTKELKRVRFSVVC

SEQ ID NO: 169035 - protein, 59 aa, Zea Mays
MGGEQASKAKTLQLLLFLLVLSRWPAQSLLWSFTARPICKGTAAVVDLRAQSNKEREEK

SEQ ID NO: 169036 - protein, 383 aa, Zea Mays
MAAALQATPLKTLSISRRRVGGAGARPRPMAASFRCSAAARSYNITLLPGDGIGPEVVAVAKDVLSLAGALEGVELRFQEKLVGGSALDATGVPLPDETLDAAKGSDAVLLGAIGGYKWDNNEKHLKPETGLLQLRAGLGVFANLRPAAVLPQLVDASTLKKEVAEGVDIMVVRELTGGIYFGKPRGFGTNDNGDDIGFNTEVYSASEIDRIARVAFEVARKRRGRLCSVDKANVLEASMLWRKRVTALASEFPDIELSHMYVDNAAMQLVRNPKQFDTIVTNNIFGDILSDEASMITGSIGMLPSASVGESGPGLFEPIHGSAPDIAGQDKANPLATILSAAMLLRYGLGEENAANRIEAAVTETLNHGFRTGDIYSPGTVR

SEQ ID NO: 169037 - protein, 323 aa, Zea Mays
MASAANFAASSWQSASPSPWTTPHVTFATPSWQPTSPSPWVAPHATFVTPSWQPASLSPWAASPANFVTTSWTPACPSPGTMPNFITSSSLTASPSPWATPLGAATTQQSPAPSMGDLWTNIRADLTKMQATLQKVEQGLLQIKAAVQHEQHQLALSARLQTSAAVGIQAVARGFLARRRVREMRRHMLEAALVTVDLGTRVRDLALSDGHQQRHQAAISKCEHGTCPTGDELQPYGSGGREGTPLVIDKGALFSATTFRYRPSRGRLRWLLLRPIPGAHPCAPLSSRWHPWDPGGCTRASPMCGGCPPYLIGSKKFGFGIIR

SEQ ID NO: 169038 - protein, 232 aa, Zea Mays
MGPQPPLHLPAANGDSIVDRDVWLACAVPLSRLPAVGAEVYYFPHGHAEQCPAHLPAPLPAPHLFPCTVAGVSLGADDETNEVFAKISLSPGPHRGPAAACRTDPTSDCPPQELSYFTKELTQSDANNGGGFSVPRYCADHIFPTLDFDANPPVQKLFMRDTRGNPWQFRHIYRGTPRRHLLTTGWSRFVNAKLLVAGDIVVFMRRHNGDLIVGLRRTPRSTGMIPLHYHQI

SEQ ID NO: 169039 - protein, 50 aa, Zea Mays
MYKFHMSRFYILFNTKITNCQCNKVCESKLNLKLIIFCRCITILSFLRLL

SEQ ID NO: 169040 - protein, 72 aa, Zea Mays
MVPSLSGSCSQGCCRHGVHVRRAIWVPSPDGGGRANFLMMALHVVSPQLGNLSTSPTQLVQGVVQHRVEHDS

SEQ ID NO: 169041 - protein, 181 aa, Zea Mays
MRGVMSPSSVFPAAVGCGGVPACAPVGAPTTSSGRGATSPSMAPASSMEARTRAGSAEARALDRDTVGHYTDGTVPPEGRTEASGPRPSLGAEAHADLHPLIIVVVLLLLSAGRGLERKPLPLLHSAVLFQQIAGQHLLADVLLLLVLLLLLCLGRQPTHLLGSRFLWCRGSGGPEATQPL

SEQ ID NO: 169042 - protein, 124 aa, Zea Mays
MAQGPFSLHPRLQAYSKRNNQVSHEDSLDQLEEARDVALVHSVKYQQSLQRYHERHVRPQGFQEGDLVLQLQQYNRGRHKLTPPWEGSFSIAKVLKPETYKLCNEEGEVYDNAWNIEQLRRFYP

SEQ ID NO: 169043 - protein, 191 aa, Zea Mays
MFFSRPAAQNLHDPTLLVATAKGSHHISLIVVPTVTKKIHHELPSSLINEPVIFNAIRTGYIIVTTIFITVIAAAATDIFRICTPFQHRRKNTVIGVVVVVIGVIISFTCVLWIGIIISYSLPANFEQASRREKLLVIVHSNHPNKRIIGLSGKIKYTAVHLDGCNIRVSHRINRAECREKRMPDPTSIDA

SEQ ID NO: 169044 - protein, 1365 aa, Zea Mays
MILLHTRDDDAKQDEVRMMATAESDDDAIWVPPDEAAAAADSMMQDDDDDDDDYHAGTGEEDDESEDDDDATSSICRWRHDSDHQSAAHREERQKAMLRAMNGQLRMLAARFLESAGIDTSSWLDIVISLSWEAALAIKPDVGTAVGNQMDPSSYIKVKCLASGTPRQCEVVKGLVFRKNVAHKHMPTKCHNPRLLLLSGLLGHSHVGFSSFSSIEQEKDHLDKSVCEMMEICRPDVVLVERTVSRDIQELLLKEGVTLVLDMKLNRLQRVARCSGAPIVSFSEVLSKPKLKQCDYFHIEKVTEEHSLITCSAGVGSRPSKTLMFLEGFHKPLGCTILLRGANTQELKKIKQVMNYTVFAAYRLVLETSFFEDQRLILNNKDSSKEEVSVARKAGPSSLGSVQETTDSNALNPLDKGFPNQALLPSEGLVVSAVPESPRRFIDILRYHNIYLPVTSSQEATDHQIQDSIHISPNVGVPIGSVESVDHLSDPQEQASSETNQQMALDGPSVSEKHEQSLENIKTSDTDEVDDVLESQSILILLSSQCITKQVICEQSRLSRIRYYGNFDVSLGRYLQDILQKQNLSCSSCGEPPEAHMYSYTHRNGNLTVLVRHLLPKYRLPGESEGKIWMWTRCLRCERESGISRSSRRVIMSAEAHYLSFGKFLELSFSNHSTARRLSICGHSLNTDCLRFFGLGSKVAMFQYSSVEIYNACKPQPTLEFHNPDMHEWYGQEVLATGVTLFSEVTSALQKLKDQFPVKDLSQLEEMLIKEKAEFMDSLAKTVDRNRESSSVDDILNVNWLYQDLLLELYVWDCRLHQLVDCTLAENAIVANGQTAAAAEADGIGERMSSIAPFENRCIKEPEKFIEAGTASALLDDAWNDKHCNDQHNTNCECDGGEEKWIWNPVNESRLAFRQEVEVGCLERFEVVNHYCPSHLSPLHKHRESGEEMGGSPQFTVGPGGSILCVSEDEISSIISRALAVSEERRHLLMDAVAETEPADTTRSKTMDKSYSSLSESSSASLWSSDSEASISSDDLSSYDTSLLLSSSLHPEIAVNGITALKGRYSVICVHSNQFYNLRRKCCPSELAYVASLSRCKRWDAQGGKSKAFFARTMDGRLIIKQIKKTEFESFIKFAPDYFRHVNHSLDTGSQTCLAKILGIYQVKQTRHGKEIKMDLMVMENILFGHNVSRTYDLKGAIFSRYVSDPNDHAGTVYLDQNFVDDMRVSPIYIGGRAKHLLERAIWNDTSFLTSINVMDYSLLVGVDRQKRELVFGIIDYLRQYTWDKQLETMVKASLVVPKNESPTVISPRDYKKRFRKFMSKHFLTVPDEWSTESRPPVAWESCAHAGELPGVKPQHPSPILLACA

SEQ ID NO: 169045 - protein, 1348 aa, Zea Mays
MMATAESDDDAIWVPPDEAAAAADSMMQDDDDDDDDYHAGTGEEDDESEDDDDATSSICRWRHDSDHQSAAHREERQKAMLRAMNGQLRMLAARFLESAGIDTSSWLDIVISLSWEAALAIKPDVGTAVGNQMDPSSYIKVKCLASGTPRQCEVVKGLVFRKNVAHKHMPTKCHNPRLLLLSGLLGHSHVGFSSFSSIEQEKDHLDKSVCEMMEICRPDVVLVERTVSRDIQELLLKEGVTLVLDMKLNRLQRVARCSGAPIVSFSEVLSKPKLKQCDYFHIEKVTEEHSLITCSAGVGSRPSKTLMFLEGFHKPLGCTILLRGANTQELKKIKQVMNYTVFAAYRLVLETSFFEDQRLILNNKDSSKEEVSVARKAGPSSLGSVQETTDSNALNPLDKGFPNQALLPSEGLVVSAVPESPRRFIDILRYHNIYLPVTSSQEATDHQIQDSIHISPNVGVPIGSVESVDHLSDPQEQASSETNQQMALDGPSVSEKHEQSLENIKTSDTDEVDDVLESQSILILLSSQCITKQVICEQSRLSRIRYYGNFDVSLGRYLQDILQKQNLSCSSCGEPPEAHMYSYTHRNGNLTVLVRHLLPKYRLPGESEGKIWMWTRCLRCERESGISRSSRRVIMSAEAHYLSFGKFLELSFSNHSTARRLSICGHSLNTDCLRFFGLGSKVAMFQYSSVEIYNACKPQPTLEFHNPDMHEWYGQEVLATGVTLFSEVTSALQKLKDQFPVKDLSQLEEMLIKEKAEFMDSLAKTVDRNRESSSVDDILNVNWLYQDLLLELYVWDCRLHQLVDCTLAENAIVANGQTAAAAEADGIGERMSSIAPFENRCIKEPEKFIEAGTASALLDDAWNDKHCNDQHNTNCECDGGEEKWIWNPVNESRLAFRQEVEVGCLERFEVVNHYCPSHLSPLHKHRESGEEMGGSPQFTVGPGGSILCVSEDEISSIISRALAVSEERRHLLMDAVAETEPADTTRSKTMDKSYSSLSESSSASLWSSDSEASISSDDLSSYDTSLLLSSSLHPEIAVNGITALKGRYSVICVHSNQFYNLRRKCCPSELAYVASLSRCKRWDAQGGKSKAFFARTMDGRLIIKQIKKTEFESFIKFAPDYFRHVNHSLDTGSQTCLAKILGIYQVKQTRHGKEIKMDLMVMENILFGHNVSRTYDLKGAIFSRYVSDPNDHAGTVYLDQNFVDDMRVSPIYIGGRAKHLLERAIWNDTSFLTSINVMDYSLLVGVDRQKRELVFGIIDYLRQYTWDKQLETMVKASLVVPKNESPTVISPRDYKKRFRKFMSKHFLTVPDEWSTESRPPVAWESCAHAGELPGVKPQHPSPILLACA

SEQ ID NO: 169046 - protein, 1368 aa, Zea Mays
MILLHTRDDDAKQDEVRMMATAESDDDAIWVPPDEAAAAADSMMQDDDDDDDDYHAGTGEEDDESEDDDDATSSICRWRHDSDHQSAAHREERQKAMLRAMNGQLRMLAARFLESAGIDTSSWLDIVISLSWEAALAIKPDVGTAVGNQMDPSSYIKVKCLASGTPRQCEVVKGLVFRKNVAHKHMPTKCHNPRLLLLSGLLGHSHVGFSSFSSIEQEKDHLDKSVCEMMEICRPDVVLVERTVSRDIQELLLKEGVTLVLDMKLNRLQRVARCSGAPIVSFSEVLSKPKLKQCDYFHIEKVTEEHSLITCSAGVGSRPSKTLMFLEGFHKPLGCTILLRGANTQELKKIKQVMNYTVFAAYRLVLETSFFEDQRLILNNKDSSKEEVSVARKAGPSSLGSVQETTDSNALNPLDKGFPNQALLPSEGLVVSAVPESPRRFIDILRYHNIYLPVTSSQEATDHQIQDSIHISPNVGVPIGSVESVDHLSDPQEQASSETNQQMALDGPSVSEKHEQSLENIKTSDTDEVDDVLESQSILILLSSQCITKQVICEQSRLSRIRYYGNFDVSLGRYLQDILQKQNLSCSSCGEPPEAHMYSYTHRNGNLTVLVRHLLPKYRLPGESEGKIWMWTRCLRCERESGISRSSRRVIMSAEAHYLSFGKFLELSFSNHSTARRLSICGHSLNTDCLRFFGLGSKVAMFQYSSVEIYNACKPQPTLEFHNPDMHEWYGQEVRNVLATGVTLFSEVTSALQKLKDQFPVKDLSQLEEMLIKEKAEFMDSLAKTVDRNRESSSVDDILNVNWLYQDLLLELYVWDCRLHQLVDCTLAENAIVANGQTAAAAEADGIGERMSSIAPFENRCIKEPEKFIEAGTASALLDDAWNDKHCNDQHNTNCECDGGEEKWIWNPVNESRLAFRQEVEVGCLERFEVVNHYCPSHLSPLHKHRESGEEMGGSPQFTVGPGGSILCVSEDEISSIISRALAVSEERRHLLMDAVAETEPADTTRSKTMDKSYSSLSESSSASLWSSDSEASISSDDLSSYDTSLLLSSSLHPEIAVNGITALKGRYSVICVHSNQFYNLRRKCCPSELAYVASLSRCKRWDAQGGKSKAFFARTMDGRLIIKQIKKTEFESFIKFAPDYFRHVNHSLDTGSQTCLAKILGIYQVKQTRHGKEIKMDLMVMENILFGHNVSRTYDLKGAIFSRYVSDPNDHAGTVYLDQNFVDDMRVSPIYIGGRAKHLLERAIWNDTSFLTSINVMDYSLLVGVDRQKRELVFGIIDYLRQYTWDKQLETMVKASLVVPKNESPTVISPRDYKKRFRKFMSKHFLTVPDEWSTESRPPVAWESCAHAGELPGVKPQHPSPILLACA

SEQ ID NO: 169047 - protein, 50 aa, Zea Mays
MTDHRDVMLPLSLQYIATRALLLLVIASAVSCSSLPPEDGIRVVSAEKRA

SEQ ID NO: 169048 - protein, 287 aa, Zea Mays
MTDHRDVMLPLSLQYIATRALLLLVIASAVSCSSLPPEDGIRVVSAEKRLVRKVEISHWGNIQITEQYKLKHGGARHKGVFSRLEYQSRPSISGASSFKNLLARLPPRVHSVYYRDEIGNISSSHLRTDSHKSDLEIEPRYPLFGGWHCTFTIGYGLPLQDFVFESVDGRRYINLTFGCPLLDTVVDDLTVKVVLPEGSKNPEHVVPFVTEKHLETSYSYLDVVGRTTVVLKKKNVVGEHNVPFQVYYEFNPIFMLAEPLMLISAVLLFFVAFIAYLHMDLSIRKSS

SEQ ID NO: 169049 - protein, 413 aa, Zea Mays
MTDHRDVMLPLSLQYIATRALLLLVIASAVSCSSLPPEDGIRVVSAEKRIDLTGPIVKVFLTLKVENAPTASEASRVLLAFTPTEFQHLSIVKATRAEGKRKKKAFVPLSVQASELATTAPDAPRLYSVLLSTPLKPGDATTLEVLYMLTHSLEPFPAEISQSESQLVYYRDSAVLLSPYHVLEQVTYIKMPSNRIESFTRVDPTTRAGSEVKYGTYSNQMPNSYLPVLVHYENNRPFAVVEELVRKVEISHWGNIQITEQYKLKHGGARHKGVFSRLEYQSRPSISGASSFKNLLARLPPRVHSVYYRDEIGNISSSHLRTDSHKSDLEIEPRYPLFGGWHCTFTIGYGLPLQDFVFESVDGRRYINLTFGCPLLDTVVDDLTVKVVLPEGSKNPEHVVPFVTEKHLELFIP

SEQ ID NO: 169050 - protein, 196 aa, Zea Mays
MATTSFFHPLAAPMDRGSVCFRRCPFSLTIPARTAPRRPAPLLVVRAKRAGSQPPAAAASRQPANPSAVPKRDVEEEEEEVEEEMPWIQDKALDLVEFTGTVTQAIPGPRVGSSPVPWLLAVPLAYVGVSFVLAVVRTVRKFTSPHTKKKRRVSKNIFLLKSLDDLFQKGREAINYPALQDLMQKEGINAGRCRSC

SEQ ID NO: 169051 - protein, 368 aa, Zea Mays
MNVAVPPQSPHLRLYDFAKSAIIKIFAFPYATVCDLYCDGGMDTDKWCDAQVGHYIGIDASASGVNYARELWENRRKPFTAEFIELDPSDDGFEAQVQEKGIQADMVCCMQHLQLCFENEEQAKKLLNNVSSLLKPGGYFFGITPDSSTIWTKYQKNVEASHNKGLKTVPNSIRSENYTITFEVEEEKFPFFGKKYQLKFASDAVFENQCLVHFPTLMRLSREAGLEYVEIQNLTEFYDDNRTQFAPMLGGYGASFLDARGKLVARSYDILGGVEFFFFLEGQAWCNDESCLTESLGLYSAFVFQKPDPEAIPPIVTPDLPDPDKGHEEEWLQPQQASVEDGRRSHADVLPIDPEKGILGPGPADMRL

SEQ ID NO: 169052 - protein, 394 aa, Zea Mays
MNVAVPPQSPHLRLYDFAKSAIIKIFAFPYATVCYMLLSFMIFSSFQISEKLRRNPESNFTFIGCQMPKVCDLYCDGGMDTDKWCDAQVGHYIGIDASASGVNYARELWENRRKPFTAEFIELDPSDDGFEAQVQEKGIQADMVCCMQHLQASWLFSRTVEYDMLLCFENEEQAKKLLNNVSSLLKPGGYFFGITPDSSTIWTKYQKNVEASHNKGLKTVPNSIRSENYTITFEVEEEKFPFFGKKYQLKFASDAVFENQCLVHFPTLMRLSREAGLEYVEIQNLTEFYDDNRTQFAPMLGGYGASFLDARGKLVARSYDILGLYSAFVFQKPDPEAIPPIVTPDLPDPDKGHEEEWLQPQQASVEDGRRSHADVLPIDPEKGILGPGPADMRL

SEQ ID NO: 169053 - protein, 372 aa, Zea Mays
MNVAVPPQSPHLRLYDFAKSAIIKIFAFPYATVCYMLLSFMIFSSFQISEKLRRNPESNFTFIGCQMPKVCDLYCDGGMDTDKWCDAQVGHYIGIDASASGVNYARELWENRRKPFTAEFIELDPSDDGFEAQVQEKGIQADMVCCMQHLQAKKLLNNVSSLLKPGGYFFGITPDSSTIWTKYQKNVEASHNKGLKTVPNSIRSENYTITFEVEEEKFPFFGKKYQLKFASDAVFENQCLVHFPTLMRLSREAGLEYVEIQNLTEFYDDNRTQFAPMLGGYGASFLDARGKLVARSYDILGLYSAFVFQKPDPEAIPPIVTPDLPDPDKGHEEEWLQPQQASVEDGRRSHADVLPIDPEKGILGPGPADMRL

SEQ ID NO: 169054 - protein, 314 aa, Zea Mays
MPKVCDLYCDGGMDTDKWCDAQVGHYIGIDASASGVNYARELWENRRKPFTAEFIELDPSDDGFEAQVQEKGIQADMVCCMQHLQLCFENEEQAKKLLNNVSSLLKPGGYFFGITPDSSTIWTKYQKNVEASHNKGLKTVPNSIRSENYTITFEVEEEKFPFFGKKYQLKFASDAVFENQCLVHFPTLMRLSREAGLEYVEIQNLTEFYDDNRTQFAPMLGGYGASFLDARGKLVARSYDILGLYSAFVFQKPDPEAIPPIVTPDLPDPDKGHEEEWLQPQQASVEDGRRSHADVLPIDPEKGILGPGPADMRL

SEQ ID NO: 169055 - protein, 338 aa, Zea Mays
MYIWPKVHRFASFPFSSSQLSRPYVVAAACLSPPTSRQLSAQIELPPSQIGFCLGSRHRRPTPGAKAFADLFAGEERPAEMNVAVPPQSPHLRLYDFAKSAIIKIFAFPYATVCYMLLSFMIFSSFQISEKLRRNPESNFTFIGCQMPKVCDLYCDGGMDTDKWCDAQVGHYIGIDASASGVNYARELWENRRKPFTAEFIELDPSDDGFEAQVQEKGIQADMVCCMQHLQLCFENEEQAKKLLNNVSSLLKPGGYFFGITPDSSTIWTKYQKNVEASHNKGLKTVPNSIRSENYTITFEVEEEKFPFFGKKYQLKFASDAVFENQCLVHFPTLMRLC

SEQ ID NO: 169056 - protein, 423 aa, Zea Mays
MYIWPKVHRFASFPFSSSQLSRPYVVAAACLSPPTSRQLSAQIELPPSQIGFCLGSRHRRPTPGAKAFADLFAGEERPAEMNVAVPPQSPHLRLYDFAKSAIIKIFAFPYATVCDLYCDGGMDTDKWCDAQVGHYIGIDASASGVNYARELWENRRKPFTAEFIELDPSDDGFEAQVQEKGIQADMVCCMQHLQLCFENEEQAKKLLNNVSSLLKPGGYFFGITPDSSTIWTKYQKNVEASHNKGLKTVPNSIRSENYTITFEVEEEKFPFFGKKYQLKFASDAVFENQCLVHFPTLMRLSREAGLEYVEIQNLTEFYDDNRTQFAPMLGGYGASFLDARGKLVARSYDILGLYSAFVFQKPDPEAIPPIVTPDLPDPDKGHEEEWLQPQQASVEDGRRSHADVLPIDPEKGILGPGPADMRL

SEQ ID NO: 169057 - protein, 378 aa, Zea Mays
MFVGVGEASFISLAAPFIDDNAPVAQKTAWLGMFYMCIPTGIALGYVYGGLVGKYLNWRAAFWGESILMVPFVILGFVIKPLNLKGFAHNTTKEYGQMLNPEVQDQINNNATKHVLPGGIEDLSGKVPQKFSLSSFCHGIMTEIGRFSKDMKELLQEKVFVIVVLGYISYNFVIGAYSYWGPKAGQEIYNMGSADLMFGGITIVCGIIGSLAGGFILDKIGSTIPNAFKLLSGATFVGAIFCFGAFCFKSLYGFIPSFAVGELSVFATQAPVNFVCLHAVKPHLRPLAMAVSTVSIHIFGDVPSSPLVGLLQDKINNWRATALILTSILFAAVVFWFIGIFIPSVDRFNEESEHGLTVAERSNLRPLLDEKDEPRTSD

SEQ ID NO: 169058 - protein, 486 aa, Zea Mays
MFCIINMLNYIDRGVIASNGVNGTRKSCSGGTCTSGSGIQGDFNLNNLEDGTLSSAFMVGLLVSSLIFASLVKRYNPFRLIGVGLLVWTIATAGCGVSFDFWSITICRMFVGVGEASFISLAAPFIDDNAPVAQKTAWLGMFYMCIPTGIALGYVYGGLVGKYLNWRAAFWGESILMVPFVILGFVIKPLNLKGFAHNTTKEYGQMLNPEVQDQINNNATKHVLPGGIEDLSGKVPQKFSLSSFCHGIMTEIGRFSKDMKELLQEKVFVIVVLGYISYNFVIGAYSYWGPKAGQEIYNMGSADLMFGGITIVCGIIGSLAGGFILDKIGSTIPNAFKLLSGATFVGAIFCFGAFCFKSLYGFIPSFAVGELSVFATQAPVNFVCLHAVKPHLRPLAMAVSTVSIHIFGDVPSSPLVGLLQDKINNWRATALILTSILFAAVVFWFIGIFIPSVDRFNEESEHGLTVAERSNLRPLLDEKDEPRTSD

SEQ ID NO: 169059 - protein, 564 aa, Zea Mays
MGGGSPVAAVQDASDDGARVVVLVAGSPVDSASDSLPPPVAATPAPAAEAKQESVSETEETKQAAAAAAAPATAAGGVQAMAVTVVRDVETGLDASTSDRDGDKPSWFTPKRLLVMFCIINMLNYIDRGVIASNGVNGTRKSCSGGTCTSGSGIQGDFNLNNLEDGTLSSAFMVGLLVSSLIFASLVKRYNPFRLIGVGLLVWTIATAGCGVSFDFWSITICRMFVGVGEASFISLAAPFIDDNAPVAQKTAWLGMFYMCIPTGIALGYVYGGLVGKYLNWRAAFWGESILMVPFVILGFVIKPLNLKGFAHNTTKEYGQMLNPEVQDQINNNATKHVLPGGIEDLSGKVPQKFSLSSFCHGIMTEIGRFSKDMKELLQEKVFVIVVLGYISYNFVIGAYSYWGPKAGQEIYNMGSADLMFGGITIVCGIIGSLAGGFILDKIGSTIPNAFKLLSGATFVGAIFCFGAFCFKSLYGFIPSFAVGELSVFATQAPVNFVCLHAVKPHLRPLAMAVSTVSIHIFGDVPSSPLVGLLQDKINNWRATALILTSILFAAVVFWFIGAF

SEQ ID NO: 169060 - protein, 324 aa, Zea Mays
MPFNWRKKRIHFHDFMLNVHSRLQMHKGVSDPLDVVAAEISDEAIILCLDEFMVTDVADAMILNRLFRQLFSKGVILVSTSNRAPDKLYEGGLQRDLFLPFIDTLKERCIVHAIGSAVDYRQLGSAEQGFYFVGKHYSTLLKQKLQSLIGDEKPSPQTVEVIMGRKLQVPLGANGCAYFPFEDLCDKPLGAADYFGLFKKFHTLALDGIPKLGSSNRTAAYRFVTLIDVMYENKARLLCTAEAGPVGLFENIVTVAEARKVSPRSSRSQKSDDTDLCVDNELGFAKDRTISRLTEINSREYLEDFEMRLRQQQQLPLQGLDKRW

SEQ ID NO: 169061 - protein, 272 aa, Zea Mays
MRSVVRSLRQLRRFTQHHAEGHSQATRLFGQQNALIMCGSTSGSLSTLRCNGEISRFASPGVELMRSMFSTVVTDPIKDIGRGGPMVEYERRIASGELVDGDSFQVDTIQQLQRLYEELIENEEDCQLDRYKSSEKSGRSRWLWSRLITQPSTYAPIKGLYLYGGVGTGKTMLMDLFYEQLPFNWRKKRIHFHDFMLNVHSRLQMHKGVSDPLDVVAAEISDEAIILCLDEFMVTDVADAMILNRLFRQLFSKGVVCGYYFLPFSYGTKLLR

SEQ ID NO: 169062 - protein, 232 aa, Zea Mays
MRSVVRSLRQLRRFTQHHAEGHSQATRLFGQQNALIMCGSTSGSLSTLRCNGEISRFASPGVELMRSMFSTVVTDPIKDIGRGGPMVEYERRIASGELVDGDSFQVDTIQQLQRLYEELIENEEDCQLDRYKSSEKSGRPFNWRKKRIHFHDFMLNVHSRLQMHKGVSDPLDVVAAEISDEAIILCLDEFMVTDVADAMILNRLFRQLFSKGVISFMKVAYNGTFSCHLLTP

SEQ ID NO: 169063 - protein, 495 aa, Zea Mays
MRSVVRSLRQLRRFTQHHAEGHSQATRLFGQQNALIMCGSTSGSLSTLRCNGEISRFASPGVELMRSMFSTVVTDPIKDIGRGGPMVEYERRIASGELVDGDSFQVDTIQQLQRLYEELIENEEDCQLDRYKSSEKSGRSRWLWSRLITQPSTYAPIKGLYLYGGVGTGKTMLMDLFYEQLPFNWRKKRIHFHDFMLNVHSRLQMHKGVSDPLDVVAAEISDEAIILCLDEFMVTDVADAMILNRLFRQLFSKGVILVSTSNRAPDKLYEGGLQRDLFLPFIDTLKERCIVHAIGSAVDYRQLGSAEQGFYFVGKHYSTLLKQKLQSLIGDEKPSPQTVEVIMGRKLQVPLGANGCAYFPFEDLCDKPLEKFHTLALDGIPKLGSSNRTAAYRFVTLIDVMYENKARLLCTAEAGPVGLFENIVTVAEARKVSPRSSRSQKSDDTDLCVDNELGFAKDRTISRLTEINSREYLEDFEMRLRQQQQLPLQGLDKRW

SEQ ID NO: 169064 - protein, 245 aa, Zea Mays
MGLNYSDKLYEGGLQRDLFLPFIDTLKERCIVHAIGSAVDYRQLGSAEQGFYFVGKHYSTLLKQKLQSLIGDEKPSPQTVEVIMGRKLQVPLGANGCAYFPFEDLCDKPLGAADYFGLFKKFHTLALDGIPKLGSSNRTAAYRFVTLIDVMYENKARLLCTAEAGPVGLFENIVTVAEARKVSPRSSRSQKSDDTDLCVDNELGFAKDRTISRLTEINSREYLEDFEMRLRQQQQLPLQGLDKRW

SEQ ID NO: 169065 - protein, 158 aa, Zea Mays
MLEAAKDAGIREVLLLRYFDLQAAPWPLGVLIRAFSMLRNRMLADPSFLFKVSTEIVIDSCCATFAEVQKRGKDFWAEFELYAADLLVGVAVDIALVGLLAPYVRIGKPSASTGLFGRFSRMAGSLPSSVFEAERPGCRFTAQQRIGTYFYKECQKIR

SEQ ID NO: 169066 - protein, 410 aa, Zea Mays
MIIVNIVHDISRMFGRGSPRMNLIQAAAMQRVSPRSTTNKRKKRTSPKVGRLRANWNSGLEKGLVEILQDHNNDCYKGQNGWSSEAWNRIVKLFHEKFPYVTFTKCQIQDKEKELKRDYKALKEARQQSGVSWDERLCRIEAEEPIWNNLTISNERLKKFRTKSFPLFEALGELHDGNIAEGTMNFTSIEPYRPPVTQPCQGAATHPSQAAFMLTQPSQPSFTQPSQPAFTQPSRIAYTQPSQAAFAQPSQAAFAQPSQAAFTQPSQAAFAHPSQATITQAISNEDDDLRVLDPIAPTSVSKRAKNVGAGSSRTRIDKRGQDGKVVEMMERFLEMKEKQDEVEKRATTNANEDDFPITTCIAIVDGMEELSDDEKVDAYDVFKDAQNRAIFMIAKDATRIKWLRKKIART

SEQ ID NO: 169067 - protein, 336 aa, Zea Mays
MIREGVLDGVEAIFAMHVDYRIPTGVIAAHPGPTQAAVCFFEAKIEGKSGMAETPHLNVDPVVVTSLAILSLQQLISREDDPLHSQVVSVTYVKAGKALDATPNLVEFGGTLRSLTTEGLYCLQRRVKEVVEGQAAVHRCKGAVEIKVEDYPVYPAVVNDEKLHRHVEDVGRGLLGPGKVRPGEKIMAGEDFAFYQQLVPGVMFGIGIRNEEAGSVHSAHNPYFFVDEDVIPVGAALHAAIAELYFTDGPLFRQRRLVVSRSCVFCLDQSEQMASAGQSDLNIWSTMLISRAPRPVSTSNYFSLCNQKHYTCFSTLQWSSYFILSLNRNTARFLTL

SEQ ID NO: 169068 - protein, 269 aa, Zea Mays
MIREGVLDGVEAIFAMHVDYRIPTGVIAAHPGPTQAAVCFFEAKIEGKSGMAETPHLNVDPVVVTSLAILSLQQLISREDDPLHSQVVSVTYVKAGKALDATPNLVEFGGTLRSLTTEGLYCLQRRVKEVVEGQAAVHRCKGAVEIKVEDYPVYPAVVNDEKLHRHVEDVGRGLLGPGKVRPGEKIMAGEDFAFYQQLVPGVMFGIGIRNEEAGSVHSAHNPYFFVDEDVIPVGAALHAAIAELYFTDGPLFRQRRLVVSRSCGWSRVQ

SEQ ID NO: 169069 - protein, 325 aa, Zea Mays
MHACGHDVHTAMLLGAAKLLSQRKDQLKGTVRLLFQPAEESGAGASHMIREGVLDGVEAIFAMHVDYRIPTGVIAAHPGPTQAAVCFFEAKIEGKSGMAETPHLNVDPVVVTSLAILSLQQLISREDDPLHSQVVSVTYVKAGKALDATPNLVEFGGTLRSLTTEGLYCLQRRVKEVVEGQAVVHRRKGAVEINSNDYPIYSAVVNDEKLHHHVEDVGRRLLGLDMVKPVEKIMAREDFALYQQLIPGVGIEIKNKKADSVTQLTTLISSLMRMSFHSVLLCIMQLQNFISLRLPLCTKEGTCSRVDDLELKRWLKCGRRAGGCA

SEQ ID NO: 169070 - protein, 705 aa, Zea Mays
MDAFFSGLDSRLREAVKVADSIMVGLVNAAMEDAYKKSLWKDGDLERLFQKLRFAELAIMQLEWCLRFVRGEMEADGGADDGHEQLLDDLLETRDRIQARLDEAELAVAQTDCDYMRRKRDELDPSRRRETPSAVDHRGAEVEGGTFEELRGSVGRKMTRMRARLEDASSELAALMQKVSGEASPMARLQEPGHEGDGVKGLSGFYSMAQLLMEFQEMVLDAGVLRDSVASAFDAMERSVSAQRAAMEEQQWLMDAEKEMYSAVVEGFLREINVESTKRNQSEGEGCPTPTLHHSRDAPDNNSSDEFQYLNDETSQLHSARRIPAEKSESRLRYTNSEEDCFCLSQEEAERLTETTIDSEIRFELQRVLYSAAFRDLLSKLSVQAYHAQRLTEQRDETEIRSNIQYEMDSIIFKDLVKNLCVESVDHLIKTWIQDEVHRALLAKIMNPWKITTEMVHSERLIKEEIECIVFGGLINDLVNGQNLSVVKYQHQNRPSDNLGRFGMIDSAEQLVNGKIQVNVTTEDDGVGSDQHRILVNQEVLGLIGNCDRQNSKGSDKQAEESIGRDDVKERLDDCRKLQTEEVATGLCMPSEGVIQEICIPLTNIYEIFGDFEAITCEKIGTSVLRLRDLDKQLSNLIEKVNSLKTSEFLYRSAFTRRCCDLQTAEAEVDLLGDEVELLLGLLSKTYGALVHYSPVLQHYVGVII

SEQ ID NO: 169071 - protein, 1000 aa, Zea Mays
MDAFFSGLDSRLREAVKVADSIMVGLVNAAMEDAYKKSLWKDGDLERLFQKLRFAELAIMQLEWCLRFVRGEMEADGGADDGHEQLLDDLLETRDRIQARLDEAELAVAQTDCDYMRRKRDELDPSRRRETPSAVDHRGAEVEGGTFEELRGSVGRKMTRMRARLEDASSELAALMQKVSGEASPMARLQEPGHEGDGVKGLSGFYSMAQLLMEFQEMVLDAGVLRDSVASAFDAMERSVSAQRAAMEEQQWLMDAEKEMYSAVVEGFLREINVESTKRNQSEGEGCPTPTLHHSRDAPDNNSSDEFQYLNDETSQLHSARRIPAEKSESRLRYTNSEEDCFCLSQEEAERLTETTIDSEIRFELQRVLYSAAFRDLLSKLSVQAYHAQRLTEQRDETEIRSNIQYEMDSIIFKDLVKNLCVESVDHLIKTWIQDEVHRALLAKIMNPWKITTEMVHSERLIKEEIECIVFGGLINDLVNGQNLSVVKYQHQNRPSDNLGRFGMIDSAEQLVNGKIQVNVTTEDDGVGSDQHRILVNQEVLGLIGNCDRQNSKGSDKQAEESIGRDDVKERLDDCRKLQTEEVATGLCMPSEGVIQEICIPLTNIYEIFGDFEAITCEKIGTSVLRLRDLDKQLSNLIEKVNSLKTSEFLYRSAFTRRCCDLQTAEAEVDLLGDEVELLLGLLSKTYGALVHYSPVLQHYVGIREVLNLLGKELAHMPNKTVMPGKDCLRQPVQHGVRVGSDFAAALQAQFRRQRRLVGTWMQGPTPTGWSPRRRLGEAPLSREEALLELGSGAVLHFGYFWSFQRLATWILAPVLSSPLPPSFLRSVPRVAMELDLPPQPTPPLTDLAASIHRAAAAAAVLSAPAPSSHAAAAVAALRDAHAAIGSFLSRLNVSYGDDHQPMADSGEELVEDGEGAQMVGEAEERLRNCGLQGSKRRKRPVPPSWPLGRRSSSSSEAAAAAAAPGAGAGRRGAATRDHGSLDAIPCVMRRKERISGVGA

SEQ ID NO: 169072 - protein, 1099 aa, Zea Mays
MDAFFSGLDSRLREAVKVADSIMVGLVNAAMEDAYKKSLWKDGDLERLFQKLRFAELAIMQLEWCLRFVRGEMEADGGADDGHEQLLDDLLETRDRIQARLDEAELAVAQTDCDYMRRKRDELDPSRRRETPSAVDHRGAEVEGGTFEELRGSVGRKMTRMRARLEDASSELAALMQKVSGEASPMARLQEPGHEGDGVKGLSGFYSMAQLLMEFQEMVLDAGVLRDSVASAFDAMERSVSAQRAAMEEQQWLMDAEKEMYSAVVEGFLREINVESTKRNQSEGEGCPTPTLHHSRDAPDNNSSDEFQYLNDETSQLHSARRIPAEKSESRLRYTNSEEDCFCLSQEEAERLTETTIDSEIRFELQRVLYSAAFRDLLSKLSVQAYHAQRLTEQRDETEIRSNIQYEMDSIIFKDLVKNLCVESVDHLIKTWIQDEVHRALLAKIMNPWKITTEMVHSERLIKEEIECIVFGGLINDLVNGQNLSVVKYQHQNRPSDNLGRFGMIDSAEQLVNGKIQVNVTTEDDGVGSDQHRILVNQEVLGLIGNCDRQNSKGSDKQAEESIGRDDVKERLDDCRKLQTEEVATGLCMPSEGVIQEICIPLTNIYEIFGDFEAITCEKIGTSVLRLRDLDKQLSNLIEKVNSLKTSEFLYRSAFTRRCCDLQTAEAEVDLLGDEVELLLGLLSKTYGALVHYSPVLQHYVGELVEWEHKSKVDGVMHACGHDVHTAMLLGAAKLLSQRKDQLKGTVRLLFQPAEESGAGASHMIREGVLDGVEAIFAMHVDYRIPTGVIAAHPGPTQAAVCFFEAKIEGKSGMAETPHLNVDPVVVTSLAILSLQQLISREDDPLHSQVVSVTYVKAGKALDATPNLVEFGGTLRSLTTEGLYCLQRRVKEVVEGQAAVHRCKGAVEIKVEDYPVYPAVVNDEKLHRHVEDVGRGLLGPGKVRPGEKIMAGEDFAFYQQLVPGVMFGIGIRNEEAGSVHSAHNPYFFVDEDVIPVGAALHAAIAELYFTDGPLFRQRRLVVSRSCVFCLDQSEQMASAGQSDLNIWSTMLISRAPRPVSTSNYFSLCNQKHYTCFSTLQWSSYFILSLNRNTARFLTL

SEQ ID NO: 169073 - protein, 1614 aa, Zea Mays
MALGPPGAAINQQAAPALTPAQIAASLADLSHAVRDMQITMNAMLTGHLPFPNPQAAAHPPQPPHPSLTAQPPPAALPPPTQPPAPLPPLARQPISYQYDMLIDPGPSSTASPTTAPIHMIRFPPSPSPIPSWAQGAPTVSPPVYSEALPRPALTTSLPSSTVGGPPGMLLGGGDGPLFPGRGPLRPHVPATTTAWSPYHGLPQDDDVETAAYGGAEARAPPRYYKLDFATYDGSEDPLNWLNHCEQFFRGQRTPASDRTWLASYHLKGPAQTWYYALEQDEGMPSWDRFAELCRLRFGPAVRGSRLAELGRLPFLSTVQEYSDRFQALLCRARDVSPMQKTELFVGGLPEYLRVDVELRDPQDLQTAMYLARAFERRAAAWPPFQQRGSRPPQRAQGSGRVTPAPPGALPTGTTTPGDSTTPTRPFRRLSPGEQQERRRQGLCFNCDEPYVRGHVCQRLFYLEVDDFLDEASSEGGVDPLEESAAPDVTGANALVVSLHALAGIRTDKTLLLPVTINGERLLALMDTGSTHNFLNADTMSRLGLAMAGGEHLRVTVANGGRLPCAGIARDVPVIINDESFSITCVGMRLGCFDFILGVDFLETLGTIQWNFRALTLSFQRQGRRIHWQGVRATQQPAPQQLAVAVVDTAQQPLMDVLLQQHGAIFDEPTGLPPARPYDHRIHLLPGTAPVAVRPYRYAQLQKDELERQCEAMLTQGIIRPSTSPFSAPVLLVRKADRSWRFCIDYRALNAKTSKDKFPIPVVDELLDELHGARFFSKLDLRSGYHQVRMHTDDIAKTAFRTHHGHYEFLVMPFGLSNAPATFQALMNDVLRPYLRKFVLVFFDDILIYSASWAEHLQHVGIVLETLQANHLHLKRSKCAFGATSVAYLGHVISEGGVAMDADKVVAVASWPPPRSARGLRGFLGLAGYYRKFIKDFGLIAAPLTRLLRRDAFAWDDDATTAFHALKHALTTGPVLQMPDFAKLFVVDCDASGAGFGAVLHQGAGPLAYFSKPFAARHLKLAAYERELIGLVQAVRHWRPYLWGRHFSVRTDHYSLKFLLDQRLSTVPQHQWTSKLFGFDFSVEYRPGRLNTVADALSRRDSEAAVEDTAMAALAISGPTFSLLDDIRRALAAAPDGQHLLQQLRDGVLAAPWRLIDGLLLHDTRIFVPNYDDLRHQVLTLAHSAGHEGIQKTLHRLRADFYMPHDRALVQDWVRTCTTCQQNKTLAQQPGGLLQPLEVPSQVWADISMDFIEGLPKVAGKSVILTVVDRFSKYAHFIALGHPYTASSVARAFFDGIVRLHGFPLSIVSDRDPVFTGHVWRDLFRMAGVTLKMSTAFHPQTDGQSEVVNKIIAMYLRCVTDDRPRAWVDWLSWAEYCYNTSYHTALRATPFEVVYGRSPPSMLPYTPGTARTEAADDMLRSRDEMLAEVRQRLLQAQQLAKKYYDAGHREVQFQVGDWVWLRLLHCTFQSLHPRAKGKLGPRYAGPFRVQERIGSVAYRLQLPDGARIHDIFHVSLLKPHRGDPPSTPGTLDPVMDGRLLPVPAKVLRAQLRRGVWQVLVQWRGLAEDDATWEKLEEFRTAYPNLQLEDELFEKAGRDVIYGQAYVRRNRAKAA

SEQ ID NO: 169074 - protein, 95 aa, Zea Mays
MHLWPSLRIRDSFKHGYLQKLELNLGNMKRAQRQRQGRQGESQEDQDGQPGGNGKAPLLEDRSPSGSVLAGALELAWDAVLLLTCCCCCFCCGGA

SEQ ID NO: 169075 - protein, 360 aa, Zea Mays
MEPPCRHPRQGRHVRAHVGRHPLHEAGGRRRARLRRHLRLRLRLLLRRWQHQRCNRGLRRHGPLRPQARRRRAQLAALGDLPRRGSRAGCAGRLRAYQGNHPTRRRHVRDTARGMGEGGERGARQERLWRDGRPHRLGRSQRIRVMRSKGCLPGINFFSTAVDLVVRKGDYLNAVAIWHMMVSEAGLVPNFSMYSAMIGLHCNAGSIDDALGLLDEMPLNGVFANSVTYNTILEGFIKHRKAREAESFLTEMSKNEQLPTASNCAAAISLFFKEFNPSAAIDVWRCIVEHNITPAEDSAKELIAGLLEFGRFTEVTKRADEMIDMRVELSRSTMENMKRGFAKAGRHQSYDNIARRLKRY

SEQ ID NO: 169076 - protein, 171 aa, Zea Mays
MSAGFQLGVIGSLALSVASSVAIVICNKALISTLGFPFATTLTSWHLMVTFCTLHVAHRLHFFEPKAIDGQTVILFGLLNGTSIGLLNLSLGFNSIGFYQMTKLAIIPFTVLLETIFLNKRFSESIKLSLLVLLLGVGIASITDLKLNMLGSILSGLAIATTCVGQIVSYI

SEQ ID NO: 169077 - protein, 328 aa, Zea Mays
MSAGFQLGVIGSLALSVASSVAIVICNKALISTLGFPFATTLTSWHLMVTFCTLHVAHRLHFFEPKAIDGQTVILFGLLNGTSIGLLNLSLGFNSIGFYQMTKLAIIPFTVLLETIFLNKRFSESIKLSLLVLLLGVGIASITDLKLNMLGSILSGLAIATTCVGQILTNTIQKRLKVSSTQLLYQSAPYQAGILFATGPFVDQLLTDRSVFAHKYSAPVLGFIVLSCLIAVSVNFSTFLVIGTTSPVTYQVLGHLKTCLVLSFGYTLLHDPFTLRNILGILIAIFGMALYSYFSVREGKKKSANDALPVSQMTARVKGRWLGLQGDD

SEQ ID NO: 169078 - protein, 416 aa, Zea Mays
MIERGHFRELQSIIEMLPLTNGSDEQAARTMPNCETVPILQIKKRQTFVFSATLALSSNFRKKLKRGLSTSKASTPDDVSSIEALSKQAGMKSNAEIVDLTKASILPEKLEESFIECSEEDKDAYLYYILSVHGQGRTIIFCTSIAALRHISSILRILGINVLTNHAQMQQRARMKVYIHRSGRTARKSLAGCSIALISPTDKSRFYSLCKSLSKENLQQFPVDHTYMSGVMNRLSLARQIDKIARKTSQENANKSWLQRNAESMGLILDTSDSEEDHVQGHKKRKATSAHLQKLQQELSDLLQCPLQPKTFSRRYLAGAGVSPLLQKQLEELAKRNASNNSSKSKNKGSGFVVIGQDRVEPLQALQNSGQEVCVNIDKEREKRRVAENWRRKKHEEKKRTQEQKRKDKRKAKEMA

SEQ ID NO: 169079 - protein, 716 aa, Zea Mays
MAEPEPLPQVSSEPTTPPQEGSGRTKTKNKKNRSKKQPKRAGADTDGLSSGASTMVEDPFFVLAGGKEGDMQDDTENMEQNEDDELILGEDDVSAWRELRLHPLLLKAMRRLGFKEPTPIQKSCFPAAAHRGKDVIGAAETGSGKTLAFGLPVLQRLLEEREKATRLQQEDEKMEERSCGSPLRALILTPTRELAKQVCDHLKDVAKFLGIHVVPIVGGLSMEKQERLLKKKPEIVVGTPGRLWEHMSMNNQHLVEADRMIERGHFRELQSIIEMLPLTNGSDEQAARTMPNCETVPILQIKKRQTFVFSATLALSSNFRKKLKRGLSTSKASTPDDVSSIEALSKQAGMKSNAEIVDLTKASILPEKLEESFIECSEEDKDAYLYYILSVHGQGRTIIFCTSIAALRHISSILRILGINVLTNHAQMQQRARMKAVDRFRESENSILVATDGFARGMDFDDVRTVIHYQLPHSTDVYIHRSGRTARKSLAGCSIALISPTDKSRFYSLCKSLSKENLQQFPVDHTYMSGVMNRLSLARQIDKIARKTSQENANKSWLQRNAESMGLILDTSDSEEDHVQGHKKRKATSAHLQKLQQELSDLLQCPLQPKTFSRRYLAGAGVSPLLQKQLEELAKRNASNNSSKSKNKGSGFVVIGQDRVEPLQALQNSGQEVCVNIDKEREKRRVAENWRRKKHEEKKRTQEQKRKDKRKAKEMA

SEQ ID NO: 169080 - protein, 379 aa, Zea Mays
MAEPEPLPQVSSEPTTPPQEGSGRTKTKNKKNRSKKQPKRAGADTDGLSSGASTMVEDPFFVLAGGKEGGFLDLEEIDEADFGIFGGVLDDVGQSVEEAGKDHGKKKKKTKKRKRGGDGEGFSGDAALVVENDQVDVEKVEKKVEDGEKGDKKGKRKMNMKKRKVKDNEMNRESDEDVASDKAEDMQDDTENMEQNEDDELILGEDDVSAWRELRLHPLLLKAMRRLGFKEPTPIQKSCFPAAAHRGKDVIGAAETGSGKTLAFGLPVLQRLLEEREKATRLQQEDEKMEERSCGSPLRALILTPTRELAKQVCDHLKDVAKFLGIHVVPIVGGLSMEKQERLLKKKPEIVVGTPGRLWEHMSMNNQHLVENDRTRPFP

SEQ ID NO: 169081 - protein, 665 aa, Zea Mays
MAEPEPLPQVSSEPTTPPQEGSGRTKTKNKKNRSKKQPKRAGADTDGLSSGASTMVEDPFFVLAGGKEGGFLDLEEIDEADFGIFGGVLDDVGQSVEEAGKDHGKKKKKTKKRKRGGDGEGFSGDAALVVENDQVDVEKVEKKVEDGEKGDKKGKRKMNMKKRKVKDNEMNRESDEDVASDKAEDMQDDTENMEQNEDDELILGEDDVSAWRELRLHPLLLKAMRRLGFKEPTPIQKSCFPAAAHRGKDVIGAAETGSGKTLAFGLPVLQRLLEEREKATRLQQEDEKMEERSCGSPLRALILTPTRELAKQVCDHLKDVAKFLGIHVVPIVGGLSMEKQERLLKKKPEIVVGTPGRLWEHMSMNNQHLVEADRMIERGHFRELQSIIEMLPLTNGSDEQAARTMPNCETVPILQIKKRQTFVFSATLALSSNFRKKLKRGLSTSKASTPDDVSSIEALSKQAGMKSNAEIVDLTKASILPEKLEESFIECSEEDKDAYLYYILSVHGQGRTIIFCTSIAALRHISSILRILGINVLTNHAQMQQRARMKAVDRFRESENSILVATDGFARGMDFDDVRTVIHYQLPHSTDVYIHRSGRTARKSLAGCSIALISPTDKSRFYSLCKSLSKENLQQFPVDHTYMSGVMNRLSLARQIDKIARKTSQ

SEQ ID NO: 169082 - protein, 628 aa, Zea Mays
MAEPEPLPQVSSEPTTPPQEGSGRTKTKNKKNRSKKQPKRAGADTDGLSSGASTMVEDPFFVLAGGKEGGFLDLEEIDEADFGIFGGVLDDVGQSVEEAGKDHGKKKKKTKKRKRGGDGEGFSGDAALVVENDQVDVEKVEKKVEDGEKGDKKGKRKMNMKKRKVKDNEMNRESDEDVASDKAEDMQDDTENMEQNEDDELILGEDDVSAWRELRLHPLLLKAMRRLGFKEPTPIQKSCFPAAAHRGKDVIGAAETGSGKTLAFGLPVLQRLLEEREKATRLQQEDEKMEERSCGSPLRALILTPTRELAKQVCDHLKDVAKFLGIHVVPIVGGLSMEKQERLLKKKPEIVVGTPGRLWEHMSMNNQHLVELHSLSFFILDEADRMIERGHFRELQSIIEMLPLTNGSDEQAARTMPNCETVPILQIKKRQTFVFSATLALSSNFRKKLKRGLSTSKASTPDDVSSIEALSKQAGMKSNAEIVDLTKASILPEKLEESFIECSEEDKDAYLYYILSVHGQGRTIIFCTSIAALRHISSILRILGINVLTNHAQMQQRARMKAVDRFRESENSILVATDGFARGMDFDDVRTVIHYQLPHSTDVGLYPQKWKDSTQVIGWLQHCVNLSY

SEQ ID NO: 169083 - protein, 619 aa, Zea Mays
MAEPEPLPQVSSEPTTPPQEGSGRTKTKNKKNRSKKQPKRAGADTDGLSSGASTMVEDPFFVLAGGKEGGFLDLEEIDEADFGIFGGVLDDVGQSVEEAGKDHGKKKKKTKKRKRGGDGEGFSGDAALVVENDQVDVEKVEKKVEDGEKGDKKGKRKMNMKKRKVKDNEMNRESDEDVASDKAEDMQDDTENMEQNEDDELILGEDDVSAWRELRLHPLLLKAMRRLGFKEPTPIQKSCFPAAAHRGKDVIGAAETGSGKTLAFGLPVLQRLLEEREKATRLQQEDEKMEERSCGSPLRALILTPTRELAKQVCDHLKDVAKFLGIHVVPIVGGLSMEKQERLLKKKPEIVVGTPGRLWEHMSMNNQHLVELHSLSFFILDEADRMIERGHFRELQSIIEMLPLTNGSDEQAARTMPNCETVPILQIKKRQTFVFSATLALSSNFRKKLKRGLSTSKASTPDDVSSIEALSKQAGMKSNAEIVDLTKASILPEKLEESFIECSEEDKDAYLYYILSVHGQGRTIIFCTSIAALRHISSILRILGINVLTNHAQMQQRARMKAVDRFRESENSILVATDGFARGMDFDDVRTVIHYQLPHSTDVEVEGQHASHWLAAALR

SEQ ID NO: 169084 - protein, 663 aa, Zea Mays
MRMLLVTKQKFIFYLADMQDDTENMEQNEDDELILGEDDVSAWRELRLHPLLLKAMRRLGFKEPTPIQKSCFPAAAHRGKDVIGAAETGSGKTLAFGLPVLQRLLEEREKATRLQQEDEKMEERSCGSPLRALILTPTRELAKQVCDHLKDVAKFLGIHVVPIVGGLSMEKQERLLKKKPEIVVGTPGRLWEHMSMNNQHLVEADRMIERGHFRELQSIIEMLPLTNGSDEQAARTMPNCETVPILQIKKRQTFVFSATLALSSNFRKKLKRGLSTSKASTPDDVSSIEALSKQAGMKSNAEIVDLTKASILPEKLEESFIECSEEDKDAYLYYILSVHGQGRTIIFCTSIAALRHISSILRILGINVLTNHAQMQQRARMKAVDRFRESENSILVATDGFARGMDFDDVRTVIHYQLPHSTDVYIHRSGRTARKSLAGCSIALISPTDKSRFYSLCKSLSKENLQQFPVDHTYMSGVMNRLSLARQIDKIARKTSQENANKSWLQRNAESMGLILDTSDSEEDHVQGHKKRKATSAHLQKLQQELSDLLQCPLQPKTFSRRYLAGAGVSPLLQKQLEELAKRNASNNSSKSKNKGSGFVVIGQDRVEPLQALQNSGQEVCVNIDKEREKRRVAENWRRKKHEEKKRTQEQKRKDKRKAKEMA

SEQ ID NO: 169085 - protein, 178 aa, Zea Mays
MLLPPLRALVTTTMVIAARRRSRRVLIMLMATMVHRRQVIVVTTATMHQHRRQAIMVITAIIIHQHRRQVLMATTVTTTHQVLTVTVPQHRYITTTNRLRLRNCIIITITLQRPPLFRAPTSLDADGQNMRMCGNNKKTIFTSWLYFCILRYASALFMVISRLINRNRVTVFLLTVAP

SEQ ID NO: 169086 - protein, 282 aa, Zea Mays
MARLFFLLLLFPLLYSSVTGLNRSDFPPSFLFGASTSSYQVEGAYLDDSKGLSNWDVFSHVPGNIDDGSNGDVAADHYHRYKDDIEMMHSIGLSSYRFSLSWSRILPKGRFGGVNQAGVKFYNSLINGLLEKGIQPFVTINHYDIPEELQERYNSWLNPEIQEDFTYFVELCFKMFGDRVKHWVTFNEPNLIVKLAYSIGAFPPNRCSEPYGKCDSGNSSTEPYIAAHNMILAHAKTVNIYRKNYKSKQGGFVGISLHLRWYEPLRNITEDHLADLGSLVLW

SEQ ID NO: 169087 - protein, 428 aa, Zea Mays
MARLFFLLLLFPLLYSSVTGLNRSDFPPSFLFGASTSSYQVEGAYLDDSKGLSNWDVFSHVPGNIDDGSNGDVAADHYHRYKDDIEMMHSIGLSSYRFSLSWSRILPKGRFGGVNQAGVKFYNSLINGLLEKGIQPFVTINHYDIPEELQERYNSWLNPEIQEDFTYFVELCFKMFGDRVKHWVTFNEPNLIVKLAYSIGAFPPNRCSEPYGKCDSGNSSTEPYIAAHNMILAHAKTVNIYRKNYKSKQGGFVGISLHLRWYEPLRNITEDHLAVSRALSFDAPWILDPLFFGDYPHQMRQILGPNLPKFTEGEKKLLKNQIDFIGTPVANTYVVPSSMEKLVMYLKQRYKSIPLYITENGYAQIANISTTAEEIINDIERSTYIRDYLTYLSFAIRLLHASIIFSCKLLSSQVIIKLCYFCAGKEQM

SEQ ID NO: 169088 - protein, 330 aa, Zea Mays
MARLFFLLLLFPLLYSSVTGLNRSDFPPSFLFGASTSSYQVEGAYLDDSKGLSNWDVFSHVPGNIDDGSNGDVAADHYHRYKDDIEMMHSIGLSSYRFSLSWSRILPKGRFGGVNQAGVKFYNSLINGLLEKGIQPFVTINHYDIPEELQERYNSWLNPEIQEDFTYFVELCFKMFGDRVKHWVTFNEPNLIVKLAYSIGAFPPNRCSEPYGKCDSGNSSTEPYIAAHNMILAHAKTVNIYRKNYKSKQGGFVGISLHLRWYEPLRNITEDHLAVSRALSFDAPWILDPLFFGDYPHQMRQILGPNLPKFTEGEKKLLKNQIDFIGVMPK

SEQ ID NO: 169089 - protein, 102 aa, Zea Mays
MHNRVGYGQRLVAQKQIVDGDTSGSFPDSARFTSDSAASMKGKEMVSGPHQAEKRSTSTSLRAETGWPANGPRMAVVRRERMENGTHMSARWRCFLGRTRGK

SEQ ID NO: 169090 - protein, 310 aa, Zea Mays
MARLFFLLLLFPLLYSSVTGLNRSDFPPSFLFGAGTSSYQPNFHAHTYCMLIRRIYLEVLAINHKSGNIDDGSNGDVAADHYHRYKDDIEMMHSIGLGSYRFSLSWSRILPKGRFGGVNQAGIKFYNSLINGLLEKGIQPLVTINHFDIPEELQERYNSWLSPEIQEDFTYFAELCFKMFGDRVKHWVTFNEPNLVVKLAYSIGAFPPNHCSEPYGKCDSGNSSTEPYIAAHNMILAHAKTVNIYRKNYKSKQGGFVGISLHLRWYEPLRNITEDHLAMRQILGPNLPKFTEGEKKLLKNQIDFIGVMPK

SEQ ID NO: 169091 - protein, 451 aa, Zea Mays
MARLFLLLLFSLLHSSVTGLRRSDFPPSFLFGAGSSSYQIEGAYLEDNKGLSNWDVFTHIKGNIDDGSNGDMATDHYHRYKDDIEMMHSIGLTSYKFSLSWSRILPKGRFGGINQAGIKFYNNLINGLLEKGIQPLVTINHYDIPEELQERYNSWLNPEIQEDFTYFAELCFKMFGDRVKHWVTFNEPNLLAKLEYFIGGFPPNRCSEPNGKCDYGNSSTEPYIAAHNMILAHAKTNNIYRKNYKSKQGGSVGITIHMRWYEPLRNITEDHLAVSRALSFEAPWFLDPLFFGDYPHQMRQILGPNLPKFTAGEEKLLKNQIDFIGVNHYQTFYVKDCIYSLCDIDPYTSEALVSESTERNGIPIGKLTQDANTYVVPSSMEKLVMYLKERYNNIPLYITENGYAQIPNISTTVEEIINDTERINYIRDYLTYLSFAIRSRCERLFCVVFDG

SEQ ID NO: 169092 - protein, 509 aa, Zea Mays
MARLFLLLLFSLLHSSVTGLRRSDFPPSFLFGAGSSSYQIEGAYLEDNKGLSNWDVFTHIKGNIDDGSNGDMATDHYHRYKDDIEMMHSIGLTSYKFSLSWSRILPKGRFGGINQAGIKFYNNLINGLLEKGIQPLVTINHYDIPEELQERYNSWLNPEIQEDFTYFAELCFKMFGDRVKHWVTFNEPNLLAKLEYFIGGFPPNRCSEPNGKCDYGNSSTEPYIAAHNMILAHAKTNNIYRKNYKSKQGGSVGITIHMRWYEPLRNITEDHLAVSRALSFEAPWILDPLFFGDYPHQMRQILGPNLPKFTEGEKKLLKNQIDFIGVNHYQTFYVKDCIYSPCDMDAYPSEALVSISTERNGIPIGKPTPVANTYAVPSSMEKLVMYLNQRYKNIPLYITENGYAQIANISTTTEEIINDTERSTYIRDYLTYLSFAIRKGADVRGYFVWSLMDNFEWISGYTVKYGLCHVNFKSLKRTPKLSAKWYSKFIKGYEQIEMASEDLPKYMVS

SEQ ID NO: 169093 - protein, 788 aa, Zea Mays
MHSASAALVRAAPKPWPEQHPLRFFPATSKAAGELHPTTYYTTLLASLSRECRHAHHPFDAGLHRTHQARACGVLHARILRLGLPLRGRLGDALVDLYGRSGRVGYAWRALACCTGAPASSAAASSVLSCHARSGSPRDVLDAFQRIRCSIGSTPDQFGIAVVLSACSRLGALEHGRQVHCDVLKSGFCSSVFCQAGLVDMYAKCGEVDDARRMFDGIACPDTICWTSMIAGYHRVGRYQQALALFSRMEKMGSVPDQVTCVTIISTLASMGRLGDARTLLKRIRMTSTVAWNAVIASYSQSGLDSEVFGLYKDMKKQGLMPTRSTFASILSAAANMTAFDEGRQIHATAVKHGLDANVFVGSSLINLYVKHGCISDAKKVFDFSTEKNIVMWNAILYGFVQNELQEETIQMFQYMRRADLEADDFTFDTSLGISLVGIYLKCKLLEDANKLLEEVPDHKNLVEWTATISGYAQNGYSVQSLVMFWRMRSYDVRSDEATFTSVLKACSEMAALTDGKEIHGLIVKSGFVSYETATSALMDMYSKCGDVISSFEIFKELKNRQNIMPWNSMIVGFAKNGYANEALLLFQKMQESQIKPDDVTLLGVLIACSHAGLISEGLHFFDSMSQVYGIVPRVDHYACLIDLLGRGGHLQKAQEVIDQLPFRADGVIWATYLAACQMHKDEERGKVAAKKLVEMEPQSSSTYVFLSSLHAAAGNWVEAKVAREAMREKGVMKFPGCSWITVGNKQSVFVVQDTHHPDALSIYKMLDDLTGMMNKDGRIKECLLEGQ

SEQ ID NO: 169094 - protein, 393 aa, Zea Mays
MLLQGGTGIPHLKWFGVEGQYNVMVIDLLGPSLEDLFNYCSRKFSLKTVLMLADQMISRVEYMHTRGFLHRDIKPDNFLMGLGRKANQVFVIDYGLAKKYRDLQTHKHIPYRENKNLTGTARYASVNTHLGVEQSRRDDLESLGYVLMYFLRGSLPWQGLKAGTKKQKYDRISEKKMLTPVEVLCKSYPSEFTAYFHYCRSLRFEDKPDYSYLKRLFRDLFIREGYQLDYVFDWTIMKYPQFRDKSKIQSSGKMSGLAGPSAERTDRTAAEALFRRTGSGSGHNREHTKHRSLLESLMPSKVAVDSDKARPQSSSRNGSTSRRAVISSSKPSSSGDLSDPNRLGGRLAPSSSSRPPTAQREIRSSSLSKIGRSSHDDAIRNLELLSLGADKRK

SEQ ID NO: 169095 - protein, 246 aa, Zea Mays
MYFLRGSLPWQGLKAGTKKQKYDRISEKKMLTPVEVLCKSYPSEFTAYFHYCRSLRFEDKPDYSYLKRLFRDLFIREGYQLDYVFDWTIMKYPQFRDKSKIQSSGKMSGLAGPSAERTDRTAAEALFRRTGSGSGHNREHTKHRSLLESLMPSKVAVDSDKARPQSSSRNGSTSRRAVISSSKPSSSGDLSDPNRLGGRLAPSSSSRPPTAQREIRSSSLSKIGRSSHDDAIRNLELLSLGADKRK

SEQ ID NO: 169096 - protein, 370 aa, Zea Mays
MVIDLLGPSLEDLFNYCSRKFSLKTVLMLADQMISRVEYMHTRGFLHRDIKPDNFLMGLGRKANQVFVIDYGLAKKYRDLQTHKHIPYRENKNLTGTARYASVNTHLGVEQSRRDDLESLGYVLMYFLRGSLPWQGLKAGTKKQKYDRISEKKMLTPVEVLCKSYPSEFTAYFHYCRSLRFEDKPDYSYLKRLFRDLFIREGYQLDYVFDWTIMKYPQFRDKSKIQSSGKMSGLAGPSAERTDRTAAEALFRRTGSGSGHNREHTKHRSLLESLMPSKVAVDSDKARPQSSSRNGSTSRRAVISSSKPSSSGDLSDPNRLGGRLAPSSSSRPPTAQREIRSSSLSKIGRSSHDDAIRNLELLSLGADKRK

SEQ ID NO: 169097 - protein, 244 aa, Zea Mays
MEHVVGGKFKLGKKIGSGSFGELYLAVNVQNGEEVAVKLESVTSRHPQLHYESKLYMLLQGGTGIPHLKWFGVEGQYNVMVIDLLGPSLEDLFNYCSRKFSLKTVLMLADQMISRVEYMHTRGFLHRDIKPDNFLMGLGRKANQVFVIDYGLAKKYRDLQTHKHIPYRENKNLTGTARYASVNTHLGVEQSRRDDLESLGYVLMYFLRGSLPWQGLKAGTKKQKYDRISEKKMLTPVEITTIRR

SEQ ID NO: 169098 - protein, 243 aa, Zea Mays
MSDAAKLTASEWYFFSFRDRKYATGSRTNRATKTGYWKATGKDREVRSPATRAVVAMRKTLVFYQGRAPNGVKSCWVMHEFRLDSPHTPPKEDWVLCRVFQKRKDSEQDNGGGSSSPPTFAGASSQGVVLDLPDDQQPSMTMAGAYVAVDHHQPGSSAVGFALPPHAQDNGLGDGGLDALLMNGATMWQYSSSALADHFPPEEVTAAPMMGLGSRGGGDGCSFFYDSGFDDMANMGFPQGWMG

SEQ ID NO: 169099 - protein, 360 aa, Zea Mays
MASKVVDLRSDTVTKPSEAMRAAMAAADVDDDVLGADPTAHRFEAEMAAVMGKEAALFVPSGTMGNLISVLVHCDVRGSEAILGDNSHIHVYENGGISTIGGVHPRTVKNNPDGTMDIDKIVAAIRHPDLHYPTTRLICLENTHGNTGGKCLSVEYTDKVGEIAKSHGLKLHIDGARIFNASVALGVPVDRLVKAADSVSVCLSKGLGAPVGSVIVGSKAFIDKARILRKTLGGGMRQVGVLCAAAHVAVRDTVGKLADDHRKAKALAEGLKKIEQITVDSASVETNMVFFEVMDPRISPDKLCQVLEQDNVLALPANSKSIRFVIHYQISDADVGYALACVEYDFMFSESNQRATGRQY

SEQ ID NO: 169100 - protein, 547 aa, Zea Mays
MVTNVVDLRSDTVTKPSDAMRAAMAAADVDDDVLGADPTARRFEAEMAALLGKEAALFVPSGTMANLVSVLAHCDVRGSEVILGDASHIHVYENGGISTLGGVHPRTVPNNPDGTMDLARIVDAIRNPDGALLYPTTRLICLENTHANSGGKCLSVEYTDKVGEIAVNHGLKLHIDGARIFNASVALGVPVHRLVKAADSVSVCLSKGLGAPIGSVVVGSEAFIDKARILRKTLGGGMRQVGVLCAAAYVAVRDTVGKLADDHRKAKALAEGLKKIKQLTVDSSSVETNMVFFDIVDPRISPSKLCQVLEQRNVLAMPASSKSTGGKCLSVEYTDKVGEIAKSHGLKLHIDGARIFNASVALGVPVDRLVKAADSVSVCLSKGLGAPVGSVIVGSKAFIDKARILRKTLGGGMRQVGVLCAAAHVAVRDTVGKLADDHRKAKALAEGLKKIEQITVDSASVETNMVFFEVMDPRISPDKLCQVLEQDNVLALPANSKSIRFVIHYQISDADVGYALACVEKAIKELLEGSTELGHSINGATKSSYGH

SEQ ID NO: 169101 - protein, 355 aa, Zea Mays
MVTNVVDLRSDTVTKPSDAMRAAMAAADVDDDVLGADPTARRFEAEMAALLGKEAALFVPSGTMANLVSVLAHCDVRGSEVILGDASHIHVYENGGISTLGGVHPRTVPNNPDGTMDLARIVDAIRNPDGALLYPTTRLICLENTHANSGGKCLSVEYTDKVGEIAVNHGLKLHIDGARIFNASVVCLSKGLGAPIGSVVVGSEAFIDKARILRKTLGGGMRQVGVLCAAAYVAVRDTVGKLADDHRKAKALAEGLKKIKQLTVDSSSVETNMVFFDIVDPRISPSKLCQVLEQRNVLAMPASSKSVRFVIHYQISDSDVQYALTCVEKAVEELLKGGTKLEHLTNGTAKNSYWH

SEQ ID NO: 169102 - protein, 68 aa, Zea Mays
MGAPGQFGAPPDQSGVPPDTHCPVSDASPCHPTVRVRSSGDRWNFVLLRHRIVRCHTGQSGAPLTSLL

SEQ ID NO: 169103 - protein, 71 aa, Zea Mays
MWLVAKSQPQQAYIERSLIDTDGALHRLISRCKPPVWSHINYLTQVHSHITITSNQNKFQNPITLSRAKRH

SEQ ID NO: 169104 - protein, 394 aa, Zea Mays
MYGVGGGFNAPSTAASRRRNPGDEEEDEEDEGGEGRVLEAWERAYADERSWESLQEDESGLLRPVDTKTLVHAQYRRRLLLRSAAAAAARIQKGLIRYLYIVIDLSRAASEMDYRPSRMAVVAKHAEAFIREFFDQNPLSHVGLVTIKDGIAHRLTEIGGSPESQIKALMGKLECSGDSSLQNALDLVHGYLDQVPSYGHKEVLILYSALNTFDPGDITETIAKCKKSKIRCSVIGLAAEIFICKHLCEETGGSYTVALDESHFKELLLEHAPPPPAIAEYAAANLIKMGFPQRGAEELISICSCHKKIKSGAEGYICPRCKVNVCELPTECRTCGLTLVSSPHLARSYHHLFPVPPFDEVTPVPNRIQRGGQICFSCQQSLYNPAQASTPPMS

SEQ ID NO: 169105 - protein, 113 aa, Zea Mays
MIKSEAGLHYGYCLVPFLSKTSCPFCVRVKQLFEKLGASYKAIELDKESDGAELQNALKEWTGQRTVPNVFINGKHIGGCDDTMALNNDGKLVPLLTEAGAIAGSASKTTITA

SEQ ID NO: 169106 - protein, 385 aa, Zea Mays
MDALLVTTTFLVPVVALLLGSGSGSAAALPRAFFVFGDSLVDNGNNNYLMTTARADAPPYGIDFPTHMATGRFSNGLNIPDIISEHLGSQPALPYLSPDLRGAQLLVGANFASAGVGILNDTGIQFVNIIRIGQQLRNFQEYQQRLAAFVGDEDAARQAVSDALVLITLGGNDFVNNYYLVPFSVRSRQFAIQDYVPYLISEYRKILTRLYELGARRVVVTGTGMIGCVPAELAMHSVDGECARDLTEAADLFNPQLVQMLSELNADIGADVFIAANTNRVSFDFMFNPQDYGGVLRAGPLQRDRAMHAGVQRVPQPGRVRVLGRVPPHGARQPDHRRPVHARIHRPHQPHEHQHHPRHGQQELGPARGVPRPPSIHPSISIPAG

SEQ ID NO: 169107 - protein, 773 aa, Zea Mays
MTTHLPTKERSRSPYLSNMSSESMSGLSLPYSRRSSERLQEGGRMDESYDIRSTRRMPQMHFDRNYVDMPYRDASHRDSHNNNVPNFQRPLLRKQVMSRASASGRHSFDDSHVPSGDVPSYTDSLASLNDALSEGLSPSSDWVARVSAFEFIRNLLKQGQKGIQEITQNFEKVMKLFFRHLDDPHHKVAQAAFSTLAEIIPASKKPFESYVERILPYVFSRLIDPKELVKKPCSITLEVVGRTYAIDMLLPALVRSLDEQRSPKAKLAVLEFANKSFSKYTVDSDGYSNSGFLKLWLSKLAPLVNEKNAKLKEASISGIISVYSHFDSTAVLNFILSLSVEDQNLLRRALKIKTPRIEVDLVNYLQSKKERPRPKSYDQVDFGTSEDGYALTSKKSYPFGRFSSSSLDAEGGKMISSMHEPVLHNVSIGRTTSDMSMDHAIQSLESSTGAEVHLTRSREPKNNINSVVEAARSWTNYTEKTDASLDGETATSTPRLDVSRFVTSDGHNTVGSTTEESVQEGDMIVNLSSIKTSLQMDNGLSVPQLLYQISNDTEVSSSEKREALQQLVDASLDNNSSIWAKYFNQILKVVLEVLDDSDSSMRELALSLITEMLNYQKDAIEDSMEIVFEKLLHVTKDAVAKISNEANQCLNVLLAKYNPFTCLAITVPLLVSDDEKMLVVCINCLTKLVGRLSQEELIVQLPTFLPALFDAFNNQSPDVRKTVVFCLVDIYIMLGKAFAPYLEGLSSTQLRLVTIYANRISQARSGKPIDSNQ

SEQ ID NO: 169108 - protein, 903 aa, Zea Mays
MIKCCVADAMSEVRATARTCYRMFAKTWPERSRRLFMLFDPAIQRIINDEDGGVHKRYASPSLRDRVVQPSRASSHSSGTYVPGYGTSAIVAMDKSAAISSDSSFPSTNLRLSQSKTIGRSSERSLESVLSSSKEKVSAIESLLKGVSMSGQNFSAARSTSLDLGVDPPSSRDPPVLLAAPASNVLSLQNSALLDSSLPTIPPSSRNGGSRLLETMTTHLPTKERSRSPYLSNMSSESMSGLSLPYSRRSSERLQEGGRMDESYDIRSTRRMPQMHFDRNYVDMPYRDASHRDSHNNNVPNFQRPLLRKQVMSRASASGRHSFDDSHVPSGDVPSYTDSLASLNDALSEGLSPSSDWVARVSAFEFIRNLLKQGQKGIQEITQNFEKVMKLFFRHLDDPHHKVAQAAFSTLAEIIPASKKPFESYVERILPYVFSRLIDPKELVKKPCSITLEVVGRTYAIDMLLPALVRSLDEQRSPKAKLAVLEFANKSFSKYTVDSDGYSNSGFLKLWLSKLAPLVNEKNAKLKEASISGIISVYSHFDSTAVLNFILSLSVEDQNLLRRALKIKTPRIEVDLVNYLQSKKERPRPKSYDQVDFGTSEDGYALTSKKSYPFGRFSSSSLDAEGGKMISSMHEPVLHNVSIGRTTSDMSMDHAIQSLESSTGAEVHLTRSREPKNNINSVVEAARSWTNYTEKTDASLDGETATSTPRLDVSRFVTSDGHNTVGSTTEESVQEGDMIVNLSSIKTSLQMDNGLSVPQLLYQISNDTEVSSSEKREALQQLVDASLDNNSSIWAKYFNQILKVVLEVLDDSDSSMRELALSLITEMLNYQKDAIEDSMEIVFEKLLHVTKDAVAKISNEANQCLNVLLAKYNPFTCLAITVPLLVSDDEKMLVVCINCLTKL

SEQ ID NO: 169109 - protein, 1381 aa, Zea Mays
MEAALEAARAKDTKERLAGVERLHEALDAAARRGLTAAEVTALVDTCMDLTRDANFRIAQGGLQALSAAAVVAGDHFKIHLNALVPAAVERLGDGKQPVRDAARQLLITLMEVSSPTIIVERAGSYAWTHKSWRVREEFVRTVATAIGLFASTEISLQRVLLSPVLQLMNDSNQSVRDAAIYCIEEMYKHMGSQFHEELQRHNLPSYMLKEINSRLDKIEPKVRSSDTAMQYKAVESRSVSANPKRGSPRTKSTPRESTLYGGDTDVTENPVEPVKVHSEKELLREFEKIAATLSPEKDWSLRIAALQRIEALVYGGAIDYPSFLMLLKQLVPPLSNQLCDRRSSIVKQACHLLNILSKELLGDFEPCAELFIPMLFKLVVITVLVIAESADTCIKTILRNCKVARILPRIVDTAKNDRSAILRARCCEYALLILEYWADASEIQRSADLYEDMIKCCVADAMSEVRATARTCYRMFAKTWPERSRRLFMLFDPAIQRIINDEDGGVHKRYASPSLRDRVVQPSRASSHSSGTYVPGYGTSAIVAMDKSAAISSDSSFPSTNLRLSQSKTIGRSSERSLESVLSSSKEKVSAIESLLKGVSMSGQNFSAARSTSLDLGVDPPSSRDPPVLLAAPASNVLSLQNSALLDSSLPTIPPSSRNGGSRLLETMTTHLPTKERSRSPYLSNMSSESMSGLSLPYSRRSSERLQEGGRMDESYDIRSTRRMPQMHFDRNYVDMPYRDASHRDSHNNNVPNFQRPLLRKQVMSRASASGRHSFDDSHVPSGDVPSYTDSLASLNDALSEGLSPSSDWVARVSAFEFIRNLLKQGQKGIQEITQNFEKVMKLFFRHLDDPHHKVAQAAFSTLAEIIPASKKPFESYVERILPYVFSRLIDPKELVKKPCSITLEVVGRTYAIDMLLPALVRSLDEQRSPKAKLAVLEFANKSFSKYTVDSDGYSNSGFLKLWLSKLAPLVNEKNAKLKEASISGIISVYSHFDSTAVLNFILSLSVEDQNLLRRALKIKTPRIEVDLVNYLQSKKERPRPKSYDQVDFGTSEDGYALTSKKSYPFGRFSSSSLDAEGGKMISSMHEPVLHNVSIGRTTSDMSMDHAIQSLESSTGAEVHLTRSREPKNNINSVVEAARSWTNYTEKTDASLDGETATSTPRLDVSRFVTSDGHNTVGSTTEESVQEGDMIVNLSSIKTSLQMDNGLSVPQLLYQISNDTEVSSSEKREALQQLVDASLDNNSSIWAKISNEANQCLNVLLAKYNPFTCLAITVPLLVSDDEKMLVVCINCLTKLVGRLSQEELIVQLPTFLPALFDAFNNQSPDVRKTVVFCLVDIYIMLGKAFAPYLEGLSSTQLRLVTIYANRISQARSGKPIDSNQ

SEQ ID NO: 169110 - protein, 262 aa, Zea Mays
MGAVNSETLLGGFIKERQQKDQIEVSVATKFAALPWRFGRGSVLSALKKSLDRLGLASVELYQLHWPGIWGNEGYLDGLADAYEQGLVKAVGVSNYNEKRLRDAHARLKKRGVPLAANQVNYSLIYRTPELNGVKAACDELGITLIAYSPIAQGVLTGKYTPENPPTGPRANTYTPEFLAKLQPLMNRIKEIGASYGKSPTQVSLNWLTCQGNVVPIPGAKNASQAKEFAGALGWSLTGDEVEELRTLAREIKGIRMPIEES

SEQ ID NO: 169111 - protein, 199 aa, Zea Mays
MALQVTGGVGCCCPPGSARRLPQAAALCRPPRAVVSGATRVVEEDEGKVRLGGSGVAVTKLGIGAWSWGDTTYWNDSEWDDRRLREAQDAFDASIDNGMTFFDTAEVYGTALMGAVNSETLLGGFIKERQQKDQIEVSVATKFAALPWRFGRGSVLSALKKSLDRLGLASVELYQLHWLVLPLSMQDILMVSRMLMSKA

SEQ ID NO: 169112 - protein, 291 aa, Zea Mays
MEHPPAQLPLKATGGDRREEEELSCGSREGNKQAARARSWGAGGSDLLASKARPERRFERSCDMGEQENNKIGGSGNDNAMAVDEAGAGAAANKGKSLGAADPRLQAISDAIRVVPHFPKPGIMFNDITELLLRPGVFRDAVDMFVERYRGMGIAAVAGIEARGFIFGPAIALAIGAKFIPLRKPKKLPGEVFSESYVLEYGMDCLEMHVGAIEPGERVVVVDDLVATGGTLSAAIRLLERAGANVVECACLIGLPKFKVPKSKFVQKSYQMYISFFSRCTNMLLTCTSVS

SEQ ID NO: 169113 - protein, 326 aa, Zea Mays
MVVPAAGFQSKDGVLTPLSLSLSQTHPLGATATPRAVPGLGLPCLFIYICRHPPAQLPLKATGGDRREEEELSCGSREGNKQAARARSWGAGGSDLLASKARPERRFERSCDMGEQENNKIGGSGNDNAMAVDEAGAGAAANKGKSLGAADPRLQAISDAIRVVPHFPKPGIMFNDITELLLRPGVFRDAVDMFVERYRGMGIAAVAGIEARGFIFGPAIALAIGAKFIPLRKPKKLPGEVFSESYVLEYGMDCLEMHVGAIEPGERVVVVDDLVATGGTLSAAIRLLERAGANVVECACLIGLPKFKDFYKLNGKPVYILVESRK

SEQ ID NO: 169114 - protein, 191 aa, Zea Mays
MMHFFLNSLFDAIPLLPLEKPIIHRDVKSSNILLTEAFMAKVADFGFARTGPTEPDQSQIETDVRGTAGYLDPEYMGTSHLTIKSDVFSYGILLLEILSGRRPIERTRGPAERITVRWAFNKYRRGNVRGILDPMLTEAVNEDILNKIFDVAFQCVAPTREDRPSMKEVVERLWKIRRDHTKIQRIAELTL

SEQ ID NO: 169115 - protein, 171 aa, Zea Mays
MVAATTAGMFLVCFESLCPCFGSKSKDGSEDHVLAEYSNSLNSSEMRSISDRIAASPLRVPASPSRFSLSSPPSYFGKVYRAALLDGRVVAIKRAKKVTYFCPGNYSSNFPSYNDLVLARMVPVWVSYECSTCVEAICTVTLSFTISSVYTYNYSSALVHSCMQCILGNQD

SEQ ID NO: 169116 - protein, 173 aa, Zea Mays
MQPIIHRDVKSSNILLTEAFMAKVADFGFARTGPTEPDQSQIETDVRGTAGYLDPEYMGTSHLTIKSDVFSYGILLLEILSGRRPIERTRGPAERITVRWAFNKYRRGNVRGILDPMLTEAVNEDILNKIFDVAFQCVAPTREDRPSMKEVVERLWKIRRDHTKIQRIAELTL

SEQ ID NO: 169117 - protein, 315 aa, Zea Mays
MNSSEMRSISDRIAASPLRVPASPSRFSLSSPPSYFGKVYRAALLDGRVVAIKRAKKENFLSLRAEFSNEVALLKSIEHKNLVQLLGYIDKANERILITEYISNGTLREHLDGQHGLVLGFNQRLEIAIDVAHGLTYLHLYAEKPIIHRDVKSSNILLTEAFMAKVADFGFARTGPTEPDQSQIETDVRGTAGYLDPEYMGTSHLTIKSDVFSYGILLLEILSGRRPIERTRGPAERITVRWAFNKYRRGNVRGILDPMLTEAVNEDILNKIFDVAFQCVAPTREDRPSMKEVVERLWKIRRDHTKIQRIAELTL

SEQ ID NO: 169118 - protein, 153 aa, Zea Mays
MAKVADFGFARTGPTEPDQSQIETDVRGTAGYLDPEYMGTSHLTIKSDVFSYGILLLEILSGRRPIERTRGPAERITVRWAFNKYRRGNVRGILDPMLTEAVNEDILNKIFDVAFQCVAPTREDRPSMKEVVERLWKIRRDHTKIQRIAELTL

SEQ ID NO: 169119 - protein, 284 aa, Zea Mays
MQFDTNNDGLISFAEYIFFVTLLSIHESNFTVAFKMFDIDHSGVIDREEFKKIMALMRSFNRQGSTHKDGLRIGLKVGKPVENGGVVEYFFGSDGNEPLHFDKFSKILKELHDEIIQLEFSHYDVKSSKTIPAKDFALSMVASADMNHINKLLDRVDSLVKEPDLKDIRITFEEFKAFADLRRRLEPLSMAIFAYGKLNGLLTKEDLKRAAQHVCGVDLTDRVVDIIFHVFDTNQDGNLSPEEFLRALQRRETDIREPTIPGPLGFLSCWFSGRKCSSLKHVVI

SEQ ID NO: 169120 - protein, 430 aa, Zea Mays
MAPLRRASRLLRSAVCRLRSPAPARAFSSAAATETGAVIAAAAVAVASSGLGLWLKPPSLADSGEAPGDQISVACAGATEAREEKGWFLFADSFRRRVFFNYEKRIRLLSPPEKIFEYFASVRNREGEVYMLPADLMRAVVPVFPPSESTVVREGRLRGERSPGELHCAPSEFFMQFDTNNDGLISFAEVIDREEFKKIMALMRSFNRQGSTHKDGLRIGLKVGKPVENGGVVEYFFGSDGNEPLHFDKFSKILKELHDEIIQLEFSHYDVKSSKTIPAKDFALSMVASADMNHINKLLDRVDSLVKEPDLKDIRITFEEFKAFADLRRRLEPLSMAIFAYGKLNGLLTKEDLKRAAQHVCGVDLTDRVVDIIFHVFDTNQDGNLSPEEFLRALQRRETDIREPTIPGPLGFLSCWFSGRKCSSLKHVVI

SEQ ID NO: 169121 - protein, 257 aa, Zea Mays
MSMFNHLTCLLMVKEGVIDREEFKKIMALMRSFNRQGSTHKDGLRIGLKVGKPVENGGVVEYFFGSDGNEPLHFDKFSKILKELHDEIIQLEFSHYDVKSSKTIPAKDFALSMVASADMNHINKLLDRVDSLVKEPDLKDIRITFEEFKAFADLRRRLEPLSMAIFAYGKLNGLLTKEDLKRAAQHVCGVDLTDRVVDIIFHVFDTNQDGNLSPEEFLRALQRRETDIREPTIPGPLGFLSCWFSGRKCSSLKHVVI

SEQ ID NO: 169122 - protein, 217 aa, Zea Mays
MAPLRRASRLLRSAVCRLRSPAPARAFSSAAATETGAVIAAAAVAVASSGLGLWLKPPSLADSGEAPGDQISVACAGATEAREEKGWFLFADSFRRRVFFNYEKRIRLLSPPEKIFEYFASVRNREGEVYMLPADLMRAVVPVFPPSESTVVREGRLRGERSPGELHCAPSEFFMQFDTNNDGLISFAEYIFFVTLLSIHESNFTVAFKMFDIDHSG

SEQ ID NO: 169123 - protein, 238 aa, Zea Mays
MSMFNHLTCLLMVKEGQGSTHKDGLRIGLKVGKPVENGGVVEYFFGSDGNEPLHFDKFSKILKELHDEIIQLEFSHYDVKSSKTIPAKDFALSMVASADMNHINKLLDRVDSLVKEPDLKDIRITFEEFKAFADLRRRLEPLSMAIFAYGKLNGLLTKEDLKRAAQHVCGVDLTDRVVDIIFHVFDTNQDGNLSPEEFLRALQRRETDIREPTIPGPLGFLSCWFSGRKCSSLKHVVI

SEQ ID NO: 169124 - protein, 458 aa, Zea Mays
MAPLRRASRLLRSAVCRLRSPAPARAFSSAAATETGAVIAAAAVAVASSGLGLWLKPPSLADSGEAPGDQISVACAGATEAREEKGWFLFADSFRRRVFFNYEKRIRLLSPPEKIFEYFASVRNREGEVYMLPADLMRAVVPVFPPSESTVVREGRLRGERSPGELHCAPSEFFMQFDTNNDGLISFAEYIFFVTLLSIHESNFTVAFKMFDIDHSGVIDREEFKKIMALMRSFNRQGSTHKDGLRIGLKVGKPVENGGVVEYFFGSDGNEPLHFDKFSKILKELHDEIIQLEFSHYDVKSSKTIPAKDFALSMVASADMNHINKLLDRVDSLVKEPDLKDIRITFEEFKAFADLRRRLEPLSMAIFAYGKLNGLLTKEDLKRAAQHVCGVDLTDRVVDIIFHVFDTNQDGNLSPEEFLRALQRRETDIREPTIPGPLGFLSCWFSGRKCSSLKHVVI

SEQ ID NO: 169125 - protein, 443 aa, Zea Mays
MRNFPLSRGTVAGLIKGYVAVSAAVYTETFNGMLGNSPTNLLMLLALGIPTACIVVMYFVRPCTPSLDEDNSTEHSHFMYTQISSVVLGIYLMVATILGDTLKLSQAVTYLLFGIMILLLLAPLAIPIKMTLYPNKQTKEKASTLAPSYSTDSLSGADPENSQPLLGSASTTLATGTNESDDSTDLDLLLAEGEGAVNLKKKRGPRRGDDFTFLEALVKADFWLLFVVYFCGVGTGVTVLNNLAQIGMSVGANDTTILLCLFGFCNFAGRILGGSVSEYFVRSRMLPRPFWMMCTQIIMVVTFLLFATGLHSLIYVSTTLLGICYGVQFAVMIPTVSELFGLRDFGLMYNFMLLVNPLGAFFFSALLAGYIYDKEAARQHPGVLEPSDCYGPDCFRLTFYVCAVVCCCGTLLGVFFISRIKPVYQMLYASGSFRHPRSQQQLH

SEQ ID NO: 169126 - protein, 471 aa, Zea Mays
MAGGGGGPGPGRVKAGSRPPWVGLAAAVWVQVAAGSAYVFPLYSHAVKEALGYNQQALTMLGVGNDVGENVGLVPGLLANRLPPWLILVIGSACAFFGFGTLWLAVTKTVAMPYWVLWIALCIGTNSSAWLGTAALVTNMRNFPLSRGTVAGLIKGYVAVSAAVYTETFNGMLGNSPTNLLMLLALGIPTACIVVMYFVRPCTPSLDEDNSTEHSHFMYTQISSVVLGIYLMVATILGDTLKLSQAVTYLLFGIMILLLLAPLAIPIKMTLYPNKQTKEKASTLAPSYSTDSLSGADPENSQPLLGSASTTLATGTNESDDSTDLDLLLAEGEGAVNLKKKRGPRRGDDFTFLEALVKADFWLLFVVYFCGVGTGVTVLNNLAQIGMSVGANDTTILLCLFGFCNFAGRILGGSVSEYFVRSRMLPRPFWMMCTQIIMVLFLLATSMTRRQQGSTQVYWSLPTAMGLTVSD

SEQ ID NO: 169127 - protein, 282 aa, Zea Mays
MRNFPLSRGTVAGLIKGYVAVSAAVYTETFNGMLGNSPTNLLMLLALGIPTACIVVMYFVRPCTPSLDEDNSTEHSHFMYTQISSVVLGIYLMVATILGDTLKLSQAVTYLLFGIMILLLLAPLAIPIKMTLYPNKQTKEKASTLAPSYSTDSLSGADPENSQPLLGSASTTLATGTNESDDSTDLDLLLAEGEGAVNLKKKRGPRRGDDFTFLEALVKADFWLLFVVYFCGVGTGVTVLNNLAQIGMSVGANDTTILLCLFGFCNFAGRILGGSVSEYFVR

SEQ ID NO: 169128 - protein, 909 aa, Zea Mays
MGQSDPILEDEVKYRYYTIIQLYRRATLQDNAQRVSPVSFELEAALKLARYLCRRELAKEVSDLLMGAADGAKALIDASDRLILYIEIARLFGTLGYKRKAAFFSRQVAQLYLQQDNAYAAMSAMQVLTMTTNAYHVQSRKTMKMNHDPSKEPRAGNTDSGKVHPQSIVSLFESQWSTLQMVVLREILISSIRAADPLSSWSAAARLLRSFYPLITPAGQSGLASSLANAADKLPTGTRCADPCLPFIRLHSFPLHPSQRDIVKRNPHKKEWWAGAGPSGPFIYTPFSKAGASGTSKQELSWIVGEPVQVMVELANPCSFDIVVESIYLSVHSGNFDAFPVSVSLPPNTSKLVLLSGIPTKVGQISIPGCIVHCFGVITEHLFKEVDCLLLGAAQGLVLSDPFRCCGSSKFKSVNFPSISVVPPLPLLIANVVGGDGSILLYEGEIRDVLITLTNAGTVPVEEANVALSGKNQDSVISIAHSTWKSALPIKPGGEVTFAVTLRAWHLSSADLEADGSRSPVNSRRIAREGTNPFLDIHYAGPAANLENGDVSLLPGRRLVVPLNICVVQGMRLVRARLLSMEIPARFTETHLKPVSGKDINLLKVDPYKGSWGLRLLELELFNPTDVVFYVDVAVHLDDTDVDQEVISDGDAACHKTRIDRDYSARVLIPLENFKLPVLDASFFVKASSSDEPLGSRAAAIAERNAKAELNASINNLISKIKVKWHSGRNSSGELNIKDAIQTALQASIMDILLPDPLMFSFKLVTNGTVVNVDSPKDSGNVLRCKDPISAHEMTHMEVQIRNNTKEIIRMNLSISCKDVAGENCFDENSATVLWAGVLSDIHLEVPPLQEVVHPFSMYFLVPGDYSLQAASVIIDATDVLRARAKAESPDEPILCRGSPFHIRVVGTA

SEQ ID NO: 169129 - protein, 659 aa, Zea Mays
MEPGLSIESGSAIRVAVLPVGGPIPPPRLREYAALVARHARVDLASLRTYYAEHQKSPFQHQPWETGCLRLKFVLGGCVPSPWEDFQSSRKVLAVIGICHLPSSPDLDHVAADFIDAARSYPSALANRCFAFCPTDAQLSAKKRDDIIMFPPSDQQSLELHMLTMIQDLAASLLMEFEKWVLRAESTGTILKTPLDSQSSLGSEEVIKAKKRRLGRAQKIIGDYCLLAGSPVDANAHYTTAIELARLTGDVFWHAGALEGSVCALVVDRMGQSDPILEDEVKYRYYTIIQLYRRATLQDNAQRVSPVSFELEAALKLARYLCRRELAKEVSDLLMGAADGAKALIDASDRLILYIEIARLFGTLGYKRKAAFFSRQVAQLYLQQDNAYAAMSAMQVLTMTTNAYHVQSRKTMKMNHDPSKEPRAGNTDSGKVHPQSIVSLFESQWSTLQMVVLREILISSIRAADPLSSWSAAARLLRSFYPLITPAGQSGLASSLANAADKLPTGTRCADPCLPFIRLHSFPLHPSQRDIVKRNPHKKEWWAGAGPSGPFIYTPFSKAGASGTSKQELSWIVGEPVQVMVELANPCSFDIVVESIYLSVHSGNFDAFPVSNTYSKRSIVCSLELHKGLSFLILSDAVALASSRVSTFLAFLLFLLCHC

SEQ ID NO: 169130 - protein, 894 aa, Zea Mays
MGQSDPILEDEVKYRYYTIIQLYRRATLQDNAQRVSPVSFELEAALKLARYLCRRELAKEVSDLLMGAADGAKALIDASDRLILYIEIARLFGTLGYKRKAAFFSRQVAQLYLQQDNAYAAMSAMQVLTMTTNAYHVQSRKTMKMNHDPSKSIVSLFESQWSTLQMVVLREILISSIRAADPLSSWSAAARLLRSFYPLITPAGQSGLASSLANAADKLPTGTRCADPCLPFIRLHSFPLHPSQRDIVKRNPHKKEWWAGAGPSGPFIYTPFSKAGASGTSKQELSWIVGEPVQVMVELANPCSFDIVVESIYLSVHSGNFDAFPVSVSLPPNTSKLVLLSGIPTKVGQISIPGCIVHCFGVITEHLFKEVDCLLLGAAQGLVLSDPFRCCGSSKFKSVNFPSISVVPPLPLLIANVVGGDGSILLYEGEIRDVLITLTNAGTVPVEEANVALSGKNQDSVISIAHSTWKSALPIKPGGEVTFAVTLRAWHLSSADLEADGSRSPVNSRRIAREGTNPFLDIHYAGPAANLENGDVSLLPGRRLVVPLNICVVQGMRLVRARLLSMEIPARFTETHLKPVSGKDINLLKVDPYKGSWGLRLLELELFNPTDVVFYVDVAVHLDDTDVDQEVISDGDAACHKTRIDRDYSARVLIPLENFKLPVLDASFFVKASSSDEPLGSRAAAIAERNAKAELNASINNLISKIKVKWHSGRNSSGELNIKDAIQTALQASIMDILLPDPLMFSFKLVTNGTVVNVDSPKDSGNVLRCKDPISAHEMTHMEVQIRNNTKEIIRMNLSISCKDVAGENCFDENSATVLWAGVLSDIHLEVPPLQEVVHPFSMYFLVPGDYSLQAASVIIDATDVLRARAKAESPDEPILCRGSPFHIRVVGTA

SEQ ID NO: 169131 - protein, 251 aa, Zea Mays
MLHFMMKSGEFLFMTTSMQKWLLLFPLVTESTLNNQVLHINCRKLFELLVLSGALAELTWPAILNKRDIFREVFMDFDPVLVSKLSEKKIIAPGSPSCSLLSEQKLRGVIENARQILKIIEEFGSFDKYCWSFVNHKPILSRFRYSRQVPVKTSKADAISKDLVRRGFRSVGPTVVYTFMQVSGMTNDHLISCYRFAECAASSAGAAKLSDGSLANSSDSSHGTAEQKMNGTNGLDSGLELSRTIDELSIS

SEQ ID NO: 169132 - protein, 260 aa, Zea Mays
MSGASARGRLSPASSGGGDSEPRSTGGRTRSVSAARGRKPSPRPGRDVAAAAGATEEKKPAAVLTLQPSLSAPAGMRRQELLLRSGLSLDASCSSDASTDSFCSRASTGRIGRPAFGARKKKALSQTDYKALSMLERDGGLISQTDAAGVKRRCAWVTANTDPCYAAFHDEEWGVPVHDDKKLFELLVLSGALAELTWPAILNKRDIFREVFMDFDPVLVSKLSEKKIIAPGSPSCSLLSEQKLRGVIENARQILKVCLN

SEQ ID NO: 169133 - protein, 236 aa, Zea Mays
MHMRLRAQYPCYAAFHDEEWGVPVHDDKKLFELLVLSGALAELTWPAILNKRDIFREVFMDFDPVLVSKLSEKKIIAPGSPSCSLLSEQKLRGVIENARQILKIIEEFGSFDKYCWSFVNHKPILSRFRYSRQVPVKTSKADAISKDLVRRGFRSVGPTVVYTFMQVSGMTNDHLISCYRFAECAASSAGAAKLSDGSLANSSDSSHGTAEQKMNGTNGLDSGLELSRTIDELSIS

SEQ ID NO: 169134 - protein, 385 aa, Zea Mays
MDQGHLKDSLLVPSSRAAATNGPHHRRATLAPGTGAGGPCGGAGGVSIDVNGLKRRGGGRRSWVRVDAATGAAEAVEVAKPALMRRLDLPARDLRLLDPLFVYPSAILGRERAVVCNLEHLRCIITADEALVLREPDAAGGAAAEEAVRRYVDELQRRLVDRADDLPFEFIALEVALEAACSFLDSQAIELEAEAYPLLDELTAKISTLNLERVRRLKSKLVALTRRVQKVRDEIEQLMDDDGDMAEMYLTEKKIRMEASMLDDEDLQGIGNSHNGFGSSLSAPVSPVSTTPATRRLEKEFSFARSRHSSFKSSDSSQYNIEELEMLLEAYFVVIDYTLSKLTSLKEYIDDTEDFINIQLIPVMLHFMMKSGEFLFMTTRSYLSC

SEQ ID NO: 169135 - protein, 231 aa, Zea Mays
MDQGHLKDSLLVPSSRAAATNGPHHRRATLAPGTGAGGPCGGAGGVSIDVNGLKRRGGGRRSWVRVDAATGAAEAVEVAKPALMRRLDLPARDLRLLDPLFVYPSAILGRERAVVCNLEHLRCIITADEALVLREPDAAGGAAAEEAVRRYVDELQRRLVDRADDLPFEFIALEVALEAACSFLDSQAIELEAEAYPLLDELTAKISTLNLERVRRLKSKLVALTRRVQKR

SEQ ID NO: 169136 - protein, 173 aa, Zea Mays
MVHYTICIILSCLLCFFTYLTLFSFFVCFQFRRHLREAEMAPKVSLAAPAKKGDAKTQALKVAKAVKSGAAKKKTKKIRTSVTFHRPTTLKKARDPKYPRISTTGRNKLDQYQILKYPLTTESAMKKIEDNNTLVFIVDLKADKKKIKAAVKKMYDIQAKKVNTLIRLALAPV

SEQ ID NO: 169137 - protein, 301 aa, Zea Mays
MIMEAIEYKVVLKRYAEEQLEPSPDDEEWTNSEAIGEFLGAFEEATKAFSAHRSPTSHLFLHNVLCIHQALRNENWQINCVLEDLALAMDSKFDKYWEKGKYNMALVIATILDPSKKMDFLDFFYEKTCQQFIDIQINMSLAKQWFTKFFGEYAKIVQKDTTVSPIVATNTSTLGSPILGKRRLDKEFSQWSQTRGRRLAKSELDAYLEEEFVRTDERFEILSWWRTNTNKYPVLSAMARDLLAIPLSTVPSESAFSAGGRILADNRSSMTPETLECLVCCKDWLYEYPNIQVYPVVFGPS

SEQ ID NO: 169138 - protein, 72 aa, Zea Mays
MFFVILSRPKCLSTKIVTVYASMQLCFCMSLKLPIKLLLCISVCSWLDVRQYAKPTGFFHGFPPNYGLVWGQ

SEQ ID NO: 169139 - protein, 106 aa, Zea Mays
MDLRISEGSGTNTTLDDQSIQSPTRRAKVWEYFLQELVEVDGVMKAVCKYCGAKLTSKRNSGTNSLRNHVADTCPKIPVEDRKQFIATMRKRTGEGSFVFDPRKTR

SEQ ID NO: 169140 - protein, 311 aa, Zea Mays
MLVLDSNHAGIKVTYFKCGGVSLGVGMQHHAADGMSGLHFINSWSDLCRGAQISVMPFIDRTLLRARDPPTPSFQHIEYQSAPAMLSSTTQFLASKSKPPATAVDIFKLTRSDLGRLRSQLPAGEGAPRFSTYAVLAAHVWKCVSLARSLPPEQPTKLYCATDGRQRLQPPLPDGYFGNVIFTATPLAEAGKVTSELAEGAAVIQGALDRMDNDYCRSALDYLELQPDLSALVRGAHTFRCPNLGLTSWVRLPIHDADFGWGRPVFMGPGGIAYEGLAFVLPSANGDGSLSIAISLQAEHMEKFRKLIGEA

SEQ ID NO: 169141 - protein, 285 aa, Zea Mays
MQHHAADGMSGLHFINSWSDLCRGAQISVMPFIDRTLLRARDPPTPSFQHIEYQSAPAMLSSTTQFLASKSKPPATAVDIFKLTRSDLGRLRSQLPAGEGAPRFSTYAVLAAHVWKCVSLARSLPPEQPTKLYCATDGRQRLQPPLPDGYFGNVIFTATPLAEAGKVTSELAEGAAVIQGALDRMDNDYCRSALDYLELQPDLSALVRGAHTFRCPNLGLTSWVRLPIHDADFGWGRPVFMGPGGIAYEGLAFVLPSANGDGSLSIAISLQAEHMEKFRKLIGEA

SEQ ID NO: 169142 - protein, 146 aa, Zea Mays
MALGTQCPCSSSWQPGGAPPHGRASNLPFELPQTQVQGAPASSMAARARPSPSMELGVAPFAARCSSSPPLGDPPDASPERVDVAASTNSGVMASYLGRFLAGDEAPLRTTNPPWAGLCTSFPPHEDTCHLKSKLVPGISRPRQVV

SEQ ID NO: 169143 - protein, 261 aa, Zea Mays
MVSVFYSQVASDISSSISIELCKPERRHHFVTMENLAGQQFVYEVTSLRALFLLLLLSPFLFLIMRNARATTLMFDTKRTRGHRQPADRQQSLPPSPPAVPVLGHLHLVGSLPHVSLRSLARTLGADLMLLRLGSTPVLVVSSSSAAEAVLRTHDHVFASRPHALVSEVVLYGPSDVGFAPHGDCWRRGRKLITTHLLSVNRVQSFRHAREEEEMIACSRLFGRRCSRVGELEIFPLEMLLDNSAFKTDLVGVIAAAGASE

SEQ ID NO: 169144 - protein, 523 aa, Zea Mays
MPPHSLLIPHSPPLRLRPRAKKKKNPQGGGGRIEGSGDVRREAKAKARIRSRRMGENAFFRRKRRAAATGQADAFTDAELEMIGMGYDRAVRFMDGPDDPRLRHPHDWYKYGRYGPYNWRGIVVGPPIRGRFSDDRVSLMEQVHDHEEWDRIEQFDMCNQFTHRLNELSDGVGFRYYWVFVRHPKWRPDEKPWEQWTLSAEVAVQASKDERLDKWSLMGRFGNPTRELITRCAAWTRPDIIYVKRPLYQSRFEPQEDFFSKLRPLVDPATENNFLFDLELDGQVVRTSYFGGLCKIVKSNPKAYVDDVVNAYSRLSDADKSRCLEFLLTNHPMDLLHPYTKEWKVKLEELELGCDAPDESEDEVGDDDGIEVVDCIEENEVDDDYYEDEDETDAQEDLKADEPENVEDSEEYWDEQWEKAMRSSDKMEKLVKTSIVASNEYSKQQKDLEKEMEWKMARANAIITEQEAEVEEESARRRTAKDGNQNDANTGLFLRAAVRPFTYRNLVKEIVLMRHHIIDGEIV

SEQ ID NO: 169145 - protein, 564 aa, Zea Mays
MDVPTPPNRAGCNSNISNIGSPMQSFDDPFGGAAMTSFDGYSELSSPSVADHIFSLLNDPSSVQHMFALWSSSGSSPRASAVREDMSFDTYPGPMDVTASLAQRINSASVFNPTEVDRGLKDSDGLVPNNGSQQGSSIIPRSVGNILADRMLMALSLFRKSLSDGVLAQVWMPVEHNGRVVLSTSEQPYLLDQDLAGYREVSRNFLFSVKEEPGLHLGLPGRVFISGVPEWTSSVTYYSKPEYLRMEHALLHEIRGSLAMPVYDPSKGSCCAVLELVTNKEKPDFDAEMDIVCDALQGVNLQTTTDRSNQKVYSENQKYASTEILDVLRAICHAHMLPLALTWIPTSNGTANGFCVAKNIRLDSQPGKSVLRIHESACYVNDAKMQGFLHACAERHLEKGQGIAGRALKSNLPFFSPDIREYSIEDYPLAHHARKFGLHAAVAIRLRSTYTGKDDYILEFFLPVNCKGCGEQQMLLNSLSSTMQRICKSLRTVSEAETDSVSATEPMYEKTNGSCLPTGNSESSSHDDQPITESAFHDLSSGDKQGDREPAKLKASCREKTQYI

SEQ ID NO: 169146 - protein, 1095 aa, Zea Mays
MDIGQGATILVSAGWLYSPFSSSSPSGRRQLRRCCWSWAKGGGTDVLPFDFPLAGRSSTSDDRASRRSDLACWARQEDGALVRPRAHTPMGDRRTGSRHYASARTLSVGAPSSSPSRQCGGKILFSQKTVLFFISCPELNTVLQIHISLLGVDKDLCLNEWSKTMDVPTPPNRAGCNSNISNIGSPMQSFDDPFGGAAMTSFDGYSELSSPSVADHIFSLLNDPSSVQHMFALWSSSGSSPRASAVREDMSFDTYPGPMDVTASLAQRINSASVFNPTEVDRGLKDSDGLVPNNGSQQGSSIIPRSVGNILADRMLMALSLFRKSLSDGVLAQVWMPVEHNGRVVLSTSEQPYLLDQDLAGYREVSRNFLFSVKEEPGLHLGLPGRVFISGVPEWTSSVTYYSKPEYLRMEHALLHEIRGSLAMPVYDPSKGSCCAVLELVTNKEKPDFDAEMDIVCDALQGVNLQTTTDRSNQKVYSENQKYASTEILDVLRAICHAHMLPLALTWIPTSNGTANGFCVAKNIRLDSQPGKSVLRIHESACYVNDAKMQGFLHACAERHLEKGQGIAGRALKSNLPFFSPDIREYSIEDYPLAHHARKFGLHAAVAIRLRSTYTGKDDYILEFFLPVNCKGCGEQQMLLNSLSSTMQRICKSLRTVSEAETDSVSATEPMYEKTNGSCLPTGNSESSSHDDQPITESAFHDLSSGDKQGDREPAKARSSSKRVAEKKRSTSEKNFSLDVLRKYFSGSLRDAAMSLGVCPTTLKRICRQHGISRWPSRKINKVNRSLKKIEKVIKSVHGVDRSLQYDPATGSLVPATSLPDKMPTSSAGVKTVEEKSSPEPGQDFSSPDGWQRESSQLHASSIPTRVGDEVQMLAINNEGSRNYASGIANIAQHSNSEDAHGPLYPVGAVNSSRTGETGYIDSPTSLHMDSVEGQTTVRDSRSVQQADVTMATKEQTLPSTSGTTDSSSGSASSQPAFKGNPGRALKVSSSDALTVKATCNGDTVRFKFLPAMGWYHLLEEVAKRFKLATGAFQLKYKDDEDEWVILANDADLQECVDVLDSIGSRSVKLQVRDLPCLVSSSGSSSCCLQVEGSA

SEQ ID NO: 169147 - protein, 348 aa, Zea Mays
MSGSVVTGEHAVSYWKTSGHIEFICSGQKQGDMVLTVPDGSHALRLGSGASIQQQISLTKGLYYSLTFSASRTCSQNEMLNVTAAPVSGSPAQTGELPTQTVYTSSGWDSYSWAFRAEAGLMSITVTHNCGEEEDPACGPIVDAFAIKTLSQPEASQNNMLRNGDFEEGPYIPPDSQWGVLVPPVDEDDVSPLPGWNIMAYKKSVKYIDSAHFAVPRGARAVELVSGVETALLQEVYTTVEGSWYRLEFSAGDADGCASSYDDGSSSGMKVKAYAGTAETTVDVDFRDAGGSKRGKIEFRATASPTRVVFVSLGYHTKSDNSGTLCGPVVDDVSLVPIPQPYARRLLL

SEQ ID NO: 169148 - protein, 194 aa, Zea Mays
MRAVTGGTPTWSCWCRNLMYPEASCRTEAVSVCTAKAKQRNERSETCDHRSACNSSCADDDKGRNGRGSSAGCTAKIKLWENNTIPSRTATLAAGAPRLSRRSCPSSPWAIRARFSGCCYSSASASSRTWACFPTPLAGSRGRRRDVRFFSLFPAFFSLTRRTRREEEKKDAAVRGKSLRWGRIEGRDEALGKQ

SEQ ID NO: 169149 - protein, 292 aa, Zea Mays
MASRLFVLRRHTRWWQRQAPRPRSLCPPSHGGDSASSHGTLELLARLRSSPSYTFHKVFNRDARFFRLLQSCSIQACHCIHTSPSVNSGNQATAEPQQQNPGVPVPVDGSSELKPKRTKLKGRRAVTNFLKSLRWKKKKEFQRMTAEEKILYKLKLARKKEERLVVALKKIEPEDPSEPTHDPEVLTPEEHFYFLKMGQKCKNYVPVGRRGIYQGVILNMHLHWKKHQTLQVIVKTFTPEEVKEIAIELATLSGGIVLDIQDGNTIIMYRGKNYAQPPPEIMSPKVSLSRKK

SEQ ID NO: 169150 - protein, 250 aa, Zea Mays
MTAEEKILYKLKLARKKEERLVVALKKIEPEDPSEPTHDPEVLTPEEHFYFLKMGQKCKNYVPVGRRGIYQGVILNMHLHWKKHQTLQVIVKTFTPEEVKEIAIELATLSGGIVLDIQDGNTIIMYRGKNYAQPPPEIMSPKVSLSRKKALDKSKYMEKLRALRRYIPRLEQELEDLHAQMKLAGEHQGQNAGKHVASISHNTNSMPVRKEPCGSIRNKTVSDLLSETVEGSKRIRGAGRGQQGSPLISR

SEQ ID NO: 169151 - protein, 461 aa, Zea Mays
MGHSSRKKKKRGAAGRKAAKDHAAQLEGDETALDEELTALASILGEDFKVTSESPHTRCNICIRPYSDDMGFEDLNISAILIVICFPGYPHKCPKLRILPEKNLSKEDTDRLLSLLIDQANIYSREGRVMIFNLFEAAQEFLSEIAPARVSVSTASFLGLSSTTDDNVEVGFDSDPYLGISYIYNSFDLYSQLYDDTYWSRQGSDLTTDSGRKNIVSQVQSNVRSKRKTIIEKSHISADKVNNAKESSGDKAEQQHATKHGAIREAAPTLHVVDEETEIYGKSLSASNTGNTSDTPERGFSSLNEPEDTDLADESWNEQDCDSDFSSSNALPYVSYMLDDASRNKKRDLVLVHLLRIACASKDSLSSALPTISAELCNIGVLSEWAKDLISDSPAVFGETFSHVFGQQMISSECSLFWRPDNSSSKPNSRYLNDFEELRSLGGLWSCCIMQKQARWAPICC

SEQ ID NO: 169152 - protein, 1109 aa, Zea Mays
MGHSSRKKKKRGAAGRKAAKDHAAQLEGDETALDEELTALASILGEDFKVTSESPHTRCNICIRPYSDDMGFEDLNISAILIVICFPGYPHKCPKLRILPEKNLSKEDTDRLLSLLIDQANIYSREGRVMIFNLFEAAQEFLSEIAPARVSVSTASFLGLSSTTDDNVEVGFDSDPYLGISYIYNSFDLYSQLYDDTYWSRQGSDLTTDSGRKNIVSQVQSNVRSKRKTIIEKSHISADKVNNAKESSGDKAEQQHATKHGAIREAAPTLHVVDEETEIYGKSLSASNTGNTSDTPERGFSSLNEPEDTDLADESWNEQDCDSDFSSSNALPYVSYMLDDASRNKKRDLVLVHLLRIACASKDSLSSALPTISAELCNIGVLSEWAKDLISDSPAVFGETFSHVFGQQMISSECSLFWRPDNSSSKPNSRYLNDFEELRSLGQGGFGRVALCKNKLDGRQYAVKKIRLKDRSPQLNEKILREVATLSRLQHQHVVRYYQAWIETEYGHHNILNAGGSCTAESSIFSYDEVSLSDAGGGNKQESTYLYIQMEYCPRTLRQDFETYISSFDVDHAWHLFRQIVEGLAHVHSQGILHRDLTPSNIFFDVRNDIKIGDFGLAKFLKLEQLDHDQYLPTEALGVSMDGTGQVGTYFYTAPEVEQKWPQINEKVDMYSLGVIFFELWHPFATAMERHLVLSDLKQKGDPPLSWESKFPRQSVLLRSLLSPSPSNRPSAVEVLQNELPPRMEDEWLNDVLRMIRTPEDTYVYDRVISTIFNEDRFAKMQGQHDSSKKSTGNIDNSELLDTIVEVAKEVFKRHCAKRFQISPLHTLEWNFTKNRGNTVKILTQGGEMLELCYELRTPFVMSIASNQTSSFKRYEISWVHRRAVGHSTPYRFLQGDFDIIGGTSPIPEAEIIKVALDLGTRFYDSKTLVIRLNHGKLAEAICSWAGVSQDQRQNVAEFLSSTIVQYWPNEADRKSQWSLIRGQLLQDLRLSEEVVEKLHKADQRFCGSADLVLARLRGTLFYDESACKALDDLSALLRCLRVWSVEQPITTIDVLMPPSECYYTNLFFQVYSKEGNHGPGFHEKLLAVGGRYDWLVEQAWDETSVLLV

SEQ ID NO: 169153 - protein, 581 aa, Zea Mays
MKSLGVIFFELWHPFATAMERHLVLSDLKQKGDPPLSWESKFPRQSVLLRSLLSPSPSNRPSAVEVLQNELPPRMEDEWLNDVLRMIRTPEDTYVYDRVISTIFNEDRFAKMQGQHDSSKKSTGNIDNSELLDTIVEVAKEVFKRHCAKRFQISPLHTLEWNFTKNRGNTVKILTQGGEMLELCYELRTPFVMSIASNQTSSFKRYEISWVHRRAVGHSTPYRFLQGDFDIIGGTSPIPEAEIIKVALDLGTRFYDSKTLVIRLNHGKLAEAICSWAGVSQDQRQNVAEFLSSTIVQYWPNEADRKSQWSLIRGQLLQDLRLSEEVVEKLHKADQRFCGSADLVLARLRGTLFYDESACKALDDLSALLRCLRVWSVEQPITTIDVLMPPSECYYTNLFFQVYSKEGNHGPGFHEKLLAVGGRYDWLVEQAWDETSKSKPPGAVGVSIALEKFLPNNPSSDLGLRRLLSRVEPSISVLVCSRGGGGLLTERMELVAELWKANIMAQFVPQEDPSLQEQYEYASEHDIKCLAIMTESGLSQTDLVKVRHLDFKKEKDVEREGLIKFLSDAMCSQYKNPTIWS

SEQ ID NO: 169154 - protein, 697 aa, Zea Mays
MEYCPRTLRQDFETYISSFDVDHAWHLFRQIVEGLAHVHSQGILHRDLTPSNIFFDVRNDIKIGDFGLAKFLKLEQLDHDQYLPTEALGVSMDGTGQVGTYFYTAPEVEQKWPQINEKVDMYSLGVIFFELWHPFATAMERHLVLSDLKQKGDPPLSWESKFPRQSVLLRSLLSPSPSNRPSAVEVLQNELPPRMEDEWLNDVLRMIRTPEDTYVYDRVISTIFNEDRFAKMQGQHDSSKKSTGNIDNSELLDTIVEVAKEVFKRHCAKRFQISPLHTLEWNFTKNRGNTVKILTQGGEMLELCYELRTPFVMSIASNQTSSFKRYEISWVHRRAVGHSTPYRFLQGDFDIIGGTSPIPEAEIIKVALDLGTRFYDSKTLVIRLNHGKLAEAICSWAGVSQDQRQNVAEFLSSTIVQYWPNEADRKSQWSLIRGQLLQDLRLSEEVVEKLHKADQRFCGSADLVLARLRGTLFYDESACKALDDLSALLRCLRVWSVEQPITTIDVLMPPSECYYTNLFFQVYSKEGNHGPGFHEKLLAVGGRYDWLVEQAWDETSKSKPPGAVGVSIALEKFLPNNPSSDLGLRRVEPSISVLVCSRGGGGLLTERMELVAELWKANIMAQFVPQEDPSLQEQYEYASEHDIKCLAIMTESGLSQTDLVKVRHLDFKKEKDVEREGLIKFLSDAMCSQYKNPTIWS

SEQ ID NO: 169155 - protein, 557 aa, Zea Mays
MEYCPRTLRQDFETYISSFDVDHAWHLFRQIVEGLAHVHSQGILHRDLTPSNIFFDVRNDIKIGDFGLAKFLKLEQLDHDQYLPTEALGVSMDGTGQVGTYFYTAPEVEQKWPQINEKVDMYSLGVIFFELWHPFATAMERHLVLSDLKQKGDPPLSWESKFPRQSVLLRSLLSPSPSNRPSAVEVLQNELPPRMEDEWLNDVLRMIRTPEDTYVYDRVISTIFNEDRFAKMQGQHDSSKKSTGNIDNSELLDTIVEVAKEVFKRHCAKRFQISPLHTLEWNFTKNRGNTVKILTQGGEMLELCYELRTPFVMSIASNQTSSFKRYEISWVHRRAVGHSTPYRFLQGDFDIIGGTSPIPEAEIIKVALDLGTRFYDSKTLVIRLNHGKLAEAICSWAGVSQDQRQNVAEFLSSTIVQYWPNEADRKSQWSLIRGQLLQDLRLSEEVVEKLHKADQRFCGSADLVLARLRGTLFYDESACKALDDLSALLRCLRVWSVEQPITTIDVLMPPSECYYTNLFFQVRHLDFKKEKDVEREGLIKFLSDAMCSQYKNPTIWS

SEQ ID NO: 169156 - protein, 689 aa, Zea Mays
MEYCPRTLRQDFETYISSFDVDHAWHLFRQIVEGLAHVHSQGILHRDLTPSNIFFDVRNDIKIGDFGLAKFLKLEQLDHDQYLPTEALGVSMDGTGQVGTYFYTAPEVEQKWPQINEKVDMYSLGVIFFELWHPFATAMERHLVLSDLKQKGDPPLSWESKFPRQSVLLRSLLSPSPSNRPSAVEVLQNELPPRMEDEWLNDVLRMIRTPEDTYVYDRVISTIFNEDRFAKMQGQHDSSKKSTGNIDNSELLDTIVEVAKEVFKRHCAKRFQISPLHTLEWNFTKNRGNTVKILTQGGEMLELCYELRTPFVMSIASNQTSSFKRYEISWVHRRAVGHSTPYRFLQGDFDIIGGTSPIPEAEIIKVALDLGTRFYDSKTLVIRLNHGKLAEAICSWAGVSQDQRQNVAEYWPNEADRKSQWSLIRGQLLQDLRLSEEVVEKLHKADQRFCGSADLVLARLRGTLFYDESACKALDDLSALLRCLRVWSVEQPITTIDVLMPPSECYYTNLFFQVYSKEGNHGPGFHEKLLAVGGRYDWLVEQAWDETSKSKPPGAVGVSIALEKFLPNNPSSDLGLRRVEPSISVLVCSRGGGGLLTERMELVAELWKANIMAQFVPQEDPSLQEQYEYASEHDIKCLAIMTESGLSQTDLVKVRHLDFKKEKDVEREGLIKFLSDAMCSQYKNPTIWS

SEQ ID NO: 169157 - protein, 1238 aa, Zea Mays
MGHSSRKKKKRGAAGRKAAKDHAAQLEGDETALDEELTALASILGEDFKVTSESPHTRCNICIRPYSDDMGFEDLNISAILIVICFPGYPHKCPKLRILPEKNLSKEDTDRLLSLLIDQANIYSREGRVMIFNLFEAAQEFLSEIAPARVSVSTASFLGLSSTTDDNVEVGFDSDPYLGISYIYNSFDLYSQLYDDTYWSRQGSDLTTDSGRKNIVSQVQSNVRSKRKTIIEKSHISADKVNNAKESSGDKAEQQHATKHGAIREAAPTLHVVDEETEIYGKSLSASNTGNTSDTPERGFSSLNEPEDTDLADESWNEQDCDSDFSSSNALPYVSYMLDDASRNKKRDLVLVHLLRIACASKDSLSSALPTISAELCNIGVLSEWAKDLISDSPAVFGETFSHVFGQQMISSECSLFWRPDNSSSKPNSRYLNDFEELRSLGQGGFGRVALCKNKLDGRQYAVKKIRLKDRSPQLNEKILREVATLSRLQHQHVVRYYQAWIETEYGHHNILNAGGSCTAESSIFSYDEVSLSDAGGGNKQESTYLYIQMEYCPRTLRQDFETYISSFDVDHAWHLFRQIVEGLAHVHSQGILHRDLTPSNIFFDVRNDIKIGDFGLAKFLKLEQLDHDQYLPTEALGVSMDGTGQVGTYFYTAPEVEQKWPQINEKVDMYSLGVIFFELWHPFATAMERHLVLSDLKQKGDPPLSWESKFPRQSVLLRSLLSPSPSNRPSAVEVLQNELPPRMEDEWLNDVLRMIRTPEDTYVYDRVISTIFNEDRFAKMQGQHDSSKKSTGNIDNSELLDTIVEVAKEVFKRHCAKRFQISPLHTLEWNFTKNRGNTVKILTQGGEMLELCYELRTPFVMSIASNQTSSFKRYEISWVHRRAVGHSTPYRFLQGDFDIIGGTSPIPEAEIIKVALDLGTRFYDSKTLVIRLNHGKLAEAICSWAGVSQDQRQNVAEYWPNEADRKSQWSLIRGQLLQDLRLSEEVVEKLHKADQRFCGSADLVLARLRGTLFYDESACKALDDLSALLRCLRVWSVEQPITTIDVLMPPSECYYTNLFFQVYSKEGNHGPGFHEKLLAVGGRYDWLVEQAWDETSKSKPPGAVGVSIALEKFLPNNPSSDLGLRRVEPSISVLVCSRGGGGLLTERMELVAELWKANIMAQFVPQEDPSLQEQYEYASEHDIKCLAIMTESGLSQTDLVKVRHLDFKKEKDVEREGLIKFLSDAMCSQYKNPTIWS

SEQ ID NO: 169158 - protein, 76 aa, Zea Mays
MVFTMEAYDLLDGDACNAQIYSVASAVSRRVEKVERDYLSYDEPRTVFSGEVCNDLGGEFCDVSYHADVFRELAQT

SEQ ID NO: 169159 - protein, 161 aa, Zea Mays
MICNGCACCGALSASVARVLHKMVSDIMCGFILMMYTKKQWSRDPTLALQYITEAHHTRSITLLDHTVPSCRSTSIEHLITYRKFRSENAGCRYSRQVLRCVPIKGRSWRRARWWLVSLLLSWLRLLRSTTTRASRCSQWRPTTYSMATRATRRYTRWHRQ

SEQ ID NO: 169160 - protein, 111 aa, Zea Mays
MCSHQGPVVEKSTVVVSVPVVVMVETAEIDYNSSFSVFTMEAYDLLDGDACNAQIYSVASAVSRRVEKVERDYLSYDEPRTVFSGEVCNDLGGEFCDVSYHADVFRELAQT

SEQ ID NO: 169161 - protein, 175 aa, Zea Mays
MICNGCACCGALSASVARVLHKMVSDIMCGFILMMYTKKQWSRDPTLALQYITEAHHTRSITLLDHTVPSCRSTSIEHLITYRKFRSENAGCRYSRQVLRCVPIKGRSWRRARWWLVSLLLSWLRLLRSTTTRASLRIGNTHVCVADAAGCSQWRPTTYSMATRATRRYTRWHRQ

SEQ ID NO: 169162 - protein, 178 aa, Zea Mays
MICNGCACCGALSASVARVLHKMVSDIMCGFILMMYTKVGLFGPITSSIDVTKFIKQWSRDPTLALQYITEAHHTRSITLLDHTVPSCRSTSIEHLITYRKFRSENAGCRYSRQVLRCVPIKGRSWRRARWWLVSLLLSWLRLLRSTTTRASRCSQWRPTTYSMATRATRRYTRWHRQ

SEQ ID NO: 169163 - protein, 1394 aa, Zea Mays
MAKPEEKLRCTKEPFIEDVGTRRIKSIRFSVLSGSEIRKSAEVQVWNNRIYDRDMTPVPNGLLDPRMGIPTKRGKCNTCHGEFSDCPGHFGYLKLALPVFNVGFFNCILDVLKCICKSCSRVLLIEKDRREFLKKMRNPRADALQKSATMKKVRDKCKLSCCPRCDYRNGVVKKGRAGLIVVHDCSKVLDGHTEELKNALQNKKEKVSASSVLVLDPATVLSLFRRMIDEDCELLNLGDRPEKLIVTEIAVPPVPIRPSVVVGNSRTSNEDSITVILKSIVNTNSILKETLHTGGPFTKCFDCWQYLQLQVVEYVNSDAPSLPESQHRGLVQRLKGKTGRFRGNLSGKRTEYTGRTVISPDPNLKITEVAIPVLMARVLTYPERVSNYNIEKLRQCIRNGPFKYPGANFVTQPDGMKQSLKYGDRRITARDLKCGCIVERHLEDGDVVLFNRQPSLHRMSIMCHRARIMPWRTLRFNESVCNPYNADFDGDEMNLHVPQTEEARTEALMLMGVQNNLCTPKNGEILVASTQDFLTSSFLVTRKDTFYDRSSFTLLCSYLGDGMENIDLPTPALIKPVELWTGKQLFSVLVRPNAHTKVFLNLAVQEKIYSKKKGKKEGGEEVKETMCGRETMCPNDGYVYFRNSELLSGQVGKATLGNGNKDGLYSVLLRDYNSHAAASCMNRLAKFSARFIGNHGFSIGVDDVQPGEHLNRQKKKEIDGGYKKCHDLISLFAKGALALHPGCNAAQTLEHNITGVLNEIRSIAGNVCMDTLHWRNSPLIMSQCGSKGSPINISQMVACVGQQSVGGRRAPDGFLNRTLPHFPINSKTPAAKGFVANSFYTGLTATEFFFHTMGGREGLVDTAVKTAETGYMSRRLMKGLEDLSVFYDQTVRNASGGIVQFLYGDDGMDPAKMEGKDGMPLNLDQLFMKVMATCPQRGSDTLSPVGIKQMLEDKFLQHDTSSDGGCSAEFKKNLTEFLDKRIELMKCTRRALHLHEDHVEKKDSCLEESIAAIISGISAKQLQVFLDTCLSRYQSKKIEAGASIGAIGAQSIGEPGTQMTLKTFHFAGVASMNVTLGVPRIKEIINAAKKISTPIITAQLLSRKDVLSARIVKGSMEKAVLGEVAATIQTVLKSSLPNLVVKLDMQLIETLHMGISADSVKLSILNHPKLKLKSEHVRVIDRAKLRIYPAGTDKLKLQLELHNLKSILPKVIVKGIPTVERVVIDEVKVNNATERYQLLVEGTNLLAVMGTPGVDARKTKSNHIMETNQTLGIEAARRSIIDEIQYTMKSHGMNIDRRHMMLLADLMTYKGEILGITRYGIAKMKSSVLMLASFEKTAEHLFNASYSGRQDQIEGVSECIIMGIPMQLGTGILKVRQRLDHVPEFKYQPDPILS

SEQ ID NO: 169164 - protein, 523 aa, Zea Mays
MSRRLMKGLEDLSVFYDQTVRNASGGIVQFLYGDDGMDPAKMEGKDGMPLNLDQLFMKVMATCPQRGSDTLSPVGIKQMLEDKFLQHDTSSDGGCSAEFKKNLTEFLDKRIELMKCTRRALHLHEDHVEKKDSCLEESIAAIISGISAKQLQVFLDTCLSRYQSKKIEAGASIGAIGAQSIGEPGTQMTLKTFHFAGVASMNVTLGVPRIKEIINAAKKISTPIITAQLLSRKDVLSARIVKGSMEKAVLGEVAATIQTVLKSSLPNLVVKLDMQLIETLHMGISADSVKLSILNHPKLKLKSEHVRVIDRAKLRIYPAGTDKLKLQLELHNLKSILPKVIVKGIPTVERVVIDEVKVNNATERYQLLVEGTNLLAVMGTPGVDARKTKSNHIMETNQTLGIEAARRSIIDEIQYTMKSHGMNIDRRHMMLLADLMTYKGEILGITRYGIAKMKSSVLMLASFEKTAEHLFNASYSGRQDQIEGVSECIIMGIPMQLGTGILKVRQRLDHVPEFKYQPDPILS

SEQ ID NO: 169165 - protein, 626 aa, Zea Mays
MDTLHWRNSPLIMSQCGSKGSPINISQMVACVGQQSVGGRRAPDGFLNRTLPHFPINSKTPAAKGFVANSFYTGLTATEFFFHTMGGREGLVDTAVKTAETGYMSRRLMKGLEDLSVFYDQTVRNASGGIVQFLYGDDGMDPAKMEGKDGMPLNLDQLFMKVMATCPQRGSDTLSPVGIKQMLEDKFLQHDTSSDGGCSAEFKKNLTEFLDKRIELMKCTRRALHLHEDHVEKKDSCLEESIAAIISGISAKQLQVFLDTCLSRYQSKKIEAGASIGAIGAQSIGEPGTQMTLKTFHFAGVASMNVTLGVPRIKEIINAAKKISTPIITAQLLSRKDVLSARIVKGSMEKAVLGEVAATIQTVLKSSLPNLVVKLDMQLIETLHMGISADSVKLSILNHPKLKLKSEHVRVIDRAKLRIYPAGTDKLKLQLELHNLKSILPKVIVKGIPTVERVVIDEVKVNNATERYQLLVEGTNLLAVMGTPGVDARKTKSNHIMETNQTLGIEAARRSIIDEIQYTMKSHGMNIDRRHMMLLADLMTYKGEILGITRYGIAKMKSSVLMLASFEKTAEHLFNASYSGRQDQIEGVSECIIMGIPMQLGTGILKVRQRLDHVPEFKYQPDPILS

SEQ ID NO: 169166 - protein, 1020 aa, Zea Mays
MARVLTYPERVSNYNIEKLRQCIRNGPFKYPGANFVTQPDGMKQSLKYGDRRITARDLKCGCIVERHLEDGDVVLFNRQPSLHRMSIMCHRARIMPWRTLRFNESVCNPYNADFDGDEMNLHVPQTEEARTEALMLMGVQNNLCTPKNGEILVASTQDFLTSSFLVTRKDTFYDRSSFTLLCSYLGDGMENIDLPTPALIKPVELWTGKQLFSVLVRPNAHTKVFLNLAVQEKIYSKKKGKKEGGEEVKETMCGRETMCPNDGYVYFRNSELLSGQVGKATLGNGNKDGLYSVLLRDYNSHAAASCMNRLAKFSARFIGNHGFSIGVDDVQPGEHLNRQKKKEIDGGYKKCHDLISLFAKGALALHPGCNAAQTLEHNITGVLNEIRSIAGNVCMDTLHWRNSPLIMSQCGSKGSPINISQMVACVGQQSVGGRRAPDGFLNRTLPHFPINSKTPAAKGFVANSFYTGLTATEFFFHTMGGREGLVDTAVKTAETGYMSRRLMKGLEDLSVFYDQTVRNASGGIVQFLYGDDGMDPAKMEGKDGMPLNLDQLFMKVMATCPQRGSDTLSPVGIKQMLEDKFLQHDTSSDGGCSAEFKKNLTEFLDKRIELMKCTRRALHLHEDHVEKKDSCLEESIAAIISGISAKQLQVFLDTCLSRYQSKKIEAGASIGAIGAQSIGEPGTQMTLKTFHFAGVASMNVTLGVPRIKEIINAAKKISTPIITAQLLSRKDVLSARIVKGSMEKAVLGEVAATIQTVLKSSLPNLVVKLDMQLIETLHMGISADSVKLSILNHPKLKLKSEHVRVIDRAKLRIYPAGTDKLKLQLELHNLKSILPKVIVKGIPTVERVVIDEVKVNNATERYQLLVEGTNLLAVMGTPGVDARKTKSNHIMETNQTLGIEAARRSIIDEIQYTMKSHGMNIDRRHMMLLADLMTYKGEILGITRYGIAKMKSSVLMLASFEKTAEHLFNASYSGRQDQIEGVSECIIMGIPMQLGTGILKVRQRLDHVPEFKYQPDPILS

SEQ ID NO: 169167 - protein, 1165 aa, Zea Mays
MDCELLNLGDRPEKLIVTEIAVPPVPIRPSVVVGNSRTSNEDSITVILKSIVNTNSILKETLHTGGPFTKCFDCWQYLQLQVVEYVNSDAPSLPESQHRGLVQRLKGKTGRFRGNLSGKRTEYTGRTVISPDPNLKITEVAIPVLMARVLTYPERVSNYNIEKLRQCIRNGPFKYPGANFVTQPDGMKQSLKYGDRRITARDLKCGCIVERHLEDGDVVLFNRQPSLHRMSIMCHRARIMPWRTLRFNESVCNPYNADFDGDEMNLHVPQTEEARTEALMLMGVQNNLCTPKNGEILVASTQDFLTSSFLVTRKDTFYDRSSFTLLCSYLGDGMENIDLPTPALIKPVELWTGKQLFSVLVRPNAHTKVFLNLAVQEKIYSKKKGKKEGGEEVKETMCGRETMCPNDGYVYFRNSELLSGQVGKATLGNGNKDGLYSVLLRDYNSHAAASCMNRLAKFSARFIGNHGFSIGVDDVQPGEHLNRQKKKEIDGGYKKCHDLISLFAKGALALHPGCNAAQTLEHNITGVLNEIRSIAGNVCMDTLHWRNSPLIMSQCGSKGSPINISQMVACVGQQSVGGRRAPDGFLNRTLPHFPINSKTPAAKGFVANSFYTGLTATEFFFHTMGGREGLVDTAVKTAETGYMSRRLMKGLEDLSVFYDQTVRNASGGIVQFLYGDDGMDPAKMEGKDGMPLNLDQLFMKVMATCPQRGSDTLSPVGIKQMLEDKFLQHDTSSDGGCSAEFKKNLTEFLDKRIELMKCTRRALHLHEDHVEKKDSCLEESIAAIISGISAKQLQVFLDTCLSRYQSKKIEAGASIGAIGAQSIGEPGTQMTLKTFHFAGVASMNVTLGVPRIKEIINAAKKISTPIITAQLLSRKDVLSARIVKGSMEKAVLGEVAATIQTVLKSSLPNLVVKLDMQLIETLHMGISADSVKLSILNHPKLKLKSEHVRVIDRAKLRIYPAGTDKLKLQLELHNLKSILPKVIVKGIPTVERVVIDEVKVNNATERYQLLVEGTNLLAVMGTPGVDARKTKSNHIMETNQTLGIEAARRSIIDEIQYTMKSHGMNIDRRHMMLLADLMTYKGEILGITRYGIAKMKSSVLMLASFEKTAEHLFNASYSGRQDQIEGVSECIIMGIPMQLGTGILKVRQRLDHVPEFKYQPDPILS

SEQ ID NO: 169168 - protein, 1370 aa, Zea Mays
MAKPEEKLRCTKEPFIEDVGTRRIKSIRFSVLSGSEIRKSAEVQVWNNRIYDRDMTPVPNGLLDPRMGIPTKRGKCNTCHGEFSDCPGHFGYLKLALPVFNVGFFNCILDVLKCICKSCSRVLLIEKDRREFLKKMRNPRADALQKSATMKKVRDKCKLSCCPRCDYRNGVVKKGRAGLIVVHDCSKVLDGHTEELKNALQNKKEKDCELLNLGDRPEKLIVTEIAVPPVPIRPSVVVGNSRTSNEDSITVILKSIVNTNSILKETLHTGGPFTKCFDCWQYLQLQVVEYVNSDAPSLPESQHRGLVQRLKGKTGRFRGNLSGKRTEYTGRTVISPDPNLKITEVAIPVLMARVLTYPERVSNYNIEKLRQCIRNGPFKYPGANFVTQPDGMKQSLKYGDRRITARDLKCGCIVERHLEDGDVVLFNRQPSLHRMSIMCHRARIMPWRTLRFNESVCNPYNADFDGDEMNLHVPQTEEARTEALMLMGVQNNLCTPKNGEILVASTQDFLTSSFLVTRKDTFYDRSSFTLLCSYLGDGMENIDLPTPALIKPVELWTGKQLFSVLVRPNAHTKVFLNLAVQEKIYSKKKGKKEGGEEVKETMCGRETMCPNDGYVYFRNSELLSGQVGKATLGNGNKDGLYSVLLRDYNSHAAASCMNRLAKFSARFIGNHGFSIGVDDVQPGEHLNRQKKKEIDGGYKKCHDLISLFAKGALALHPGCNAAQTLEHNITGVLNEIRSIAGNVCMDTLHWRNSPLIMSQCGSKGSPINISQMVACVGQQSVGGRRAPDGFLNRTLPHFPINSKTPAAKGFVANSFYTGLTATEFFFHTMGGREGLVDTAVKTAETGYMSRRLMKGLEDLSVFYDQTVRNASGGIVQFLYGDDGMDPAKMEGKDGMPLNLDQLFMKVMATCPQRGSDTLSPVGIKQMLEDKFLQHDTSSDGGCSAEFKKNLTEFLDKRIELMKCTRRALHLHEDHVEKKDSCLEESIAAIISGISAKQLQVFLDTCLSRYQSKKIEAGASIGAIGAQSIGEPGTQMTLKTFHFAGVASMNVTLGVPRIKEIINAAKKISTPIITAQLLSRKDVLSARIVKGSMEKAVLGEVAATIQTVLKSSLPNLVVKLDMQLIETLHMGISADSVKLSILNHPKLKLKSEHVRVIDRAKLRIYPAGTDKLKLQLELHNLKSILPKVIVKGIPTVERVVIDEVKVNNATERYQLLVEGTNLLAVMGTPGVDARKTKSNHIMETNQTLGIEAARRSIIDEIQYTMKSHGMNIDRRHMMLLADLMTYKGEILGITRYGIAKMKSSVLMLASFEKTAEHLFNASYSGRQDQIEGVSECIIMGIPMQLGTGILKVRQRLDHVPEFKYQPDPILS

SEQ ID NO: 169169 - protein, 714 aa, Zea Mays
MNRLAKFSARFIGNHGFSIGVDDVQPGEHLNRQKKKEIDGGYKKCHDLISLFAKGALALHPGCNAAQTLEHNITGVLNEIRSIAGNVCMDTLHWRNSPLIMSQCGSKGSPINISQMVACVGQQSVGGRRAPDGFLNRTLPHFPINSKTPAAKGFVANSFYTGLTATEFFFHTMGGREGLVDTAVKTAETGYMSRRLMKGLEDLSVFYDQTVRNASGGIVQFLYGDDGMDPAKMEGKDGMPLNLDQLFMKVMATCPQRGSDTLSPVGIKQMLEDKFLQHDTSSDGGCSAEFKKNLTEFLDKRIELMKCTRRALHLHEDHVEKKDSCLEESIAAIISGISAKQLQVFLDTCLSRYQSKKIEAGASIGAIGAQSIGEPGTQMTLKTFHFAGVASMNVTLGVPRIKEIINAAKKISTPIITAQLLSRKDVLSARIVKGSMEKAVLGEVAATIQTVLKSSLPNLVVKLDMQLIETLHMGISADSVKLSILNHPKLKLKSEHVRVIDRAKLRIYPAGTDKLKLQLELHNLKSILPKVIVKGIPTVERVVIDEVKVNNATERYQLLVEGTNLLAVMGTPGVDARKTKSNHIMETNQTLGIEAARRSIIDEIQYTMKSHGMNIDRRHMMLLADLMTYKGEILGITRYGIAKMKSSVLMLASFEKTAEHLFNASYSGRQDQIEGVSECIIMGIPMQLGTGILKVRQRLDHVPEFKYQPDPILS

SEQ ID NO: 169170 - protein, 324 aa, Zea Mays
MLRCPDPSCAAAVGQDMINSLAADDDKEKYGRYLRRSYIEDNRKTKWCPAPGCEYAVEFVMGSGSYDVNCNCSYGFCWNCTEEAHRPVDCATVSKWILKNSAESENMNWILANSKPCPKCKRPIEKNQGCMHITCTPPCKFEFCWLCLGPWSEHGERTGGFYACNRYESARQEGAYDESERRREMAKNSLERYTHYYERWAANQSSRQKALGDLQSLQNDKLERLSDIQSQPESQLKFIVEAWLQIVECRRVLKWTYAYGFYLPEHEHAKRQFFEYLQGEAESGLERLHQCAEKELQIYLDAESPSKDFNDFRTKLAGLTRPFH

SEQ ID NO: 169171 - protein, 336 aa, Zea Mays
MLRCPDPSCAAAVGQDMINSLAADDDKEKYGRYLRRSYIEDNRKTKWCPAPGCEYAVEFVMGSGSYDVNCNCSYGFCWNCTEEAHRPVDCATVSKWILKNSAESENMNWILANSKPCPKCKRPIEKNQGCMHITCTPPCKFEFCWLCLGPWSEHGERTGGFYACNRYESARQEGAYDESERRREMAKNSLERYTHYYERWAANQSSRQKALGDLQSLQNDKLERLSDIQSQPESQLKFIVEAWLQIVECRRVLKWTYAYGFYLPEHEHAKRQFFEYLQGEAESGLERLHQCAEKELQIYLDAESPSKDFNDFRTKLAGLTRYMLLLSMPSMLALMT

SEQ ID NO: 169172 - protein, 354 aa, Zea Mays
MSAAACGHPFCSTCWRGYISTAISDGPGCLMLRCPDPSCAAAVGQDMINSLAADDDKEKYGRYLRRSYIEDNRKTKWCPAPGCEYAVEFVMGSGSYDVNCNCSYGFCWNCTEEAHRPVDCATVSKWILKNSAESENMNWILANSKPCPKCKRPIEKNQGCMHITCTPPCKFEFCWLCLGPWSEHGERTGGFYACNRYESARQEGAYDESERRREMAKNSLERYTHYYERWAANQSSRQKALGDLQSLQNDKLERLSDIQSQPESQLKFIVEAWLQIVECRRVLKWTYAYGFYLPEHEHAKRQFFEYLQGEAESGLERLHQCAEKELQIYLDAESPSKDFNDFRTKLAGLTRPFH

SEQ ID NO: 169173 - protein, 226 aa, Zea Mays
MTNGLLMKSVSGRLWVYQRSIMKCQMTEKYSHASLVSPVTCGICFESCPRGSMSAAACGHPFCSTCWRGYISTAISDGPGCLMLRCPDPSCAAAVGQDMINSLAADDDKEKYGRYLRRSYIEDNRKTKWCPAPGCEYAVEFVMGSGSYDVNCNCSYGFCWNCTEEAHRPVDCATVSKWILKNSAESENMNWILANSKPCPKCKRPIEKNQGCMHITCTPPCKFEFC

SEQ ID NO: 169174 - protein, 496 aa, Zea Mays
MTNGLLMKSVSGRLWVYQRSIMKCQMTEKYSHASLVSPVTCGICFESCPRGSMSAAACGHPFCSTCWRGYISTAISDGPGCLMLRCPDPSCAAAVGQDMINSLAADDDKEKYGRYLRRSYIEDNRKTKWCPAPGCEYAVEFVMGSGSYDVNCNCSYGFCWNCTEEAHRPVDCATVSKWILKNSAESENMNWILANSKPCPKCKRPIEKNQGCMHITCTPPCKFEFCWLCLGPWSEHGERTGGFYACNRYESARQEGAYDESERRREMAKNSLERYTHYYERWAANQSSRQKALGDLQSLQNDKLERLSDIQSQPESQLKFIVEAWLQIVECRRVLKWTYAYGFYLPEHEHAKRQFFEYLQGEAESGLERLHQCAEKELQIYLDAESPSKDFNDFRTKLAGLTSVTRNYFENLVRALETGLNDVGPSTSHGTCSKSATSKSLGGKSKSGKNRASSSSSKSGGSTRGVDDSNIWTCDQCTYANPKSARACQACDRQHR

SEQ ID NO: 169175 - protein, 320 aa, Zea Mays
MESEDDMHDANDSAEDDFYSGGEAGLAASDDGDADYDFADHDSDDSAELISHRQQQNYSILSEVDIQRRQEDDINRVSTVLSISKPEACVLLRNYNWSVSKVHDEWFADEERVRKVVGLPEKHNEMPNDREVTCGICFESCPRGSMSAAACERTGGFYACNRYESARQEGAYDESERRREMAKNSLERYTHYYERWAANQSSRQKALGDLQSLQNDKLERLSDIQSQPESQLKFIVEAWLQIVECRRVLKWTYAYGFYLPEHEHAKRQFFEYLQGEAESGLERLHQCAEKELQIYLDAESPSKDFNDFRTKLAGLTRPFH

SEQ ID NO: 169176 - protein, 206 aa, Zea Mays
MGWWENAKSVFGDAGNVGCFPRIGRKQSKNSYAFPADPGSEKRRGSGGPAPAPEEVITVEVPEVPLRELNGITASFSGEKLIGQGSYAKVYQATTRSGRLAVVKRLEKPSKHASNDVFLKQLGVASRLKHDNFVRLLGYTISGDLRVLVYEFATMGTLHDVLHGGSPSPLPCCCCCWWWSETCIQAAATLGPTTTNQPRTQGTGMC

SEQ ID NO: 169177 - protein, 314 aa, Zea Mays
MGWWENAKSVFGDAGNVGCFPRIGRKQSKNSYAFPADPGSEKRRGSGGPAPAPEEVITVEVPEVPLRELNGITASFSGEKLIGQGSYAKVYQATTRSGRLAVVKRLEKPSKHASNDVFLKQLGVASRLKHDNFVRLLGYTISGDLRVLVYEFATMGTLHDVLHGDRDVLRLPPPEQGSAARPVLLSWIHRVHIALDAARGLEYLHEMVQPPVTHKDVRSTNVLLFEGFRAKIADYNMFSQAADMARLNRSTHTLGSFGYQAPEYAMTGQMTDKSDVYSFGIVLLELLTGRKPLDRTLPPGQRSLVNWVRIIEYL

SEQ ID NO: 169178 - protein, 337 aa, Zea Mays
MARPRGKKRTAPRAAATDSVQPEAAATETAAAEPANRGRWKRVKAPPKPKPETDYFAEKRNLEDLWLSAFPVGTEWENIDKIKEFNWSFENLEKALEEGGELHAQLLDVNGESKIVLIPIVVAVDCPFPPSDKIGINSVQRENEEIVPMKAMKMAWVPYVPLEDRLSRIDSLKTKIFTLGCTQRRSALKHLKIERVKKFDYCMPYYMPLQPLEDENDTVISFLYPLEPPIVDEFDWEMDDYEDFADQKVQEGGLPEDEKEKFKEFLKEKVRERKRELKQAKEARRKAIDDMDPKVKEAFENIKFYKFYPVKTPDTPDVNNVKARYINRYYRNAHYLM

SEQ ID NO: 169179 - protein, 189 aa, Zea Mays
MKAMKMAWVPYVPLEDRLSRIDSLKTKIFTLGCTQRRSALKHLKIERVKKFDYCMPYYMPLQPLEDENDTVISFLYPLEPPIVDEFDWEMDDYEDFADQKVQEGGLPEDEKEKFKEFLKEKVRERKRELKQAKEARRKAIDDMDPKVKEAFENIKFYKFYPVKTPDTPDVNNVKARYINRYYRNAHYLM

SEQ ID NO: 169180 - protein, 488 aa, Zea Mays
MAAGRHGGYRDYEERERELDAEASRRSKEQHHHLGGRHRDVDRRRDGGRSRGGRDFANGHGRRRSPPPRSRLAGRLGDREPGEVLSGSASDDSGGRSDRGRENGVRSSSREGDMVAGTGISSPIKKRKFSPIIWDRDSPKPPHSGAARDKKSVESVPSELPPPPPLPQDHIPLSLSVEKSPMDVETTVGTESAEQLPEHEVNKVIEQEEDYPSPTMRNISTSRWAGANDDEEGGAAPMKKRSVSPADSSVPGQWKRASPEPGEVSGGRAMSRSSDSGKIGNDEKEDSEVDKDDYMDVDREHASDSGTENCMSDTDSDNEMCRPETPEPERPPHRCINMLQGCRSVDEFERLNKINEGTYGVVYRARDKKTSEIVALKKVKMEREREGFPLTSLREINILLSFHHPSIVDVKEVVVGSSLDSIFMVMEYMEHDLKGVMETMKQPYTQSEVKCLMLQLLEGVKYLHDNWVLHRDLKTSNLLLNNRPQNCC

SEQ ID NO: 169181 - protein, 120 aa, Zea Mays
MVDPDSPSPSNPTNREYLHWLVTDIPESANASYSGFFHSVLLNLRNEIVSYENPKPSAGIHRFVFVLFRQSVQQTVYAPGWRQNFNTRDFSALYNLGPPVAAVFFNCQRENGCGGRRYIR

SEQ ID NO: 169182 - protein, 185 aa, Zea Mays
MSRDPLVVGHVVGDILDPFIKTASLKVLYNNKELTNGSDLKPSQVASEPRVEIGGRDMRNLYTLVMVDPDSPSPSNPTNREYLHWLVTDIPESANASYSGFFHSVLLNLRNEIVSYENPKPSAGIHRFVFVLFRQSVQQTVYAPGWRQNFNTRDFSALYNLGPPVAAVFFNCQRENGCGGRRYIR

SEQ ID NO: 169183 - protein, 109 aa, Zea Mays
MVDPDSPSPSNPTNREYLHWLVTDIPESANASYRNEIVSYENPKPSAGIHRFVFVLFRQSVQQTVYAPGWRQNFNTRDFSALYNLGPPVAAVFFNCQRENGCGGRRYIR

SEQ ID NO: 169184 - protein, 67 aa, Zea Mays
MSRDPLVVGHVVGDILDPFIKTASLKVLYNNKELTNGSDLKPSQVASEPRVEIGGRDMRNLYTLVSP

SEQ ID NO: 169185 - protein, 927 aa, Zea Mays
MISRRAAATAALRASVRRACSSSSRAADPDDQLLGLLEAPEPQRGPRLSSKDFAFLQVPTPVLHAAALPPPEAVLISKAIRAYASDFDGKAERFLRRHRDFLNDAVVVAVLRSVRTPELCVRFFLWAERQVGYSHTGACYNALAEVLHFDDRARTTERLLREIGEDDREVLGRLLNVIVRKCCRHGAWAKALEELGRLKDFGYRPSGATYNALVQVLATAGQMDMGFRVQKEMSELGFCTDKFTVGCFAQALCKEGRWSDALVMIEREDFKLDTVLCTQMISGLMEASLFDEAISFLHRMRCNSCIPNVVTYRTLLAGFLKKKQLGWCKRIISMMMNEGCNPNPSLFNSLVHSYCNARDYPYAYKLLNRMAGCGCPPGYVVYNIFIGSICSGEELPSPDLLALAEKVYEEMLASSCVLNKVNTANFARCLCGMGKFDKAFQIIKLMMRKGFVPDTSTYSKVGLIEQARSWFDEMESVGCSPSVVTYTALLHAYLKTKQVPQASDIFHRMVDAGCAPNTITYSALVDGLCKAGESQKACEVYAKMIGTSDNVGSDFYFEGEHTDSIAPNVVTYGALIDGLCKAHKVVDAQELLDVMSSNGCEPNHIIYDALIDGFCKVGKLDNAQEVFFRMSKCGYLPTVHTYTSLIDAMFKDRRLDLAIKVLSQMLESSCTPNVVTYTAMIDGLCRIGECQKALKLLSMMEKRGCNPNVVTYTSLIDGLGKSGKVDMSLQLFTQMITQGCAPNYVTYRVLINHCCAAGLLDEAHSLLSEMKQTYWPKYVQGYCSVVQGFSKKFIASLGLLEELESHGMVSIAPVYGLLIDSFSKAGRLEKALELHKEMMEVSSSLNITSKDTYTSLIQALCLASQLEKAFELYSEITRKGVVPELSAFICLIKGLIKVNKWNEALQLCYSMCDEGVNWQSNNSFDGG

SEQ ID NO: 169186 - protein, 79 aa, Zea Mays
MRQIWKEIAHRTATVTVRWCTGQSGAPPVAEPPKLLGPHAPVLVPKTSDGYACAPDNLTGSVRFPQGHRINHLQPEPRD

SEQ ID NO: 169187 - protein, 272 aa, Zea Mays
MYSWEKLFTERLVERRESEVKHLATRKYLDAWCVYFWATTPTLFSLSTFSIFAITGHALDAATVFTCVALFNTLISPLNSFPWVINGMIDAVISSRRLSNYLSTPEHHSSELNASADLLNHHFKRYSKVGSGKSSLLNTIIGETRVISGFNCLCTTEVIEACALHVDILAMTRGDMSHIGEKGTNLSGGQRARLALARALYHNSDVYLFDDILSAVDSQVASCILEKAIMGAPTNAENKITKHTQSSVKRQSSDGSVMSDGPGQPSDITQYV

SEQ ID NO: 169188 - protein, 194 aa, Zea Mays
MTPEAALDHVRSIRPRVLLAPSQWHAISSFGALTGGQLPVWSTNLACFLEAIEAGCTNTGNDTIVQQDNIDKENDSAMKLDVSSSMEKPSGQGPEESILESDCIGDVPIECDKHGDSEPLSMEGKIISGNVNVKNQISREDLKEAFKNFGTVRMRQQSETLGKHAMHFLAGYISMFSTQGPFQTGITRGALSTY

SEQ ID NO: 169189 - protein, 370 aa, Zea Mays
MTPEAALDHVRSIRPRVLLAPSQWHAISSFGALTGGQLPVWSTNLACFLEAIEAGCTNTGNDTIVQQDNIDKENDSAMKLDVSSSMEKPSGQGPEESILESDCIGDVPIECDKHGDSEPLSMEGKIISGNVNVKNQISREDLKEAFKNFGTVRMRQQSETLGKHAMHFLAGYISMFSTQGPFQTGITRISCAGELLAHIRTVKMYSWEKLFTERLVERRESEVKHLATRKYLDAWCVYFWATTPTLFSLSTFSIFAITGHALDAATVFTCVALFNTLISPLNSFPWVINGMIDAVISSRRLSNYLSTPEHHSSELNASADLLNHHFKRYSKVGSGKSSLLNTIIGETRVISGFNCLCTTGTMDFIWLFTR

SEQ ID NO: 169190 - protein, 254 aa, Zea Mays
MEGKIISGNVNVKNQISREDLKEAFKNFGTVRMRQQSETLGKHAMHFLAGYISMFSTQGPFQTGITRISCAGELLAHIRTVKMYSWEKLFTERLVERRESEVKHLATRKYLDAWCVYFWATTPTLFSLSTFSIFAITGHALDAATVFTCVALFNTLISPLNSFPWVINGMIDAVISSRRLSNYLSTPEHHSSELNASADLLNHHFKRYSKVTHNPMAIIFQNVSCSWSSSSVAELNIVLRDISLQLQKGSLLQL

SEQ ID NO: 169191 - protein, 262 aa, Zea Mays
MEGKIISGNVNVKNQISREDLKEAFKNFGTVRMRQQSETLGKHAMHFLAGYISMFSTQGPFQTGITRISCAGELLAHIRTVKMYSWEKLFTERLVERRESEVKHLATRKYLDAWCVYFWATTPTLFSLSTFSIFAITGHALDAATVFTCVALFNTLISPLNSFPWVINGMIDAVISSRRLSNYLSTPEHHSSELNASADLLNHHFKRYSKVTHNPMAIIFQNVSCSWSSSSVAELNIVLRDISLQLQKGSLLQLLVLVNHLY

SEQ ID NO: 169192 - protein, 331 aa, Zea Mays
MTPEAALDHVRSIRPRVLLAPSQWHAISSFGALTGGQLPVWSTNLACFLEAIEAGCTNTGNDTIVQQDNIDKENDSAMKLDVSSSMEKPSGQGPEESILESDCIGDVPIECDKHGDSEPLSMEGKIISGNVNVKNQISREDLKEAFKNFGTVRMRQQSETLGKHAMHFLAGYISMFSTQGPFQTGITRISCAGELLAHIRTVKMYSWEKLFTERLVERRESEVKHLAVFTCVALFNTLISPLNSFPWVINGMIDAVISSRRLSNYLSTPEHHSSELNASADLLNHHFKRYSKVGSGKSSLLNTIIGETRVISGFNCLCTTGTMDFIWLFTR

SEQ ID NO: 169193 - protein, 288 aa, Zea Mays
MYSWEKLFTERLVERRESEVKHLATRKYLDAWCVYFWATTPTLFSLSTFSIFAITGHALDAATVFTCVALFNTLISPLNSFPWVINGMIDAVISSRRLSNYLSTPEHHSSELNASADLLNHHFKRYSKVGSGKSSLLNTIIGETRVISGFNCLCTTEVIEACALHVDILAMTRGDMSHIGEKGTNLSGGQRARLALARALYHNSDVYLFDDILSAVDSQVASCILEKAIMGAPTNAENKITKHTQSSVIVARPREVATLTCSIWETTMTDSALLNPKMTVHYSKTTEF

SEQ ID NO: 169194 - protein, 475 aa, Zea Mays
MTPEAALDHVRSIRPRVLLAPSQWHAISSFGALTGGQLPVWSTNLACFLEAIEAGCTNTGNDTIVQQDNIDKENDSAMKLDVSSSMEKPSGQGPEESILESDCIGDVPIECDKHGDSEPLSMEGKIISGNVNVKNQISREDLKEAFKNFGTVRMRQQSETLGKHAMHFLAGYISMFSTQGPFQTGITRISCAGELLAHIRTVKMYSWEKLFTERLVERRESEVKHLATRKYLDAWCVYFWATTPTLFSLSTFSIFAITGHALDAATVFTCVALFNTLISPLNSFPWVINGMIDAVISSRRLSNYLSTPEHHSSELNASADLLNHHFKRYSKVGSGKSSLLNTIIGETRVISGFNCLCTTEVIEACALHVDILAMTRGDMSHIGEKGTNLSGGQRARLALARALYHNSDVYLFDDILSAVDSQVASCILEKAIMGAPTNAENKITKHTQSSVKRQSSDGSVMSDGPGQPSDITQYV

SEQ ID NO: 169195 - protein, 320 aa, Zea Mays
MACFWHGVTWPNPRPNSEDGYKSSIREMRKQRRKESDLIPFCRRLQARFSSPTLDGGPAVRSRPGGGSPEATAPSQMVFRAVPIPGEIFCHPTLPYFSLDSAQIRAVGRTIFDRELFHVDLDDAPVFDADTDNLSVEPIFDDVVFEDIEPNFDDLDDEPLFDTKFDELDKGSVFDTESIPDHVAVSVFEFVRPEYDAELTVFDTDSDSLNDLPVVDMGPVHDAELAVFNQGNDGSSTAHTGVLDGHPVFDVELVFDEEPLIEIDCSIFNTNAPFMCLTDCLSYVDDMVSATFKEGHIFDKETVVEAVQKESGRDYYTAHD

SEQ ID NO: 169196 - protein, 344 aa, Zea Mays
MACFWHGVTWPNPRPNSEDGYKSSIREMRKQRRKESDLIPFCRRLQARFSSPTLDGGPAVRSRPGGGSPEATAPSQMVFRAVPIPGEIFCHPTLPYFSLDSAQIRAVGRTIFDRELFHVDLDDAPVFDADTDNLSVEPIFDDVVFEDIEPNFDDLDDEPLFDTKFDELDKGSVFDTESIPDHVAVSVFEFVRPEYDAELTVFDTDSDSLNDLPVVDMGPVHDAELAVFNQGNDGSSTAHTGVLDGHPVFDVELVFDEEPLIEIDCSIFNTNAPFMCLTDCLSYVDDMVSATFKEGHIFDKETVVEAVQKESGRDYYTAHGGTTYVHCKAGRGRSTTIVLCYLVG

SEQ ID NO: 169197 - protein, 336 aa, Zea Mays
MTPEAALDHVRSIRPRVLLAPSQWHAISSFGALTGGQLPVWSTNLACFLEAIEAGCTNTGNDTIVQQDNIDKENDSAMKLDVSSSMEKPSGQGPEESILESDCIGDVPIECDKHGDSEPLSMEGKIISGNVNVKNQISREDLKEAFKNFGTVRMRQQSETLGKHAMHFLAGYISMFSTQGPFQTGITRISCAGELLAHIRTVKMYSWEKLFTERLVERRESEVKHLAVFTCVALFNTLISPLNSFPWVINGMIDAVISSRRLSNYLSTPEHHSSELNASADLLNHHFKRYSKVTHNPMAIIFQNVSCSWSSSSVAELNIVLRDISLQLQKGSLLQL

SEQ ID NO: 169198 - protein, 332 aa, Zea Mays
MAEAPVARLDGAAIQIKNLLYVFAGYGTINHVHSHVDIYNFSDNTWGGRFDMPEDMAHSHLGMVTDGRFIYVVTGQYGPQCRGPTTRNFVLDTETKEWRGMPPLPVPRYAPATQLWRGRLHVMGGSKEDRHEPALEHWSLAVKDGKALEKEWRSEKPIPRGGPHRACVVANDKLLVIGGQEGDFMAKPGSPIFKCVRRSEVVYSNVYMLDDGTTWKELPPMPKPDSHIEFAWVNVNNSLVIAGGTTDKHPITKKMVLVGEVFRFNLGTLEWSVIGRLPFRIKTTLVGYWDGWLYFTSGQRDKGPKDPSPKKVKWVALGTVCHCHRCVVCLFF

SEQ ID NO: 169199 - protein, 281 aa, Zea Mays
MPEDMAHSHLGMVTDGRFIYVVTGQYGPQCRGPTTRNFVLDTETKEWRGMPPLPVPRYAPATQLWRGRLHVMGGSKEDRHEPALEHWSLAVKDGKALEKEWRSEKPIPRGGPHRACVVANDKLLVIGGQEGDFMAKPGSPIFKCVRRSEVVYSNVYMLDDGTTWKELPPMPKPDSHIEFAWVNVNNSLVIAGGTTDKHPITKKMVLVGEVFRFNLGTLEWSVIGRLPFRIKTTLVGYWDGWLYFTSGQRDKGPKDPSPKKVKWVALGTVCHCHRCVVCLFF

SEQ ID NO: 169200 - protein, 94 aa, Zea Mays
MPSSHSATVTALSVAVGIQEGFRSATFATALVFACVVMHDAFGVRLHAGKQAEVLNQIVYELPEEHPLSETKPLREILGHTVPQVELNASYYLS

SEQ ID NO: 169201 - protein, 229 aa, Zea Mays
MNASEDKLKAVSEELGHEIRVFSSENFALQPSKLPSADHEEGDDFYELQPADYYNLISNRMGELSKMLKTRKMREAELAAQRAKRTKAVMRVRFPDGYILEADFLPSERIHSLVDLLMKVLARPDLPFYLYTVPPKKRILDTSQDFYTSGFVPGANVHFSYDLPEDDLKAGPFLREGILSLDGLSLLLKPASQPDDSRMNSSTHQSGASQSDPVPTTNKKPGRPKWLKR

SEQ ID NO: 169202 - protein, 63 aa, Zea Mays
MLLRLHVGFDSPAATAPHSGCAKDMLIRLCFQTLRKTKRKANICIWSWALLMLPPQDIVAKCF

SEQ ID NO: 169203 - protein, 92 aa, Zea Mays
MLLRLHVGFDSPAATAPHSGCAKDMLIRLCFQTLRKTKVNCCRRDSILVSFFIRTILISTASCLEESKYMHMVMGFIDASASGYSCKMFLRQ

SEQ ID NO: 169204 - protein, 201 aa, Zea Mays
MATRNFKKAASLFLDSISTFTTYELFTYDTFIFYTVLTSVISLDRVSLKQKVVDAPEILAVIGKVPHLSEFLNSLYNCQYKSFFIAFSGLTEPIKLERYLQPHFRYYMREVRTVVYSQFLESYKSVTMEAMAAAFGVTVDFIDQELSRFIAAGKLHCKIDKVAGVLETNRPDARNAFYQATIKQGDFLLNRIQKLSRVIDL

SEQ ID NO: 169205 - protein, 288 aa, Zea Mays
MRSDVIMSMFMNELYGFQLDNHRWYPLELRKDKPAKIKARNIKRKESTNDVEANIIDDEGDEVMVDVEEAIEGQPEVNGVSNQLIKTLNITKDGSSRSIDVLSDSTAQESFLEASESEWLEISEEEDDDDDDETDDDENEEGDASQTDEDEEESDEDAAKNVSSAVSLLKGESKTMRRKEKRARIEQIRVILGLSDSQRTPVPGESLRDFYKRTNMYWQMAAYEHTQHTGKELRKDGFDLAETRFKELKPILDELAVLEAEQKAEEEASASTSSKRDTKKPKQKSARR

SEQ ID NO: 169206 - protein, 518 aa, Zea Mays
MNDIVILSVQTFVYGDLYRYDVEKNEWKLVSSPNSPPPRSAHQTVAWKNNIYMFGGEFTSPNQERFHHYKDFWTLDLKTNQWEQILAKGCPSARSGHRMVLYKHKIVLFGGFYDTLREVRYYNDLHVFDLDHFKWEEIKPRPGCLWPSPRSGFQLAVYQDQIYLYGGYFKEVSSDKEKGTVHADMWSLDPRTWEWNKVKKAGMPPGPRAGFSMCVHKKRAVLFGGVVDMEVEGDVIMSMFMNELYGFQLDNHRWYPLELRKDKPAKIKARNIKRKESTNDVEANIIDDEGDEVMVDVEEAIEGQPEVNGVSNQLIKTLNITKDGSSRSIDVLSDSTAQESFLEASESEWLEISEEEDDDDDDETDDDENEEGDASQTDEDEEESDEDAAKNVSSAVSLLKGESKTMRRKEKRARIEQIRVILGLSDSQRTPVPGESLRDFYKRTNMYWQMAAYEHTQHTGKELRKDGFDLAETRFKELKPILDELAVLEAEQKAEEEASASTSSKRDTKKPKQKSARR

SEQ ID NO: 169207 - protein, 384 aa, Zea Mays
MAAAPSPRPRMAHRKGGAAPISLFLDTDLGTHLALLVAPDTGIRGLKSQVAAEHAAAFPDIGPVITKSFQVRRKGVLYRLSDSMTVMSSFTKIEGGCFLHVNMAEATEATYCCQDAPAIDDKRLSDVSLGIHVKNHIKELPVMASDVACDLLPRDLEGGNDDTTLNNVQAHDALPNCTLVPSSSQLNTEILKNKAVGMDSDAEAGIDQVIDKAKSYSGQIKHANQAEGTYISSTSMACVDKSSNESNMSHAVAELHASRDHGVGDDVSDKKQVRVEQQLLEEIQSKDTLSQVKEHKKSRTGFFDASCTSLLKTGISSTAYDESEASDDDGAISLSQKSLKGGLHISSILRGSRSYKKARKKLEELLDDDDTIVPDSQPTDGLRG

SEQ ID NO: 169208 - protein, 825 aa, Zea Mays
MEKGGRSTDVSNKRHTNQITSQVKKGKKSKVGSVGMPTVDATGEKDHMYSENAAKQDTVSTKKEIAHEPSVQQMSNIVYQGDSNVVENPSGDGKKKKKRRRHSESLKGMNPSQDLTSSSGFVTNKNSIQCTDAAPIDAKQTTQGIIEGETVNEHMKLSRSLDVAATNIVDGVLADLRPKDSLSKDLDEDLLPGQTHLGSNQNGLEVPESIAVKVGSVTAALPPKCPAAVHFASPVSSPRQKKSKGKKSKVLSTMTDSSHQSSGVSEEDANRELTESDSLRFADKTSDPEDIVTGNVVAQADDKRKTTKRQRKKGSVKQVCDTLALKETNDAEENLVQGGYVVDTPLSTVGEVEQKGKSSQIPTPKIRKTNCSTHGLDSHTTKDNQGVYVTDIIETHDNENAAGTPTLHEVQKYAMVLKSANTNSQKQRKTSSNSELQSQDCALEHGFTADLVNGRTEREVSTTSSASAVKPDYHTVFHRANDGINFLDHFSCSNMNDDPSIAAESKQNNEDEPLREMKNKKKKWKQGTSSIEPNDILESFPSEKASLTGHFGTSKAIVSSVAKESMNIENENVNDGKEKKRKGKANMEVPTAEKDNSNCDNQGIDISTQESLISFVQNERTGQDNGKESNSKVTQNASIMQHGREDPTWNHTPEKNLHQSVDDDQNKLLTEKDHAHISKEVGKFTSQPKPHAKIRKPDEFTIKGKVAPNPKPVSNLMKDFSTSPGASSDSTEGMPQSANRYKVSVQKVPSKMYQETSGNSKKASRKIVSGAISNDSIREGCGDELDTTTVMEGSSDSSSTSADSGISSTAYDESEASDDDGAISL

SEQ ID NO: 169209 - protein, 1392 aa, Zea Mays
MAEATEATYCCQDAPAIDDKRLSDVSLGIHVKNHIKELPVMASDVACDLLPRDLEGGNDDTTLNNVQAHDALPNCTLVPSSSQLNTEILKNKAVGMDSDAEAGIDQVIDKAKSYSGQIKHANQAEGTYISSTSMACVDKSSNESNMSHAVAELHASRDHGVGDDVSDKKQVRVEQQLLEEIQSKDTLSQVKEHKKSRTGFFDASCTSLLKTGTTLVESLNTSNHQEVHETFNVESIQLENPSTVGKKKKRKRRQLSPSKSASAQETIEPSATAVDLLKPTGEGLPNNSLGIQIHNILAMDNLSQEKEHKKSRTSSPDTSSRHLLETDPASLREPLNTSNHQVHDTLHQESIQLENPSAAGKKKKRKRQLSPSKSVSTQITTEPSPGAAPADLSRSTGDEAYNVELNGKDETIVEESGCRLSSSELNDANQGGKSVQFVSDALASIDLICKQEKFGHSLKGCKDPSIANAIYSTSENVAIEGKTTKESCVPLDRGDKHEEKKQHNEGCHNEAVPEISHMEKGGRSTDVSNKRHTNQITSQVKKGKKSKVGSVGMPTVDATGEKDHMYSENAAKQDTVSTKKEIAHEPSVQQMSNIVYQGDSNVVENPSGDGKKKKKRRRHSESLKGMNPSQDLTSSSGFVTNKNSIQCTDAAPIDAKQTTQGIIEGETVNEHMKLSRSLDVAATNIVDGVLADLRPKDSLSKDLDEDLLPGQTHLGSNQNGLEVPESIAVKVGSVTAALPPKCPAAVHFASPVSSPRQKKSKGKKSKVLSTMTDSSHQSSGVSEEDANRELTESDSLRFADKTSDPEDIVTGNVVAQADDKRKTTKRQRKKGSVKQVCDTLALKETNDAEENLVQGGYVVDTPLSTVGEVEQKGKSSQIPTPKIRKTNCSTHGLDSHTTKDNQGVYVTDIIETHDNENAAGTPTLHEVQKYAMVLKSANTNSQKQRKTSSNSELQSQDCALEHGFTADLVNGRTEREVSTTSSASAVKPDYHTVFHRANDGINFLDHFSCSNMNDDPSIAAESKQNNEDEPLREMKNKKKKWKQGTSSIEPNDILESFPSEKASLTGHFGTSKAIVSSVAKESMNIENENVNDGKEKKRKGKANMEVPTAEKDNSNCDNQGIDISTQESLISFVQNERTGQDNGKESNSKVTQNASIMQHGREDPTWNHTPEKNLHQSVDDDQNKLLTEKDHAHISKEVGKFTSQPKPHAKIRKPDEFTIKGKVAPNPKPVSNLMKDFSTSPGASSDSTEGMPQSANRYKVSVQKVPSKMYQETSGNSKKASRKIVSGAISNDSIREGCGDELDTTTVMEGSSDSSSTSADSGISSTAYDESEASDDDGAISLSQKSLKGGLHISSILRGSRSYKKARKKLEELLDDDDTIVPDSQPTDGLRG

SEQ ID NO: 169210 - protein, 158 aa, Zea Mays
MIKLRYPKKLFRRSSSKGSSTTSSSSSSDGDAAGSARGGEIEWEVRPGGMLVQKRDDGRGHVDVITVRVATGFSWHDVSVVATCTFGELKAVLWKMTGLEPREQRLLFRGKEREDGDHLHMIGVRDMDKVLLLEDPALKDMKLRAGLTAAYRQTFIRV

SEQ ID NO: 169211 - protein, 92 aa, Zea Mays
MQAKLGLVNFEAEGRGCICRWVESTHVEALLARLVPAAPCAAAGTDAPTPCTPACPSVVTLASSRRSACSAWRSPSPPIHACPAHSQEQQRH

SEQ ID NO: 169212 - protein, 901 aa, Zea Mays
MGSERSFRGPSARTASYRKSSAVRIRGLNPPRSKQVHRVRQDGHRKSLDSNHSNHSSIRQLADNMVSNVDADKEEGEVNSYERPKLAMPDKSDEEVKMPGCSKSRSKSSAAMSRVGSPCMSASEARSVGSRRSTLGHGTEDTRLRSNDVVGSNFSGCGISYCWSGASKYRELYSDSDGPDQPLLSTDGIEAAFQGNVPYTETLRCLSQKFRPRSFSELIGLNVVAQSLLYSTCKGKVAPMYLFHGPRGTGKTSTARIFAAALNCVSLEEQRPCGFCKECVILFSGKSRDVKELDAAKMDRLGRVKALLKSASLVPYSSRFKVFIVDECHLLREDAWSAILKSLDEPYRHTVYIMITSDIESLPRASITHCQKFHFPKIKVADIVYRLERICIEEGLEFDHDGLYFIAAKSNGSLRDSEIMLDQLSLLGKKVTISLVHELVGSVSDDELIELLDLALSSDTTNTVRRARELMGSAIDPLQLVSQLANLIMDILSGRCQSAVTEVSKSFLGRYALSEVGIKKLRHALKILSETEKQLRTSRNQATWVTVALLQFSTNEPNPVAETNDMHAHSVTGYTDDWVSKVHSSANFCQACNSSKSNCSERHCRRLKLENIWRRAIGKCRSRSAKSFLRKEGFLSSVHVTEELAIAEVGFEHPDHLSRAEKMQSLIESSLQHVLGCNVEIRFKLVPCPVSKDARLKRQPFSFLNCSGRKQELSDSVVTDEDEAARGPGARETPLKGYTSSQQESPYTMRRVDSKPTTVHGCEDDARSTLTSSRSTADDLTRTCRSETGYPKGVREQGRSDGTQQEPDLQPNCFSRTLKLQKKLLSSGAAHTICLRVQPHNKMDFLPKKEFDTYFCAYEPYEQCPRSDSRATYSSRDDDLWSKNSRFGSNLLCWRAPKQSM

SEQ ID NO: 169213 - protein, 978 aa, Zea Mays
MMDMRRHSVSVDAPLSRTLVQLKRVRSLRDPATNSMSKYASPSDHMIWETASSNGVTPELGRSAHHHLVGEDEDVGAEPTTMGSERSFRGPSARTASYRKSSAVRIRGLNPPRSKQVHRVRQDGHRKSLDSNHSNHSSIRQLADNMVSNVDADKEEGEVNSYERPKLAMPDKSDEEVKMPGCSKSRSKSSAAMSRVGSPCMSASEARSVGSRRSTLGHGTEDTRLRSNDVVGSNFSGCGISYCWSGASKYRELYSDSDGPDQPLLSTDGIEAAFQGNVPYTETLRCLSQKFRPRSFSELIGLNVVAQSLLYSTCKGKVAPMYLFHGPRGTGKTSTARIFAAALNCVSLEEQRPCGFCKECVILFSGKSRDVKELDAAKMDRLGRVKALLKSASLVPYSSRFKVFIVDECHLLREDAWSAILKSLDEPYRHTVYIMITSDIESLPRASITHCQKFHFPKIKVADIVYRLERICIEEGLEFDHDGLYFIAAKSNGSLRDSEIMLDQLSLLGKKVTISLVHELVGSVSDDELIELLDLALSSDTTNTVRRARELMGSAIDPLQLVSQLANLIMDILSGRCQSAVTEVSKSFLVSEVGIKKLRHALKILSETEKQLRTSRNQATWVTVALLQFSTNEPNPVAETNDMHAHSVTGYTDDWVSKVHSSANFCQACNSSKSNCSERHCRRLKLENIWRRAIGKCRSRSAKSFLRKEGFLSSVHVTEELAIAEVGFEHPDHLSRAEKMQSLIESSLQHVLGCNVEIRFKLVPCPVSKDARLKRQPFSFLNCSGRKQELSDSVVTDEDEAARGPGARETPLKGYTSSQQESPYTMRRVDSKPTTVHGCEDDARSTLTSSRSTADDLTRTCRSETGYPKGVREQGRSDGTQQEPDLQPNCFSRTLKLQKKLLSSGAAHTICLRVQPHNKMDFLPKKEFDTYFCAYEPYEQCPRSDSRATYSSRDDDLWSKNSRFGSNLLCWRAPKQSM

SEQ ID NO: 169214 - protein, 903 aa, Zea Mays
MMDMRRHSVSVDAPLSRTLVQLKRVRSLRDPATNSMSKYASPSDHMIWETASSNGVTPELGRSAHHHLVGEDEDVGAEPTTMGSERSFRGPSARTASYRKSSAVRIRGLNPPRSKQVHRVRQDGHRKSLDSNHSNHSSIRQLADNMVSNVDADKEEGEVNSYERPKLAMPDKSDEEVKMPGCSKSRSKSSAAMSRVGSPCMSASEARSVGSRRSTLGHGTEDTRLRSNDVVGSNFSGCGISYCWSGASKYRELYSDSDGPDQPLLSTDGIEAAFQGNVPYTETLRCLSQKFRPRSFSELIGLNVVAQSLLYSTCKGKVAPMYLFHGPRGTGKTSTARIFAAALNCVSLEEQRPCGFCKECVILFSGKSRDVKELDAAKMDRLGRVKALLKSASLVPYSSRFKVFIVDECHLLREDAWSAILKSLDEPYRHTVYIMITSDIESLPRASITHCQKFHFPKIKVADIVYRLERICIEEGLEFDHDGLYFIAAKSNGSLRDSEIMLDQLSLLGKKVTISLVHELVGSVSDDELIELLDLALSSDTTNTVRRARELMGSAIDPLQLVSQLANLIMDILSGRCQSAVTEVSKSFLGRYALSEVGIKKLRHALKILSETEKQLRTSRNQATWVTVALLQFSTNEPNPVAETNDMHAHSVTGYTDHLSRAEKMQSLIESSLQHVLGCNVEIRFKLVPCPVSKDARLKRQPFSFLNCSGRKQELSDSVVTDEDEAARGPGARETPLKGYTSSQQESPYTMRRVDSKPTTVHGCEDDARSTLTSSRSTADDLTRTCRSETGYPKGVREQGRSDGTQQEPDLQPNCFSRTLKLQKKLLSSGAAHTICLRVQPHNKMDFLPKKEFDTYFCAYEPYEQCPRSDSRATYSSRDDDLWSKNSRFGSNLLCWRAPKQSM

SEQ ID NO: 169215 - protein, 99 aa, Zea Mays
MALLSLLAFLLATAAAPAAVAAVGNATYDGSKTDASPAVLCNGEGCEPPQPNREPPGAGGYVPYYNTSAASPPALLLAPVTGGYYVMAMACIFLLWTLV

SEQ ID NO: 169216 - protein, 227 aa, Zea Mays
MKSWSWRRAKARPPPRGSAHGSGAPSFWGSQPGRTPAAGGGGARRRGTSCRSGRRRPTRGPAPAASRSLTTPSRTRSRRSTPSSPTPSTNAAAGGGDNDGGDENVTAEKDDAESRELASMTKQISSWLQLKQQIRAPVSAASFQSSTKGPKSQQEWIVRARDTDSPRVVRTTVTTRWWLEAINITPATPFNGIQVIQSTQALLFIAIARARASTPSHTQSNRDPPSA

SEQ ID NO: 169217 - protein, 362 aa, Zea Mays
MKDGANNNWCYCSTDGFKVCSKCSKSNNDNIKEEANKCPGDKKENMENHASSAWTDTETLLLLEGVLKHGDDWDLIAQHVRTKNKSECIAMLIQLPFGEHMLGTINGKFVSRLHINQTDDGKTNQHIMESSSHSTEMADGMQIDGSEDSADKSVEEYPTKRRRLFFSMDATTSLMEQLAILTTAASPDVAAAAADAAIKAFGNENPQARKAFRLNEQEYKTKAFASNHVQQIDHKVSNKDTAMHGQSGSDKQEKKFIASAYQLRAAVATAVGVAAARAKMLADQEEREMELLMASVIETQLRKMQYKIKHFEELDSLMDQEYTAIQQMKGSLMNEWIKVLEHAFRAGVSLPRDELLTKLLLN

SEQ ID NO: 169218 - protein, 354 aa, Zea Mays
MKAPKKDGFKVCSKCSKSNNDNIKEEANKCPGDKKENMENHASSAWTDTETLLLLEGVLKHGDDWDLIAQHVRTKNKSECIAMLIQLPFGEHMLGTINGKFVSRLHINQTDDGKTNQHIMESSSHSTEMADGMQIDGSEDSADKSVEEYPTKRRRLFFSMDATTSLMEQLAILTTAASPDVAAAAADAAIKAFGNENPQARKAFRLNEQEYKTKAFASNHVQQIDHKVSNKDTAMHGQSGSDKQEKKFIASAYQLRAAVATAVGVAAARAKMLADQEEREMELLMASVIETQLRKMQYKIKHFEELDSLMDQEYTAIQQMKGSLMNEWIKVLEHAFRAGVSLPRDELLTKLLLN

SEQ ID NO: 169219 - protein, 515 aa, Zea Mays
MKLMRLGTRPDSFFTSGPVRSVYTEVATDLQIQVDHCLFRLHKALCAGSDAAELPGFPGGAEAFEACAKFCYGVAITVGAHNVVPLRCAAARLGMTEAADRGNLAAKLDAFLASCLLRRWKDALAVLRSAAGRHAAECEELGVTSRCVEAVATLVVSDPGGGDAAAAPSSSASPWWARDVSDLGVDLFWRVMVAVKAAGTVKGRAVGDALKTYARRWLPAVAKSGYLVLEQTDISTAEWNSRLLVEKMVSLLPAERNAVSCSFFLKLLKAASVLGASPASKAELTRRVALQLEDASVSDLLIPSSCAGETLYDVDAVTAILEELALRQAAAAGVPEASPPHARGHRRSRSAESSEYEGARRSASAPASHGAMVRIGRLVDGFLMEVAKDPNLPLDKLIAIAEAVPDCARPEHDHLYRAVDTYLRVHTWKTDCTISVSARLIFDASLTVLASIYATGAPGDRQGFEEEAVQGSQLQEALRDGVYARRPERAAAAPGGRAGALLRERTRGGAVRPRG

SEQ ID NO: 169220 - protein, 541 aa, Zea Mays
MRLYVYVLEARGLPAPRQRRGGVVLFYAKVTVGKQRFRTRAVEASDLGGAAVAAAWNEEFVFAVGSDGAAGGEELEVAVARRGARGREVVGTVRLPVPAATAAAGAPGERRSVPPTWFTLQLQRRRKGVVGVDGGDEAAADCGKILLSFSLYGENNVNSVVHTDAEVERSLDMEHSSCNNGGVVDSPRSHDTDNSEHFTQEDCNSITEVDDLAETSTTATANGASDTERMVPDAAASFFEEAMEIMKSRRSTPELPQDLDGGIIFEHAYLVGSKELNHLLFRPDSQFFKDVRELQGTMDYEEQPWTWKSADPPSLTRTCRYTTGASNKFMKAVKTSEEQTYLRADGKSFVVTARVRTPEVPFGNCFAVVLLYKIVHRTGEEGAHLTVSYNVDFLQSTMMRSVIEGSVRDGLRENFQGFAQVLSRHVVEVAGSVGMSKEQLLAPLQVEHRQSDIRLAYRYFCNFTAVSTVLFALYVLVHIFLSGPAGLEFSGLDLPDSFGELITAGVLVLQLQRLLNMVTHFVEARLQRVIMGLKQMVTVGC

SEQ ID NO: 169221 - protein, 484 aa, Zea Mays
MRLYVYVLEARGLPAPRQRRGGVVLFYAKVTVGKQRFRTRAVEASDLGGAAVAAAWNEEFVFAVGSDGAAGGEELEVAVARRGARGREVVGTVRLPVPAATAAAGAPGERRSVPPTWFTLQLQRRRKGVVGVDGGDEAAADCGKILLSFSLYGENNVNSVVHTDAEVERSLDMEHSSCNNGGVVDSPRSHDTDNSEHFTQEDCNSITEVDDLAETSTTATANGASDTERMVPDAAASFFEEAMEIMKSRRSTPELPQDLDGGIIFEHAYLVGSKELNHLLFRPDSQFFKDVRELQGTMDYEEQPWTWKSADPPSLTRTCRYTTGASNKFMKAVKTSEEQTYLRADGKSFVVTARVRTPEVPFGNCFAVVLLYKIVHRTGEEGAHLTVSYNVDFLQSTMMRSVIEGSVRDGLRENFQGFAQVLSRHVVEVAGSVGMSKEQLLAPLQVEHRQSDIRLAYSWRTSPPIAALTEYGDPFCRGKVTERK

SEQ ID NO: 169222 - protein, 605 aa, Zea Mays
MRLYVYVLEARGLPAPRQRRGGVVLFYAKVTVGKQRFRTRAVEASDLGGAAVAAAWNEEFVFAVGSDGAAGGEELEVAVARRGARGREVVGTVRLPVPAATAAAGAPGERRSVPPTWFTLQLQRRRKGVVGVDGGDEAAADCGKILLSFSLYGENNVNSVVHTDAEVERSLDMEHSSCNNGGVVDSPRSHDTDNSEHFTQEDCNSITEVDDLAETSTTATANGASDTERMVPDAAASFFEEAMEIMKSRRSTPELPQDLDGGIIFEHAYLVGSKELNHLLFRPDSQFFKDVRELQGTMDYEEQPWTWKSADPPSLTRTCRYTTGASNKFMKAVKTSEEQTYLRADGKSFVVTARVRTPEVPFGNCFAVVLLYKIVHRTGEEGAHLTVSYNVDFLQSTMMRSVIEGSVRDGLRENFQGFAQVLSRHVVEVAGSVGMSKEQLLAPLQVEHRQSDIRLAYRYFCNFTAVSTVLFALYVLVHIFLSGPAGLEFSGLDLPDSFGELITAGVLVLQLQRLLNMVTHFVEARLQRGSDHGVKANGDGWLLTVALLEATSLPPGSVDPYVVLSCNGITRTSSVQLQTLEPQWNEHCRDNGVWRHGRSTCRAGR

SEQ ID NO: 169223 - protein, 459 aa, Zea Mays
MRLYVYVLEARGLPAPRQRRGGVVLFYAKVTVGKQRFRTRAVEASDLGGAAVAAAWNEEFVFAVGSDGAAGGEELEVAVARRGARGREVVGTVRLPVPAATAAAGAPGERRSVPPTWFTLQLQRRRKGVVGVDGGDEAAADCGKILLSFSLYGENNVNSVVHTDAEVERSLDMEHSSCNNGGVVDSPRSHDTDNSEHFTQEDCNSITEVDDLAETSTTATANGASDTERMVPDAAASFFEEAMEIMKSRRSTPELPQDLDGGIIFEHAYLVGSKELNHLLFRPDSQFFKDVRELQGTMDYEEQPWTWKSADPPSLTRTCRYTTGASNKFMKAVKTSEEQTYLRADGKSFVVTARVRTPEVPFGNCFAVVLLYKIVHRTGEEGAHLTVSYNVDFLQSTMMRSVIEGSVRDGLRENFQGFAQVLSRHVVEVAGSVGMSKEQLLAPLQVEHRQSDIRLAYRP

SEQ ID NO: 169224 - protein, 174 aa, Zea Mays
MSCGRGSTGEVEGGKSVAAMTPWHDSLAPPPRVLISHRPSDASGQGIVLSLQHPRSGDEVGYLFIDGQLQEINWFKERYGAWFLGDYVCEDGGLYYCTPVDPIFIFLPTFEAARMSNDKDPGKFRQLDEILYVEGYPGYQQLMNVANHHMELVCEVKGWTTPRSYLGCAARYTT

SEQ ID NO: 169225 - protein, 204 aa, Zea Mays
MSCGRGSTGEVEGGKSVAAMTPWHDSLAPPPRVLISHRPSDASGQGIVLSLQHPRSGDEVGYLFIDGQLQEINWFKERYGAWFLGDYVCEDGGLYYCTPVDPIFIFLPTFEAARMSNDKDPGKFRQLDEILYVEGYPGYQQLMNVANHHMELVCEVKVSNMKFFRLDNSKVLSWLCCKVYDLKEVFPKLGKNYAAQTEKEKCMS

SEQ ID NO: 169226 - protein, 234 aa, Zea Mays
MANYKRSTGLRSVMVLGSWEIMFVKMVAFIIAPLLIPSSFSYQLLKLHNDKDPGKFRQLDEILYVEGYPGYQQLMNVANHHMELVCEVKEVSNMKFFRLDNSKVLSWLCCKVYDLKEVFPKLGKNYAAQTEKEKLKEAVQMIREYLKDEPWLALLCKKLQLDINAITVDATTKTAEASVYADSCPAPALPSESKTANGGAKSSKGRPAKKAKTEVGSKNIKDMFRRVTRSGSGS

SEQ ID NO: 169227 - protein, 211 aa, Zea Mays
MANYKRSTGLRSVMVLGSWEIMFVKNDKDPGKFRQLDEILYVEGYPGYQQLMNVANHHMELVCEVKEVSNMKFFRLDNSKVLSWLCCKVYDLKEVFPKLGKNYAAQTEKEKLKEAVQMIREYLKDEPWLALLCKKLQLDINAITVDATTKTAEASVYADSCPAPALPSESKTANGGAKSSKGRPAKKAKTEVGSKNIKDMFRRVTRSGSGS

SEQ ID NO: 169228 - protein, 293 aa, Zea Mays
MSCGRGSTGEVEGGKSVAAMTPWHDSLAPPPRVLISHRPSDASGQGIVLSLQHPRSGDEVGYLFIDGQLQEINWFKERYGAWFLGDYVCEDGGLYYCTPVDPIFIFLPTFEAARMSNDKDPGKFRQLDEILYVEGYPGYQQLMNVANHHMELVCEVKEVSNMKFFRLDNSKVLSWLCCKVYDLKEVFPKLGKNYAAQTEKEKLKEAVQMIREYLKDEPWLDINAITVDATTKTAEASVYADSCPAPALPSESKTANGGAKSSKGRPAKKAKTEVGSKNIKDMFRRVTRSGSGS

SEQ ID NO: 169229 - protein, 210 aa, Zea Mays
MANYKRSTGLRSVMVLGSWEIMFVKNDKDPGKFRQLDEILYVEGYPGYQQLMNVANHHMELVCEVKVSNMKFFRLDNSKVLSWLCCKVYDLKEVFPKLGKNYAAQTEKEKLKEAVQMIREYLKDEPWLALLCKKLQLDINAITVDATTKTAEASVYADSCPAPALPSESKTANGGAKSSKGRPAKKAKTEVGSKNIKDMFRRVTRSGSGS

SEQ ID NO: 169230 - protein, 111 aa, Zea Mays
MLRILKVVRKNSTEATRSPGLLRVSRGSPFASRLIRTAYPRPTFPGAIRGRLPLRGVAQSLQWKRSATDSSNAVKPSQAAPSAPGNQLVTPTPRSFTYTRTEPKPNDGAMA

SEQ ID NO: 169231 - protein, 443 aa, Zea Mays
MHNHRKRSREADVRSTKSATHPVNGAPRRLLQFAVRDAVRTVPPVTSGSESASKRLCSVVSTLASDSTLDITHIRLQKTNSDLRIPVATAALRAAAEAAEDALKDSFCGSVFSRLGRMPTINSSEQSPDRRSQDLEGKEYENIDNIQAENQVEFYGRNQHGGSDVYMRDRRTEEATGSLSNIDEYGHNSSVRYNGLGSLRSALPASGGKESLVLGYVRGASEVRSGRLIAQGPPAGSGPRSSEKILNVSGNTKTQKLRTHVTRDALAFDPQVPMEKVSGARKSIGQGPHAGSGPRPSERILNVSGNTNTQKLPTHVTRDDLAFDPQVPMEKVADARKSHVKIAHANDMSMTTDKSKDLIQSSSMLEAQKATSGAAGSNTTGQPEGGSDSRTVFVSNVHFGATKDALSRHFNKFGAILKTHIVTDGVTAQRILSSCTKNQQSRR

SEQ ID NO: 169232 - protein, 758 aa, Zea Mays
MDGGEDRTFKANFTSEGVTMLQDRVKEKLSELMGDYSDDTLAEYVVVLLRNGRHKDEAAKELHVFLGDDNDAFVSWLWDHLSSNLHLYVQPKAASSKDDTRSSHNAARGLPVHSVISSTQVNHEPEAETQKTVITHKKKDWGHRKRDWGTIGRGQSETVPLRSVVDNVSLAKEKDLHESHADEKAFHKSHSVRRTRSPDMHNHRKRSREADVRSTKSATHPVNGAPRRLLQFAVRDAVRTVPPVTSGSESASKRLCSVVSTLASDSTLDITHIRLQKTNSDLRIPVATAALRAAAEAAEDALKDSFCGSVFSRLGRMPTINSSEQSPDRRSQDLEGKEYENIDNIQAENQVEFYGRNQHGGSDVYMRDRRTEEATGSLSNIDEYGHNSSVRYNGLGSLRSALPASGGKESLVLGYVRGASEVRSGRLIAQGPPAGSGPRSSEKILNVSGNTKTQKLRTHVTRDALAFDPQVPMEKVSGARKSIGQGPHAGSGPRPSERILNVSGNTNTQKLPTHVTRDDLAFDPQVPMEKVADARKSHVKIAHANDMSMTTDKSKDLIQSSSMLEAQKATSGGQPEGGSDSRTVFVSNVHFGATKDALSRHFNKFGAILKTHIVTDGVTGQSTGSAYIEFLHKESAEQALTLNGASFMLRILKVVRKNSTEATRSPGLLRVSRGSPFASRLIRTAYPRPTFPGAIRGRLPLRGVAQSLQWKRSATDSSNAVKPSQAAPSAPGNQLVTPTPRSFTYTRTEPKPNDGAMA

SEQ ID NO: 169233 - protein, 566 aa, Zea Mays
MHNHRKRSREADVRSTKSATHPVNGAPRRLLQFAVRDAVRTVPPVTSGSESASKRLCSVVSTLASDSTLDITHIRLQKTNSDLRIPVATAALRAAAEAAEDALKDSFCGSVFSRLGRMPTINSSEQSPDRRSQDLEGKEYENIDNIQAENQVEFYGRNQHGGSDVYMRDRRTEEATGSLSNIDEYGHNSSVRYNGLGSLRSALPASGGKESLVLGYVRGASEVRSGRLIAQGPPAGSGPRSSEKILNVSGNTKTQKLRTHVTRDALAFDPQVPMEKVSGARKSIGQGPHAGSGPRPSERILNVSGNTNTQKLPTHVTRDDLAFDPQVPMEKVADARKSHVKIAHANDMSMTTDKSKDLIQSSSMLEAQKATSGAAGSNTTGQPEGGSDSRTVFVSNVHFGATKDALSRHFNKFGAILKTHIVTDGVTGQSTGSAYIEFLHKESAEQALTLNGASFMLRILKVVRKNSTEATRSPGLLRVSRGSPFASRLIRTAYPRPTFPGAIRGRLPLRGVAQSLQWKRSATDSSNAVKPSQAAPSAPGNQLVTPTPRSFTYTRTEPKPNDGAMA

SEQ ID NO: 169234 - protein, 635 aa, Zea Mays
MDGGEDRTFKANFTSEGVTMLQDRVKEKLSELMGDYSDDTLAEYVVVLLRNGRHKDEAAKELHVFLGDDNDAFVSWLWDHLSSNLHLYVQPKAASSKDDTRSSHNAARGLPVHSVISSTQVNHEPEAETQKTVITHKKKDWGHRKRDWGTIGRGQSETVPLRSVVDNVSLAKEKDLHESHADEKAFHKSHSVRRTRSPDMHNHRKRSREADVRSTKSATHPVNGAPRRLLQFAVRDAVRTVPPVTSGSESASKRLCSVVSTLASDSTLDITHIRLQKTNSDLRIPVATAALRAAAEAAEDALKDSFCGSVFSRLGRMPTINSSEQSPDRRSQDLEGKEYENIDNIQAENQVEFYGRNQHGGSDVYMRDRRTEEATGSLSNIDEYGHNSSVRYNGLGSLRSALPASGGKESLVLGYVRGASEVRSGRLIAQGPPAGSGPRSSEKILNVSGNTKTQKLRTHVTRDALAFDPQVPMEKVSGARKSIGQGPHAGSGPRPSERILNVSGNTNTQKLPTHVTRDDLAFDPQVPMEKVADARKSHVKIAHANDMSMTTDKSKDLIQSSSMLEAQKATSGAAGSNTTGQPEGGSDSRTVFVSNVHFGATKDALSRHFNKFGAILKTHIVTDGVTGQSTGSPFD

SEQ ID NO: 169235 - protein, 765 aa, Zea Mays
MDGGEDRTFKANFTSEGVTMLQDRVKEKLSELMGDYSDDTLAEYVVVLLRNGRHKDEAAKELHVFLGDDNDAFVSWLWDHLSSNLHLYVQPKAASSKDDTRSSHNAARGLPVHSVISSTQVNHEPEAETQKTVITHKKKDWGHRKRDWGTIGRGQSETVPLRSVVDNVSLAKEKDLHESHADEKAFHKSHSVRRTRSPDMHNHRKRSREADVRSTKSATHPVNGAPRRLLQFAVRDAVRTVPPVTSGSESASKRLCSVVSTLASDSTLDITHIRLQKTNSDLRIPVATAALRAAAEAAEDALKDSFCGSVFSRLGRMPTINSSEQSPDRRSQDLEGKEYENIDNIQAENQVEFYGRNQHGGSDVYMRDRRTEEATGSLSNIDEYGHNSSVRYNGLGSLRSALPASGGKESLVLGYVRGASEVRSGRLIAQGPPAGSGPRSSEKILNVSGNTKTQKLRTHVTRDALAFDPQVPMEKVSGARKSIGQGPHAGSGPRPSERILNVSGNTNTQKLPTHVTRDDLAFDPQVPMEKVADARKSHVKIAHANDMSMTTDKSKDLIQSSSMLEAQKATSGAAGSNTTGQPEGGSDSRTVFVSNVHFGATKDALSRHFNKFGAILKTHIVTDGVTGQSTGSAYIEFLHKESAEQALTLNGASFMLRILKVVRKNSTEATRSPGLLRVSRGSPFASRLIRTAYPRPTFPGAIRGRLPLRGVAQSLQWKRSATDSSNAVKPSQAAPSAPGNQLVTPTPRSFTYTRTEPKPNDGAMA

SEQ ID NO: 169236 - protein, 376 aa, Zea Mays
MMMMMAGEHVLAALATLLLASLLTLVLNHFLPLLLNPKAPRGSFGWPLLGETLRFLTPHASNTLGGFLEDHCSRYGRVFKSHLFCTPTVVSCDQDLNHFILQNEERLFQCSYPRPIHGILGKSSMLVVLGEDHKRLRNLALALVTSTKLKPSYLGDIEKIALHVVGAWRRHGGVRVVAFCEEARKFAFSVIVKQVLGLSPEEPVTARILEDFLAFMKGLISFPLYIPGTPYAKAVRARERISSTVKGIIKERRSAGSWNKQGDFLDVLLSSNELSDEEKVSFVLDSLLGGYETTSLLISMVVYFLGQSAQDLDLVKREHDSIRSNKGKEECLTSEDYKKMEYTQQVINEALRCGNIVKFVHRKALKDVKYKGDVAR

SEQ ID NO: 169237 - protein, 320 aa, Zea Mays
MLWGRHIVRTCVRECQTTGIIGENVISHCQFKEDNTSVGGSWYNQEQIYIQWKELNCMTDCRYFCMTRREGERQALGLSPVKYHGKWPFLRVSVFQEPLSAALSAVNLLMHFTGWLSFFLLVNYQLPLRPQAKRTYYEYTSLWHIYAILSMNAWFWSSIFHTRDIDLTEKLDYSSAVALLGYSLILSLLRAFNVKDEASRVMFAAPILAFVTTHILYLNFYELDYGWNMKVCVVMAAVQLLTWAVWAGVSRHPSRLKVWTVVFGGALAMLLELYDFPPYMGYADAHSLWHASTIPLTCLLWSFIKDDAKFRTATLVKKAK

SEQ ID NO: 169238 - protein, 263 aa, Zea Mays
MTDCRYFCMTRREGERQALGLSPVKYHGKWPFLRVSVFQEPLSAALSAVNLLMHFTGWLSFFLLVNYQLPLRPQAKRTYYEYTSLWHIYAILSMNAWFWSSIFHTRDIDLTEKLDYSSAVALLGYSLILSLLRAFNVKDEASRVMFAAPILAFVTTHILYLNFYELDYGWNMKVCVVMAAVQLLTWAVWAGVSRHPSRLKVWTVVFGGALAMLLELYDFPPYMGYADAHSLWHASTIPLTCLLWSFIKDDAKFRTATLVKKAK

SEQ ID NO: 169239 - protein, 63 aa, Zea Mays
MGCPMVKVWQWRLCVARRLMMSWPPYSNIWSINYDKLSCVNCIIGNWVVMDFSAGTLTSKTYV

SEQ ID NO: 169240 - protein, 770 aa, Zea Mays
MMKDDNGTLSKMDLIETITKCLKENGECMSSSLRLPRGSHGHLDDVGLLENQQEGLEKLKMSFNEMKLQVESTRAEWEEDLRRLESYFEAQNHNAYQKLLEENRKLYNQVQDLKGSIRVYCRVKPFPKAQSDQRSTVDHIGENGEILIANPQKQGKDGRKIFTFNKIFGPSTSQSEVFADTQPLIRSVMDGYNVCIFAYGQTGSGKTYTMSGPDVTAEETWGVNYRSLNDLFEISQTRADSITYDVKVQMIEIYNEQVRDLLMTDGANKRLEIRNNSHVNGLNIPDANIVPVKCAQDVLDLMKVGQRNRAVGSTALNERSSRSHSVLTVHVQGKEVISGSTLRGCLHLVDLAGSERVDKSEATGERLTEAKHINKSLSALGDVISALAQKSSHVPYRNSKLTQVLQDALGGQAKTLMFVHVNPETDSFSETMSTLKFAERVATIELGAARANKEAGQVKDLKEEIAKLKLALDEKENEVAQFKDLANRVTSEMRNARTRSPLTASMSLKPEVSQESSVDTCTSEIRSSSSGKQRRFRSPLSVRELDDKSPVISRELYLSARKYKTPSPPVRSSLSVERGSFAKIVENTGSIDCTPISKVEVPPKVWSSNSKTTPSSVLTAQSLRKFRDSEENRTKIPPAVRQSMAKNRSESTPKTHNEEKPANRHHSGTKARSEARNTRDSSEIENEFAGDEPTFHFNRTAKKLPTKVMSRQSQNIDVSVRASVRGEMEPLTEGRQRRNWSKPPHAERTNMPLPDIRRSVSLPRGKNPLV

SEQ ID NO: 169241 - protein, 286 aa, Zea Mays
MPGPGAHLLYALSGGAALSRLAGPDRRFGPHHCAVYAANAFLGPDLGSFAEWLCSFLPSASAAGDLAMAAVHHPFYYPLLLGLPLAWAYAWLSRRLLRAGVLDSPSGVPLRKRQCFLLISAGSLSHFFLDHLFEENGHSTMYTWILSTGWWKGRAPINPDAVLVVGLLCTCLMGGYVYINRVNHGRSAAEKSKPIFLSHSDDSHPVLYVVCQSDIPAATPSTCHRAFSSLDTTCSMDGRCFLWPVHNRASFKLRSNASVEYSPFNLGSANSDTLPSWISVEAWEQK

SEQ ID NO: 169242 - protein, 857 aa, Zea Mays
MDVFGSSSNVVPLVDCPNGFSVPYEVLFRLNSLVHMGKLVARHVNADLFKVLEDLSIDTLRRIFEKMSKLKSTCYEPLQFIRHEAHSMNMRKKALSNKRESGKLMRCYRIHITPSKIYCLGPEEEVSNYVVKYHSEYASDFARVTFVDEDWSKLSPNALSARTEQGFFSKPLKTGLYHRILSILKEGFCIGPKKYEFLAFSASQLRGNSVWMFASNSSLTAENIRRWMGHFEDIRSVSKCAARMGQLFSSSRQTFEVSSYDVEVIPDIEVTTDGTKYIFSDGIGKISTRFARQVAKLIGLDPAHPPSAFQIRYGGYKGVITIDPTSFFNLSLRPSMKKFESKSTMLNITNWSKSQPCYVNREIISLLSTLGIKDEVFESMQQDDMHESDGMLTNKEAALSVLGKIGGGDTKTAADMLLQGYEPSSEPYLLMILKAHRANRLTDIRTRCKIHVQKGRVLIGCLDETCKLEYGQVYIRITKNHKEQKYSEQPFFCNDDGKTAVIVGKVAITKNPCLHPGDVRVLEAVYDPGLDARGLIDCVVFPQRGERPHPNECSGGDLDGDLFFITWDDKLIPEKVDAPMDYTATRPRIMDHAVTLEKHFVSYMINDTLGAISTAHLIHADRDPLKARSPECVQLAALHSMAVDFAKTGAPAEMPLALRPREFPDFMERWERPMYVSNGVLGKLYRAALRHEEDAEALLPAGPPSCVYDPDLEVAGFDEFLDAAEERYEAYAERLGALMTYYSAEREDEILTGNIRNKLVYLRRDNKRYFEMKDRIIAAVDALHAEVRGWLRACKEDDASRVASAWYHVTYHPDRRGEKRFWSFPWIICDTLLAIKAARRCRKRVEDAAVPMDCDGS

SEQ ID NO: 169243 - protein, 546 aa, Zea Mays
MALNTYFQMVSGRFLLDLPDNMKKFESKSTMLNITNWSKSQPCYVNREIISLLSTLGIKDEVFESMQQDDMHESDGMLTNKEAALSVLGKIGGGDTKTAADMLLQGYEPSSEPYLLMILKAHRANRLTDIRTRCKIHVQKGRVLIGCLDETCKLEYGQVYIRITKNHKEQKYSEQPFFCNDDGKTAVIVGKVAITKNPCLHPGDVRVLEAVYDPGLDARGLIDCVVFPQRGERPHPNECSGGDLDGDLFFITWDDKLIPEKVDAPMDYTATRPRIMDHAVTLEEIQKHFVSYMINDTLGAISTAHLIHADRDPLKARSPECVQLAALHSMAVDFAKTGAPAEMPLALRPREFPDFMERWERPMYVSNGVLGKLYRAALRHEEDAEALLPAGPPSCVYDPDLEVAGFDEFLDAAEERYEAYAERLGALMTYYSAEREDEILTGNIRNKLVYLRRDNKRYFEMKDRIIAAVDALHAEVRGWLRACKEDDASRVASAWYHVTYHPDRRGEKRFWSFPWIICDTLLAIKAARRCRKRVEDAAVPMDCDGS

SEQ ID NO: 169244 - protein, 865 aa, Zea Mays
MSTAAPAPGSTATVRVSNIPASAIAAELLAFFDSAVTIAGATFACEIVAAHRGWLSRGHGFVQFDSSAAATHAIDLASSGRLPPFLGSCLSVSPARADLLPRAPDLSLRAASASLILGNRVAERELEVAYSCDGVRAEVIPRMRRVDLYLKHDSQSYKLEVLFEDINECFGCHLDGTGAILLQLTYAPRIHIAISGSTVKSRFTDDRFHACKEDAKFAWVRALDFTPNSSFGECSTLVLKLSKGASVSYILESLPFSGELGELAIASMDVFGSSSNVVPLVDCPNGFSVPYEVLFRLNSLVHMGKLVARHVNADLFKVLEDLSIDTLRRIFEKMSKLKSTCYEPLQFIRHEAHSMNMRKKALSNKRESGKLMRCYRIHITPSKIYCLGPEEEVSNYVVKYHSEYASDFARVTFVDEDWSKLSPNALSARTEQGFFSKPLKTGLYHRILSILKEGFCIGPKKYEFLAFSASQLRGNSVWMFASNSSLTAENIRRWMGHFEDIRSVSKCAARMGQLFSSSRQTFEVSSYDVEVIPDIEVTTDGTKYIFSDGIGKISTRFARQVAKLIGLDPAHPPSAFQIRYGGYKGVITIDPTSFFNLSLRPSMKKFESKSTMLNITNWSKSQPCYVNREIISLLSTLGIKDEVFESMQQDDMHESDGMLTNKEAALSVLGKIGGGDTKTAADMLLQGYEPSSEPYLLMILKAHRANRLTDIRTRCKIHVQKGRVLIGCLDETCKLEYGQVYIRITKNHKEQKYSEQPFFCNDDGKTAVIVGKVAITKNPCLHPGDVRVLEAVYDPGLDARGLIDCVVFPQRGERPHPNECSGGDLDGDLFFITWDDKLIPEKVDAPMDYTATRPRIMDHAVTLED

SEQ ID NO: 169245 - protein, 282 aa, Zea Mays
MCVSIYCVHFVTFCHCKQVTTFPFSSVKCNWLLIPVVPLSLCRRQLESNSSHGDDGSDRLVGKGDLRLKLMRKGLLPRSNGSAEQNDIDLREKLSRNHKLPNYDSRGHAAESRASYDMRDEPPELSSRYSSREDVLGSRHSSVVSRVPYARSVDDLLKLDYSRKSYPSWTDDGLRHRSPERMLKVRSDMYPRIAYDQIRPMPPLRSAGSSRPQSFITRDAPDTSRSQPYAGKSTISIDTVQRTNGITPSTAALPKAPVMDEAPLTVTGLLNSLGLEKWICLH

SEQ ID NO: 169246 - protein, 176 aa, Zea Mays
MHHPQHPIGCYHHQLHQSIVPIHSATKPTGKVLFKSFNSRRKNLQTENTLNKVLCSVTVSGHLPNFHPGSCDLACSSDQLLVHEAQETALQWPSQQVPKNLQRPTMSTQARCCQQQRMQGLHQPHETQERSPQRYQHHGGYHGSLYRSKEGQNNHFLAPLNSYRVTDHRQSALSTT

SEQ ID NO: 169247 - protein, 320 aa, Zea Mays
MSDDINDGELPLLGKKRSVRDRLGSNVSDSDFYESQQRNKRRQLESNSSHGDDGSDRLVGKGDLRLKLMRKGLLPRSNGSAEQNDIDLREKLSRNHKLPNYDSRGHAAESRASYDMRDEPPELSSRYSSREDVLGSRHSSVVSRVPYARSVDDLLKLDYSRKSYPSWTDDGLRHRSPERMLKVRSDMYPRIAYDQIRPMPPLRSAGSSRPQSFITRDAPDTSRSQPYAGKSTISIDTVQRTNGITPSTAALPKAPVMDEAPLTVTGLLNSLGLEKYVVLFQAEEVDLSALRQMGESDLKDMGVPMGPRKKILLAVGPQSK

SEQ ID NO: 169248 - protein, 141 aa, Zea Mays
MLKVRSDMYPRIAYDQIRPMPPLRSAGSSRPQSFITRDAPDTSRSQPYAGKSTISIDTVQRTNGITPSTAALPKAPVMDEAPLTVTGLLNSLGLEKYVVLFQAEEVDLSALRQMGESDLKDMGVPMGPRKKILLAVGPQSK

SEQ ID NO: 169249 - protein, 89 aa, Zea Mays
MASSSASSRHQVTITLGRSGQVVKRRAMSDDINDGELPLLGKKRSVRDRLGSNVSDSDFYESQQRNKRYISWICYFHCLYRLQSFELHL

SEQ ID NO: 169250 - protein, 80 aa, Zea Mays
MATTSSRGEASSSSPPRKTLMRSHLGLEGDAKPETVPEETVLVVVDILRRSTALRVLEDGKLVISTFSSIRVMQKSCSSI

SEQ ID NO: 169251 - protein, 112 aa, Zea Mays
MANRPRWMMKYEKGLVDILHENNTSHYRTQNGWRTEGWRKIVRDFNVLFLKGHKNHLPAYLRMLVETLVMEATISAQPQTCLKDLVEQLTQALMRHGIISAYLSKQHWDPKV

SEQ ID NO: 169252 - protein, 50 aa, Zea Mays
MLVETLVMEATISAQPQTCLKDLVEQLTQALMRHGIISAYLSKQHWDPKV

SEQ ID NO: 169253 - protein, 223 aa, Zea Mays
MANRPRWMMKYEKGLVDILHENNTSHYRTQNGWRTEGWRKIVRDFNDMPNARKYQSKSFPLLDSLELLFDGPIPEGAQKSPSSIPQNVGGNVGDGGNNISTAPDLSERPSGTINTSVNEAWNNISLLKQTALGPQGIDNLDTLQNRDEEVLERLQHGSDRRPQRADEQAQSSSCVELQRDRRKKRKAPDIQQIMETYMNFRMKQPRVKQRRAKDADQFTISRY

SEQ ID NO: 169254 - protein, 78 aa, Zea Mays
MYNSIMEYIPSILVIIISYQLISLHAHLKKARCNCKATIKIITLSQTNKFTKNTDKKLHVYAYNASYFGTKTVRWGCT

SEQ ID NO: 169255 - protein, 55 aa, Zea Mays
MARAQIRNSESCINAHLFLIEKNVVFVMFSDLQVELVHMSISAAQCNIQAHGFPV

SEQ ID NO: 169256 - protein, 162 aa, Zea Mays
MLPMAVHPTSTPSLSPRARVSPPRPSTSLAATSSSPCSRIVSFKSRRLPLRSVRSVVAAAAAAAAEEEENKVVVPERQDPMLVLKFIWMEKNIGIALDQLVPGYGSIPLSPYYFWPRKDAWEELRAKLEEKEWISQKQMIILLNQATDIINLWQQGGGSLST

SEQ ID NO: 169257 - protein, 334 aa, Zea Mays
MGRSPCCDKEGLKKGPWTPEEDQKLLAYIEQHGHGCWRSLPAKAGLQRCGKSCRLRWTNYLRPDIKRGKFSLQEEQTIIQLHALLGNRWSAIATHLPKRTDNEIKNYWNTHLKKRLAKMGIDPVTHKPRSDALGTGGGGGAAGAQHAKAAAHLSHTAQWESARLEAEARLAREARLRALAASASAPPQMPAAAAHRLDSPTSTLSFSESAALASVLQEAHGAAAAAAAAARAAMQPMQAYEEACKEHEQQQWGDHVVDVADAGFAAAGFTGLLLDGSLSQHDLRPAPATTTRDDEADAGLHETEEEKSYWDSIMNLVNSSSLPTTLRRWSSADS

SEQ ID NO: 169258 - protein, 160 aa, Zea Mays
MAILGYLMYGDDVKSQVTLNLPEGKVVSKLAIYTTLINPFSKYALMVTPLSTAVEEKLLAAGRGGKSSRSVSVLVRTLLVVTTVVVALAVPFFGHLMALVGSLLSVMASMLLPCIFYLKIFGAARCGRAEVALVATIIVLGSVVLATGTYASVKKIVQDY

SEQ ID NO: 169259 - protein, 392 aa, Zea Mays
MQIIKIIVYYIITFGKTSVLLLKQKGQNPEPEQNGGAHKPYIPPTRRLRLPPDLCTGERHNSSLVDASGGFSEMLASTRRCYVFGGKGGVGKTSMAASLAVKFANHGEPTAIVSTEPSPSLGDLFEQDMGVGGKTVRITGFDSLFAVEAGQFKIKGEPEDLGSFINNLLGKMGLGTHSDIMSMIREMLDGMPPGLEEALVLSKVIKSIDVQEADILRRLVLDAPSTGHTLKLLSASDWIEMFLTLSIKGIKVASSMPSFNMYLEDVQFISARLEELRQQVRRVREILFDPQSTEFIVVTIPTMMAVTESSRFHESLKKDGAHTRRLVINQVLPPSASDCRFCAAKRREEARAFRAILEDRELGGLKLIQAPLLDMEVKGVPALRFLSDSVWK

SEQ ID NO: 169260 - protein, 206 aa, Zea Mays
MLDGMPPGLEEALVLSKVIKSIDVQEADILRRLVLDAPSTGHTLKLLSASDWIEMFLTLSIKGIKVASSMPSFNMYLEDVQFISARLEELRQQVRRVREILFDPQSTEFIVVTIPTMMAVTESSRFHESLKKDGAHTRRLVINQVLPPSASDCRFCAAKRREEARAFRAILEDRELGGLKLIQAPLLDMEVKGVPALRFLSDSVWK

SEQ ID NO: 169261 - protein, 351 aa, Zea Mays
MAALINPIYRRLAAFACRRISAPAVEKPVLPLVYHRNLQQRHNSSLVDASGGFSEMLASTRRCYVFGGKGGVGKTSMAASLAVKFANHGEPTAIVSTEPSPSLGDLFEQDMGVGGKTVRITGFDSLFAVEAGQFKIKGEPEDLGSFINNLLGKMGLGTHSDIMSMIREMLDGMPPGLEEALVLSKGHTLKLLSASDWIEMFLTLSIKGIKVASSMPSFNMYLEDVQFISARLEELRQQVRRVREILFDPQSTEFIVVTIPTMMAVTESSRFHESLKKDGAHTRRLVINQVLPPSASDCRFCAAKRREEARAFRAILEDRELGGLKLIQAPLLDMEVKGVPALRFLSDSVWK

SEQ ID NO: 169262 - protein, 281 aa, Zea Mays
MVNQQLLFRRNHLRHSDMGVGGKTVRITGFDSLFAVEAGQFKIKGEPEDLGSFINNLLGKMGLGTHSDIMSMIREMLDGMPPGLEEALVLSKVIKSIDVQEADILRRLVLDAPSTGHTLKLLSASDWIEMFLTLSIKGIKVASSMPSFNMYLEDVQFISARLEELRQQVRRVREILFDPQSTEFIVVTIPTMMAVTESSRFHESLKKDGAHTRRLVINQVLPPSASDCRFCAAKRREEARAFRAILEDRELGGLKLIQAPLLDMEVKGVPALRFLSDSVWK

SEQ ID NO: 169263 - protein, 67 aa, Zea Mays
MSMIMSFTSRACSCLKIRQPDVGEQADLLVGFCCHLIPVSSSAVLAQVLFFSADKDRAIAVHAVKAN

SEQ ID NO: 169264 - protein, 187 aa, Zea Mays
MPRPGASAVGGLSSKGVTSATHDSEEAPPRSMRATGDRGAMSSKTLWLVSKRKLIALSAFCLSLHSSRYFPAFALGDTSVKIEDVTPKIFPSGPLFPTEKRIAELFEINTYSVVNIFDATLRPQLNVTGVVELLAVLFQKIRSLVMLLHASTFLLLKGYRKILKANWLVQIVLKILLFLRLMLLLIF

SEQ ID NO: 169265 - protein, 207 aa, Zea Mays
MPRPGASAVGGLSSKGVTSATHDSEEAPPRSMRATGDRGAMSSKTLWLVSKRKLIALSAFCLSLHSSRYFPAFALGDTSVKIEDVTPKIFPSGPLFPTEKRIAELFEINTYSVVNIFDATLRPQLNVTGVVEIPEGNGSGVVWDDFGHIITNYHVVGSALSKNPKPGDVVARVNILAAEGKILKANWLVQIVLKILLFLRLMLLLIF

SEQ ID NO: 169266 - protein, 238 aa, Zea Mays
MPRPGASAVGGLSSKGVTSATHDSEEAPPRSMRATGDRGAMSSKTLWLVSKRKLIALSAFCLSLHSSRYFPAFALGDTSVKIEDVTPKIFPSGPLFPTEKRIAELFEINTYSVVNIFDATLRPQLNVTGVVEIPEGNGSGVVWDDFGHIITNYHVVGSALSKNPKPGDVVARVNILAAEGIQKNFEGKLVGADRAKDLAVLKVDAPTDLLKPINWFKSRYFKSGWGDNWRRNSNRCSY

SEQ ID NO: 169267 - protein, 130 aa, Zea Mays
MSDVKRQPLQLLSPNSIAARAPHTDTNPPPGPPSGKPGLPRIRCSAYPADRPPTRPLRMPRPGASAVGGLSSKGVTSATHDSEEAPPRSMRATGDRGAMSSKTLWLVSKRKLIALSAFCLSLHSSSICFG

SEQ ID NO: 169268 - protein, 371 aa, Zea Mays
MRRNATSDDFMSAVSFRTHAVGTSGGSRRAPTEAKLKVAINGFGRIGRNFLRCWHGRGDASPLDVIAINDTGGVKQASHLLKYDSTLGIFDADVKPVGDNAISVDGKVIKVVSDRNPSNLPWGELGIDLVIEGTGVFVDREGAGKHIQAGAKKVLITAPGKGDIPTYVVGVNADQYNPDEPIISNASCTTNCLAPFVKVLDQKFGIIKGTMTTTHSYTGDQRLLDASHRDLRRARAAALNIVPTSTGAAKAVSLVLPNLKGKLNGIALRVPTPNVSVVDLVVQVSKKTLAEEVNQAFRDAAANELTGILEVCDVPLVSVDFRCSDVSSTIDASLTMVMGDDMVKVISWYDNEWGYSQRVVDLADICANQWK

SEQ ID NO: 169269 - protein, 107 aa, Zea Mays
MRVYAEPKARLNICAWSMHSCSSSTPACTHEKKANESVRSNQRDRLTPYLRDIPLWGDERMTPFPLTPNQTAPDMILMAVKDPLRASFETQIPLGPPSFPRVRNPCR

SEQ ID NO: 169270 - protein, 76 aa, Zea Mays
MSRNCKRNVKVKIKISKARLQGNRSRLARFRERFSPSHPVSAPVLKHRQRVTTIHRYIHMLYMQWNDKRGFTVLNY

SEQ ID NO: 169271 - protein, 485 aa, Zea Mays
MENYCESIDYYQKPSHPPNKPTTMDEDKDDNNDTGKGKAVLGAGPYHHHHHATAADQQEPESQEEFFSDSESGSESIEIADLKKRMWKDQLLLMKLEGRSGRDREAQLPLHLHPFADDHPATASALLQQAKDHQESPESRYRRKAMLRAQDGVIRHMLKMMEACNARGFVYGVVNESGVPVSGSSDSLRGWWKDEVGFERAGPLALSVAAAAGLDDPGSPMAASFLHGLHDIQDSTLGSLLSALIQHCEPPQRSFPLDRGLAPPWWPTGREAWWGTQGEAQAHQGPPPYRKPHDLKKAWKISLLSAVIKHLSPRFDQMRKLVWQSKRLQHKMSARDADTWSKVITQEEALDRHAQRALQITPLEEEEDDDGGPDTDAGGDSPMAAAHVEKRKRKGTDDGEHEAKDAVAVRDGGQHNSSIAVAETTQPPPVAHDSMLQGLQRGGTTLPDGSAVHDDDMLSSLLGIADVVDMTDFPNSPIWQWGVYD

SEQ ID NO: 169272 - protein, 189 aa, Zea Mays
MEALLELEKMQRVLSLMSSRGLSHTDSSCGGAAADRFLAQFLLFMCRSYFMFHGLDVNKPQAIFKYLPVLSFTESYIYQLDASNEDCLHVVPDDNTSKVLGKKEESLNETSLSQMIEPLEGLLQCQGLMTDRLRTELKSGIQYWSLERKLCQALLRNEKISIEDVMMAIHLKSFDYRVLNLLMFQLTGQ

SEQ ID NO: 169273 - protein, 162 aa, Zea Mays
MFHGLDVNKPQAIFKYLPVLSFTESYIYQLDASNEDCLHVVPDDNTSKVLGKKEESLNETSLSQMIEPLEGLLQCQGLMTDRLRTELKSGIQYWSLERKLCQALLRNEKISIEDVMMAIHLKSFDYRVLNLLMFQLTGQHVNELHMDFLSVSEFLVEISDDL

SEQ ID NO: 169274 - protein, 131 aa, Zea Mays
MFHGLDVNKPQAIFKYLPVLSFTESYIYQLDASNEDCLHVVPDDNTSKVLGKKEESLNETSLSQMIEPLEGLLQCQGLMTDRLRTELKSGIQYWSLERKLCQALLRNEKVNELHMDFLSVSEFLVEISDDL

SEQ ID NO: 169275 - protein, 274 aa, Zea Mays
MEALLELEKMQRVLSLMSSRGLSHTDSSCGGAAADRFLAQFLLFMVQPFDSLTLENKFLLISELLRKATPNTLEEVQHLTHLEANKDICSGGSLQPIKKFKMHAEKSTVQAMPMVGFDAMARAKSTLEDFCRSYFMFHGLDVNKPQAIFKYLPVLSFTESYIYQLDASNEDCLHVVPDDNTSKVLGKKEESLNETSLSQMIEPLEGLLQCQGLMTDRLRTELKSGIQYWSLERKLCQALLRNEKISIEDVMMAIHLKSFDYRVLNLLMFQLTGQ

SEQ ID NO: 169276 - protein, 143 aa, Zea Mays
MNCIWTSCQFQNFWLRYLMTCEFALNLIPMHHSITKWYDYEDDVMNNTFNILRMFAAIYGPLEAPNMLAKCIGEAEEKYESFSKKLDPSLSGSYWRRCEEATKEGGKTSGHAYGTWNIPRVISNEDAFRRERRSKHDACAVIT

SEQ ID NO: 169277 - protein, 196 aa, Zea Mays
MEALLELEKMQRVLSLMSSRGLSHTDSSCGGAAADRFLAQFLLFMCRSYFMFHGLDVNKPQAIFKYLPVLSFTESYIYQLDASNEDCLHVVPDDNTSKVLGKKEESLNETSLSQMIEPLEGLLQCQGLMTDRLRTELKSGIQYWSLERKLCQALLRNEKVNELHMDFLSVSEFLVEISDDLYDYEVSWATETDGIV

SEQ ID NO: 169278 - protein, 234 aa, Zea Mays
MEALLELEKMQRVLSLMSSRGLSHTDSSCGGAAADRFLAQFLLFMVQPFDSLTLENKFLLISELLRKCRSYFMFHGLDVNKPQAIFKYLPVLSFTESYIYQLDASNEDCLHVVPDDNTSKVLGKKEESLNETSLSQMIEPLEGLLQCQGLMTDRLRTELKSGIQYWSLERKLCQALLRNEKISIEDVMMAIHLKSFDYRVLNLLMFQLTGQHVNELHMDFLSVSEFLVEISDDL

SEQ ID NO: 169279 - protein, 276 aa, Zea Mays
MFHGLDVNKPQAIFKYLPVLSFTESYIYQLDASNEDCLHVVPDDNTSKVLGKKEESLNETSLSQMIEPLEGLLQCQGLMTDRLRTELKSGIQYWSLERKLCQALLRNEKISIEDVMMAIHLKSFDYRVLNLLMFQLTGQHVNELHMDFLSVSEFLVEISDDLYDYEDDVMNNTFNILRMFAAIYGPLEAPNMLAKCIGEAEEKYESFSKKLDPSLSGSYWRRCEEATKEGGKTSGHAYGTWNIPRVISNEDAFRRERRSKHDACAVKCRNDLQPLM

SEQ ID NO: 169280 - protein, 486 aa, Zea Mays
MASLAQAQLEKMRRKASGFWNLEPNAAFPNWGHTLTSASFLFYFRSPPFSVCYFASLEQNLKQLEAKPRYCEKRKRGGRGGAAMEALLELEKMQRVLSLMSSRGLSHTDSSCGGAAADRFLAQFLLFMVQPFDSLTLENKFLLISELLRKATPNTLEEVQHLTHLEANKDICSGGSLQPIKKFKMHAEKSTVQAMPMVGFDAMARAKSTLEDFCRSYFMFHGLDVNKPQAIFKYLPVLSFTESYIYQLDASNEDCLHVVPDDNTSKVLGKKEESLNETSLSQMIEPLEGLLQCQGLMTDRLRTELKSGIQYWSLERKLCQALLRNEKISIEDVMMAIHLKSFDYRVLNLLMFQLTGQHVNELHMDFLSVSEFLVEISDDLYDYEDDVMNNTFNILRMFAAIYGPLEAPNMLAKCIGEAEEKYESFSKKLDPSLSGSYWRRCEEATKEGGKTSGHAYGTWNIPRVISNEDAFRRERRSKHDACAVIT

SEQ ID NO: 169281 - protein, 168 aa, Zea Mays
MFHGLDVNKPQAIFKYLPVLSFTESYIYQLDASNEDCLHVVPDDNTSKVLGKKEESLNETSLSQMIEPLEGLLQCQGLMTDRLRTELKSGIQYWSLERKLCQALLRNEKVPRNAQVLFDVALETKVGNGENTKFWTDRWLQGSTVVQVLVEYLRLWESVDGVTLQPSV

SEQ ID NO: 169282 - protein, 252 aa, Zea Mays
MEALLELEKMQRVLSLMSSRGLSHTDSSCGGAAADRFLAQFLLFMVQPFDSLTLENKFLLISELLRKATPNTLEEVQHLTHLEANKDICSGGSLQPIKKFKMHAEKSTVQAMPMVGFDAMARAKSTLEDFCRSYFMFHGLDVNKPQAIFKYLPVLSFTESYIYQLDASNEDCLHVVPDDNTSKVLGKKEESLNETSLSQMIEPLEGLLQCQGLMTDRLRTELKSGIQYWSLERKLCQALLRNEKVPRNAQVL

SEQ ID NO: 169283 - protein, 405 aa, Zea Mays
MAAVVSWYGPLIDLSAAASHVGGFVQLLAVVRRLLPHQEQNAATGRTYQRTIAEVGDDTRSSFSVSLWSSKHNSTIIAGDVLLLQNIKIVQFRNGLEGRASQMSSVQVLLNSKDLLDTEPEGICELISSCKVGNATKSKLRKVAEWIIHTKCALGESHHQMQVVSKNWKLAKENESAHFLSISELISQRKLCNINIYACIGKMVLVSSPTSPLKVNLSVIDRRSFKEHSDIVRDLVTAGCKLCGSPLYHKNLHEENTFALDCPNNPKYLHVPGQIYRPFLIYIYDQSGQVPLLVRNRAAETLFANITADDVSECHNSHMLSETYESCNLSTPGTVDDCGNKEIAKRRKTEQKPNFYLIWLTLIKCLLSQGSNSPFCFQISVNPEKNVEDGRFELELGLDGRAIGC

SEQ ID NO: 169284 - protein, 227 aa, Zea Mays
MIWSAVGTRVRISWRRAGAGLAASSGVGRDGGVEHVGAADGAVDVRAEPGVDAGDVERVRALGQQAHELAVLELAEADGAVSRAQEPRPGAVPRGGDGTDGRLVEPHGPDVPDVVHHPACAVPPVVVPAAAADVRRALGEWDRRCEERLPPPPDLPAPHGHRDAEQDQAYEGEHPGGDERVFDEVPSVVVACTGWGPVSLRPSLVPPTVMRGSRRRRRRRRQNGRAR

SEQ ID NO: 169285 - protein, 151 aa, Zea Mays
MPAAAARLIQGSIRSRSTVNAASAPSHLRSGVVLLLLLSLARWQPPRARRQGLRVHRHRRACVRATTTTTAAAVPVPARVPHQRGDHAAPGGGQVGARGDRAPGPRLRGRAVPGRGRVPRGRRLRPALLRVVPVRRRAAGTWIGASPTSRS

SEQ ID NO: 169286 - protein, 351 aa, Zea Mays
MAATGYPNAAAWTRPAGTPDNPDQNSRVEAALETPGPDPSHHHPHPHLASRIRTRWAASAATRSRRARGGGRGSCACTGSAPAARSCASRCSGSGPPTSRRASTSSSPTRRSPPRASPTSRASSTLPTTSGSSSTRSAAAYAHAHPPAHYPPPSPPRSRRPADFVKLIVVSLVFFCGARVAGSCDALTNLTFISTYYYQIPYVLYNAKQSFMEYRNFDKCLAYIEELMIKDGPFDGLMGFSQGSILSAALPGLQEQGLALTRVPKVKYLIIIGGAKFQSPTVAGKAYANKIACPSLHFIGTLRQWQRRASFHCHAKFVCPVAFKRCVGGNVMAYSRRLRIRCSCLPASLVN

SEQ ID NO: 169287 - protein, 61 aa, Zea Mays
MHLIEDKHSTQSQIVILLSIDYPLKIQPKDAIPWFFSIFCEGVIYSYLTTAIIDHYALSGI

SEQ ID NO: 169288 - protein, 664 aa, Zea Mays
MLSTTWASPKATPIPSSPASQTATRLHPASSSNRTLRLVALPSPSAPRRRRRPGLPPPARAGLVATAAMPAPEPKARVLVAGGGIGGLAFALAAKRKGFEVLVLERDMSAVRGEGRYRGPIQLQSNALAALEAVDAAAADEIMDSGCVTGDRVNGIVDGVSGSWYIKFDTFTPAAERGLPVTRVISRMTLQQILARAVGDDAILNGSHVVDFIDDGSKVTAILEDGRKFEGDLLVGADGIWSKVRKTLFGHSDATYSGYTCYTGIADFVPPDIDTVGYRVFLGHKQYFVSSDVGAGKMQWYAFHNEEAGGTDPENGKKKKLLEIFDGWCDNVIDLINATDEEAVLRRDIYDRPPTMNWGKGRVTLLGDSVHAMQPNLGQGGCMAIEDGYQLAVELENAWQESVKTETPIDIVSSLRRYEKERRLRVAIIHGLARMAAIMATTYRPYLGVGLGPLSFLTKLRIPHPGRVGGRFFIKYGMPTMLSWVLGGNSSKLEGRLLSCRLSDKANDQLYQWFEDDDALEEAMGGEWYLIATSEGNCNSLQPIHLIRDEQRSLFVGSRSDPNDSASSLSLSSPQISERHATITCKNKAFYLTDLGSEHGTWITDNEGRRYRVPPNFPVRFHPSDVIEFGSDKKAMFRVKVLNTLPYESARSGNRQQQQVLQAA

SEQ ID NO: 169289 - protein, 470 aa, Zea Mays
MASSMACPAPAERGLPVTRVISRMTLQQILARAVGDDAILNGSHVVDFIDDGSKVTAILEDGRKFEGDLLVGADGIWSKVRKTLFGHSDATYSGYTCYTGIADFVPPDIDTVGYRVFLGHKQYFVSSDVGAGKMQWYAFHNEEAGGTDPENEAVLRRDIYDRPPTMNWGKGRVTLLGDSVHAMQPNLGQGGCMAIEDGYQLAVELENAWQESVKTETPIDIVSSLRRYEKERRLRVAIIHGLARMAAIMATTYRPYLGVGLGPLSFLTKLRIPHPGRVGGRFFIKYGMPTMLSWVLGGNSSKLEGRLLSCRLSDKLYQWFEDDDALEEAMGGEWYLIATSEGNCNSLQPIHLIRDEQRSLFVGSRSDPNDSASSLSLSSPQISERHATITCKNKAFYLTDLGSEHGTWITDNEGRRYRVPPNFPVRFHPSDVIEFGSDKKAMFRVKVLNTLPYESARSGNRQQQQVLQAA

SEQ ID NO: 169290 - protein, 639 aa, Zea Mays
MALLSATSPAKAHLPTLLAYHDEPQQHQHALPPAHPQCFGGGGGKARQRARGRCAAAMRPLDAAVAPAPTPAAGEAPRKRPRVLVAGGGIGGLVLALAARRKGYDVTVFERDLSAVRGEGQYRGPIQIQSNALAALEAIDMSVAEEVMRVGCVTGDRINGLVDGMSGSWYIKFDTFTPAAERGLPVTRVISRMTLQQILARAVGDDAILNGSHVVDFIDDGSKVTAILEDGRKFEGDLLVGADGIWSKVRKTLFGHSDATYSGYTCYTGIADFVPPDIDTVGYRVFLGHKQYFVSSDVGAGKMQWYAFHNEEAGGTDPENEAVLRRDIYDRPPTMNWGKGRVTLLGDSVHAMQPNLGQGGCMAIEDGYQLAVELENAWQESVKTETPIDIVSSLRRYEKERRLRVAIIHGLARMAAIMATTYRPYLGVGLGPLSFLTKLRIPHPGRVGGRFFIKYGMPTMLSWVLGGNSSKLEGRLLSCRLSDKLYQWFEDDDALEEAMGGEWYLIATSEGNCNSLQPIHLIRDEQRSLFVGSRSDPNDSASSLSLSSPQISERHATITCKNKAFYLTDLGSEHGTWITDNEGRRYRVPPNFPVRFHPSDVIEFGSDKKAMFRVKVLNTLPYESARSGNRQQQQVLQAA

SEQ ID NO: 169291 - protein, 665 aa, Zea Mays
MALLSATSPAKAHLPTLLAYHDEPQQHQHALPPAHPQCFGGGGGKARQRARGRCAAAMRPLDAAVAPAPTPAAGEAPRKRPRVLVAGGGIGGLVLALAARRKGYDVTVFERDLSAVRGEGQYRGPIQIQSNALAALEAIDMSVAEEVMRVGCVTGDRINGLVDGMSGSWYIKFDTFTPAAERGLPVTRVISRMTLQQILARAVGDDAILNGSHVVDFIDDGSKVTAILEDGRKFEGDLLVGADGIWSKVRKTLFGHSDATYSGYTCYTGIADFVPPDIDTVGYRVFLGHKQYFVSSDVGAGKMQWYAFHNEEAGGTDPENGKKKKLLEIFDGWCDNVIDLINATDEEAVLRRDIYDRPPTMNWGKGRVTLLGDSVHAMQPNLGQGGCMAIEDGYQLAVELENAWQESVKTETPIDIVSSLRRYEKERRLRVAIIHGLARMAAIMATTYRPYLGVGLGPLSFLTKLRIPHPGRVGGRFFIKYGMPTMLSWVLGGNSSKLEGRLLSCRLSDKLYQWFEDDDALEEAMGGEWYLIATSEGNCNSLQPIHLIRDEQRSLFVGSRSDPNDSASSLSLSSPQISERHATITCKNKAFYLTDLGSEHGTWITDNEGRRYRVPPNFPVRFHPSDVIEFGSDKKAMFRVKVLNTLPYESARSGNRQQQQVLQAA

SEQ ID NO: 169292 - protein, 77 aa, Zea Mays
MVRRRRKWSASCDGDAGSTREIQPHLLAFAQAFPAGHNSGTIHIYIWDKGLPKGKGLLLLAEMSSAGNLAWTTLLRL

SEQ ID NO: 169293 - protein, 565 aa, Zea Mays
MERSEPSLKPEWLLRPTVPATTHKPVTSPRADDHGRGASSRNRSSGRDRDRSSQQSSSRRGSSSSGSRRNDRDGTGKSRGYGNFGKHSKDRIQEKDLDFRERESRLVQPDDPLRDGFESFSSCRSEKDRLNRTRSKVAIPNRAGVSLDNGNVSKKDNGVISFEREFPHLGSEDKNGKQDIGRVPSPGISTPIQNIPLVVSDGWNSVLAEVPALVDPNINSVSSSSSPAGSSKPIEVSNSGSALSMAETVMQSPLNICTTPQLSIDAQKIEERTMRQCILRPLTPSSNKISASISLDKLLKSKGARAGESNGPIKVAPQLSIQPSSNSVRTPVKTELVKQSQSGSLQVLSREQNGTVNTAAKDITSNNPVHLQTEKQVQKTSTNFLSCCEFIENGNSSCEEANSCEGSQRHLSDNEEIIPPSESHDVLDEGSLGIQVDDKGSSSSPVLGTQDISSKKPQEDNVDIVVPVYVNDGSVMPNSVDNEARLLLEEANPAQVLQHIDAREENPCPAQEFESIGAGGEEELNLLRSMGWDENEEVQPLQQEEIADCVRQNVRLQQKLQECRG

SEQ ID NO: 169294 - protein, 645 aa, Zea Mays
MERSEPSLKPEWLLRPTVPATTHKPVTSPRADDHGRGASSRNRSSGRDRDRSSQQSSSRRGSSSSGSRRNDRDGTGKSRGYGNFGKHSKDRIQEKDLDFRERESRLVQPDDPLRDGFESFSSCRSEKDRLNRTRSKVAIPNRAGVSLDNGNVSKKDNGVISFEREFPHLGSEDKNGKQDIGRVPSPGISTPIQNIPLVVSDGWNSVLAEVPALVDPNINSVSSSSSPAGSSKPIEVSNSGSALSMAETVMQSPLNICTTPQLSIDAQKIEERTMRQCILRPLTPSSNKISASISLDKLLKSKGARAGESNGPIKVAPQLSIQPSSNSVRTPVKTELVKQSQSGSLQVLSREQNGTVNTAAKDITSNNPVSPVLGRSSSMEPMRKSIVNPKLKVGTNGRSLHPLQGSFADRKASAKDKYKFFELLRSKSVNGSSAAIESPSSLTDDQQNSSPELPFKFIENGNSSCEEANSCEGSQRHLSDNEEIIPPSESHDVLDEGSLGIQVDDKGSSSSPVLGTQDISSKKPQEDNVDIVVPVYVNDGSVMPNSVDNEARLLLEEANPAQVLQHIDAREENPCPAQEFESIGAGGEEELNLLRSMGWDENEEVQPLQQEEIADCAERQAAAEASGMQGLIAESMEQRHCASPC

SEQ ID NO: 169295 - protein, 540 aa, Zea Mays
MERSEPSLKPEWLLRPTVPATTHKPVTSPRADDHGRGASSRNRSSGRDRDRSSQQSSSRRGSSSSGSRRNDRDGTGKSRGYGNFGKHSKDRIQEKDLDFRERESRLVQPDDPLRDGFESFSSCRSEKDRLNRTRSKVAIPNRAGVSLDNGNVSKKDNGVISFEREFPHLGSEDKNGKQDIEVPALVDPNINSVSSSSSPAGSSKPIEVSNSGSALSMAETVMQSPLNICTTPQLSIDAQKIEERTMRQCILRPLTPSSNKISASISLDKLLKSKGARAGESNGPIKVAPQLSIQPSSNSVRTPVKTELVKQSQSGSLQVLSREQNGTVNTAAKDITSNNPVSPVLGRSSSMEPMRKSIVNPKLKFIENGNSSCEEANSCEGSQRHLSDNEEIIPPSESHDVLDEGSLGIQVDDKGSSSSPVLGTQDISSKKPQEDNVDIVVPVYVNDGSVMPNSVDNEARLLLEEANPAQVLQHIDAREENPCPAQEFESIGAGGEEELNLLRSMGWDENEEVQPLQQEEIADCVRQNVRLQQKLQECRG

SEQ ID NO: 169296 - protein, 935 aa, Zea Mays
MASAMKLLGRSSLASPAAAAPGRERRGGPCFAAVGREGSAHRRRSSLRSTAPVGALAERVVVTPAPPERAGAGPPEPHPQSVAARAVVTVRRRRKEDAKRRVAEQLDAYADRVGRSVLLELISTETDPRKGGPKKSRRSALVGWFEKKDVKTERVVYTADFTVDGSFGEPGAVTVLNRHQREFFIESIVVEGFPSGPAHFTCNSWVQPTRVDRNPRVFFTNKPYLPAETPPGLQELRRQQLSDLRGEGADTGERRITDRVWEYDVYNDLGNPDKGAEFARPVLGGEQQLPYPRRMRTGRPKTITDDRAESRVEYPEPIYVSRDEEFEDGKNEMLSEGALKALLHNFMPLLVSSVSPDIRDFAGFHDVDNLFKEGLRLKQALQDQLFQKIPFVRKIQENSEGLLRYDTPDIIKSKPAPMRLPPPPSMIHGEDKFAWLRDDEFARQALAGINPVNIERLQAFPPMSKLDPAVYGPPESAITEEHIIGQLDGMSVQQALQDDRLYMLDYHDIFMPFLDRINALDGRKAYGTRTLFFLTAAGTLKPIAIELCLPPMTDGCARAKRVFTPPADATSNWLWQLAKAHVCSNDAGVHQLINHWLRTHAAMEPFIIAAHRHLSTMHPIFKLLKPHMRYTLKINALARQILINGDGVIESGFTPGRYCMEMSSFAYRELWRLDQEGLPADLIRRGMAVEDPTQPHGLRLLIEDYPYATDGLLLWSAIRRWCDAYVAMYYPSDESVQGDTELQSWYREAVHTGHADKRDAPWWPRLSTPADLASLLTTLLWLTSAQHAALNFGQYPLGGYIPNRPPLMRRLVPAEGDPEYAHLVADPHRFFLSALPSLTQTTTFMTVIDTLSTHSADEQYLGERPDEAWTADPAALAAAREFADEVRRAEEEIERRNADTGRRNRCGAGVLPYELMAPTSGPGITCRGVPNSVTI

SEQ ID NO: 169297 - protein, 742 aa, Zea Mays
MASAMKLLGRSSLASPAAAAPGRERRGGPCFAAVGREGSAHRRRSSLRSTAPVGALAERVVVTPAPPERAGAGPPEPHPQSVAARAVVTVRRRRKEDAKRRVAEQLDAYADRVGRSVLLELISTETDPNDRAESRVEYPEPIYVSRDEEFEDGKNEMLSEGALKALLHNFMPLLVSSVSPDIRDFAGFHDVDNLFKEGLRLKQALQDQLFQKIPFVRKIQENSEGLLRYDTPDIIKKDKFAWLRDDEFARQALAGINPVNIERLQAFPPMSKLDPAVYGPPESAITEEHIIGQLDGMSVQQALQDDRLYMLDYHDIFMPFLDRINALDGRKAYGTRTLFFLTAAGTLKPIAIELCLPPMTDGCARAKRVFTPPADATSNWLWQLAKAHVCSNDAGVHQLINHWLRTHAAMEPFIIAAHRHLSTMHPIFKLLKPHMRYTLKINALARQILINGDGVIESGFTPGRYCMEMSSFAYRELWRLDQEGLPADLIRRGMAVEDPTQPHGLRLLIEDYPYATDGLLLWSAIRRWCDAYVAMYYPSDESVQGDTELQSWYREAVHTGHADKRDAPWWPRLSTPADLASLLTTLLWLTSAQHAALNFGQYPLGGYIPNRPPLMRRLVPAEGDPEYAHLVADPHRFFLSALPSLTQTTTFMTVIDTLSTHSADEQYLGERPDEAWTADPAALAAAREFADEVRRAEEEIERRNADTGRRNRCGAGVLPYELMAPTSGPGITCRGVPNSVTI

SEQ ID NO: 169298 - protein, 135 aa, Zea Mays
MDKSIPVVSKIFCSGTPTMLMIRMRPIVVNGGGFVVTDLSHNIVFVVDGCGILGSKGELMVKDGEGEPILFISKKGGIVQALSTRNKWNGYSMDYQGKNKLVFSLTDPKLCTAQDGHERANRRQGLLPCGSAVRI

SEQ ID NO: 169299 - protein, 107 aa, Zea Mays
MDYQGKNKLVFSLTDPKLCTAQGAPIRIHIEPKRHCKNWDFEIGGSFADRDCTIVDCTRKIVAQMGTKEPIGGKDFYHVEVQSGYDQAFIIGVMAILDNIHGESTRC

SEQ ID NO: 169300 - protein, 166 aa, Zea Mays
MDKSIPVVSKIFCSDGCGILGSKGELMVKDGEGEPILFISKKGGIVQALSTRNKWNGYSMDYQGKNKLVFSLTDPKLCTAQGAPIRIHIEPKRHCKNWDFEIGGSFADRDCTIVDCTRKIVAQMGTKEPIGGKDFYHVEVQSGYDQAFIIGVMAILDNIHGESTRC

SEQ ID NO: 169301 - protein, 140 aa, Zea Mays
MVKDGEGEPILFISKKGGIVQALSTRNKWNGYSMDYQGKNKLVFSLTDPKLCTAQGAPIRIHIEPKRHCKNWDFEIGGSFADRDCTIVDCTRKIVAQMGTKEPIGGKDFYHVEVQSGYDQAFIIGVMAILDNIHGESTRC

SEQ ID NO: 169302 - protein, 54 aa, Zea Mays
MCSPPSSFATVHSPYLVIYLFIYLYNWYYCTTPDWIGSAGGRRPEPGASSSINL

SEQ ID NO: 169303 - protein, 448 aa, Zea Mays
MTLLDLSKRTGAYISTLQGILADLGEKVESEFDSISIDLAELVAMELGVNSRRMHTGEGKNEPRPAVVTVMGHVDHGKTSLLDALRQTSVAAKEAGGITQHIGAFVVEMSSGASITFLDTPGHAAFSAMRARGAAVTDIVVLVVAADDGIMPQTLEAMSHAKAANVPIVVAINKCDKSGADPERVRIQLGSEGLLLEDMGGDVQVVEISAVTKTGLDKLEEALLLQAEMMDLKARIDGPAQAFVVEARVDRGRGPLATAIVKYGTLVSGQHIVVGAEWGRIRSLRDTAGNITQSAKPAMPIEIEGLKGLPMAGDDVVVVDSEERARMLSHGRKKKQEKDRLRKIDEGMAEELEIKEETPERVEMTIIVKADVQGSVQAVTDALRSLNSAQVFVNVVHVGVGPISQHDIDLAQACGAYIVGFNIRSPPSPITQAAARANIKMLWNPLGR

SEQ ID NO: 169304 - protein, 104 aa, Zea Mays
MGEEKRGMAPQQRTKESPSRGEMAWGKRRERAGAAIYRAKLWTCQTAPTGGRCCSDDLGRRVSAFFAWNRILVAAQNIFLDLYSTIIVKDLESYRSTKIGLSLG

SEQ ID NO: 169305 - protein, 187 aa, Zea Mays
MVYWPICAAAWQPSRRNFRACLDTKIPGKIVVSSLLPHTNADQFLPTAAAPSSSRQRRPVSGNSSGTSGLRAPWPWEGILAAAMGEEKRGMAPQQRTKESPSRGEMAWGKRRERAGAAIYRAKLWTCQTAPTGGRCCSDDLGRRVSAFFAWNRILVAAQNIFLDLYSTIIVKDLESYRSTKIGLSLG

SEQ ID NO: 169306 - protein, 777 aa, Zea Mays
MAHEREPLLQQRQTGVGNACGAKDSSSAPAPSAAALPSLARTVLKFLMWAVFLTWAAGIFLYPTKPVQAVFRKWVGLTRDSMFGIAGGIFLTFSAPILIIALLAYVYISFFPSEHVVEKRKLRSLSFRLWTFPVLVDGPFGVVSAVEFIGIVLFIVFVVYSMTYYAVEAVSLVSKFDIPSMTESELILDVIGLRLGAVGLFCMLFLFLPVARGSVLLRLIDIPFEHATRYHVWLGHLTMALFTLHGLFYVISWSMQGRLREELRQWKEIGVANLPGVISLAAGLLMWVTSLHPVRKRFFELFFYTHQLYVVFVVFLAFHVGDFIFSICAGAVFLFMLDRFLRFWQSRAKVDIISAACRPCGTVELVFSKPASLHYNALSFIFIQVRELSFLQWHPFSVSSSPMDGRYHMSVLIKVLGTWTEKLRSIITDVQEKNGGDSELQCGRMTACVEGPYGHESPYHLMYENLVLVAGGIGISPFLAILSDIIHRIEEGKQCMPKNVLVLWSVKKSKELSLLSAVDAQTISSSVSDRLQLDIQAFVTQEPHPPLEDGIVGDDQKVPGMFVKNGTAMSGLVGTGDNFWAAMYFLASTLGFLLAYALVQVYYVKPHNVVAWWYLGLLFMLCMVAGVALPGGLVVLLWHLSEKQRLEDDKWDASQSPRAEQTGPLAAAGGGDDDAAPSVSLAALRTTRYGCRPNFEDERSEGVQGAEPPPRRLGGGQEQERRGLPFQQPQLRPVNYVRLVWSVQRSSVHVAQHTRTDDSWMYMLIRHNLISCIYMYS

SEQ ID NO: 169307 - protein, 731 aa, Zea Mays
MAHEREPLLQQRQTGVGNACGAKDSSSAPAPSAAALPSLARTVLKFLMWAVFLTWAAGIFLYPTKPVQAVFRKWVGLTRDSMFGIAGGIFLTFSAPILIIALLAYVYISFFPSEHVVEKRKLRSLSFRLWTFPVLVDGPFGVVSAVEFIGIVLFIVFVVYSMTYYAVEAVSLVSKFDIPSMTESELILDVIGLRLGAVGLFCMLFLFLPVARGSVLLRLIDIPFEHATRYHVWLGHLTMALFTLHGLFYVISWSMQGRLREELRQWKEIGVANLPGVISLAAGLLMWVTSLHPVRKSICAGAVFLFMLDRFLRFWQSRAKVDIISAACRPCGTVELVFSKPASLHYNALSFIFIQVRELSFLQWHPFSVSSSPMDGRYHMSVLIKVLGTWTEKLRSIITDVQEKNGGDSELQCGRMTACVEGPYGHESPYHLMYENLVLVAGGIGISPFLAILSDIIHRIEEGKQCMPKNVLVLWSVKKSKELSLLSAVDAQTISSSVSDRLQLDIQAFVTQEPHPPLEDGIVGDDQKVPGMFVKNGTAMSGLVGTGDNFWAAMYFLASTLGFLLAYALVQVYYVKPHNVVAWWYLGLLFMLCMVAGVALPGGLVVLLWHLSEKQRLEDDKWDASQSPRAEQTGPLAAAGGGDDDAAPSVSLAALRTTRYGCRPNFEAEFAAFAERAGDAADVGVLVCGPQGLQTSVARECRARNLRRGGLGAAKSRSGAVFHFNSHSFDL

SEQ ID NO: 169308 - protein, 427 aa, Zea Mays
MWVTSLHPVRKRFFELFFYTHQLYVVFVVFLAFHVGDFIFSICAGAVFLFMLDRFLRFWQSRAKVDIISAACRPCGTVELVFSKPASLHYNALSFIFIQVRELSFLQWHPFSVSSSPMDGRYHMSVLIKVLGTWTEKLRSIITDVQEKNGGDSELQCGRMTACVEGPYGHESPYHLMYENLVLVAGGIGISPFLAILSDIIHRIEEGKQCMPKNVLVLWSVKKSKELSLLSAVDAQTISSSVSDRLQLDIQAFVTQEPHPPLEDGIVGDDQKVPGMFVKNGTAMSGLVGTGDNFWAAMYFLASTLGFLLAYALVQVYYVKPHNVVAWWYLGLLFMLCMVAGVALPGGLVVLLWHLSEKQRLEDDKWDASQSPRAEQTGPLAAAGGGDDDAAPSVSLAALRTTRYGCRPNFEARPGELNDRPICLWTN

SEQ ID NO: 169309 - protein, 445 aa, Zea Mays
MSSSMESSYLPATTESLAQAQEAKDASESISILYRVIQDPSSSADALRTKEVAITNLTNYLTKENRAEELRNLLTQLRPFFAVIPKAKTAKIVRGIIDAVAKIPGTSDLQISLCKEMVEWTRAEKRTFLRQRVEARLAALLLENQEYTEALTLLTSLIKEVRRLDDKLLLVDIDLLESKLHFSLRNLPKAKASLTAARTAANAIYVPPAQQGTIDLQSGILHAEEKDYKTAYSYFFEAFEAFSALEDPKAIFSLKYMLLCKIMVNQADDVAGIISSKAGLKYLGPDVDAMKAVADAYSKRSLKYFETALRDYKSQLEEDPIVHRHLSSLYDTLLEQNLCRLIEPYSRVEIAHIAEMIELLIEPYSRVEIAHIAEMIELPIDHVEKKLSQMILDKKFAGTLDQGAGCLIIFEDSKTEEIFPATLETISNVGKVVDSLYVRSAKIMA

SEQ ID NO: 169310 - protein, 393 aa, Zea Mays
MSSSMESSYLPATTESLAQAQEAKDASESISILYRVIQDPSSSADALRTKEVAITNLTNYLTKENRAEELRNLLTQLRPFFAVIPKAKTAKIVRGIIDAVAKIPGTSDLQISLCKEMVEWTRAEKRTFLRQRVEARLAALLLENQEYTEALTLLTSLIKEVRRLDDKLLLVDIDLLESKLHFSLRNLPKAKASLTAARTAANAIYVPPAQQGTIDLQSGILHAEEKDYKTAYSYFFEAFEAFSALEDPKAIFSLKYMLLCKIMVNQADDVAGIISSKAGLKYLGPDVDAMKAVADAYSKRSLKYFETALRDYKSQLEEDPIVHRHLSSLYDTLLEQNLCRLIEPYSRVEIAHIAEMIELPIDHVEKKLSQMIVDKKFAGTLDQGADCTYSGDD

SEQ ID NO: 169311 - protein, 416 aa, Zea Mays
MEAKTEAFTVKDHRGELYKKHYPPALKDEVWRLEKIGKDGSFHKRLNSSGIYTVEHFLQFLVRDQQKLRSILGSNMSNRMWESLIEHAKTCVLSGNHYIYYSSDARNVGAIFNNIYEFTGLIADDQFISAENLTENQRVFADTLVKQAYADWINVLEYDGKALLKFNQKKKYVTTRSETAKASASYPASNGLVNSQKELPGGPVNAEQSSLNNASQDRTRIPSMSMGNQVAREYAGNPQHMTPSITMQCDTRSLIPGGQFSGGSSVQTQTSRSSNMLALRPTQQPQNLDFSGLGQSTQPSGTNPFADWSRLQESSVDEYLMDEIRARSHELLENDEMQHMLRFLSVGGAPTGLNNVDGFLSYPSPAPAFGFDEDDRARSSGKAVVGWLKIKAAMRWGIFVRRKAAERRAQLVELED

SEQ ID NO: 169312 - protein, 193 aa, Zea Mays
MSMGNQVAREYAGNPQHMTPSITMQCDTRSLIPGGQFSGGSSVQTQTSRSSNMLALRPTQQPQNLDFSGLGQSTQPSGTNPFADWSRLQESSVDEYLMDEIRARSHELLENDEMQHMLRFLSVGGAPTGLNNVDGFLSYPSPAPAFGFDEDDRARSSGKAVVGWLKIKAAMRWGIFVRRKAAERRAQLVELED

SEQ ID NO: 169313 - protein, 209 aa, Zea Mays
MAPFALGSQVVAVASVSVGLNSSVKGVALKECEHPLAARQRKFVRVQLLRSGWCIRKIPGRDACQITVLHHEDNGMNIEMAKLAFSKGIWSYICKMSNALRRYPQHGSPSVSILTMQKLMKKDLETADASLSASQNTAASVVPSTPTSRTSPCKLAGRKSRQMIASGILLVGSIVCLSRGRSNLGAQLAMAFFLKKAFKQERQSGSSST

SEQ ID NO: 169314 - protein, 228 aa, Zea Mays
MKIIEDDGPGAAFYASAKAMTNGNHTFYVVAVASVSVGLNSSVKGVALKECEHPLAARQRKFVRVQLLRSGWCIRKIPGRDACQITVLHHEDNGMNIEMAKLAFSKGIWSYICKMSNALRRYPQHGSPSVSILTMQKLMKKDLETADASLSASQNTAASVVPSTPTSRTSPCKLAGRKSRQMIASGILLVGSIVCLSRGRSNLGAQLAMAFFLKKAFKQERQSGSSST

SEQ ID NO: 169315 - protein, 279 aa, Zea Mays
MSGAILLELFIIDLGSWLSFALAASQMKDKARVVAMDLRGHGKSTTNDDLDLSIETLTNDVIAVIRTMYGDLPPAIILVGHSMGGSVAIHVAARKEIRNLHGLVVVDVVEGTAMASLVHMQKILANRAQHFPSIEKAIEWSVKGGPLRNIESARVSIPSTLKYDESRECYTYRTPLEQTEKYWKGWYEGLSDKFLSCPVQKILLLAGTDRLDSWFTICRALTIGQMQGKFQMVVIRHTGHAIQEDVPEEFASHILKFISRNKIGPNGVEIPGLIKKWQQ

SEQ ID NO: 169316 - protein, 310 aa, Zea Mays
MEPPPLSSLQEEGEEGPTVEDSSVFSAAVVPPRPATHHSLHKYAPLDWSAYFDEERRVAIPDTDNVFNAYTTGSEGPVVFCLHGGGYSGLSFALAASQMKDKARVVAMDLRGHGKSTTNDDLDLSIETLTNDVIAVIRTMYGDLPPAIILVGHSMGGSVAIHVAARKEIRNLHGLVVVDVVEGTAMASLVHMQKILANRAQHFPSIEKAIEWSVKGGPLRNIESARVSIPSTLKYDESRECYTYRTPLEQTEKYWKGWSFRQVPILPSAKDPVVSWYRQTGQSFNNRSNARKISNGGDSAHWTCYTGRCT

SEQ ID NO: 169317 - protein, 320 aa, Zea Mays
MEPPPLSSLQEEGEEGPTVEDSSVFSAAVVPPRPATHSHSLHKYAPLDWSAYFDEERRVAIPDTDNVFNAYTTGSEGPVVFCLHGGGYSGLSFALAASQMKDKARVVAMDLRGHGKSTTNDDLDLSIETLTNDVIAVIRTMYGDLPPAIILVGHSMGGSVAIHVAARKEIRNLHGLVVVDVVEGTAMASLVHMQKILANRAQHFPSIEKAIEWSVKGGPLRNIESARVSIPSTLKYDESRECYTYRTPLEQTEKYWKGWYEGLSDKFLSCPVQKILLLAGTDRLDRALTIGQMQGKFQMVVIRHTGHAIQMYLKNLHRTY

SEQ ID NO: 169318 - protein, 654 aa, Zea Mays
MAAAMDAPNPGAAAGPGMPSDALYQELWHACAGPLVTVPRQGERVYYFPQGHMEQLEASAHHQQLDQYLPMFDLPPKILCRVVNVELRAEADSDEVYAQIMLQPEADQNELTSLDAEPQEREKCTAHSFCKTLTASDTSTHGGFSVLRRHAEECLPQLDMSQNPPCQELVAKDLHGTEWHFRHIFRGQPKRHLLTTGWSVFVSSKRLVSGDAFIFMRGENGELRVGVRRLMRQVNSMPSSVISSHSMHLGVLATASHAISTGTLFSVFYKPRTSRSDFIVSVNKYLEAKKQKISVGMRFKMRFEGDDAPERRFSGTIIGIGSLPAMSKSLWADSDWRSLKVQWDEPSSILRPDRISPWEVEPLDAANPQSPQPPLRAKRPRPPASPCMVSELPSGFGLWKSPIESSCTLSFSEPQRARELFPSIPTSTLSSSSNVSFNSKNEPSMLTSQFYWSARHTRADSCAASTNTVVIEKKQEPSSGGCRLFGINICSAEEEVLPEVTAPGVGYEQTAASVELNSDKLSQPSDVNNSDALAASSERSPLESQSRQVRSCTKVIMQGMAVGRAVDLTKLSGYSDLCQKLEEMFDIQGELGSTLKKWRVIFTDDEDDMMLVGDDPWDEFCRMVKRIYIYTYEEAKKLTSKSKLPVGEVVCFFQ

SEQ ID NO: 169319 - protein, 659 aa, Zea Mays
MAAAMDAPNPGAAAGPGMPSDALYQELWHACAGPLVTVPRQGERVYYFPQGHMEQLEASAHHQQLDQYLPMFDLPPKILCRVVNVELRAEADSDEVYAQIMLQPEADQNELTSLDAEPQEREKCTAHSFCKTLTASDTSTHGGFSVLRRHAEECLPQLDMSQNPPCQELVAKDLHGTEWHFRHIFRGQPKRHLLTTGWSVFVSSKRLVSGDAFIFMRGENGELRVGVRRLMRQVNSMPSSVISSHSMHLGVLATASHAISTGTLFSVFYKPRTSRSDFIVSVNKYLEAKKQKISVGMRFKMRFEGDDAPERRFSGTIIGIGSLPAMSKSLWADSDWRSLKVQWDEPSSILRPDRISPWEVEPLDAANPQSPQPPLRAKRPRPPASPCMVSELPSGLWKSPIESSCTLSFSEPQRARELFPSIPTSTLSSSSNVSFNSKNEPSMLTSQFYWSARHTRADSCAASTNTVVIEKKQEPSSGGCRLFGINICSAEEEVLPEVTAPGVGYEQTAASVELNSDKLSQPSDVNNSDALAASSERSPLESQSRQVRSCTKVIMQGMAVGRAVDLTKLSGYSDLCQKLEEMFDIQGELGSTLKKWRVIFTDDEDDMMLVGDDPWDEFCRMVKRIYIYTYEEAKKLTSKSKLPVSSDSSKLSAANSLSE

SEQ ID NO: 169320 - protein, 831 aa, Zea Mays
MRLLHADMQKRAALKERTARSLVQKAKSESKYMEQVRSAISLKRAAAEKKRLRLLEAEKTKAQARLLRIQKAAMTVCSRRESERRKLKEQLDNKLQRAKRQRAEYLKQRGSPRGSTHADYLKHAYALSRKLARHWRIFVKSRKTTFALAQAYDALGINEKSVKNMPFEKLAMSMESPVVLRSTKALLDRLEKRLVISHSVASSSVENVDHLLKRLGSPPRRKAPPSREGKTRAVVKRPAKSSEASIKLPRYSLRVVLCAYMILAHPSAVLSGQGEREKQLIESAANFIKEFELLIKVILDGPGQSSGVTGQRKFRAQLANFDKAWCSYLYSFVVWKVKDARLLEEDLVRAACKLELSMMQTCKLTADRHSQNNLTHDMKAIQKQVIDDQKLLRDKVQHLSGDAGLERMNSALSDTRSKFFEAKENGSPLTAPVANVSTPLSINSSGKAPLSEVPESSRTNVVGTSSVVRSLFSASSSSVSSSPEKQPTENEKMVNEMLHEDASAFAGRSDSASTAEEEFQNKVRETMEKAFWDMVTNSMRGERPDYSQLINLVKEVRDSLHDLAPKEWKEKILENIDLEILSQVLGSGSQDAQYLGQILEYSLDMVRKLSAAAKEDEMKKNHDKLLSELSTNSEVNGDGINSFVIAVIKGLRFILEEIKELKAEVSKARIQMMQQIIKESAGVEYLQKAFADRYGPPETAPASLPLTLQWILTSKNIAEEEWSEHSDCLSVMPAAGQAPALVPVLRSGHGAPVGQPSPSAGDTSGQPECKGEKLDKLIRIGLLQLISSVEGLQLQSTPESFQINLLRLRAVQSQFQQVIVIATTCSSCAKF

SEQ ID NO: 169321 - protein, 771 aa, Zea Mays
MRLLHADMQKRAALKERTARSLVQKAKSESKYMEQVRSAISLKRAAAEKKRLRLLEAEKTKAQARLLRIQKAAMTVCSRRESERRKLKEQLDNKLQRAKRQRAEYLKQRGSPRGSTHADYLKHAYALSRKLARHWRIFVKSRKTTFALAQAYDALGINEKSVKNMPFEKLAMSMESPVVLRSTKALLDRLEKRLVISHSVASSSVENVDHLLKRLGSPPRRKAPPSREGKTRAVVKRPAKSSEASIKLPRYSLRVVLCAYMILAHPSAVLSGQGEREKQLIESAANFIKEFELLIKVILDGPGQSSGVTGQRKFRAQLANFDKAWCSYLYSFVVWKVKDARLLEEDLVRAACKLELSMMQTCKLTADRHSQNNLTHDMKAIQKQVIDDQKLLRDKVQHLSGDAGLERMNSALSDTRSKFFEAKENGSPLTAPVANVSTPLSINSSGKAPLSEVPESSRTNVVGTSSVVRSLFSASSSSVSSSPEKQPTENEKMVNEMLHEDASAFAGRSDSASTAEEEFQNKVRETMEKAFWDMVTNSMRGERPDYSQLINLVKEVRDSLHDLAPKEWKEKILENIDLEILSQVLGSGSQDAQYLGQILEYSLDMVRKLSAAAKEDEMKKNHDKLLSELSTNSEVNGDGINSFVIAVIKGLRFILEEIKELKAEVSKARIQMMQQIIKESAGVEYLQKAFADRYGPPETAPASLPLTLQWILTSKNIAEEEWSEHSDCLSVMPAAGQAPALVPVLRSGHGAPVGQPSPSAGDTSGQPECKD

SEQ ID NO: 169322 - protein, 246 aa, Zea Mays
MPFEKLAMSMESPVVLRSTKALLDRLEKRLVISHSVASSSVENVDHLLKRLGSPPRRKAPPSREGKTRAVVKRPAKSSEASIKLPRYSLRVVLCAYMILAHPSAVLSGQGEREKQLIESAANFIKEFELLIKVILDGPGQSSGVTGQRKFRAQLANFDKAWCSYLYSFVVWKVKDARLLEEDLVRAACKLELSMMQTCKLTADRHSQNNLTHDMKAIQKQVIDDQKLLRDKVQHLSGDAGLERMNS

SEQ ID NO: 169323 - protein, 63 aa, Zea Mays
MDFTAALLQRLEEDSTQQQQQSLAQLVEAAYEATLKPWHGWISSAACKPKPWTWTWSDPRPSL

SEQ ID NO: 169324 - protein, 276 aa, Zea Mays
MASAEIPNSSPDATNPAAAAATATATATGPDISSSPPLPPRKRRLSPSSSPTRSASRSRSPRSRSPRGRRSRSRSRSRSRSRSRSPQYPPDGKRQRHNDLTVEACRDFLRDRCTRSDLECRYAHPHNSASVDRDNKVTACADSLRNNCFRGMTCRYYHPPPQIQEQLLRSIGMEDPNVKTQICRDFTRGKCSRSANECRFLHHSSVEDAAIVCQDFLRGQCNRIACRYSHVVAHPVPPMSHVPMPYPEMLYMPPPPPPPLGVPMMGPPPSPFAGTS

SEQ ID NO: 169325 - protein, 97 aa, Zea Mays
MSHVPMPYPEMLYMPPPPPPPLGVPMMGPPPSPFADNKNRVEVCRDFLKNMCNRESCRFLHPGTHTAAASANVEVCRDFKRGECNRPACRFLHPYTS

SEQ ID NO: 169326 - protein, 73 aa, Zea Mays
MFCFYLSLVAHFLFDRRQRSLKILGACSPVPIEKCAFFAWTISPLRLSNVHAIATLSTTRSIRHMWKCCAEEL

SEQ ID NO: 169327 - protein, 194 aa, Zea Mays
MVLVACGWRHTITVSDSGNLYTYGWSKYGQLGHGDFEDHLVPHKVEALKDSTISQISGGWRHTMALTSEGKLYGWGWNKFGQVGVGNNDDHSSPGQVSFPEDQKISQVACGWRHTLALSEKKNVFSWGRGTSGQLGNGEIVDRNTPVLIDALSSDGSACKKLESSTAAPFAAKVWVSPSERYAIVPDENVSSIS

SEQ ID NO: 169328 - protein, 321 aa, Zea Mays
MGCIMACTTSFNMGSLEGQTLVAIISELPSALILKRHAHILRGTRNVQDTPSTDTEDMSSTASNGIGPLASVSGSSHYGDAKASSSAPAPREELAVDPASLVAPAEHREESVEAMVSSSAPATSVGHGEGNGAGGIAPSVAHCAIEASQGEGAGDNASPSILRVGGGSSFRACLGNLGLEWIEVVLRQWGLLGPSRPDLAFTGHPSLLFSGSGAPCAAHSRIRPSLHRTSLPPLLGEWCSLRCPFSDKVPRGHPIILEGLEGEDMDVEQWQLIEGASARADKGLETIERCLDNFEEAMLIACTMMMWDLLPIGQREVLLTA

SEQ ID NO: 169329 - protein, 543 aa, Zea Mays
MLGWFKLKKSDQLSGLSSSVDGDSTASVSPSCSKSSQQKHLLLDLKDGRRKSMTRKGDDPSLADSFLERTQAGDLFSAAPRVRHPLPSGTTIVDQIDLLQEQVKMLAGDVALCTSSLKRLTEQAANNPDNLQIQEQIVRLKDEIAEKKSHIHMLEQRMVQSLETTEGPAIKTELSQLSEKTFELEIMSADNRILQDQLQAKVTENAELQETVAHLRQEISNLSKAAKSEDSFASVQSSEPSTASTDTRDQTNEISNRANMSSRTTDLNESGFISQVLKQASEIESLKQENLRLVEEKDGLEIHSQKLAEESSYAKELASAAAIELKNLAEEVTRLSYENAKLNADLAAARELNASMSRSNIHPDPKRRDHESGILVEELQKELVASCQREAVLEDTLSQKDRRESELLKIIDDAKCREHELKNELASMGALLSKIKKENSQQDVFEFKAKQNGFHSSKTDSGRLVSEMQASDNGCWDGLSTFEEARAAYNFERMRCKELESIVSKLKGEDLRGLDVKVLEELQNFHVEALSRICQEKMASQAL

SEQ ID NO: 169330 - protein, 971 aa, Zea Mays
MGCGQCGKGTVFAYGVTSSGKTHTMHGEQKSPGIIPLAVKDVFSIIQDTPGREFLLRVSYLEIYNEVINDLLDPTGQNLRIREDAQGTYVEGIKEEVVLSPAHALSLIASGEEHRHVGSNNFNLVSSRSHTIFTLTIESSPSGENEAEEVKLSQLNLIDLAGSESSKTETTGLRRKEGSYINKSLLTLGTVIAKLTDGKATHIPYRDSKLTRLLQSSLSGHGRISLICTVTPASSNSEETHNTLKFAHRSKHIEIKASQNKIIDEKSLIKKYQKEISSLKEELQQLRRGMMGNGGILPTDQEDLVNLKLQLEAGQVKLQSRLEQEEEAKAALMGRIQRLTKLILVSTKSSISSNVSGKTNFRRRHSFGEDELVYLPDRKREYFVDDDDVSLDSELSLEGKLDLNNPEESARFGRRNHKRGMLGWFKLKKSDQLSGLSSSVDGDSTASVSPSCSKSSQQKHLLLDLKDGRRKSMTRKGDDPSLADSFLERTQAGDLFSAAPRVRHPLPSGTTIVDQIDLLQEQVKMLAGDVALCTSSLKRLTEQAANNPDNLQIQEQIVRLKDEIAEKKSHIHMLEQRMVQSLETTEGPAIKTELSQTFSKLSTQLSEKTFELEIMSADNRILQDQLQAKVTENAELQETVAHLRQEISNLSKAAKSEDSFASVQSSEPSTASTDTRDQTNEISNRANMSSRTTDLNESGFISQVLKQASEIESLKQENLRLVEEKDGLEIHSQKLAEESSYAKELASAAAIELKNLAEEVTRLSYENAKLNADLAAARELNASMSRSNIHPDPKRRDHESGILVEELQKELVASCQREAVLEDTLSQKDRRESELLKIIDDAKCREHELKNELASMGALLSKIKKENSQQDVFEFKAKQNGFHSSKTDSGRLVSEMQASDNGCWDGLSTFEEARAAYNFERMRCKELESIVSKLKGEDLRGLDVKVLEELQNFHVEALSRICQEKMASQAL

SEQ ID NO: 169331 - protein, 562 aa, Zea Mays
MSSSRPTRSSISPFRSRRSAPAVSAAGPPPPARTSSGGRPSTPSSTASGRPTTPSSSGGRPATPSAAFARPATPSSSSARPATPSSTASARPTTPSSISSRVAVRAPLVDAANAKENIMVTVRFRPLSPREINKGDEVAWYADGDNMVRNEYNLSIAYAFDKVFGPATTTRHVYDIAAQHIVSGAMQGINGTVFAYGVTSSGKTHTMHGEQKSPGIIPLAVKDVFSIIQDTPGREFLLRVSYLEIYNEVINDLLDPTGQNLRIREDAQGTYVEGIKEEVVLSPAHALSLIASGEEHRHVGSNNFNLVSSRSHTIFTLTIESSPSGENEAEEVKLSQLNLIDLAGSESSKTETTGLRRKEGSYINKSLLTLGTVIAKLTDGKATHIPYRDSKLTRLLQSSLSGHGRISLICTVTPASSNSEETHNTLKFAHRSKHIEIKASQNKIIDEKSLIKKYQKEISSLKEELQQLRRGMMGNGGILPTDQEDLVNLKLQLEAGQVKLQSRLEQEEEAKAALMGRIQRLTKLILVSTKSSISSNVSGKTNFRRRHSFGEDENFRLKGNLI

SEQ ID NO: 169332 - protein, 823 aa, Zea Mays
MSSSRPTRSSISPFRSRRSAPAVSAAGPPPPARTSSGGRPSTPSSTASGRPTTPSSSGGRPATPSAAFARPATPSSSSARPATPSSTASARPTTPSSISSRVAVRAPLVDAANAKENIMVTVRFRPLSPREINKGDEVAWYADGDNMVRNEYNLSIAYAFDKVFGPATTTRHVYDIAAQHIVSGAMQGINGTVFAYGVTSSGKTHTMHGEQKSPGIIPLAVKDVFSIIQDTPGREFLLRVSYLEIYNEVINDLLDPTGQNLRIREDAQGTYVEGIKEEVVLSPAHALSLIASGEEHRHVGSNNFNLVSSRSHTIFTLTIESSPSGENEAEEVKLSQLNLIDLAGSESSKTETTGLRRKEGSYINKSLLTLGTVIAKLTDGKATHIPYRDSKLTRLLQSSLSGHGRISLICTVTPASSNSEETHNTLKFAHRSKHIEIKASQNKIIDEKSLIKKYQKEISSLKEELQQLRRGMMGNGGILPTDQEDLVNLKLQLEAGQVKLQSRLEQEEEAKAALMGRIQRLTKLILVSTKSSISSNVSGKTNFRRRHSFGEDELVYLPDRKREYFVDDDDVSLDSELSLEGKLDLNNPEESARFGRRNHKRGMLGWFKLKKSDQLSGLSSSVDGDSTASVSPSCSKSSQQKHLLLDLKDGRRKSMTRKGDDPSLADSFLERTQAGDLFSAAPRVRHPLPSGTTIVDQIDLLQEQVKMLAGDVALCTSSLKRLTEQAANNPDNLQIQEQIVRLKDEIAEKKSHIHMLEQRMVQSLETTEGPAIKTELSQTFSKLSTQLSEKTFELEDSSRPATSKGNRKCRTPRNSCTLEARNQ

SEQ ID NO: 169333 - protein, 66 aa, Zea Mays
MVVASLLLRLGLSIGHSGSAALKNSVNTSDPAFPTGFLENKKQGKQKAASFAGEYFNQEKVSNHCD

SEQ ID NO: 169334 - protein, 275 aa, Zea Mays
MASDAAQVKAAREDIRELLRTTHSHPILVRLGWHDAGTYDKNIEEWPQRGGANGSLRFDVELKHGANAGLINALKLIQPIKDKYPSITYADLFQLASATAIEEAGGPKIPMKYGRVDVTGPEQCPPEGKLPDAGPSSPADHLREVFYRMGLNDKEIVALSGAHTLGRSRPERSGWGKPETKYTKNGPGAPGGQSWTVEWLRFDNSYFKDIKEKRDQDLLVLPTDAALFEDPKFKVYAEKYAEDQDAFFRDYAEAHAKLSELGAKFQPPQGFSLDD

SEQ ID NO: 169335 - protein, 164 aa, Zea Mays
MLVGGYPFEDPDDPKNFRKTIGRIMSIQYKIPEYVHVSQDCKELLSRIFVANSAKRITIREIRNHPWFLKNLPRELTEAAQAMYYKKDNSAPTYSVQSVEEIMKIVEKARTPPPSSTPVAGFGWAEEDEQEDSKDPDEEHEDGEDEYEKQVKQVHASGEFHLSC

SEQ ID NO: 169336 - protein, 190 aa, Zea Mays
MEKYELLKDIGAGNFGVARLMRNKETKELVAMKYIPRGQKIDENVAREIINHRSLRHPNIIRFKEVVLTPTHLAIVMEYAAGGELFDRICNAGRFSEDEARYFFQQLICGVSYCHSMQICHRDLKLENTLLDGSPAPRLKICDFGYSKSSLLHSKPKSTVGTPAYIAPEVLSRREYDGKPMCGPVESLFM

SEQ ID NO: 169337 - protein, 143 aa, Zea Mays
MGAAPSTLPESPRPRLPSCSLREPQPSDQSQPNSLQSNRCSWLARPCGTSSIAAVRRRVPVRAPLLGSHQPPFSNPCLGRHRGVLVDWLAVDLVGVVEHSISLNPESRTLGKNKRGPCASLIKCSTQRAESESLPCSRIARQI

SEQ ID NO: 169338 - protein, 522 aa, Zea Mays
MYKAVFSGDTLESASTDVLAAMDQAIADGVHVMSLSLGFPETSYDTNVIAIGAFAAMRKGIFVACSAGNDGSDGYTIMNGAPWITTVGAASIDRDFTATVTLGSGAAVQGKSVYPLSTPTVSASLYYGHGNRSKQRCEYSSLRSKDVRGKYVLCTGGPSTEIEQQMDEVQSNGGLGAIIASDMKEFLQPTEYTMPLVLVTQPDGAAIAKYATTAAGSARAGGGAPRASIRFGGTALGVKPAPTVSYFSARGPGLISPTILKPDIVAPGVDILAAWVPNKEIMELGRQKLYTKYALVSGTSMSSPHAAGVAALLRSVHPDWSPAAIRSAMMTTAYVKDSASNVIVSMPSGSPGTPLDFGSGHVSPNEAVDPGLVYDAAADDYVDLLCALRYSGSQISTITGRPNPSCAGANLDLNYPSFTIILNRTNSATHTFKRVLTNVAAAPAKYSVSVTAPAGMKVTVSPTALSFGGKGSKQPFTVTVQVSKVKRNSNDYNYAGNYGFLSWNEVGGKHVVRSPIVSAFAQ

SEQ ID NO: 169339 - protein, 499 aa, Zea Mays
MLSDSAPAVPTPPPPSSGSMRRRLAPVLLLAAALLLAARPWPAVIAADCPLDLSWPNYGLIASVCSDQNGHSKCCRYINAVLAVSSAMYANTTGTLGVPAQFSDSCIANISDTLVSKGILPTAASFCGLGIKIQVSYQCDGMTTILEMLQSPNFIDITRSCATTLSDDITCKRCLNSGLSYLRHLVGEQDNVTLNTCRDAAFVALVSQGNISTVDTAGCFFSVQGLSALQVNISGPAPTGLVAPDISPSPLTVQVPVVPPKHHRSYKLVLFPAIGVLVTGVAILLMIVLIFLIRRKNKELKKMEGNNPLDAWSFSCVKKGQEGNSTIFGRFSYKEMKNATRNFSTVLGGGENGTVFRGQLNDGSVVAIRRVESSPKQSHNEFCKEMEFLGRLHHRHLVGLKGFCSTRFERCMNTWKMEAFKITYIRQVNICYHGKIGSKLPSMLPMLWSTFIFIVILHYTMEMLSLAMSSWTRITLQSLLVAVLHTTLVVAIQLPVAHQ

SEQ ID NO: 169340 - protein, 397 aa, Zea Mays
MEGNNPLDAWSFSCVKKGQEGNSTIFGRFSYKEMKNATRNFSTVLGGGENGTVFRGQLNDGSVVAIRRVESSPKQSHNEFCKEMEFLGRLHHRHLVGLKGFCSTRFERFQVYEYMENGSLQDHLHSPSKHLLPWKNRVQIAIDVANALEYLHFYCDPPLYHGDVKPSNVFLDKNYLAKLAGCGLAHHSSSGNTTPSCTPVNVKAQATPGYVDPEYMVTQELTPKSDVYSYGVLLLELVTGKPVIQDNKSLVEWSRELIGTDYRLHELVDPSVADAFDLDELQVVADVIHWCTHRDGAARPSMKQVLRILYERLDPLSGRFARAVEGEEGYYYCHGGGRVKGKQAGDGVIQFSGDAARSWLPSSSSTSRSHCSRSVLLECNSPEPQSSPAHGNGAFLA

SEQ ID NO: 169341 - protein, 50 aa, Zea Mays
MFSGSASADMQKKCSIFIHWFQYSSLCKTFGFSSKYVFANLRVISPPYGG

SEQ ID NO: 169342 - protein, 169 aa, Zea Mays
MELNTEGVLYAKKDYNLAKHPQIDVPNLQVIKLMQSFKSKEYVRETFSWQYYYWYLTNDGIEHLRNYLNLPSEIVPATLKKSARPLGRPFGSGPPGDRPRGPGRFEDRPRFGDRDEYRGGPRGAPGDFGGDKSGAPAEFQPSFRSSGARPGFGRGGGSGFGAGPTSSME

SEQ ID NO: 169343 - protein, 203 aa, Zea Mays
MVITASNDLNEETIDALNKQGHEVDAFGIGTYLVTCYSQAALGCVFKLVEINNRPRIKLSEDVAKCNNMFQVSIPCKKRCFRLYGKEGYPLVDIMIRESEPSPKAGERILCRHPFIESKRAYVVPQHVEELLQYYWPGTSDKPRAELPSLEKIRSRCMQQLEKLRPDHIRRLNPTPYKVSVSAKLYDFIHCLWLNEAPVGELQ

SEQ ID NO: 169344 - protein, 246 aa, Zea Mays
MAAPATSGPPASANGSLAGVAAAVGAPTNPMATAMLTDQYQFSMAYAYWKAGKHADRAVFDLYFRKNPFGGEFTVFAGLEECIKFMANFKFTEHDISFLQSVMPTCAGAFFDYLGEVDCSDVEVYSIPEGSVVFPKVPLMRVEGPVAVVQLLETPFVNLINYASLVTTNAARHRHVAGKSKVLLEFGLRRAQGPDGAISASKYCFMGGFDATSNVLAGNLFGIPLRGTHSHAFVSSYMVSEVSFLL

SEQ ID NO: 169345 - protein, 237 aa, Zea Mays
MAAPATSGPPASANGSLAGVAAAVGAPTNPMATAMLTDQYQFSMAYAYWKAGKHADRAVFDLYFRKNPFGGEFTVFAGLEECIKFMANFKFTEHDISFLQSVMPTCAGAFFDYLGEVDCSDVEVYSIPEGSVVFPKVPLMRVEGPVAVVQLLETPFVNLINYASLVTTNAARHRHVAGKSKVLLEFGLRRAQGPDGAISASKYCFMGGFDATRALMRYQTRPSGTKMAQEFARILLV

SEQ ID NO: 169346 - protein, 566 aa, Zea Mays
MAAPATSGPPASANGSLAGVAAAVGAPTNPMATAMLTDQYQFSMAYAYWKAGKHADRAVFDLYFRKNPFGGEFTVFAGLEECIKFMANFKFTEHDISFLQSVMPTCAGAFFDYLGEVDCSDVEVYSIPEGSVVFPKVPLMRVEGPVAVVQLLETPFVNLINYASLVTTNAARHRHVAGKSKVLLEFGLRRAQGPDGAISASKYCFMGGFDATSNVLAGNLFGIPLRGTHSHAFVSSYMSLDEIPNKALRNKDGSRVCEDFVSLVQEWLQKFQAADSLGGVFGDTNKSELAAFASYALAFPSNFLALVDTYDVIRSGIPNFCAVALALHDLGYKASGIRLDSGDLAYLSIEARKVFRAVEKEFNLPGFAKMVITASNDLNEETIDALNKQGHEVDAFGIGTYLVTCYSQAALGCVFKLVEINNRPRIKLSEDVAKVSIPCKKRCFRLYGKEGYPLVDIMIRESEPSPKAGERILCRHPFIESKRAYVVPQHVEELLQYYWPGTSDKPRAELPSLEKIRSRCMQQLEKLRPDHIRRLNPTPYKVSVSAKLYDFIHCLWLNEAPVGELQ

SEQ ID NO: 169347 - protein, 176 aa, Zea Mays
MAGAGSNRASSARHPAPAPSSPSSSSREANVADMVHGWHAQQAAANKALAAEAGAGGSSSAAASLPRGAVPFPAPAAGFQTWSGQNVVVSVASNEAYINLHSPRQPAGTLTKALFVLERHRIDVVTTTISTQDGFHMYGIHARVNSASASARFPENLCAEDRFKLAVSEMLQLINI

SEQ ID NO: 169348 - protein, 588 aa, Zea Mays
MSQEGANLPQEVVGSHDQATAPHGSIPAPADSNPSSVSNLASAVNNGGSSECASPAVLSAGEDNNAASSKTASPAVLSAGEDNNKAKLKLASPASLLAGEEKGNNADEFKLASPRMLHDCDDNNAGSHAGVRNCNAAQSKLANPAVLHAGDDKKGGSKIAGPEVPHASVTSTTGSKLNGPAALHAGNDNDSGGSRLPNPAVLHASKDMDNNAGRPKFASPVLLHAGEDNKARTKLAIQAGGGGNAGAGSSRLTRSAALHAGKDNGAGSKPAIQVVPRLHAGGKDNNAGSFKAARPSAADSGESNAKEGKSNVAGEQRAREAGVGCGGGKGNAAAVEDVDHDLHIFTERERRKKMKNMFSTLHALLPQLPDKADKATIVGEAVTYIKTLEGTVQKLEKLKLERKRALAAQQQLMAGAGSNRASSARHPAPAPSSPSSSSREANVADMVHGWHAQQAAANKALAAEAGAGGSSSAAASLPRGAVPFPAPAAGFQTWSGQNVVVSVASNEAYINLHSPRQPAGTLTKALFVLERHRIDVVTTTISTQDGFHMYGIHARVNSASASARFPENLCAEDRFKLAVSEMLQLINI

SEQ ID NO: 169349 - protein, 328 aa, Zea Mays
MNLPIVMYHIGVLWQTSPFLTPKYTSKGKVTCLNASAGNKTYLAPLMGQLAAYCLAETVLLCCHWTSRISTACLFRQSLMQMEIFLVDCLKYFTVVEHLDNYRCDRCWHIIAAKYLSLRSEVDEEKVSKLQSCVDYGTCSCRDMFPLESLPCSSSSRATKQLIISQCPKILCIHFLRASVGLDGEPIKHQGHISFPLLLNLSPFTGGASSAGPLAMNAQRDGQQALHLYRQLNMQANADVSSSSSSPPQLSRSKLYGLAAVVEHYGKCGGGHYAVYRRVASNPDPDDPGKPVAGLGKRWFYISDGYVSEVPEEDVLRAEATLLFYERL

SEQ ID NO: 169350 - protein, 429 aa, Zea Mays
MLEVCEILATIAFLMSSSRDNLLATDGLLPEEKAVRMPLLLALSSLLEDLIIVRDERTVLNPHGVMHALSLYVGHFNLTRQQDASEAFLHLLISLRDEFAHCYVPHRSSLADITLSDSKVYKQREGNLPECKRWKQNLFGPFDGTVGSILSCRNCSSVLSLDFENFHCLPLSPVLNANGDITSGCSLVDCLKYFTVVEHLDNYRCDRCWHIIAAKYLSLRSEVDEEKVSKLQSCVDYGTCSCRDMFPLESLPCSSSSRATKQLIISQCPKILCIHFLRASVGLDGEPIKHQGHISFPLLLNLSPFTGGASSAGPLAMNAQRDGQQALHLYRQLNMQANADVSSSSSSPPQLSRSKLYGLAAVVEHYGKCGGGHYAVYRRVASNPDPDDPGKPVAGLGKRWFYISDGYVSEVPEEDVLRAEATLLFYERL

SEQ ID NO: 169351 - protein, 252 aa, Zea Mays
MQMEIFGCSLVDCLKYFTVVEHLDNYRCDRCWHIIAAKYLSLRSEVDEEKVSKLQSCVDYGTCSCRDMFPLESLPCSSSSRATKQLIISQCPKILCIHFLRASVGLDGEPIKHQGHISFPLLLNLSPFTGGASSAGPLAMNAQRDGQQALHLYRQLNMQANADVSSSSSSPPQLSRSKLYGLAAVVEHYGKCGGGHYAVYRRVASNPDPDDPGKPVAGLGKRWFYISDGYVSEVPEEDVLRAEATLLFYERL

SEQ ID NO: 169352 - protein, 364 aa, Zea Mays
MHALSLYVGHFNLTRQQDASEAFLHLLISLRDEFAHCYVPHRSSLADITLSDSKVYKQREGNLPECKRWKQNLFGPFDGTVGSILSCRNCSSVLSLDFENFHCLPLSPVLNANGDITSGCSLVDCLKYFTVVEHLDNYRCDRCWHIIAAKYLSLRSEVDEEKVSKLQSCVDYGTCSCRDMFPLESLPCSSSSRATKQLIISQCPKILCIHFLRASVGLDGEPIKHQGHISFPLLLNLSPFTGGASSAGPLAMNAQRDGQQALHLYRQLNMQANADVSSSSSSPPQLSRSKLYGLAAVVEHYGKCGGGHYAVYRRVASNPDPDDPGKPVAGLGKRWFYISDGYVSEVPEEDVLRAEATLLFYERL

SEQ ID NO: 169353 - protein, 185 aa, Zea Mays
MFPLESLPCSSSSRATKQLIISQCPKILCIHFLRASVGLDGEPIKHQGHISFPLLLNLSPFTGGASSAGPLAMNAQRDGQQALHLYRQLNMQANADVSSSSSSPPQLSRSKLYGLAAVVEHYGKCGGGHYAVYRRVASNPDPDDPGKPVAGLGKRWFYISDGYVSEVPEEDVLRAEATLLFYERL

SEQ ID NO: 169354 - protein, 219 aa, Zea Mays
MEATYLWEDDDDRFSVENIPLYDSADDEPTSINKEILVSSDGMVTQYSNISRVQSTENPGNTGTNEFAPIIVDELTSSNGLAPMNVEPLTVSSNEFTPSNAMPMVARLVENGSTGYSAQDTHDASQNSAPKAANHANQTGPQNNSNHSALVPVKPAPKRRGRKPKRVVHKQLDIPDICDRLTSSVACEEILYCEVMVCYDYDQNSLLLKQCSSGEQCEV

SEQ ID NO: 169355 - protein, 408 aa, Zea Mays
MAGQFVIEYCGEVISWKEAKRRAQAYETQCLKDAYIIYLNADESIDATRKGNLARFINHSCQPNCETRKWNVLGEVRVGIFAKQNIPFGTELSYDYNFEWYGGVMVRCLCGAASCSGFLGAKSRGFQEATYLWEDDDDRFSVENIPLYDSADDEPTSINKEILVSSDGMVTQYSNISRVQSTENPGNTGTNEFAPIIVDELTSSNGLAPMNVEPLTVSSNEFTPSNAMPMVARLVENGSTGYSAQDTHDASQNSAPKAANHANQTGPQNNSNHSALVPVKPAPKRRGRKPKRVVHKQLDIPDICDRLTSSVACEEILYCEEVKNQAVSEIDALYDEIRPAVEEHERDSQDSVSTSLAEKWIEASCRKYKAEFDLYAAVLKNVASTPLRSKDDVGPREQNGLKYLENGS

SEQ ID NO: 169356 - protein, 378 aa, Zea Mays
MPISFTSMLMSQLMQQEKGTLRDSSTIHAYSQPNCETRKWNVLGEVRVGIFAKQNIPFGTELSYDYNFEWYGGVMVRCLCGAASCSGFLGAKSRGFQEATYLWEDDDDRFSVENIPLYDSADDEPTSINKEILVSSDGMVTQYSNISRVQSTENPGNTGTNEFAPIIVDELTSSNGLAPMNVEPLTVSSNEFTPSNAMPMVARLVENGSTGYSAQDTHDASQNSAPKAANHANQTGPQNNSNHSALVPVKPAPKRRGRKPKRVVHKQLDIPDICDRLTSSVACEEILYCEEVKNQAVSEIDALYDEIRPAVEEHERDSQDSVSTSLAEKWIEASCRKYKAEFDLYAAVLKNVASTPLRSKDDVGPREQNGLKYLENGS

SEQ ID NO: 169357 - protein, 258 aa, Zea Mays
MEQSIEDRTMLPNHPATKLSTARLQTKVSQFDDFEKWDLSLHRSTLRLELAKEPLLLIGSLETTVPKFGRCVDELELDLLQRQPGSLLQEGLAEGHHPLLWTHTAALDHQVVTLHDTIMGEATHGSDVLLIPVKLCGGIVGLLSSLADLVNLLVHLSAVVVPILTSTGNRIGDPSRMPCTDTSNFAETPVGLAGKPGDTPTSDHTLITFPLGHTNDVNHLILLEDSINRDLFLKEFVAIVHLVSNGTTIDLNLHQVSL

SEQ ID NO: 169358 - protein, 251 aa, Zea Mays
MEQSIEDRTMLPNHPATKLSTARLQTKVSQFDDFEKWDLSLHRSTLRLELAKEPLLLIGSLETTVPKFGRCVDELELDLLQRQPGSLLQEGLAEGHHPLLWTHTAALDHQVVTLHDTIMGEATHGSDVLLIPVKLCGGIVGLLSSLADLVNLLVHLSAVVVPILTSTGNRIGDPSRMPCTDTSNFAETPVGLAGKPGDTPTSDHTLITFPLGHTNDVNHLILLEDSINRDLFLKEFVAIVHLVSNGTTIDL

SEQ ID NO: 169359 - protein, 219 aa, Zea Mays
MKGLKQKKAHLMEIQVNGGTIADKVDYGYKFFEKEVPVDAVFQKDEMIDIIGVTKGKGYEGVVTRWGVTRLPRKTHRGLRKVACIGAWHPARVSYTVARAGQNGYHHRTEMNKKVYKIGKAGQETHDASTEFDRTEKDITPMGGFPHYGIVKGDYLMIKGCCVGPKKRVVTLRQSLLKQTSRLALEEIKLKFIDTSSKFGHGRFQTTDEKQRFFGKLKA

SEQ ID NO: 169360 - protein, 191 aa, Zea Mays
MSHRKFEHPRHGSLGFLPRKRSSRHRGKVKSFPRDDPKKPCHLTAFLGYKAGMTHIVREVEKPGSKLHKKETCEAVTIIETPPLVIVGLVAYVKTPRGLRTLNSVWAQHLSEEVRRRFYKNWCKSKKKAFTKYALKYENDAGKKEIQLQLETSRLALEEIKLKFIDTSSKFGHGRFQTTDEKQRFFGKLKA

SEQ ID NO: 169361 - protein, 71 aa, Zea Mays
MDLSAVQAALSDKSYSTLASLCDELLLQAASQGFTTDEWPYSVHLLAHLYINDLELQTEDIQAVDFCIFHN

SEQ ID NO: 169362 - protein, 55 aa, Zea Mays
MINIIVICQPIFGSPLSFLPGITTIYLARMVMEGDSACCLLLQVYIITFFTGCIC

SEQ ID NO: 169363 - protein, 593 aa, Zea Mays
MEMRARESVSMSKDLTGEITPFATALHDVFLHSHCSSCFTKLLPQTPCVMSCMTCCSLRYCCSECLRADSVVHVSSGECCFFVDHLKRASPSYVTEGTSDLRAALRLLCVLEIHGLVSPDSINHYSRIGGLSASGIEEALKEGEVIAERILEGSLLMSSARKSRAQTCVIFSDRLKLEKMALWAVIINSVEVQLSEGLALGVAVYGPSFSWFNHSCFPSASYRFVLAPRNEDCASQKSKSSVVPASKGVAADVEARHSDLWSKYKFICSCRRCIASPEPYTDLILNCDVRDLDKAEAEGTVTPPAIENLGDVLQQAISEYTSNDDPEACCDMIETMLSNRLVSGLKQEDISGRKHILQPLHHICLTAYMTLASAYRFRALSLEEAVRSDGENTDEFFRMAKAAAAYSLVLAGSTHHLFLSECSLMIPLSHFLLNTGQSLLYLVESIKGKTRQNISEARLSFSSCPASSTDNDSPPYHVFRSTCEAFGKQMLSLSLRCWSFLVRGLPCLEKIKSPMEFSMPGTTIFQSVLSEEDHANLSAHEPVGFTERQAGCILSLALCCITYCKYLATICYGPHHYLADHAKYLLEGIDPAQ

SEQ ID NO: 169364 - protein, 303 aa, Zea Mays
MEMRARESVSMSKDLTGEITPFATALHDVFLHSHCSSCFTKLLPQTPCVMSCMTCCSLRYCCSECLRADSVVHVSSGECCFFVDHLKRASPSYVTEGTSDLRAALRLLCVLEIHGLVSPDSINHYSRIGGLSASGIEEALKEGEVIAERILEGSLLMSSARKSRAQTCVIFSDRLKLEKMALWAVIINSVEVQLSEGLALGVAVYGPSFSWFNHSCFPSASYRFVLAPRNEDCASQKSKSSVVPASKGVAADVWHAWQYEDHSTHGTSLRSTKQDIRICGQSINLFVLAGDVLHHQSHTLILF

SEQ ID NO: 169365 - protein, 279 aa, Zea Mays
MEMRARESVSMSKDLTGEITPFATALHDVFLHSHCSSCFTKLLPQTPCVMSCMTCCSLRYCCSECLRADSVVHVSSGECCFFVDHLKRASPSYVTEGTSDLRAALRLLCVLEIHGLVSPDSINHYSRIGGLSASGIEEALKEGEVIAERILEGSLLMSSARKSRAQTCVIFSDRLKLEKMALWAVIINSVEVQLSEGLALGVAVYGPSFSWFNHSCFPSASYRFVLAPRNEDCASQKSKSSVVPASKGVAADVWHAWQYEDHSTHGDVLHHQSHTLILF

SEQ ID NO: 169366 - protein, 351 aa, Zea Mays
MLGNTKIILLMEARHSDLWSKYKFICSCRRCIASPEPYTDLILNCDVRDLDKAEAEGTVTPPAIENLGDVLQQAISEYTSNDDPEACCDMIETMLSNRLVSGLKQEDISGRKHILQPLHHICLTAYMTLASAYRFRALSLEEAVRSDGENTDEFFRMAKAAAAYSLVLAGSTHHLFLSECSLMIPLSHFLLNTGQSLLYLVESIKGKTRQNISEARLSFSSCPASSTDNDSPPYHVFRSTCEAFGKQMLSLSLRCWSFLVRGLPCLEKIKSPMEFSMPGTTIFQSVLSEEDHANLSAHEPVGFTERQAGCILSLALCCITYCKYLATICYGPHHYLADHAKYLLEGIDPAQ

SEQ ID NO: 169367 - protein, 277 aa, Zea Mays
MEMRARESVSMSKDLTGEITPFATALHDVFLHSHCSSCFTKLLPQTPCVMSCMTCCSLRYCCSECLRADSVVHVSSGECCFFVDHLKRASPSYVTEGTSDLRAALRLLCVLEIHGLVSPDSINHYSRIGGLSASGIEEALKEGEVIAERILEGSLLMSSARKSRAQTCVIFSDRLKLEKMALWAVIINSVEVQLSEGLALGVAVYGPSFSWFNHSCFPSASYRFVLAPRNEDCASQKSKSSVVPASKGVAADVWHAWQYEDHSTHGTSLRSTLVCNY

SEQ ID NO: 169368 - protein, 309 aa, Zea Mays
MEMRARESVSMSKDLTGEITPFATALHDVFLHSHCSSCFTKLLPQTPCVMSCMTCCSLRYCCSECLRADSVVHVSSGECCFFVDHLKRASPSYVTEGTSDLRAALRLLCVLEIHGLVSPDSINHYSRIGGLSASGIEEALKEGEVIAERILEGSLLMSSARKSRAQTCVIFSDRLKLEKMALWAVIINSVEVQLSEGLALGVAVYGPSFSWFNHSCFPSASYRFVLAPRNEDCASQKSKSSVVPASKGVAADVWHAWQYEDHSTHALCKYGPRVVVRCIKPINKGDEVCITYIDLLQTRAMYCITRAIH

SEQ ID NO: 169369 - protein, 110 aa, Zea Mays
MRFITPAFTSYVLSMHSCYVSIIVGAAGVPGVLLHHVLAELWNICLPIPLLKYCCCNPCCSQVLVASLGVLAVRVCKSKLLFPATNSICPSLPISYLSHGPVGRAVLELE

SEQ ID NO: 169370 - protein, 119 aa, Zea Mays
MAFALLVAAARAESAGSTRSPAAAAGGGRAMGGGWPRPGGALAAPRLLLRALLLCSLLAQPHPSRAFFFFGGVRTSLHVPQDDVGMGTRRLQARVLQLAVPLLMMLSFAATSVSAGVVM

SEQ ID NO: 169371 - protein, 168 aa, Zea Mays
MRGVVSIALAYNKAFDLMFPRFCGSARHFGRCARHFGRDIIMPNLKSSVTTIASAVEYMDEVLKALPPGEARNEDSRTLQFNYGSFKHKALDKSLTKKGKTLAILHEFQVLQVVAVGECGLDYDRLQFCPTDMQKKFPGGVTYSFTDLAEDQDRLLSFEKMFIGKFLR

SEQ ID NO: 169372 - protein, 193 aa, Zea Mays
MPYPHTRILQSVLAAAARSRSADCSLLPTQRGGTPSPSPSACCAPVLHTGVAPSSRTPHRSHPHPSRTPPLSAASADQHTLLQIQRHFFTVGGREMVLRRAATECPKKVAGLKDLVNLPTQLREFAGGRSQMSHISFFLSVWSYIKDNKLQDPTNKNIVKCDEKLKTVLLGRSKVQLSELPMIVKLHFPKLPK

SEQ ID NO: 169373 - protein, 105 aa, Zea Mays
MARTKQTARKSTGGKAPRKQLATKAARKSAPATGGVKKPHRFRPGTVALREIRKRPPRRTWWGSSRTPTFAPSTPSASLSCPRTSSSRGASGARGLERPSCCSSL

SEQ ID NO: 169374 - protein, 231 aa, Zea Mays
MMGGSGRAALLLALVAVSLAVEIQADAGYGYTPTPTPATPTPKPEKPPTKGPKPEKPPKEHKPPKEHGPKPEKPPKEHKPTPPTYTPSPKPTPPTYTPTPTPPKPTPPTYTPAPTPHKPTPTPPTYTPSPKPPTPKPTPPTYTPSPKPPASKPPTPKPTPPTYTPSPKPPTPKPTPPTYTPSPKPPATKPPTPKPTPPTYTPTPKPPATKPPTYTPTPPVSHTPSPPPPYY

SEQ ID NO: 169375 - protein, 284 aa, Zea Mays
MMGGSGRAALLLALVAVSLAVEIQADAGYGYTPTPTPATPTPKPEKPPTKGPKPEKPPKEHKPPKEHGPKPEKPPKEHKPTPPTYTPSPKPTPPTYTPTPTPPKPTPPTYTPAPTPHKPTPTPPTYTPSPKPPTPKPTPPTYTPSPKPPTPKPTPPTYTPSPKPPATKPPTPKPTPPTYTPSPKPPTPKPTPPTYTPSPKPPATKPPTPKPTPPTYTPSPKPPTPKPTPPTYTPSPKPPATKPPTPKPTPPTYTPTPKPPATKPPTYTPTPPVSHTPSPPPPYY

SEQ ID NO: 169376 - protein, 263 aa, Zea Mays
MMGGSGRAALLLALVAVSLAVEIQADAGYGYTPTPTPATPTPKPEKPPTKGPKPEKPPKEHKPPKEHGPKPEKPPKEHKPTPPTYTPSPKPTPPTYTPTPTPPKPTPPTYTPAPTPHKPTPTPPTYTPSPKPPTPKPTPPTYTPSPKPPTPKPTPPTYTPSPKPPATKPPTPKPTPPTYTPSPKPPTPKPTPQTYTPSPKPPTPKPTPPTYTPSPKPPATKPPTPKPTPPTYTPTPKPPATKPPTYTPTPPVSHTPSPPPPYY

SEQ ID NO: 169377 - protein, 263 aa, Zea Mays
MMGGSGRAALLLALVAVSLAVEIQADAGYGYTPTPTPATPTPKPEKPPTKGPKPEKPPKEHKPPKEHGPKPEKPPKEHKPTPPTYTPSPKPTPPTYTPTPTPPKPTPPTYTPAPTPHKPTPTPPTYTPSPKPPTPKPTPPTYTPSPKPPASKPPTPKPTPPTYTPSPKPPTPKPTPPTYTPSPKPPATKPPTPKPTPPTYTPSPKPPTPKPTPPTYTPSPKPPTPKPTPPTYTPTPKPPATKPPTYTPTPPVSHTPSPPPPYY

SEQ ID NO: 169378 - protein, 101 aa, Zea Mays
MRSNGQPVYNFCVTVDDATMQISHVIRAEEHLPNTLRQALIYKALGFAMPSFAHVSLILAPDTSKLSKRHGATSVGQYKEMVNYLALLGWVMVLKMSSSLS

SEQ ID NO: 169379 - protein, 608 aa, Zea Mays
MMGKEETPPADGGGAFAFISKGWREVRDSASADLRLMRARADSVRARADRELEHLLASAASALTGPAPPLPPVATGAPIAEVEFVRRRIQPKIQELRRHCSSRAPDARWPPGAAPAPGASSLRIDLSGITAIRNAIVAEGDRGGRWRVARRKGDQDEEGRKEWEVVRVIQSGLKEFERRSLSSGIFAGFRGRGEFVEKFRFGMKSLNKGYQESKDVPPLHLTEIVAYLVRQSGPFLDQLGIQRDLCDKLVEMLCSKRNGRLMYHSLSKDRPLAENISDELDLRIARVLESTGYHTDEGFWNDPAKYKISDNRRHVAIVTTASLPWMTGTAINPLFRAAYLARSAKQKVTLVVPWLSKSDQELVYPNNITFSSPEEQETYIRNWLQERIGFEANFKISFYPGKFSKERRSIIPAGDTSQFISSKEADIAILEEPEHLNWYHHGKRWTDKFNHVIGVVHTNYLEYIKREKNGAIQSFLVKHINNWVTRAYCHKVLRLSAATQDLPRSVVCNVHGVNPKFLNVGEKIAADRECGQKVFSKGAYFLGKMVWAKGYRELIDLLSKHKNDLEGFMIDVYGNGEDSEAVQNAARKFDLNINFFKGKDHADDSLHG

SEQ ID NO: 169380 - protein, 209 aa, Zea Mays
MLIPRAALASTNENERTKRAPVVVVGSWRSDDSHVDGAVGRVRELEGDGGVDAGGDYPGRGAGGEDASAGGGAGAAAGGEQRGAVDEEVVAARDPAADLPLDAAVHPDVEQHVSRLDVLLHGVRHVLRHGDRVARHDRRPHRHVLVALVDRRHRHGYRHRLVAVRGERVQRLVVHAHPLVRVPRRDRHLRSRESAGSLRSMERSCTSCR

SEQ ID NO: 169381 - protein, 580 aa, Zea Mays
MASWQPPAALHLRTHLRDLFSLATATKSVLAGCCAKSAGLGRLLRQIGRSWQVALATHRLAGEMRAGGCTVQQSLTAEAAAVVKQAVSLARRRGNAQVTPLHVASAMLAAAPAGQLLRAACLRSHSHPLQCKALELCFNVALNRLPASASSPLLGGNHHCYHPPSLSNALVAAFKRAQAHQRRGGSVESQHQQPVVAAVKIELDQLVVSILDDPSVSRVMRDAGFSSTQVKANVEQAVCSSSTMATAAAAPSKNPNPSSSATTTSPPPKEAKAKPPLALHHQARDEDVAAVLDCLASRSKRRVVVIAESAAAAEAMAHAAVDKIKRGEVKHEHDALRGAQVVSLRVSSFREMPREEAERRLGELRCLVKQGRRQRVVLVVEDLKWAAEFWAGHDGQSGRRGGYYYCAVEHVVNELRALASGGSLCWLLGFGTYQAYTKCRVGQPSLESLWGLQTLTVPAGSLALSLTCAFDDSALGTVNQSLKAGSDADGNGPASCWPLLGGSQLSLSSRCCGDGDCSAARIDTKAALPRPSVSSSNLPSWLQHCRDHQRCTYRSLLRAILRILARARHGAPSAAGRRSG

SEQ ID NO: 169382 - protein, 102 aa, Zea Mays
MFSPTPMLALALYLGLPLSLLSRQLHPVASSPTLSLAGLCLGAARSHHRLTAAAFAYVHPLALVLRLGLPLPPLSRRLLCTCCVFSGVPVYRALPRGCTAIS

SEQ ID NO: 169383 - protein, 169 aa, Zea Mays
MPSPPPHCCHVLSYAHARSRALPRPAIVTAVSPATPCCVLSDALACRALPRGCTLPSPPHRRSIRLCAPARSRATPRSAIATAFSPAAMYLLRLLRRSRLQGSTSGLHCDKLMINSTPTARNHYIARHHSLSLSTMSPMREFRHWAFSLQILLFRFTFIILYYSVLIQR

SEQ ID NO: 169384 - protein, 130 aa, Zea Mays
MSPAPPRACHGVQPFTPCSFGPKATSPHRPPGGEGYPYPPARTEPAETCGGACATPLAEAPSRCHAPTPRDGARLVLAAPVVPGHHEVAAPTRSTTLYKKRPAHTAAHRSQNQSRRFNHVRIHTATRARS

SEQ ID NO: 169385 - protein, 364 aa, Zea Mays
MTIDQELLPSSSLPFYKTKEQKRAATARPAPAGHSSRLESGTMPPSLHPPHLHFHKLKRRHHPAAMAKKGLAAILYKFRDVHCPPSASLPPSTPSAHYAQRCYPPPLSAWPWPSCRHPRTSSFRGPKDDAAAVFRTVNTVYDYDTISGSEQVLRRSSIDEAACIDRRPLSLLGEAIAEQAVDEEEEKETELRETAVVRGMRSERLFFEPAGAEFLPNQSVAVAPARGKDEAATADVKSEEQATTDAPHDKDEPPAEAVTAKGGAVVVTVESKDPYGDFRASMAEMVAAHGLRDWEALEELLAWYLKLNAKGVHAAIVGAFVDLLVSMQPQASSPPSLPSQSPSSSCITFEECSSATFDEDDCKS

SEQ ID NO: 169386 - protein, 531 aa, Zea Mays
MPKGKANANATTHLSTRRRSRMTPTVGWPSPRVATPFGRCLTARCIVSLGLHNHQVLLSRFAAAFNALASPSRNAAAASRPSVALATLLGRCCTVRCLAQLHARIILLGLHNHHALLARFTTACDALECPSVAASFIAALTDSHAAPLRLRNAVLASLARHAPLHAALTEFNLLRQAALPDSFSFPCLLRACARVSCLPAGRALHAAAIRLGVHADLFIRTALIQFYGRCGVADAARALFYQIDIPSEVSWTAIIVAYVNNGGIIDARALFDTMPQRNVVHWNVMVDGYVKCGDLEGARRLFDEMPERTATACTSLIGGYAKAGNMEAARLLFDKLEDRDVFSWSAMISGYAQNGYPGEALRTFDEFQGQGIHPDELVVVGLMSACSQLGNIRLASWIEDYITKYSIDMNNAHVLAGLVNMNAKCGNLERATFLFESMPVRDVFSYCSLMQGYCLHGSADKAVKLFSRMLLEGLTPDNAVFTIVLTACCHAGLVEEGKKFFDIMKNVYLMVPSGIVKDQGASVQMLEYGPD

SEQ ID NO: 169387 - protein, 100 aa, Zea Mays
MHLLASCCFTRGSRVSARNPLMSRNLERNGRITCMTFPRDWLRRDLSVIGFGLIGWMGPSSVPAINGNSLTGLFFSSIGQELAHFPTPPPVTSQFCSLTN

SEQ ID NO: 169388 - protein, 333 aa, Zea Mays
MVKVTIVLMNRVPVTPRVMMIRERMFEHDLRRVKGLEIRKTAEDGNCLFRAVADQVYGDAEAYDMARQMCVDYMERERDHFSQFITESFTLYCKRKRRDKVYGNNVEIQAFAEMYNRPIHIYSYSTEPINIFQGSYNTDTPPIRLSYHHGNHYNSVVDPRRQTIGAGLGFSSFRGTNVDRDQVKAAIKAQQDQQIDNALMAEGRFYSDLELTEREIERMVMEASRSEYLAKEKKLNIRESSTSGAEPSSSAAISGSSRSVAGADRSSEDYFVLPDTVLTRSMQLLLAMGFGYNQVMEAYSIFGEDVDSMVCYLVETGGASAGGSNRRKGKAAE

SEQ ID NO: 169389 - protein, 479 aa, Zea Mays
MTRIFVQRGTAGSSSSSGRSGSQSAQQPAAAAREELPLQPQPQLPELLAIDDVTEHLNEGNENNSSRIKFLRTDDTISESSSYAEERAAREKPPKDDSNVINPTSLVEEPIVLHTPDQIEHGNSVPSGTNSSQMVGAASHPPPPPAPPPKSLLGNSGLWRMGPGSSNSVRIGSPRRPVAWPPVAARTSASGSRPSSPRSLVDGEGYNSADEQGPCYASSYDDSERERMFEHDLRRVKGLEIRKTAEDGNCLFRAVADQVYGDAEAYDMARQMCVDYMERERDHFSQFITESFTLYCKRKRRDKVYGNNVEIQAFAEMYNRPIHIYSYSTEPINIFQGSYNTDTPPIRLSYHHGNHYNSVVDPRRQTIGAGLGFSSFRGTNVDRDQVKAAIKAQQDQQIDNALMAEGRFYSDLELTEREIERMVMEASRSEYLAKEKKLNIRESSTSGAEPSSSAAMVPLDQLLERTEAARTTLCFQTLC

SEQ ID NO: 169390 - protein, 124 aa, Zea Mays
MDSIARRFPYLMEQKPEDGDEDAQAAKIDWKIIEDDVDKPFVASGLEFVPLPVMHGEGYICLGFLFGRRARVAYLSDVSRFLPKTENVISKSGAGQLDLLILEANALHGVGDSSSTHLTLSEVI

SEQ ID NO: 169391 - protein, 306 aa, Zea Mays
MNPVFQAPSGTNKDQSVQGSVEPDPFDSSTKGAAKPQSSSSSLIFLGTGCSGSLPDTRCLLKPSTPPCGVCSMGVSLPPERNPNYRLNTSLLIDYCHDETHKYILIDIGKTFREQVLRWFVHHKVPSVNSIILTHEHADAVLGLDEVWVVQPRNGRNDIEQIPIFLTQFTMDSIARRFPYLMEQKPEDGDEDAQAAKIDWKIIEDDVDKPFVASGLEFVPLPVMHGEGYICLGFLFGRRARVAYLSDVSRFLPKTENVISKSGAGQLDLLILEANALHGVGDSSSTHLTLSEVLMLSRGSVLNKLF

SEQ ID NO: 169392 - protein, 290 aa, Zea Mays
MNPVFQAPSGTNKDQSVQGSVEPDPFDSSTKGAAKPQSSSSSLIFLGTGCSGSLPDTRCLLKPSTPPCGVCSMGVSLPPERNPNYRLNTSLLIDYCHDETHKYILIDIGKTFREQVLRWFVHHKVPSVNSIILTHEHADAVLGLDEVWVVQPRNGRNDIEQIPIFLTQFTMDSIARRFPYLMEQKPEDGDEDAQAAKIDWKIIEDDVDKPFVASGLEFVPLPVMHGEGYICLGFLFGRRARVAYLSDVSRFLPKTENVISKSGAGQLDLLILEANALHGVVQMLSNILMA

SEQ ID NO: 169393 - protein, 375 aa, Zea Mays
MHILWRSGVEESRRPVDGHQLRADRGQPAVAGEGVVPGPVDAGEQGEAVRRGPVRAERVRRHGCGVRGGHRQRERVGDGGAGGGAGVGGAARAAVPPGHAHHLHHRRQRGAQGQRQRAQGEPPAGHAVRVPGADRGGPAGPGERHHGALAGHHGQHLPALRRRVRPRRRALPPAAPGLPVRGAVPVPHQLLPLLRVQGRPGQRAAGVRPVPARRRRGHRRQHGAQVRQHAVRPGRLGVRRHPEAGPHRRRRQGLRDRVAVQGGPRRGRRHAGVRQDVHRQPAAEDRDGAGHADEAVGARRRLRVRALQREPQARPGLRTELRLALPRRHARVRCRPAGIPSTHGLFTRHQRGGPFLRLHQPRCHCIDHSQLILRA

SEQ ID NO: 169394 - protein, 63 aa, Zea Mays
MRSFTCLHVSGHQIFSSTALSSCSGDHTSERDAKKAGKLLQIYTIIYCQETDARLLCRIDLSR

SEQ ID NO: 169395 - protein, 643 aa, Zea Mays
MLNVDMSACSLCFCGRSSKGEATPFIFTKSRTNVVLWNLMLVAYGQISDLAKSFEIFGQMQATGIHPNQFTYPCILRTCTCTGQIELGEQIHSLSIKNGFESDMYVSGVLIDMYSKYGCLDKARKILEMLEKRDVVSWTSMIAGYVQHDFCEEALATFKEMQDCGVWPDNIGLASAASACAGIKAMRQGLQIHARVYVSGYAADISIWNTLVNLYARCGRSEEAFSLFREIEHKDEITWNGLISGFGQSRLYKQALMVFMKMGQAGAKYNVFTFISAISALANLADIKQGKQVHGRAVKTGHTSETEVANALISLYGKCGSIEDAKMIFSEMSLRNEVSWNTIITSCSQHGRGLEALDLFDQMKQEGLKPNDVTFIGVLAACSHVGLVEEGLSYFKSMSNVYGLNPIPDHYACVVDILGRAGQLDRARRFVDEMPITANAMIWRTLLSACKVHKNIEIGELAAKHLLELEPHDSASYVLLSNAYAVTGKWANRDQVRKMMKDRGIRKEPGRSWIEVKNAVHAFFVGDRLHPLSDQIYKFLSELNDRLSKIGYKQENPNLFHEKEQEQKDPTAFVHSEKLAVAFGLMTLPPCIPLRVIKNLRVCDDCHSWMKCTSEVTRREIVLRDVYRFHHFNSGSCSCGDYW

SEQ ID NO: 169396 - protein, 868 aa, Zea Mays
MTCREVAASLHRSLAKFIVPDNPEKILSLVAAKASHHRALGSADLTCALQACRGRGNRWPLVLEIHATSVVRGLGADRLIGNLLIDLYAKNGLVWQARQVFKELSSRDHVSWVAMLSGYAQSGLGKEAFRLYSQMHWTAVIPTPYVLSSVLSACTKGKLFAQGRMIHAQVYKQAFCSETFVGNALIALYLGFGSFKLAERVFCDMLFCDRVTFNTLISGHAQCGHACASVGDLQKGKQLHSYLLKAAHDIFNLGDRTNVVLWNLMLVAYGQISDLAKSFEIFGQMQATGIHPNQFTYPCILRTCTCTGQIELGEQIHSLSIKNGFESDMYVSGVLIDMYSKYGCLDKARKILEMLEKRDVVSWTSMIAGYVQHDFCEEALATFKEMQDCGVWPDNIGLASAASACAGIKAMRQGLQIHARVYVSGYAADISIWNTLVNLYARCGRSEEAFSLFREIEHKDEITWNGLISGFGQSRLYKQALMVFMKMGQAGAKYNVFTFISAISALANLADIKQGKQVHGRAVKTGHTSETEVANALISLYGKCGSIEDAKMIFSEMSLRNEVSWNTIITSCSQHGRGLEALDLFDQMKQEGLKPNDVTFIGVLAACSHVGLVEEGLSYFKSMSNVYGLNPIPDHYACVVDILGRAGQLDRARRFVDEMPITANAMIWRTLLSACKVHKNIEIGELAAKHLLELEPHDSASYVLLSNAYAVTGKWANRDQVRKMMKDRGIRKEPGRSWIEVKNAVHAFFVGDRLHPLSDQIYKFLSELNDRLSKIGYKQENPNLFHEKEQEQKDPTAFVHSEKLAVAFGLMTLPPCIPLRVIKNLRVCDDCHSWMKCTSEVTRREIVLRDVYRFHHFNSGSCSCGDYW

SEQ ID NO: 169397 - protein, 589 aa, Zea Mays
MWTCLCFCGRSSKGEATPFIFTKSRTNVVLWNLMLVAYGQISDLAKSFEIFGQMQATDMYSKYGCLDKARKILEMLEKRDVVSWTSMIAGYVQHDFCEEALATFKEMQDCGVWPDNIGLASAASACAGIKAMRQGLQIHARVYVSGYAADISIWNTLVNLYARCGRSEEAFSLFREIEHKDEITWNGLISGFGQSRLYKQALMVFMKMGQAGAKYNVFTFISAISALANLADIKQGKQVHGRAVKTGHTSETEVANALISLYGKCGSIEDAKMIFSEMSLRNEVSWNTIITSCSQHGRGLEALDLFDQMKQEGLKPNDVTFIGVLAACSHVGLVEEGLSYFKSMSNVYGLNPIPDHYACVVDILGRAGQLDRARRFVDEMPITANAMIWRTLLSACKVHKNIEIGELAAKHLLELEPHDSASYVLLSNAYAVTGKWANRDQVRKMMKDRGIRKEPGRSWIEVKNAVHAFFVGDRLHPLSDQIYKFLSELNDRLSKIGYKQENPNLFHEKEQEQKDPTAFVHSEKLAVAFGLMTLPPCIPLRVIKNLRVCDDCHSWMKCTSEVTRREIVLRDVYRFHHFNSGSCSCGDYW

SEQ ID NO: 169398 - protein, 70 aa, Zea Mays
MRPSVIMTWIKIFVRLQKCRSICCLLTQSGSLKVVTFTTSDVCAFMFRSSCVYFRLKRVQKQISVVIFLN

SEQ ID NO: 169399 - protein, 637 aa, Zea Mays
MWTCLCFCGRSSKGEATPFIFTKSRTNVVLWNLMLVAYGQISDLAKSFEIFGQMQATGIHPNKFTYPCILRTCTCTGQIELGEQIHSLSIKNGFESDMYVSGVLIDMYSKYRCLDKARKILEMLEKRDVVSWTSMIAGYVQHDFCEEALATFKEMQDCGVWPDNIGLASAASACAGIKAMRQGLQIHARVYVSGYAADISIWNTLVNLYARCGRSEEAFSLFREIDHKDEITWNGLISGFGQSRLYEQALMVFMKMSQAGAKYNVFTFISAISALANLADIKQGKQVHGRAVKTGHTSETEVANALISLYGKCGSIEDAKMIFSEMSLRNEVSWNTIITSCSQHGRGLEALDLFDQMKQEGLKPNDVTFIGVLAACSHVGLVEEGLSYFKSMSNVYGLNPIPDHYACVVDILGRAGQLDRARRFVDEMPITANAMIWRTLLSACKVHKNIEIGELAAKHLLELEPHDSASYVLLSNAYAVTGKWANRDQVRKMMKDRGIRKEPGRSWIEVKNAVHAFFVGDRLHPLSDQIYKFLSELNDRLSKIGYKQENPNLFHEKEQEQKDPTAFVHSEKLAVAFGLMTLPPCIPLRVIKNLRVCDDCHSWMKFTSEVTRREIVLRDVYRFHHFNSGSCSCGDYW

SEQ ID NO: 169400 - protein, 515 aa, Zea Mays
MLEKRDVVSWTSMIAGYVQHDFCEEALATFKEMQDCGVWPDNIGLASAASACAGIKAMRQGLQIHARVYVSGYAADISIWNTLVNLYARCGRSEEAFSLFREIDHKDEITWNGLISGFGQSRLYEQALMVFMKMSQAGAKYNVFTFISAISALANLADIKQGKQVHGRAVKTGHTSETEVANALISLYGKCGSIEDAKMIFSEMSLRNEVSWNTIITSCSQHGRGLEALDLFDQMKQEGLKPNDVTFIGVLAACSHVGLVEEGLSYFKSMSNVYGLNPIPDHYACVVDILGRAGQLDRARRFVDEMPITANAMIWRTLLSACKVHKNIEIGELAAKHLLELEPHDSASYVLLSNAYAVTGKWANRDQVRKMMKDRGIRKEPGRSWIEVKNAVHAFFVGDRLHPLSDQIYKFLSELNDRLSKIGYKQENPNLFHEKEQEQKDPTAFVHSEKLAVAFGLMTLPPCIPLRVIKNLRVCDDCHSWMKFTSEVTRREIVLRDVYRFHHFNSGSCSCGDYW

SEQ ID NO: 169401 - protein, 335 aa, Zea Mays
MSVVGAAVQADSAATAQDPRHAGRPAGDGDQDEAQRRQVPGLSGNRRPEGEGQAQARLCPWELAQELGVYMLSFDRPGYAESDPHPARTEESIALDIAELADNLQLGRKFYLAGFSMGGEIMWSCLKYIPHRLSGVAILGPVGNYWWPGLPSNVSRDAWYQQLPRDQWAVWVAHHLPWLTYWWNTQKLFPASSVIAYNPALLSQEDEMLMAKFGYRAYMIRQQGEHECLHRDMMVGFGKWSWSPLQLENPFADADADDGQGAGKVHLWHGAEDLIVPVSLSRYISQKLPWVVYHELPKSGHLFPIAEGMADIIVKSLLLGDDHLSSSASQPPHSP

SEQ ID NO: 169402 - protein, 350 aa, Zea Mays
MAVSGEKPPPPPPPARKLILALLTCLSSALLYRQIQPLPPKIPGTPGGPPVTATRTRLSDGRYLAYLETGVPREKAKHRLVFVHGSLRKSWAFTCCPSIAPGTPRATRTRPGPRRASPSTSPSSPTTCSWVASSTLLASPWAARSCGAASSTSHTGNYWWPGLPSNVSRDAWYQQLPRDQWAVWVAHHLPWLTYWWNTQKLFPASSVIAYNPALLSQEDEMLMAKFGYRAYMPQIRQQGEHECLHRDMMVGFGKWSWSPLQLENPFADADADDGQGAGKVHLWHGAEDLIVPVSLSRYISQKLPWVVYHELPKSGHLFPIAEGMADIIVKSLLLGDDHLSSSASQPPHSP

SEQ ID NO: 169403 - protein, 290 aa, Zea Mays
MPEGDMEHTGDVGNVYFGPNHPMKPHRLCMTHHLVLSYGLHQKMEIYRPHKAYPIELAQFHSADYVEFLHRITPDSQHLYASELTRYNLGEDCPVFDNLFEFCQIYAGGTLDAARRLNHKICDIAINWAGGLHHAKKCEASGFCYINDLVLGILELLKYHARVLYIDIDVHHGDGVEEAFYFTDRVMTVSFHKYGDLFFPGTGDIKDIGEREGKYYAINIPLKDGIDDTSFTRLFKTVSSLHFIPCYFVIFLVLPCYLSLSCRLLPKLLRHICLVLLFFNVGLIHWRGIV

SEQ ID NO: 169404 - protein, 245 aa, Zea Mays
MLEKDRISYFYDGDVGNVYFGPNHPMKPHRLCMTHHLVLSYGLHQKMEIYRPHKAYPIELAQFHSADYVEFLHRITPDSQHLYASELTRYNLGEDCPVFDNLFEFCQIYAGGTLDAARRLNHKICDIAINWAGGLHHAKKCEASGFCYINDLVLGILELLKYHARVLYIDIDVHHGDGVEEAFYFTDRVMTVSFHKYGDLFFPGTGDIKDIGEREGKYYAINIPLKDGIDDTSFTRLFKTVMLNV

SEQ ID NO: 169405 - protein, 353 aa, Zea Mays
MLEKDRISYFYDDNLGEDCPVFDNLFEFCQIYAGGTLDAARRLNHKICDIAINWAGGLHHAKKCEASGFCYINDLVLGILELLKYHARVLYIDIDVHHGDGVEEAFYFTDRVMTVSFHKYGDLFFPGTGDIKDIGEREGKYYAINIPLKDGIDDTSFTRLFKTIIAKVVETYLPGAIVLQCGADSLARDRLGCFNLSIEGHAECVKFVKKFNIPLLVTGGGGYTKENVARCWAVETGVLLDTELPNEIPKNEYIEYFAPDYTLKVPNLNMDNLNSKTYLSSIKVQVMESLRYIQHAPGVQMQEVPPDFYIPDFDEDELDPDERVDQHTQDKQIHRDDEYYEGDNDNDHDDGTR

SEQ ID NO: 169406 - protein, 115 aa, Zea Mays
MLEKDRISYFYDGDVGNVYFGPNHPMKPHRLCMTHHLVLSYGLHQKMEIYRPHKAYPIELAQFHSADYVEFLHRITPDSQHLYASELTRYNLGEDCPVFDNLFEFCQIYAGGTLD

SEQ ID NO: 169407 - protein, 216 aa, Zea Mays
MLEKDRISYFYDDNLGEDCPVFDNLFEFCQIYAGGTLDAARRLNHKICDIAINWAGGLHHAKKCEASGFCYINDLVLGILELLKYHARVLYIDIDVHHGDGVEEAFYFTDRVMTVSFHKYGDLFFPGTGDIKDIGEREGKYYAINIPLKDGIDDTSFTRLFKTVSSLHFIPCYFVIFLVLPCYLSLSCRLLPKLLRHICLVLLFFNVGLIHWRGIV

SEQ ID NO: 169408 - protein, 314 aa, Zea Mays
MHGSQLRVAYQGVPGAYSEKAAGKAYPGCDAIPCDQFEVAFQAVELWIADRAVLPVENSLGGSIHRNYDLLLRHRLHIVGEVQLPVHHCLLALPGVRKECLTRVMSHPQALAQCEHTLTAMGLNVVREAFDDTAGAAEYVAANGLRDTAAIASSRAAELYGMEVLADGIQDDSGNVTRFVMLAREPVVPRTDRPFKTSIVFAHDREGTSVLFKVLSAFAFRDISLTKIESRPHRHRPIRLVDDANVGTAKHFEYMFYVDFQASLAEPRAQNALAEVQEYTSFLRVLGSYPMDMTPMTAGSSSTVVSSSDDPSSS

SEQ ID NO: 169409 - protein, 461 aa, Zea Mays
MASCDDDFVLLGDDAHQPATPPPPAPTAQQPAPPPPPPPQASHPFSFTDAVAGAAAGAGSFAQAQEESNHHAERGKPAHHAKRGRERAEEFSSDGGEYCSYINSSGSGGGGKKGRGGGGSSSVSDYRKDREEWTDGAISSLLDAYTDRFEQLNRGNLRGRDWEDVAGAVTDGQGKTTGAKSVEQCKNKIDNLKKRYKVECQRLSSSGGGAISHWPWFKKMEQIVGNSASPASSKLLTAAEDEKPRQQQQHSSKRYPLSCTGPPTGVGSSRTNPLSNPRWKRVLLKIGGTALCGAAHQNVDPKVIMLIAREVQVACHHGVEVAIVVGGRNIFCGDNWVAATGTDRASTYPIGMMASVMNSVLLQASLEKIGVETRVQTALMMQEVAEPYIRRRAIRHLEKGRVVIFGGIGVGIGNPLFTTDTAAALRASEIVIFNMLEPGNISRAICGDQIGTLVDQSGRIT

SEQ ID NO: 169410 - protein, 354 aa, Zea Mays
MASCDDDFVLLGDDAHQPATPPPPAPTAQQPAPPPPPPPQASHPFSFTDAVAGAAAGAGSFAQAQEESNHHAERGKPAHHAKRGRERAEEFSSDGGEYCSYINSSGSGGGGKKGRGGGGSSSVSDYRKDREEWTDGAISSLLDAYTDRFEQLNRGNLRGRDWEDVAGAVTDGQGKTTGAKSVEQCKNKIDNLKKRYKVECQRLSSSGGGAISHWPWFKKMEQIVGNSASPASSKLLTAAEDEKPRQQQQHSSKRYPLSCTGPPTGVGSSRTNPLSNPRWKRVLLKIGGTALCGAAHQNVDPKVIMLIAREVQVACHHGVEVAIVVGGRNIFCGDNWVAATGTDRASTYPIGNWE

SEQ ID NO: 169411 - protein, 457 aa, Zea Mays
MASCDDDFVLLGDDAHQPATPPPPAPTAQQPAPPPPPPPQASHPFSFTDAVAGAAAGAGSFAQAQEESNHHAERGKPAHHAKRGRERAEEFSSDGGEYCSYINSSGSGGGGKKGRGGGGSSSVSDYRKDREEWTDGAISSLLDAYTDRFEQLNRGNLRGRDWEDVAGAVTDGQGKTTGAKSVEQCKNKIDNLKKRYKVECQRLSSSGGGAISHWPWFKKMEQIVGNSASPASSKLLTAAEDEKPRQQQQHSSKRYPLSCTGPPTGVGSSRTNPLSNPRWKRVLLKIGGTALCGAAHQNVDPKVIMLIAREVQVACHHGVEVAIVVGGRNIFCGDNWVAATGTDRASTYPIGMMASVMNSVLLQASLEKIGVETRVQTALMMQEVAEPYIRRRAIRHLEKGRVVIFGGIGVGIGNPLFTTDTAAALRASESMPLHPVPNAFFILMVFPMDLHMANDLN

SEQ ID NO: 169412 - protein, 354 aa, Zea Mays
MASCDDDFVLLGDDAHQPATPPPPAPTAQQPAPPPPPPPQASHPFSFTDAVAGAAAGAGSFAQAQEESNHHAERGKPAHHAKRGRERAEEFSSDGGEYCSYINSSGSGGGGKKGRGGGGSSSVSDYRKDREEWTDGAISSLLDAYTDRFEQLNRGNLRGRDWEDVAGAVTDGQGKTTGAKSVEQCKNKIDNLKKRYKVECQRLSSSGGGAISHWPWFKKMEQIVGNSASPASSKLLTAAEDEKPRQQQQHSSKRYPLSCTGPPTGVGSSRTNPLSNPRWKRVLLKIGGTALCGAAHQNVDPKVIMLIAREVQVACHHGVEVAIVVGGRNIFCGDNWVAATGTDRASTYPIGRHL

SEQ ID NO: 169413 - protein, 433 aa, Zea Mays
MESFKRKKEEQCSILSKSPDEYWQEIRAVQSTHEVALANRLKYSLDENDKDDGVNIEVIGDNKIASPSMPPTSVDEPILVGSEEIARVTSLWSGIPVQKLTADETKLLVGLDDELRKRVIGQDDAVVAISRAVKRSRVGLNDPDRPIATLLFCGPTGVGKTELTKALAASYFGSESAMIRLDMSEYMERHAVSKLIGSPPGYMGFGEGGTLTEAVRRTPFTVVLLDEIEKAHPDIFNILLQVFEDGHLTDSQGRRVSFKNTLIVMTSNVGSTSISSGRRSIGFSTQRDTEETTYAAMKSLVMEELKAFFRPELLNRLDEVVVFHPLEKTQMMAILNLILQEVKSRLLALGIGLEVSESMKILISQQGYDRSYGARPLRRAVTQLVEDVISEAILFGQFKPGDTILMGTDATGKPCLSRLNDQTVQLSDTAPTI

SEQ ID NO: 169414 - protein, 447 aa, Zea Mays
MRASGGLIDPVIGRKEEIERVVQIICRRTKNNPILLGEAGVGKTAIAEGLALKIANGDVPIFLVGKRILSLDVALLMAGAKERGELEARITSLLREVRKAGDVMLFIDEVHTLIGSGIAGRGSKGAGLDIANLLKPALSRGELQCIASTTLDEHRLHFEKDKALARRFQPVLVNEPSQEDAVKILLGLREKYETYHKCKYTLEGINAAVYLSARYIPDRHLPDKAIDLIDEAGSRARMESFKRKKEEQCSILSKSPDEYWQEIRAVQSTHEVALANRLKYSLDENDKDDGVNIEVIGDNKIASPSMPPTSVDEPILVGSEEIARVTSLWSGIPVQKLTADETKLLVGLDDELRKRVIGQDDAVVAISRAVKRSRVGLNDPDRPIATLLFCGPTGVGKTELTKALAASYFGSVGYAFLLASFSRSEKTCCMDHVLKKLFIRFAGISYD

SEQ ID NO: 169415 - protein, 391 aa, Zea Mays
MEACCCSSSSAPSASILAAAPDVALRRRIPAAAGGRTPARPLRVSAVMLATAVPRRRGPGVIRAVFERFTERAVKAVVFSQREARGMGDDTVAPHHLLLGLIAEDRTLVGFLGSGLRVERAREACRDALGKAGPAQAATGLATDVPFSAASKRVFEAAVEFSRNIGCNFISPEHIALGLFDLDDPTTNRILKSLGADPSQLAKQALKRVQGELAKDGREPVGLSSFKVRERSAAGAGKSAIVKYSNKKKEKSALAQFCVDLTMRASGGLIDPVIGRKEEIERVVQIICRRTKNNPILLGEAGVGKTAIAEGLALKIANGDVPIFLVGKRILSLDVALLMAGAKERGELEARITSLLREVMLCYSSMRSILLLDLELLGEGVKELALILPIC

SEQ ID NO: 169416 - protein, 953 aa, Zea Mays
MEACCCSSSSAPSASILAAAPDVALRRRIPAAAGGRTPARPLRVSAVMLATAVPRRRGPGVIRAVFERFTERAVKAVVFSQREARGMGDDTVAPHHLLLGLIAEDRTLVGFLGSGLRVERAREACRDALGKAGPAQAATGLATDVPFSAASKRVFEAAVEFSRNIGCNFISPEHIALGLFDLDDPTTNRILKSLGADPSQLAKQALKRVQGELAKDGREPVGLSSFKVRERSAAGAGKSAIVKYSNKKKEKSALAQFCVDLTMRASGGLIDPVIGRKEEIERVVQIICRRTKNNPILLGEAGVGKTAIAEGLALKIANGDVPIFLVGKRILSLDVALLMAGAKERGELEARITSLLREVRKAGDVMLFIDEVHTLIGSGIAGRGSKGAGLDIANLLKPALSRGELQCIASTTLDEHRLHFEKDKALARRFQPVLVNEPSQEDAVKILLGLREKYETYHKCKYTLEGINAAVYLSARYIPDRHLPDKAIDLIDEAGSRARMESFKRKKEEQCSILSKSPDEYWQEIRAVQSTHEVALANRLKYSLDENDKDDGVNIEVIGDNKIASPSMPPTSVDEPILVGSEEIARVTSLWSGIPVQKLTADETKLLVGLDDELRKRVIGQDDAVVAISRAVKRSRVGLNDPDRPIATLLFCGPTGVGKTELTKALAASYFGSVGYAFLLASFSRSEKTCCMDHESAMIRLDMSEYMERHAVSKLIGSPPGYMGFGEGGTLTEAVRRTPFTVVLLDEIEKAHPDIFNILLQVFEDGHLTDSQGRRVSFKNTLIVMTSNVGSTSISSGRRSIGFSTQRDTEETTYAAMKSLVMEELKAFFRPELLNRLDEVVVFHPLEKTQMMAILNLILQEVKSRLLALGIGLEVSESMKILISQQGYDRSYGARPLRRAVTQLVEDVISEAILFGQFKPGDTILMGTDATGKPCLSRLNDQTVQLSDTAPTI

SEQ ID NO: 169417 - protein, 410 aa, Zea Mays
MSGGRMLCLISQLNAMWNGLMQRIHCFFCTQVAAQESQRVCCIQLGDIWSTLLQHLSMHLTTNQQTYTDCGWITGHSYVTYGPLLNGATVLVFEGAPNYPDPGRCWDIVDKYGVTIFYTAPTLIRSLMRDGTEYVARYSRKSLRVLGSVGEPINPTAWRWLYDVIGDSRCPISDTWWQTETGGFMITPLPGAWPQKPGSATFPFFGVQPVIVDEKGREMEGECSGYLCIKKSWPGAFRTLYGDKERYETTYFKPFAGYYFSGDGCSRDKDGYHWLTGRVDDVINVSGHRIGTAEVESALVSHPKCAEAAVVGIDHEVKGQGIYAFVTLVDGVPYSDDLRKSLVTTVRSQIGAFAAPDKIHWAPGLPKTRSGKIMRRILRKIASRQLDELGDTSTLADPGVVDQLIALSDS

SEQ ID NO: 169418 - protein, 733 aa, Zea Mays
MAQHIYATGCGRCGCARPIIRTLLPALTHHLASSSLLRRRKAPMGASDHLGLAAVAAAKPRNGRTCMAVLGEPLPALDDPGILVHPSADFAAQALVSSTKQYRDMYQKSIDDPAGFWSEIADEFYWKQKWSPDNVCAENLDVTKGPIMIEWFKGGKTNICYNAVDRNVEAGNGDKIAMYWEGNEPSQDGKLTYSELLEKLSNYLKSVGVRKGDAVVIYLPMLMELPIAMLACARIGAVHSVVFAGFSADALAQRVIDCKPKVVITCNAVKRGMKIIHLKDIVDASLDQSAKNGVDVGICLTYENQSALNKVDTRWKTGRDVWWQDVVPDFPTKCDVEWVDAEDPLFLLYTSGSTGKPKGVLHTTGGYMVYSATTFKHAFDYKPTDIYWCTADCGWITGHSYVTYGPLLNGATVLVFEGAPNYPDPGRCWDIVDKYGVTIFYTAPTLIRSLMRDGTEYVARYSRKSLRVLGSVGEPINPTAWRWLYDVIGDSRCPISDTWWQTETGGFMITPLPGAWPQKPGSATFPFFGVQPVIVDEKGREMEGECSGYLCIKKSWPGAFRTLYGDKERYETTYFKPFAGYYFSGDGCSRDKDGYHWLTGRVDDVINVSGHRIGTAEVESALVSHPKCAEAAVVGIDHEVKGQGIYAFVTLVDGVPYSDDLRKSLVTTVRSQIGAFAAPDKIHWAPGLPKTRSGKIMRRILRKIASRQLDELGDTSTLADPGVVDQLIALSDS

SEQ ID NO: 169419 - protein, 301 aa, Zea Mays
MAQHIYATGCGRCGCARPIIRTLLPALTHHLASSSLLRRRKAPMGASDHLGLAAVAAAKPRNGRTCMAVLGEPLPALDDPGILVHPSADFAAQALVSSTKQYRDMYQKSIDDPAGFWSEIADEFYWKQKWSPDNVCAENLDVTKGPIMIEWFKGGKTNICYNAVDRNVEAGNGDKIAMYWEGNEPSQDGKLTYSELLEKVCQLSNYLKSVGVRKGDAVVIYLPMLMELPIAMLACARIGAVHSVVFAGFSADALAQRVIDCKPKVVITCNAVKRGMKIIHLKDIVDASLDQSAKNGVDAFA

SEQ ID NO: 169420 - protein, 553 aa, Zea Mays
MAQHIYATGCGRCGCARPIIRTLLPALTHHLASSSLLRRRKAPMGASDHLGLAAVAAAKPRNGRTCMAVLGEPLPALDDPGILVHPSADFAAQALVSSTKQYRDMYQKSIDDPAGFWSEIADEFYWKQKWSPDNVCAENLDVTKGPIMIEWFKGGKTNICYNAVDRNVEAGNGDKIAMYWEGNEPSQDGKLTYSELLEKVCQLSNYLKSVGVRKGDAVVIYLPMLMELPIAMLACARIGAVHSVVFAGFSADALAQRVIDCKPKVVITCNAVKRGMKIIHLKDIVDASLDQSAKNGVDVGICLTYENQSALNKVDTRWKTGRDVWWQDVVPDFPTKCDVEWVDAEDPLFLLYTSGSTGKPKGVLHTTGGYMVYSATTFKHAFDYKPTDIYWCTADCGWITGHSYVTYGPLLNGATVLVFEGAPNYPDPGRCWDIVDKYGVTIFYTAPTLIRSLMRDGTEYVARYSRKSLRVLGSVGEPINPTAWRWLYDVIGDSRCPISDTWWQTETGGFMITPLPGAWPQKPGSATFPFFGVQSLLTRKVGKWKENAVDIFA

SEQ ID NO: 169421 - protein, 632 aa, Zea Mays
MYQKSIDDPAGFWSEIADEFYWKQKWSPDNVCAENLDVTKGPIMIEWFKGGKTNICYNAVDRNVEAGNGDKIAMYWEGNEPSQDGKLTYSELLEKVCQLSNYLKSVGVRKGDAVVIYLPMLMELPIAMLACARIGAVHSVVFAGFSADALAQRVIDCKPKVVITCNAVKRGMKIIHLKDIVDASLDQSAKNGVDVGICLTYENQSALNKVDTRWKTGRDVWWQDVVPDFPTKCDVEWVDAEDPLFLLYTSGSTGKPKGVLHTTGGYMVYSATTFKHAFDYKPTDIYWCTADCGWITGHSYVTYGPLLNGATVLVFEGAPNYPDPGRCWDIVDKYGVTIFYTAPTLIRSLMRDGTEYVARYSRKSLRVLGSVGEPINPTAWRWLYDVIGDSRCPISDTWWQTETGGFMITPLPGAWPQKPGSATFPFFGVQPVIVDEKGREMEGECSGYLCIKKSWPGAFRTLYGDKERYETTYFKPFAGYYFSGDGCSRDKDGYHWLTGRVDDVINVSGHRIGTAEVESALVSHPKCAEAAVVGIDHEVKGQGIYAFVTLVDGVPYSDDLRKSLVTTVRSQIGAFAAPDKIHWAPGLPKTRSGKIMRRILRKIASRQLDELGDTSTLADPGVVDQLIALSDS

SEQ ID NO: 169422 - protein, 181 aa, Zea Mays
MHVKVAQRRFKSCFGEHSFGWTYCGSHNFSPAAWGQPLSPPSKANPSKARSAPSSPMLHICNYELGIILIALPPGMSKHASESRHRIEDIALPFVVPPPRYKGSDKPATRLAMREAVAEACVLQGNDVVDLPDDTDEDVPDEDDEQVVELSDCSQQEKEEEKIYAETLWGQVDSSQSLEKD

SEQ ID NO: 169423 - protein, 959 aa, Zea Mays
MAVPLPQQPGPYTSGSLGYFHLRLVGPAPALLLVRTDRLYSLSHSRRCGYRFRLRLLANPHRRRAPDLLLSTYGCDLRLTHRSGIGSPSVNGRPLRAGTPTELAVGDEVSVLRCGARYGFIVERFVSCGGFEVDAASTAGSCAEGLVFRAESLRKRLRAISESEDPLSLLRDCSGIGNLDVDIGPKKWRQDGAAELCLDNPITPASKENVLQGDCNFERDKFDHDFDVVNDGDPELFNGSKGCRDDSSEKPGCGSGNEEQYHSEGCYSDGSTFFLNRLADTGSNTQTEPQSGVTLPQLLHPVNSLVRVFIATFTLDISWFLNYCKIPQHLPVTIACHNKERCWSASSENRTAAPFESHPKLLLVFPRFPEDIAFGKDRKKQGVACHHPKLIVLQREDSMRVIVTSANLVPRQWHLITNTVWWQDFPCRTSPDYAALFSAAKKQKSDFAAQLVSFIASMVNEVRSQAYWITEVAKYDFEGAGGYLIASVPGIHAQSPYLESNYFLSAKHNVHTKSAHRMSFGSVQTSVVGISHRFHIPSDAGKQLRALSAFLGKCRENMYGTTEVILKRNTNIPADANAVSVLVADLDKFSEEDSVQLGFLPREVAKWVAPLSDSGFFDFSGFIYPREALEAAFGVTNTKVQLLLYVSKGPEFSQISRLISNEHFPPLCSLIASLQRCLGLWRLEEVLANIKWPETLEADFIYSASSIGTSINPQFIASFASAAGKRPHQDFDSQESDPEWGCWTANHELKKPSISLLFPTIDRVKKGACGIQLCRNLLSLPEVAQRRFKSCFGEHSFGWTYCGSHNFSPAAWGQPLSPPSKANPSKARSAPSSPMLHICNYELGIILIALPPGMSKHASESRHRIEDIALPFVVPPPRYKGSDKPATRLAMREAVAEACVLQGNDVVDLPDDTDEDVPDEDDEQVVELSDCSQQEKEEEKIYAETLWGQVDSSQSLEKD

SEQ ID NO: 169424 - protein, 731 aa, Zea Mays
MAVPLPQQPGPYTSGSLGYFHLRLVGPAPALLLVRTDRLYSLSHSRRCGYRFRLRLLANPHRRRAPDLLLSTYGCDLRLTHRSGIGSPSVNGRPLRAGTPTELAVGDEVSVLRCGARYGFIVERFVSCGGFEVDAASTAGSCAEGLVFRAESLRKRLRAISESEDPLSLLRDCSGIGNLDVDIGPKKWRQDGAAELCLDNPITPASKENVLQGDCNFERDKFDHDFDVVNDGDPELFNGSKGCRDDSSEKPGCGSGNEEQYHSEGCYSDGSTFFLNRLADTGSNTQTEPQSGVTLPQLLHPVNSLVRVFIATFTLDISWFLNYCKIPQHLPVTIACHNKERCWSASSENRTAAPFESHPKLLLVFPRFPEDIAFGKDRKKQGVACHHPKLIVLQREDSMRVIVTSANLVPRQWHLITNTVWWQDFPCRTSPDYAALFSAAKKQKSDFAAQLVSFIASMVNEVRSQAYWITEVAKYDFEGAGGYLIASVPGIHAQSPYLESNYFLSAKHNVHTKSAHRMSFGSVQTSVVGISHRFHIPSDAGKQLRALSAFLGKCRENMYGTTEVILKRNTNIPADANAVSVLVADLDKFSEEDSVQLGFLPREVAKWVAPLSDSGFFDFSGFIYPREALEAAFGVTNTKVQLLLYVSKGPEFSQISRLISNEHFPPLCSLIASLQRCLGLWRLEEVLHQLGLQLIHSSLQALLLLLVNDLIKISTLKNLIQSGVAGQQTMS

SEQ ID NO: 169425 - protein, 591 aa, Zea Mays
MRVIVTSANLVPRQWHLITNTVWWQDFPCRTSPDYAALFSAAKKQKSDFAAQLVSFIASMVNEVRSQAYWITEVAKYDFEGAGGYLIASVPGIHAQSPYLESNYFLSAKHNVHTKSAHRMSFGSVQTSVVGISHRFHIPSDAGKQLRALSAFLGKCRENMYGTTEVILKRNTNIPADANAVSVLVADLDKFSEEDSVQLGFLPREVAKWVAPLSDSGFFDFSGFIYPREALEAAFGVTNTKVQLLLYVSKGPEFSQISRLISNEHFPPLCSLIASLQRCLGLWRLEEVLANIKWPETLEADFIYSASSIGTSINPQFIASFASAAGKRPHQDFDSQESDPEWGCWTANHELKKPSISLLFPTIDRVKKGACGIQLCRNLLSLPEKTWQRLRSTGIFHDAIPQPNARIGYPMHVKVAQRRFKSCFGEHSFGWTYCGSHNFSPAAWGQPLSPPSKANPSKARSAPSSPMLHICNYELGIILIALPPGMSKHASESRHRIEDIALPFVVPPPRYKGSDKPATRLAMREAVAEACVLQGNDVVDLPDDTDEDVPDEDDEQVVELSDCSQQEKEEEKIYAETLWGQVDSSQSLEKD

SEQ ID NO: 169426 - protein, 243 aa, Zea Mays
MGQMISGDKSDEQTARDDGIIKNGREILFQAFNWESNKHNWWSILEEKVTDLAESGFTSVWLPPPTQSLSREGYLPQNLYCLDSCYGSLHELKLLLHKMSEHNVRAMADVVINHRIGTTQGSNGMYNRYDGIPVSWDEHAVTSCSGGKGNKSTGDNFDGVPNIDHTQPFVRKDIIEWLIWLRKSVGFQDFRFDFTKGYAAKFVKEYIEESKPLFAVGEYWDSCEYSPPDYRLNYNQGRGLLIG

SEQ ID NO: 169427 - protein, 110 aa, Zea Mays
MNLFPILRARLGISIKSVGDKLKFGLLTIFPCSQPYFMKTTAVPREASRAQKSACPPITSSRASTSPTICSKVSGRFSTEGLNFSAPASTELKTCFSRCRHRLLKSTHFS

SEQ ID NO: 169428 - protein, 403 aa, Zea Mays
MFGPDKCGSTNKVHFILKHKNPKTGKYVEHHLKFPPSVPYDKLSHVYTAILKPDNEVKILVDGEEKKKANFLSADDFEPALIPSKTIPDPDDKKPEDWDERAKIPDPDAVKPDDWDEDAPMEIVDDEATKPEGWLDDEPEEIDDPEAAKPEDWDDEEDGEWEAPKIDNPKCEEAPGCGEWKRPMKQNPAYKGKWHAPMIDNPNYKGIWKPQEIPNPEYFELDKPDFDPIAAIGIEIWTMQDGILFDNILIADDEKVATSILEKTWKPKYDVEKEKEKAEEEAAAGADGLSEFQKKIFDVLYKIADVPFLAPYKTKIIDVIEKGEKQPNITIGILVSVVVVFVTVLFKILFGGKKPVAPVKPAAEAKKPKATVTDGAGSSGDKDEKEDEKEETAGPRRRTRRET

SEQ ID NO: 169429 - protein, 496 aa, Zea Mays
MGGRALLLLLLVSALVFQIHASDPLLYEPFDEDFEGRWVVSKKDEYQGVWRHAKSDGHEDYGLLVSEKARKYAIIKELDEPVTLKDGTVVLQFEVRLQNGLECGGAYIKYIRPQDAGWDAKEFDNETPYTIMFGPDKCGSTNKVHFILKHKNPKTGKYVEHHLKFPPSVPYDKLSHVYTAILKPDNEVKILVDGEEKKKANFLSADDFEPALIPSKTIPDPDDKKPEDWDERAKIPDPDAAKPEDWDDEEDGEWEAPKIDNPKCEEAPGCGEWKRPMKQNPAYKGKWHAPMIDNPNYKGIWKPQEIPNPEYFELDKPDFDPIAAIGIEIWTMQDGILFDNILIADDEKVATSILEKTWKPKYDVEKEKEKAEEEAAAGADGLSEFQKKIFDVLYKIADVPFLAPYKTKIIDVIEKGEKQPNITIGILVSVVVVFVTVLFKILFGGKKPVAPVKPAAEAKKPKATVTDGAGSSGDKDEKEDEKEETAGPRRRTRRET

SEQ ID NO: 169430 - protein, 240 aa, Zea Mays
MACLSHQAIKMDHMFIFQASKQMRTNLKRRMRLSQLWFGLVTFALSQQVGKVVLYDPISLRIILLPVQEYPITTEENEDKDEPDMLVDLSPYKEDGSLEIEYSSLLDVRLLKGIEPVPGAFSTPLAETCNEVGSALAKGRPVTLHKNEGNIESQKSPLVANNTNGKEHKLGKSEKTVWEKNDEPGDEVDVQQNGWGTWKQNSTSAWSYRALRSSALGPTMALLRGKNNQRGKPPYRKKGK

SEQ ID NO: 169431 - protein, 366 aa, Zea Mays
MACLSHQAIKMDHMFIFQASKQMRTNLKRRMRLSQLWFGLVTFALSQQGTFQWSGTLSKKKGQKWGINSSNKKNADVGYHAGIAGSNTEVNNLVMDIKVTENGFCAVSNRRIDEGSNVEMSSVKAVANEEKSRGVPFDFESLYPLTQLPKEGDLIAYRLVELSSMLCPELSSFRVGKVVLYDPISLRIILLPVQEYPITTEENEDKDEPDMLVDLSPYKEDGSLEIEYSSLLDVRLLKGIEPVPGAFSTPLAETCNEVGSALAKGRPVTLHKNEGNIESQKSPLVANNTNGKEHKLGKSEKTVWEKNDEPGDEVDVQQNGWGTWKQNSTSAWSYRALRSSALGPTMALLRGKNNQRGKPPYRKKGK

SEQ ID NO: 169432 - protein, 517 aa, Zea Mays
MDGFTLPPFESTCIFRDNDIIRGQRLKVTNSGKHIDYSKKEQNGSKKLKLSVIDIEAKKATPQHETTTTLVEQQKSEGNYQTELKCEAKVTNYDAQSDTKKLESRSARRKKIKRLMKQRGKLQIEKNVHGDSPIAADCPSSSNQDGLPVPSSNQNGSHVHFSSLKADEDESETSDEIVPVVVRPGHIRFEPAGREPDKSPAKELQGTFQWSGTLSKKKGQKWGINSSNKKNADVGYHAGIAGSNTEVNNLVMDIKVTENGFCAVSNRRIDEGSNVEMSSVKAVANEEKSRGVPFDFESLYPLTQLPKEGDLIAYRLVELSSMLCPELSSFRVGKVVLYDPISLRIILLPVQEYPITTEENEDKDEPDMLVDLSPYKEDGSLEIEYSSLLDVRLLKGIEPVPGAFSTPLAETCNEVGSALAKGRPVTLHKNEGNIESQKSPLVANNTNGKSEKTVWEKNDEPGDEVDVQQNGWGTWKQNSTSAWSYRALRSSALGPTMALLRGKNNQRGKPPYRKKGK

SEQ ID NO: 169433 - protein, 342 aa, Zea Mays
MACLSHQAIKMDHMFIFQASKQMRTNLKRRMRLSQLWFGLVTFALSQQGTFQWSGTLSKKKGQKWGINSSNKKNADVGYHAGIAGSNTEVNNLVMDIKVTENGFCAVSNRRIDEGSNVEMSSVKAVANEEKSRGVPFDFESLYPLTQLPKVGKVVLYDPISLRIILLPVQEYPITTEENEDKDEPDMLVDLSPYKEDGSLEIEYSSLLDVRLLKGIEPVPGAFSTPLAETCNEVGSALAKGRPVTLHKNEGNIESQKSPLVANNTNGKEHKLGKSEKTVWEKNDEPGDEVDVQQNGWGTWKQNSTSAWSYRALRSSALGPTMALLRGKNNQRGKPPYRKKGK

SEQ ID NO: 169434 - protein, 584 aa, Zea Mays
MDGFTLPPFESTCIFRDNDIIRVKQKSCTKHIEHNDVHCIQDHEIIEKRSLPVDGKILAIQDKEDVCKHQEEEAHDDHQLEENATASHSTENNGTSLKRKRNDGVADIPESSKGQRLKVTNSGKHIDYSKKEQNGSKKLKLSVIDIEAKKATPQHETTTTLVEQQKSEGNYQTELKCEAKVTNYDAQSDTKKLESRSARRKKIKRLMKQRGKLQIEKNVHGDSPIAADCPSSSNQDGLPVPSSNQNGSHVHFSSLKADEDESETSDEIVPVVVRPGHIRFEPAGREPDKSPAKELQGTFQWSGTLSKKKGQKWGINSSNKKNADVGYHAGIAGSNTEVNNLVMDIKVTENGFCAVSNRRIDEGSNVEMSSVKAVANEEKSRGVPFDFESLYPLTQLPKVGKVVLYDPISLRIILLPVQEYPITTEENEDKDEPDMLVDLSPYKEDGSLEIEYSSLLDVRLLKGIEPVPGAFSTPLAETCNEVGSALAKGRPVTLHKNEGNIESQKSPLVANNTNGKSEKTVWEKNDEPGDEVDVQQNGWGTWKQNSTSAWSYRALRSSALGPTMALLRGKNNQRGKPPYRKKGK

SEQ ID NO: 169435 - protein, 589 aa, Zea Mays
MVFCAQMDGFTLPPFESTCIFRDNDIIRVKQKSCTKHIEHNDVHCIQDHEIIEKRSLPVDGKILAIQDKEDVCKHQEEEAHDDHQLEENATASHSTENNGTSLKRKRNDGVADIPESSKGQRLKVTNSGKHIDYSKKEQNGSKKLKLSVIDIEAKKATPQHETTTTLVEQQKSEGNYQTELKCEAKVTNYDAQSDTKKNVHGDSPIAADCPSSSNQDGLPVPSSNQNGSHVHFSSLKADEDESETSDEIVPVVVRPGHIRFEPAGREPDKSPAKELQGTFQWSGTLSKKKGQKWGINSSNKKNADVGYHAGIAGSNTEVNNLVMDIKVTENGFCAVSNRRIDEGSNVEMSSVKAVANEEKSRGVPFDFESLYPLTQLPKEGDLIAYRLVELSSMLCPELSSFRVGKVVLYDPISLRIILLPVQEYPITTEENEDKDEPDMLVDLSPYKEDGSLEIEYSSLLDVRLLKGIEPVPGAFSTPLAETCNEVGSALAKGRPVTLHKNEGNIESQKSPLVANNTNGKSEKTVWEKNDEPGDEVDVQQNGWGTWKQNSTSAWSYRALRSSALGPTMALLRGKNNQRGKPPYRKKGK

SEQ ID NO: 169436 - protein, 595 aa, Zea Mays
MVFCAQMDGFTLPPFESTCIFRDNDIIRVKQKSCTKHIEHNDVHCIQDHEIIEKRSLPVDGKILAIQDKEDVCKHQEEEAHDDHQLEENATASHSTENNGTSLKRKRNDGVADIPESSKGQRLKVTNSGKHIDYSKKEQNGSKKLKLSVIDIEAKKATPQHETTTTLVEQQKSEGNYQTELKCEAKVTNYDAQSDTKKNVHGDSPIAADCPSSSNQDGLPVPSSNQNGSHVHFSSLKADEDESETSDEIVPVVVRPGHIRFEPAGREPDKSPAKELQGTFQWSGTLSKKKGQKWGINSSNKKNADVGYHAGIAGSNTEVNNLVMDIKVTENGFCAVSNRRIDEGSNVEMSSVKAVANEEKSRGVPFDFESLYPLTQLPKEGDLIAYRLVELSSMLCPELSSFRVGKVVLYDPISLRIILLPVQEYPITTEENEDKDEPDMLVDLSPYKEDGSLEIEYSSLLDVRLLKGIEPVPGAFSTPLAETCNEVGSALAKGRPVTLHKNEGNIESQKSPLVANNTNGKEHKLGKSEKTVWEKNDEPGDEVDVQQNGWGTWKQNSTSAWSYRALRSSALGPTMALLRGKNNQRGKPPYRKKGK

SEQ ID NO: 169437 - protein, 596 aa, Zea Mays
MVFCAQMDGFTLPPFESTCIFRDNDIIRVKQKSCTKHIEHNDVHCIQDHEIIEKRSLPVDGKILAIQDKEDVCKHQEEEAHDDHQLEENATASHSTENNGTSLKRKRNDGVADIPESSKGQRLKVTNSGKHIDYSKKEQNGSKKLKLSVIDIEAKKATPQHETTTTLVEQQKSEGNYQTELKCEAKVTNYDAQSDTKKLESRSARRKKIKRLMKQRGKLQIEKNVHGDSPIAADCPSSSNQDGLPVPSSNQNGSHVHFSSLKADEDESETSDEIVPVVVRPGHIRFEPAGREPDKSPAKELQGTFQWSGTLSKKKGQKWGINSSNKKNADVGYHAGIAGSNTEVNNLVMDIKVTENGFCAVSNRRIDEGSNVEMSSVKAVANEEKSRGVPFDFESLYPLTQLPKVGKVVLYDPISLRIILLPVQEYPITTEENEDKDEPDMLVDLSPYKEDGSLEIEYSSLLDVRLLKGIEPVPGAFSTPLAETCNEVGSALAKGRPVTLHKNEGNIESQKSPLVANNTNGKEHKLGKSEKTVWEKNDEPGDEVDVQQNGWGTWKQNSTSAWSYRALRSSALGPTMALLRGKNNQRGKPPYRKKGK

SEQ ID NO: 169438 - protein, 360 aa, Zea Mays
MACLSHQAIKMDHMFIFQASKQMRTNLKRRMRLSQLWFGLVTFALSQQGTFQWSGTLSKKKGQKWGINSSNKKNADVGYHAGIAGSNTEVNNLVMDIKVTENGFCAVSNRRIDEGSNVEMSSVKAVANEEKSRGVPFDFESLYPLTQLPKEGDLIAYRLVELSSMLCPELSSFRVGKVVLYDPISLRIILLPVQEYPITTEENEDKDEPDMLVDLSPYKEDGSLEIEYSSLLDVRLLKGIEPVPGAFSTPLAETCNEVGSALAKGRPVTLHKNEGNIESQKSPLVANNTNGKSEKTVWEKNDEPGDEVDVQQNGWGTWKQNSTSAWSYRALRSSALGPTMALLRGKNNQRGKPPYRKKGK

SEQ ID NO: 169439 - protein, 410 aa, Zea Mays
MGSRKGWFPVALLLLADSALWPPVAAAAAGGGEAEHAVQQHSERISGSAGDVLEDNPVGRLKVFIYDLPRKYNKKMVTKDSRCLSHMFAAEIFMHRFLLSSAVRTLNPKEADWFYTPVYTTCDLTNAGLPLPFKSPRVMRSAIQYISNKWPFWNRTDGADHFFVVPHDFAACFHYQEEKAIERGILPLLRRATLVQTFGQENHVCLKEGSIIIPPYAPPQKMQAHLISPDTPRSIFVYFRGLFYDTGNDPEGGYYARGARASLWENFKSNPLFDISTDHPATYYEDMQRAVFCLCPLGWAPWSPRLVEAVVFGCIPVIIADDIVLPFADAIPWEEIGVFVEEKDVPKLDTILTSMPIDDILRKQRLLANPSMKQAMLFPQPAQPRDAFHQILNGLARKLPHPEGGTIPDA

SEQ ID NO: 169440 - protein, 667 aa, Zea Mays
MLVLRRVSFLLSSPSPRAPLAKPLLLLRPPQTLAPTARQLVAMAASVPSAGGAGTMSRDAFRAAVTNTLERRLFFVPSFKIYGGVAGLYDYGPPGCAVKANVLAFWRQHFVLEEGMLEVDCPCVTPEVVLKASGHVDKFTDLMVKDEKTGNCYRADHLLKDFCKDKLEKDHTLSPEMAEEYNRVLAILDDLTAEQLGAKIREYKIVAPDTKNSLSDPYPFNLMFQTSIGPSGLSPGYMRPETAQGIFVNFKDLYYYNGNKLPFAAAQIGQAFRNEISPRQGLLRVREFTLAEIEHFVDPEDKSHPKFGDVSDLEFWMFPREDQMAGRSATRLKLGNSISEGTVNNETLGYFIGRVYLFLTQLGIDKDRLRFRQHLPNEMAHYAADCWDAEIECSYGWIECVGIADRSAYDLRAHSDKSGEKLEAHEKFAEPREVEKLVITPSKKELGLAFKGNQKLVVESLEAMTETEALDMKAALESRGEVEFKVCTLGKNVTIKKNMVSINIEKKKEHQRKFTPSVIEPSFGIGRIIYCLFEHCFYQRPGKTEDEQLNVFRFPPLVAPIKCTVFPLVKLEKFEAVAKKISKALTAAGISHIIDMTGNTIGKRYARTDEIGVPLAITVDHTTSVTVRDRDSKDQIRVDVDEVASVVKEVTDGQSTWADIMWRFLFD

SEQ ID NO: 169441 - protein, 108 aa, Zea Mays
MDPDLDLDLDMDMETLAGDSGGEAERNEAAEAEAEVERYEAAEAEADILRDRFRLAVISIATAEEGRNDGRRPRCFLHRRLGVQERRAASKGCRVVCTACRSQIRQDG

SEQ ID NO: 169442 - protein, 149 aa, Zea Mays
MPPKLDPSQVVEVFVRVTGGEVGAASSLAPKIGPLGLSPKKIGEDIAKETAKDWKGLRVTVKLTVQNRQAKVSVVPSAAALVIKALKEPERDRKKVKNIKHSGNIGLDDVVEIARTMRNRSMAKELAGTVKEILGTCVSVGCTVEIPSA

SEQ ID NO: 169443 - protein, 337 aa, Zea Mays
MVPARNLQPLARDAHATPCAAAAGLGVTPTAPMAQEPIDKHHSEPTKPPPPPQERQADQDTRRHAHAYGEQQQRTLRPLQPAGVHHQEAAGSSGSSSNGGAGDWLRLGLSPASPSAGGTQPGLVFADRAAGPPLLLSSQPQTRTASEALRPGMGVAPGPFLHQAAPGIPQASITLPVPRAGPPWLPPWSPSAVAPPLVPFGNRAFYTPGAASGLDAIRVVLPPSAVAGVWFALQAAPHQGREPFLPQIPRSYLRIKDARVTVRLLSKYLAGRLGLEDESEVEITCRGRQLPAFLTLQHVRDGIWCQGDAAAASPSVVPDMSAANHHHLMVLQYGRRS

SEQ ID NO: 169444 - protein, 173 aa, Zea Mays
MPSTAPVELDFLGLRPAAAAAAEDDHHHGSSTTSAAAAASSSVRGMKTSAIASIGAHKLRRVIAGDEATKQHQQQQAPMTVFYGGAVATFDGVSQDTAEAIMKMAMEVTASSGGRIVRRDAFRGNLTKAVSTEAKGEAEWAGSLSASIGRTKQPRWCSDHDVSCEGGSSLISL

SEQ ID NO: 169445 - protein, 124 aa, Zea Mays
MERPRFSDHLEAIKFICKDFWSELFKKQIDNLKTNHRGTFVLQDNRFRWLTRVSLDPRTENTDSTENDSAALGDTAAQTTTMLLYFPCGLIRGALTNLGISCSVSADMSNLPAWASKPPKNTSL

SEQ ID NO: 169446 - protein, 152 aa, Zea Mays
MEMVAVYCGGLYTAKPELAARRIEAIGFQVGHQLSERYTMERPRFSDHLEAIKFICKDFWSELFKKQIDNLKTNHRGTFVLQDNRFRWLTRVSLDPRTENTDSTENDSAALGDTAAQTTTMLLYFPCGLIRGALTNLGISCSVSADMSNLPA

SEQ ID NO: 169447 - protein, 113 aa, Zea Mays
MERPRFSDHLEAIKFICKDFWSELFKKQIDNLKTNHRGTFVLQDNRFRWLTRVSLDPRTENTDSTENDSAALGDTAAQTTTMLLYFPCGLIRGALTNLGISCSVSADMSNLPA

SEQ ID NO: 169448 - protein, 78 aa, Zea Mays
MSSASAAPCQHNLFAAQGGQSRLKDDTGHRHHDAGTTSSTTILVGNRLMVANVGDSDSHMQRRECYSGFKRPQAGLDE

SEQ ID NO: 169449 - protein, 220 aa, Zea Mays
MNPPLISPCSFILSSRIQDQDDRPHPLGSLPVPSLPGQPALLQQALSPAELHTSHGAQLLSSLSCARLLFFLRTLLFLSPAVHYYRDAVSARRALDLAPARRQKLPDAPSLLLPARFHGRRIPWPCAPARGRISLCSPSPAGAPPVAAPCVLGLKFLCARNSLLANAPARCCRQVRISQLVLVAMSSSLCACELLCLARRRSPAPYRTRLFRRLVLMPVP

SEQ ID NO: 169450 - protein, 192 aa, Zea Mays
MKLRSDYKDEFVTKHGVKLGLMSCFVKAAVSALQNQPIVNAVIDGDDIIYRDYVDVSVAVGTSKGLVVPVIRDADTMNFADIEKGINNLAKKANEGALSIDDMAGGTFTISNGGVYGSLLSTPIINPPQSSILGMHSIVQRPVVVNGDILARPMMFLALTYDHRLIDGREAVFFLRRIKDVVEDPRRLLLDI

SEQ ID NO: 169451 - protein, 365 aa, Zea Mays
MGESVTDGTLANFLKKPGDRVEADEPIAQIETDKVTIDVASPEAGVIEKLIASEGDTVTPGTKVAIISKSAQPAETHVAPSEEATSKGSSPPKVEEKSRVEEKAPKVEPPKMQAPKPTAPLKTSPSEPQLPPKERERRVPMPRLRKRIANRLKDSQNTFAMLSTFNEVDMTNLMKLRSDYKDEFVTKHGVKLGLMSCFVKAAVSALQNQPIVNAVIDGDDIIYRDYVDVSVAVGTSKGLVVPVIRDADTMNFADIEKGINNLAKKANEGALSIDDMAGGTFTISNGGVYGSLLSTPIINPPQSSILGMHSIVQRPVVVNGDILARPMMFLALTYDHRLIDGREAVFFLRRIKDVVEDPRRLLLDI

SEQ ID NO: 169452 - protein, 226 aa, Zea Mays
MGESVTDGTLANFLKKPGDRVEADEPIAQIETDKVTIDVASPEAGVIEKLIASEGDTVTPGTKVAIISKSAQPAETHVAPSEEATSKGSSPPKVEEKSRVEEKAPKVEPPKMQAPKPTAPLKTSPSEPQLPPKERERRVPMPRLRKRIANRLKDSQNTFAMLSTFNEVDMTNLMKLRSDYKDEFVTKHGVKLGLMSCFVRLLFLHFKTSQLLMLSLMAMTSYTETT

SEQ ID NO: 169453 - protein, 230 aa, Zea Mays
MAQLKAARATDVPPAMPDPDPDVVAADLGACVRHGRVDGLAAGSGRAEATATATTTAAAADQGRRRPPLVVVGHRGKGMNALASPDPRLRGDIRENTLRAFNAAAASHPAVAYVEFDVQVNHGLSFFFLFATKINQCIRNLRMPACATSVSVRGVGVSQRCPLGRVLGPVRKKVDRGAAVGELGRGRQAAASCLLRPETSGGRWFPLLRSREPNLHSRSLAQRTFPCRCA

SEQ ID NO: 169454 - protein, 397 aa, Zea Mays
MAQLKAARATDVPPAMPDPDPDVVAADLGACVRHGRVDGLAAGSGRAEATATATTTAAAADQGRRRPPLVVVGHRGKGMNALASPDPRLRGDIRENTLRAFNAAAASHPAVAYVEFDVQGQVSAKRVTELNLDEFLSYGPQRDQGKAGKPLLRKLKDGRILKWDVQSEDALCTLREVFEGVHRRVGFNVELKFDDDLFYTEERLTCILKSVLKVVFEHANDRPIIFSSFQPDAAQLIRKLQDKYPVLFLTNGGTQVYADPRRNSLEEAVKLCVAGGLQGIVSEVRAILRQPSAVAKIKEANKLSLMTYGQLNNVAEVVYVQHLMGVDGVIVDLVQEIAEAVSAFTVVTAVQASGSQDGGGIVVGERMETAAVAVAGTPSFSPREVSFLLRLIPELVQ

SEQ ID NO: 169455 - protein, 407 aa, Zea Mays
MAQLKAARATDVPPAMPDPDPDVVAADLGACVRHGRVDGLAAGSGRAEATATATTTAAAADQGRRRPPLVVVGHRGKGMNALASPDPRLRGDIRENTLRAFNAAAASHPAVAYVEFDVQVTRDGCPVIFHDNFIYTQQDGQVSAKRVTELNLDEFLSYGPQRDQGKAGKPLLRKLKDGRILKWDVQSEDALCTLREVFEGVHRRVGFNVELKFDDDLFYTEERLTCILKSVLKVVFEHANDRPIIFSSFQPDAAQLIRKLQDKYPVYADPRRNSLEEAVKLCVAGGLQGIVSEVRAILRQPSAVAKIKEANKLSLMTYGQLNNVAEVVYVQHLMGVDGVIVDLVQEIAEAVSAFTVVTAVQASGSQDGGGIVVGERMETAAVAVAGTPSFSPREVSFLLRLIPELVQ

SEQ ID NO: 169456 - protein, 276 aa, Zea Mays
MKIAAGAAKGLEYLHDKAQPPVIYRDFKSSNILLGEGFHPKLSDFGLAKLGPVGDKSHVSTRVMGTYGYCAPEYAMTGQLTVKSDVYSFGVVLLELITGRKAIDSTRPASEQNLVSWARPLFNDRRKLPKMADPGLEGQFPTRGLYQALAVASMCIQSEAASRPLIADVVTALSYLANQIYDPSLAHASKKAGGSDQRNRVGDSGRALSKNDDAGSSGHRSPSKDRADSPREQFPGAANRGQDRERMVAEAKMWGENWREKRRAAQGSLDSPTGGG

SEQ ID NO: 169457 - protein, 292 aa, Zea Mays
MVTQMEGFLEHFEKQVLTFNVMTQQHAAGFNRAEEQLILQMSMVEDERRQLELLRAAIVQHQQQEAARARLALAQPQAALPAASCQALVAAGRGEGASRGQALAPSLVMQQQETMMTAGAWQALAAAASRGQGASNEQALMQAIMAQHMQRQRQQEIMAAASRGDGATCGQAEALPLAAVTQLMQQRNQQRQQEEMTTTAFRCDVAPGYLALASAGMMRQQQQHQQEVMAAGGWQLDLGLRHTDIAPRVDGSSSSQAALPPAMLQQPGQGQASTAGSGMALPWRGVADGREQ

SEQ ID NO: 169458 - protein, 368 aa, Zea Mays
MLGMSRTGLAGAALRVALTALLPLVLPAYYVYKLTTYLLGAVFPEDVAGKVVLITGASSGIGEHLAYEYAKRGAYLALVARREASLREVGDVALGLGSPGVLVLPADVSKPRDCEGFIDDTISYFGRLDHLVNNASIWQVCKFEEIQDVRHLRALMDINFWGHVYPTRLAIPHLRRSRGRIVGVTSNSSYIFIGRNTFYNASKAAALSFYDTLRMELGSDIRITEVVPGVVESEITKGKMLTKGGEMKVDQDERDVRHPGADAGRARGRLRQDRGARRVPGREVRVRAQVVHGRLLAAGLPPGSPGLELPPAHCRHGRRVHHGHARKVAGRAARRAPRRAAAVAPLAGDQGLVTVIVYVLWPWIALAV

SEQ ID NO: 169459 - protein, 373 aa, Zea Mays
MLGMSRTGLAGAALRVALTALLPLVLPAYYVYKLTTYLLGAVFPEDVAGKVVLITGASSGIGEHLAYEYAKRGAYLALVARREASLREVGDVALGLGSPGVLVLPADVSKPRDCEGFIDDTISYFGRLDHLVNNASIWQVCKFEEIQDVRHLRALMDINFWGHVYPTRLAIPHLRRSRGRIVGVTSNSSYIFIGRNTFYNASKAAALSFYDTLRMELGSDIRITEVVPGVVESEITKGKMLTKGGEMKVDQDERDCVLCPAGHPGADAGRARGRLRQDRGARRVPGREVRVRAQVVHGRLLAAGLPPGSPGLELPPAHCRHGRRVHHGHARKVAGRAARRAPRRAAAVAPLAGDQGLVTVIVYVLWPWIALAV

SEQ ID NO: 169460 - protein, 463 aa, Zea Mays
MDRKTYELVGPDYPGNRAEDVKDPSLGWMISFLFLIALVGPFSIVLLRKVMVIDYKLAFPGGTATALMINSLHGKTDGDLAGKKLHCLVKYMGISFVWSFFKWFFSGVGDSCGFDNFPTFGLEAFKSTFYFDFSPSYVGFGFISPHIVNCSVFLGSVISWGFLWPFISAQAGHWYPDNLGNSDFRGLYGYKVFIAISIILGDGLYNLVKIFIVIARELCSMQSKQHELPVQALEDDGSCEQLADEKLQTEIFLKDSISPWFAASGYIVLAAISTASVPAIFPQLKWYLVLLCYFFAPVVAFCNSYGMGLTNLNLAPTYGKIALFALASLVGSDGGGVIAGLAACGIVMSVACSTADLMQDLKSGYLTLSSPRSMFTAQLIGIALGCVIAPLTLWLFWTAFDIGDPDGEYKAPFAIMFREMAILGMEGFSALPLHCLDICYAAFFLALATSLLKDVAPANVSRS

SEQ ID NO: 169461 - protein, 355 aa, Zea Mays
MEHRGERQQQKVGSSHGDAEHAEGGVHHPAQRDARDRPRQHLHGLGGAQVPYAPGHLPPAVLHLQAHHVCVRCCRARGRRREGCAHHRRRLRHRPARLALVARMVGSLHDVAARARDGGSPDVLVVAGDVAKPEDCRRFVQATVEHFGRLDHLVNNAGVANVCWFEDVPDVAALKRVLAVNFWGAVHATHCALPHLKKSGGGKVFVNSSAAAALAMPGMSLYNASEAAVLNFFETLRVELRDEVGITIATSGWIVSEMTGGKQLSKEGTVEVAVRCAEATVDAICRGRRHLTVPLWYRALFLWRALAPEVVEFSQRLLCRRTAGGRGHQAKGKRLQEVTGAVQPAPLHSSDIKRE

SEQ ID NO: 169462 - protein, 679 aa, Zea Mays
MTPAETSPPAPPPRASHPVSSPLLLQDPTTQATCPWREQLTVRGVAVAAALGALLCVVIHRLNLTVGVIPALNVASGLLAFFLAAAWRAAAGWLGFGRGPPFTRQENTVIQTCAIACAGLAFSGCSASYIFAMDRKTYELVGPDYPGNRAEDVKDPSLGWMISFLFLIALVGPFSIVLLRKVMVIDYKLAFPGGTATALMINSLHGKTDGDLAGKKLHCLVKYMGISFVWSFFKWFFSGVGDSCGFDNFPTFGLEAFKSTFYFDFSPSYVGFGFISPHIVNCSVFLGSVISWGFLWPFISAQAGHWYPDNLGNSDFRGLYGYKVFIAISIILGDGLYNLVKIFIVIARELCSMQSKQHELPVQALEDDGSCEQLADEKLQTEIFLKDSISPWFAASGYIVLAAISTASVPAIFPQLKWYLVLLCYFFAPVVAFCNSYGMGLTNLNLAPTYGKIALFALASLVGSDGGGVIAGLAACGIVMSVACSTADLMQDLKSGYLTLSSPRSMFTAQLIGIALGCVIAPLTLWLFWTAFDIGDPDGEYKAPFAIMFREMAILGMEGFSALPLHCLDICYAAFFLALATSLLKDVAPANVSRFIPIPIAMAAPFYVGAYFGVDMFIGTAILYAWQKLNREQADGYAVAVASGLICGDGIWSIPSALLSILGAVPPICMSFEASSAPR

SEQ ID NO: 169463 - protein, 326 aa, Zea Mays
MTPAETSPPAPPPRASHPVSSPLLLQDPTTQATCPWREQLTVRGVAVAAALGALLCVVIHRLNLTVGVIPALNVASGLLAFFLAAAWRAAAGWLGFGRGPPFTRQENTVIQTCAIACAGLAFSGCSASYIFAMDRKTYELVGPDYPGNRAEDVKDPSLGWMISFLFLIALVGPFSIVLLRKVMVIDYKLAFPGGTATALMINSLHGKTDGDLAGKKLHCLVKYMGISFVWSFFKWFFSGVGDSCGFDNFPTFGLEAFKSTFYFDFSPSYVGFGFISPHIVNCSVFLGSVISWGFLWPFISAQAGHWYPDNLGNSDFRGLYGYKIIP

SEQ ID NO: 169464 - protein, 688 aa, Zea Mays
MTPAETSPPAPPPRASHPVSSPLLLQDPTTQATCPWREQLTVRGVAVAAALGALLCVVIHRLNLTVGVIPALNVASGLLAFFLAAAWRAAAGWLGFGRGPPFTRQENTVIQTCAIACAGLAFSGCSASYIFAMDRKTYELVGPDYPGNRAEDVKDPSLGWMISFLFLIALVGPFSIVLLRKVMVIDYKLAFPGGTATALMINSLHGKTDGDLAGKKLHCLVKYMGISFVWSFFKWFFSGVGDSCGFDNFPTFGLEAFKSTFYFDFSPSYVGFGFISPHIVNCSVFLGSVISWGFLWPFISAQAGHWYPDNLGNSDFRGLYGYKVFIAISIILGDGLYNLVKIFIVIARELCSMQSKQHELPVQALEDDGSCEQLADEKLQTEIFLKDSISPWFAASGYIVLAAISTASVPAIFPQLKWYLVLLCYFFAPVVAFCNSYGMGLTNLNLAPTYGKIALFALASLVGSDGGGVIAGLAACGIVMSVACSTADLMQDLKSGYLTLSSPRSMFTAQLIGIALGCVIAPLTLWLFWTAFDIGDPDGEYKAPFAIMFREMAILGMEGFSALPLHCLDICYAAFFLALATSLLKDVAPANVSRFIPIPIAMAAPFYVGAYFGVDMFIGTAILYAWQKLNREQADGYAVAVASGLICGDGIWSIPSALLSILGAVPPICMSFEASSAPRTTLHVPCSL

SEQ ID NO: 169465 - protein, 457 aa, Zea Mays
MGISFVWSFFKWFFSGVGDSCGFDNFPTFGLEAFKSTFYFDFSPSYVGFGFISPHIVNCSVFLGSVISWGFLWPFISAQAGHWYPDNLGNSDFRGLYGYKVFIAISIILGDGLYNLVKIFIVIARELCSMQSKQHELPVQALEDDGSCEQLADEKLQTEIFLKDSISPWFAASGYIVLAAISTASVPAIFPQLKWYLVLLCYFFAPVVAFCNSYGMGLTNLNLAPTYGKIALFALASLVGSDGGGVIAGLAACGIVMSVACSTADLMQDLKSGYLTLSSPRSMFTAQLIGIALGCVIAPLTLWLFWTAFDIGDPDGEYKAPFAIMFREMAILGMEGFSALPLHCLDICYAAFFLALATSLLKDVAPANVSRFIPIPIAMAAPFYVGAYFGVDMFIGTAILYAWQKLNREQADGYAVAVASGLICGDGIWSIPSALLSILGAVPPICMSFEASSAPRQ

SEQ ID NO: 169466 - protein, 372 aa, Zea Mays
MTPAETSPPAPPPRASHPVSSPLLLQDPTTQATCPWREQLTVRGVAVAAALGALLCVVIHRLNLTVGVIPALNVASGLLAFFLAAAWRAAAGWLGFGRGPPFTRQENTVIQTCAIACAGLAFSGCSASYIFAMDRKTYELVGPDYPGNRAEDVKDPSLGWMISFLFLIALVGPFSIVLLRKVMVIDYKLAFPGGTATALMINSLHGKTDGDLAGKKLHCLVKYMGISFVWSFFKWFFSGVGDSCGFDNFPTFGLEAFKSTFYFDFSPSYVGFGFISPHIVNCSVFLGSVISWGFLWPFISAQAGHWYPDNLGNSDFRGLYGYKVFIAISIILGDGLYNLVKIFIVIARELCSMQSKQHELPVQALEGKHVTS

SEQ ID NO: 169467 - protein, 384 aa, Zea Mays
MTPAETSPPAPPPRASHPVSSPLLLQDPTTQATCPWREQLTVRGVAVAAALGALLCVVIHRLNLTVGVIPALNVASGLLAFFLAAAWRAAAGWLGFGRGPPFTRQENTVIQTCAIACAGLAFSGCSASYIFAMDRKTYELVGPDYPGNRAEDVKDPSLGWMISFLFLIALVGPFSIVLLRKVMVIDYKLAFPGGTATALMINSLHGKTDGDLAGKKLHCLVKYMGISFVWSFFKWFFSGVGDSCGFDNFPTFGLEAFKSTFYFDFSPSYVGFGFISPHIVNCSVFLGSVISWGFLWPFISAQAGHWYPDNLGNSDFRGLYGYKVFIAISIILGDGLYNLVKIFIVIARELCSMQSKQHELPVQALEGNDEWTSRGHLPCLEAHR

SEQ ID NO: 169468 - protein, 306 aa, Zea Mays
MGEAEVEKPKEAAEEEKKKEDKPMDATAAAEDKPKDAAAAEDKPKDGEEKKDDAPPPPPPPPPPEEVEMRVYMHCEGCARKVKKILKRFDGVEDVVADSKSHKVVVKGKKAAADPMRVVERVQKKTGRKVELLSPIPPPTPPEEKKAEEEPEPPKPEEKKEPVPAPPPESGAGDNTGAKEEEKGQEEEKEKEGGGDGGGEEKKKEGGKEEEKKDGEKQEEEKEGGGGGEKVEEKEGDKDAAAAAAASMYMHYPRFPFPGGYYAPPPGYVYQPVYPAPAYAAYAPPHHQPMAPQIFSDENPNACSVM

SEQ ID NO: 169469 - protein, 1024 aa, Zea Mays
MGLFRAASGLARLALRRNLSRAAASPFAGSGGAVPGAMPARYFHSTRPRRFAAPAPRAVPLSRLTDSFLDGTSSVYLEELQRAWEADPNSVDESWDNFFRNFVGQAAATSPGLSGQTIQESMRLLLLVRAYQVSGHLKAKLDPLGLEERPVPDVLDPGFYGFSEADLDREFFLGVWMMAGFLSENRPVQTLRSVLERLEQAYCGTIGYEYMHIPDREKCNWLRDRIETVNPREYTYDRRQVMLDRLIWSTQFENFLATKWTTAKRFGLEGAETLIPGMKEMFDRAADLGVESIVIGMPHRGRLNVLGNVVRKPLRQIFSEFSGGTKPVNEGEGLYTGTGDVKYHLGTSYDRPTRGGKHIHLSLVANPSHLEAVDPVVAGKTRAKQYYSNDRDRTKNLGVLLHGDGSFSGQGVVYETLHLSALENYTTGGTIHIVVNNQVAFTTDPRSGRSSQYCTDVAKALDAPIFHVNGDDLEAVVHVCELAAEWRQTFHSDVVVDIVCYRRFGHNEIDEPSFTQPKMYKVIRNHPSALEIYQRKLLESGKISKEDIDKLNKKVSTILNEEFQNSKDYVPNKRDWLSAYWTGFKSPEQISRIQNTGVKPEILKRVGEAMTTLPENFNPHRAVKKIFYQRRQMIETGEGIDWAVGEALAFATLIIEGNHVRLSGQDVERGTFSHRHSVLHDQETGEQYCPLDHLVMNQDEELFTVSNSSLSEFAVLGFELGYSMENPNSLVIWEAQFGDFSNGAQVIFDQFLSSGESKWLRQTGLVVCLPHGYDGQGPEHSSARLERFLQMSDDNPYVIPEMDPTLRKQIQQCNWQVVNVTTPANYFHVLRRQIHRDFRKPLIVMSPKNLLRHKDCKSNLSEFDDLAGHPGFDKQGTRFKRLIKDQNNHKDLEEGINRLVLCSGKVYYELDEERRKTERTDVAICRVEQLCPFPYDLIQRELKRYPRGADEHGSVQLHQPPAADGNEGSGPWWHRGHQVRRQGPVGCYCYGLLLGARAGADGAGAKGPAARPHQLPVLKETRPL

SEQ ID NO: 169470 - protein, 235 aa, Zea Mays
MSDDNPYVIPEMDPTLRKQIQQCNWQVVNVTTPANYFHVLRRQIHRDFRKPLIVMSPKNLLRHKDCKSNLSEFDDLAGHPGFDKQGTRFKRLIKDQNNHKDLEEGINRLVLCSGKVYYELDEERRKTERTDVAICRVEQLCPFPYDLIQRELKRYPNAEIVWCQEEPMNMGAYSYINPRLLTAMKALGRGGIEDIKYVGRAPSAATATGFYSVHVQEQTELVQKALQRDPINYPF

SEQ ID NO: 169471 - protein, 411 aa, Zea Mays
MNNFVKRFGGDIFSKMYPTARAYRKEVSQYFFNQVVEASPDAKDWLDKNHKLLWRRSEFNPEIKCDYITNNLAEVFNNWIKDFKDLPVHELADKYRQMVMVLWNKRRIIGERLSGRILPAIIHQLKARTRGLGHLSVVKANCISAEILDSSSTHNRHVVKSYLHHCTCEEWQQTGKPCQHALALITAQQTVDVNMEDFVHEYYSVERFRKAYSRLIEPLPDRTQWPEVDLPFVVGAPLDKRLAGRQRKLRIKSCLEGGGGGKPKKDAKVAAVEAEWGTKKQMIRGKRKCKRCGELGHGETSYKCSLNGTKKRKRKPRKNTTKYGENAKLPTKRRGQNVEETNAAVDQTAQETANAYQDVQETNAIISSPIRPNRETILQDSPVRLTRRGLLCCLGRAQASRLTSTLAATNI

SEQ ID NO: 169472 - protein, 178 aa, Zea Mays
MDSNLSDTVSMLDGEPELTLAVVDPIVAIDDMPQAQHIDWNTLQIVERQDEEGRLEVIDEDQLYNLLGLTVDVETPSIDGMGNDGDAGRVDSEAGRVDGEAPHLLDDSFGAEIPVDDDVPEERVFVHDPDKPSMSIGTVYPDMKEFRLAMRQFAINEEFELHIAKTDRARYIGYCKGD

SEQ ID NO: 169473 - protein, 60 aa, Zea Mays
MRATGKDDSYAAHITKAYKWEFAEREGLQLVVLNPGTTLGPFFMSSVNTSLNNLLQLLRG

SEQ ID NO: 169474 - protein, 75 aa, Zea Mays
MCAIIALGTNVMASTGSILSICFVSTTHHALSLCWIWRSMRALPQSIGCSSLVFLALASIRSFLKSHWHNELYGV

SEQ ID NO: 169475 - protein, 71 aa, Zea Mays
MQTFPFVSEEDAVALHIVRTHDHHKIEGICHNSLVITLSRFMLSITNGWSCNITFMVVNWDRANIVMYFLP

SEQ ID NO: 169476 - protein, 542 aa, Zea Mays
MSISIPLPPIPVASVCCDPAPLRLHHLSRLSPPPRLQLHPRWFRAAAGRVTSAAVGFRRASMCVVIFIGTNGQTYFITASLVTSIQNFPKSRGPTVGILKGFMGLTSAILTQVYTVMHTPDHAALIFMVAVGPSLVAIGLMFVIRPVGGHRQIRPSDKNSFMFIYTVCLLLASYLVGAMLVQDFLQPSYDVVVFLTVILFVLLISPIAIPVIVSFMPEKAQHLMEDALLSEPLTGEASSSRQKEDQPEVILSEVEEEKSKETDSLPPSERRKRIAELQAKLVEAAARGGVRIKRRPHRGDNFTLMQALVKADFWLIWLSLLLGSGSGLTVIDNLGQMSQAIGYKNAHIFVSLVSIWNFLGRVGGGYFSEIIVRERTYPRHIALAVAQIVMAAGHFLFAMAWPGTMYIASLLVGLGYGAHWAIVPAAVSELFGVKHFGAMYNFLILANPAGSLIFSELIVSNLYEHEAEKQASQHQMSALLSPRLLRDTGFLADDALKCEGPACFFFSSLIMSVFCAVAAGLSLLVVQRTRQVYPRLYSSVRT

SEQ ID NO: 169477 - protein, 522 aa, Zea Mays
MPEGSKLCEFSILKTSDSTYFTPHHKRTPQSYDFAVDGWQLMCVVIFIGTNGQTYFITASLVTSIQNFPKSRGPTVGILKGFMGLTSAILTQVYTVMHTPDHAALIFMVAVGPSLVAIGLMFVIRPVGGHRQIRPSDKNSFMFIYTVCLLLASYLVGAMLVQDFLQPSYDVVVFLTVILFVLLISPIAIPVIVSFMPEKAQHLMEDALLSEPLTGEASSSRQKEDQPEVILSEVEEEKSKETDSLPPSERRKRIAELQAKLVEAAARGGVRIKRRPHRGDNFTLMQALVKADFWLIWLSLLLGSGSGLTVIDNLGQMSQAIGYKNAHIFVSLVSIWNFLGRVGGGYFSEIIVRERTYPRHIALAVAQIVMAAGHFLFAMAWPGTMYIASLLVGLGYGAHWAIVPAAVSELFGVKHFGAMYNFLILANPAGSLIFSELIVSNLYEHEAEKQASQHQMSALLSPRLLRDTGFLADDALKCEGPACFFFSSLIMSVFCAVAAGLSLLVVQRTRQVYPRLYSSVRT

SEQ ID NO: 169478 - protein, 238 aa, Zea Mays
MQALVKADFWLIWLSLLLGSGSGLTVIDNLGQMSQAIGYKNAHIFVSLVSIWNFLGRVGGGYFSEIIVRERTYPRHIALAVAQIVMAAGHFLFAMAWPGTMYIASLLVGLGYGAHWAIVPAAVSELFGVKHFGAMYNFLILANPAGSLIFSELIVSNLYEHEAEKQASQHQMSALLSPRLLRDTGFLADDALKCEGPACFFFSSLIMSVFCAVAAGLSLLVVQRTRQVYPRLYSSVRT

SEQ ID NO: 169479 - protein, 260 aa, Zea Mays
MAMGKLEERTRAFWTNRWLVFVGAMWMQSMAGTTYIFGAISPVVKARLGYDQPQVAALGVAKNVGGCLGLLAGALSATWPPWALLAIGAAQNFLGYGWLWLVVSGNAPALPLWLMCVVIFIGTNGQTYFITASLVTSIQNFPKSRGPTVGILKGFMGLTSAILTQVYTVMHTPDHAALIFMVAVGPSLVAIGLMFVIRPVGGHRQIRPSDKNSFMFIYTVCLLLASYLVGAMLVQDFLQPSYDVERQAVHDKRRINQRSF

SEQ ID NO: 169480 - protein, 879 aa, Zea Mays
MFPETVFLDVGTGRYYSSQLSNGPPEPLSSLGYPNAICGNQYHRSTSGTSEGSESHQSYSNLSSVTEVSSYSGNKEYNKNDGSLLSIPEVGHTCQQNQTGNGNSKNKSELNMALKKIAEQLSLGEDDDDDYIYSNQTHSMGGDNQIKQIRQEGTQKGLSRNIAPSWEDVLHSSSGLPTSSIYQQSDVKYQKKSEYQPPEILDSSDLRIQLSATKRFLLGPEASIDSPSLNSVLRNRVNSVTDTISAYDSRFESSLNPDWQTKTALTFQSNSQGSEITELFDHDHFEPYSREDTTISLGQTNKFNIREVSPEWAFSYEITKVIITGDFLCDPSNLCWAVMFGDNEVPVEIVQPGVLRCHTPLHSNGNLRICITSGNREVCSEFKDFEFRSKPTSSSFTDIAPSSRHLKSSEELLLLAKFARMLLSGNGNREVPDGDPQSGQCPKLKTNEELWDRLINELKVGCENPLSSVDWIVEQLLKSNLQQWLSVKLRGFNGTDFLSKQEQGIIHLISALGYEWALSPVLSAGVGLNFRDSNGWTALHWAAYFGREKMVAALLAAGASATAVTDPTAQDPVGKTAAFLASERGHTGLAGYLSEVSLTSYLASLTIEESDVSKGSAEVEAERAVEGISQRNAQRHGGTEDELSMKDSLAAVRNAAQAAARIQNAFRAFSFRKRQQKTARLRDVYGMTQEDIDELAAASRLYHQAHASSGQFYDRAAVSIQKKYKGWKGRKHFLNMRRNAVKIQAHVRGHQVRKKYRTIVSTVSVLEKVILRWRRKGHGLRGFRAEQQPMVEAIEEDDEEDDDFDDDEAVKVFRRQKVDQAVKEAVSRVLSMVDSTEARMQYRRMLEEFRQATAELEGSNEVTSIFDSDLELLGINNFM

SEQ ID NO: 169481 - protein, 860 aa, Zea Mays
MFPETVFLDVGTGRYYSSQLSNGPPEPLSSLGYPNAICGNQYHRSTSGTSEGSESHQSYSNLSSVTEVSSYSGNKEYNKNDGSLLSIPEVGHTCQQNQTGNGNSKNKSELNMALKKIAEQLSLGEDDDDDYIYSNQTHSMGGDNQIKQIRQEGTQKGLSRNIAPSWEDVLHSSSGLPTSSIYQQSDVKYQKKSEYQPPEILDSSDLRIQLSATKRFLLGPEASIDSPSLNSVLRNRVNSVTDTISAYDSRFESSLNPDWQTKTALTFQSNSQGSEITELFDHDHFEPYSREDTTISLGQTNKFNIREVSPEWAFSYEITKVIITGDFLCDPSNLCWAVMFGDNEVPVEIVQPGVLRCHTPLHSNGNLRICITSGNREVCSEFKDFEFRSKPTSSSFTDIAPSSRHLKSSEELLLLAKFARMLLSGNGNREVPDGDPQSGQCPKLKTNEELWDRLINELKVGCENPLSSVDWIVEQLLKSNLQQWLSVKLRGFNGTDFLSKQEQGIIHLISALGYEWALSPVLSAGVGLNFRDSNGWTALHWAAYFGREKMVAALLAAGASATAVTDPTAQDPVGKTAAFLASERGHTGLAGYLSEVSLTSYLASLTIEESDVSKGSAEVEAERAVEGISQRNAQRHGGTEDELSMKDSLAAVRNAAQAAARIQNAFRAFSFRKRQQKTARLRDVYGMTQEDIDELAAASRLYHQAHASSGQFYDRAAVSIQKKYKGWKGRKHFLNMRRNAVKIQAHVRGHQVRKKYRTIVSTVSVLEKVILRWRRKGHGLRGFRAEQQPMVEAIEEDDEEDDDFDDDEAVKVFRRQKVDQAVKEAVSRVLSMVDSTEARMQYRRMLEEFRQATNWKDQMK

SEQ ID NO: 169482 - protein, 135 aa, Zea Mays
MAARCPYFAVEESSRGIRSGESPAAALRRILATPGAHQAPCCYDALGARLVERAGFPIGFMGGFCVSAARLGLPDVGLISYGEMVDQGRLINEAVSIPVIGDGDNGYGNSMNIKRTIKGYINAGFAGIMLEDQVA

SEQ ID NO: 169483 - protein, 180 aa, Zea Mays
MACRALALRSLLLPDPLHRLPAAAPPVWRASRGGRRPHLRCCSGGGGGEPGQPPQEAVLEAISKIARSKGRVALTTNMVMGGTVTDDASDEWLVLDQKVNSYPTDRGFTAIGTGGDDFVQSMVVAVESVLQESIPKGRVSQKLSSRGKYVSVNIGPIRVVSSEQTITAKSKKIPPGKKRR

SEQ ID NO: 169484 - protein, 70 aa, Zea Mays
MACRALALRSLLLPDPLHRLPAAAPPVWRASRGGRRPHLRCCSGGGGGEPGQPPQEAVLEAISSKFLPHR

SEQ ID NO: 169485 - protein, 184 aa, Zea Mays
MVSLCPTHLLSRLLSPHAMLGTQQPLQSLPYNSAAVVQQILTPRRDARHPPHHVLGMMLGACPHPCDNVTPAHPYLALHIHVGQPTTEPWRRISDGRPGDQACQNRNRRRVLMLGLAVEKECRICCQASYLQEINGLRLGAYSSFSWRLGLSKLERCMLSSVLFARDKWLTPRGLFFLLMVRYN

SEQ ID NO: 169486 - protein, 121 aa, Zea Mays
MEITRSAPVVKEELFGPVLYVMKFQTLKEAIEINNSVPQGLSSSIFTKRPNIIFKWLGPHGSDCGIVNVNIPTNGAEIGGAFGGEKAAGGGREAGSDSWKQYMRRATWREVLEVVSHLFTP

SEQ ID NO: 169487 - protein, 613 aa, Zea Mays
MASAETLARSPSREPSSDLTRADSSEPHHNIDGSGAGAGDSSRRRRRSRWEQSNDDSAANNSGGEGGTGGRKRKTRWAEEEPRPAIALPDFMKDFAAEMDPEVHALNARLLEISRLLQSGLPLDDRPEGARSPSPEPVYDNLGIRINTREYRARERLNRERQEIISQLIRRNPAFKPPSDYRPPKLQKKLYIPMKEYPGYNFIGLIIGPRGNTQKRMEKETGAKIVIRGKGSVKEGKLLQKRDLKPDPSENEDLHVLVEADTQEALDAAAGMVEKLLTPVDEVLNEHKRQQLRELAALNGTIRDDEFCRTCGEAGHRQYACPNKMNTGQSKGYGFVKYSDVSQANAAIAAMNGHHLEGRVIAVRVAGKPPQTAPAVSAPPSYPPPDPTSGGYSSQSYMGAPPPPPPGSYAPVPWGQPPPYASYPPPPPGSGVYSPAPPAPGQAAPPPYGMQYPPPPPPPAAPIPPPGTAPSSDGAQNYPPGVTPPSSGSSTHPVATSVYASSGAPNAPSIYPPPPYSYSSYYPPPFQPPPPPPPPPASVDPSQSIATAPWLTHSVVVPPPPTSVDPSQSISTAPWLTHSAVPPPPPPLSSTTDQSTASYGADAEYDKFMSEMK

SEQ ID NO: 169488 - protein, 110 aa, Zea Mays
MKKDALNSHRRRRPPQSVGRKREKATPIRGRPSQAWCLPNPPATVPGAGRILATAVKAARQSNHTLLSWPPPAASQAELISLLCLLVQQHVHYITPKCSGFDRSLHFRCL

SEQ ID NO: 169489 - protein, 309 aa, Zea Mays
MLCLFCARCKRFRELGQSKVVLARASPRCLAVRAKAWSEEAHRFLQRCADAGSLEACYLLGMIRFYCLGIRGSGAALMAAAAVGGHREALYSLAVVQFNGSGGGKDDRDLRAGAALCARAASLGHVGALRELGHCLQDGYGVRRSVLDGRRLLIQANARELAAVAASPPPQLLGKAAPHPTRRHSCLLSDFGVPRRGRGAARGQPVPGGLVVRVAALGTAAAVAVGVERLLARGGRRRRAAAVLAGAVRAARDAAARVQAVLRVRPGELLLPRVPGAALEDGAQGGVHAHGPVARRGRRRRRRGAAAPR

SEQ ID NO: 169490 - protein, 53 aa, Zea Mays
MKQLRNCKYPMCLFKNFKHFLDTLPSHKYFISFPHQFIEQVLSAQYIIVSEQL

SEQ ID NO: 169491 - protein, 117 aa, Zea Mays
MFQLESKLLPFGAKILDFKDDCLRMFLKAPILTSDCEIYGQKFNCSIDSFISDHELLIEIDKINMEPKKVQIIPDDMSVDILIERMESSSLFSNLDMANSAMPTPVYNQCFETIIGE

SEQ ID NO: 169492 - protein, 321 aa, Zea Mays
MAEQGNQKVSGEISVTAETTFNDMIQLDVGIEMLESLISNLGPKALNHFDESSVLGLSDSTDSCRNRSIADKDYIYELELDHQIEKSTMELEILQHLQRDDEMFQLESKLLPFGAKILDFKDDCLRMFLKAPILTSDCEIYGQKFNCSIDSFISDHELLIEIDKINMEPKKVQIIPDDMSVDILIERMESSRDTVCSPTLIWLIQQCQHQSIINALRRSLVNDANSSRHCFEYLNKKEMIVAHLDRGIDVSIKMSSDWPLCSYGLKLISIRNAGDRPTNIASTILCKTKELANELEPQIRQHLLTLVDAVEDIIIRELRSR

SEQ ID NO: 169493 - protein, 223 aa, Zea Mays
MKVLFWGCQTQLIHAEIEALLTRTTYMRDDEMFQLESKLLPFGAKILDFKDDCLRMFLKAPILTSDCEIYGQKFNCSIDSFISDHELLIEIDKINMEPKKVQIIPDDMSVDILIERMESSRDTVCSPTLIWLIQQCQHQSIINALRRSLVNDANSSRHCFEYLNKKEMIVAHLDRGDRPTNIASTILCKTKELANELEPQIRQHLLTLVDAVEDIIIRELRSR

SEQ ID NO: 169494 - protein, 205 aa, Zea Mays
MAEAQALVPAQGPDEAPLDASAIHSRVEQLSLKRLEVEPEAEVAEDEVALGLDSTHKAAQDAMDEWDSATAAVSIDDLDAYLEQLRKDVAMAEQGNQKVSGEISVTAETTFNDMIQLDVGIEMLESLISNLGPKALNHFDESSVLGLSDSTDSCRNRSIADKDYIYELELDHQIEKSTMELEILQHLQRLYCSMSNVLQTISLHG

SEQ ID NO: 169495 - protein, 195 aa, Zea Mays
MTALTATSLPARAPAAVSVTRCPRQRQIDEKWKHDLYREDDEPASNPKDLRLKLQRRSFQQDFTSTRSSGVRDLREKLSGIMNPQPSNADPPKPKPKPVSEVVNISRRQIADEMHARQNKKPPKQTSSKKTSQPKAESPLDSFLSSLGLEKYSITFQAEEVDMAALRHMTDSDLKALGIPMGPRKKIILALESRA

SEQ ID NO: 169496 - protein, 74 aa, Zea Mays
MSTVPTDPPLHEQVHATREHTTPFRRSFARRVRATLAISPLPVRDCLFMYGIVGFKLTLSHIQGMWLVKIVLDH

SEQ ID NO: 169497 - protein, 88 aa, Zea Mays
MFYGMCKIRSSLVKLVLGFLELSVYFSILKVLLEGQLEFEKLELGTKNYGFFWRSFLLGYEYLVKIWGCLESICSESLVGPQNRVVNP

SEQ ID NO: 169498 - protein, 56 aa, Zea Mays
MFYVSQLKKCFRVLKHVIEIADVNLGPDLTYLEYHIKVLDLKDRVMKRPRSFGAQM

SEQ ID NO: 169499 - protein, 198 aa, Zea Mays
MELVVSSAYGSGHHSSGCVSPASRLHPFMLVSGARSAYSSLVPRPPCCSCSSSAPVEHRRLGMAHGHPVSTSSSSSIPCSLALAKGLSFIFCRVSTPMAASTHELAGRRSICSLLGLPGVLLPRLGAPASSFSLARFPARASPDADAASLTSSRHSIAAARHIANFPRHFSATTSSASASRARLVFGSSPRILRKKKL

SEQ ID NO: 169500 - protein, 84 aa, Zea Mays
MKGPCTPTCCTLLCASFFCFLLAGSEDEPPVIGSTSFGSEATPAWLLNEAISSKSGSEFTGGGRQCWGLVLKCYELRTRQHKKC

SEQ ID NO: 169501 - protein, 424 aa, Zea Mays
MLPEGPTQKAMFEFKIIAENISTRDLVQEFLAFKVFPSVKEWEMPKLKGEKKKGELVRLPYYFKFKKYFKTPCQEWLDTVEVMCNEILGNYSKKEDQLMTAAFGTRPKRRLNQVLDALGFEYPDYEDLNKGAGGQKRKRGTEALDEGDKEPVKKKISKKKKPSSPKQQISEAEETPASPSAAVVEKILKVMTESLPAKLSPLGPQLTKFFQKDKEPEKLRKTIKGKKQRIITVTEVIDKTPPRASAQKTQAAAEGADIEITPSEAAAAEVTSAEDLNLESTIEHIDQMLLDMAAEEAATAAEEGVTAASRKGKEIADEASENEAFAFKNLVGEHLTKAEIEELKEYAQSCGYKPGALLFGGVDDEKLECIRDQTGAKVISTLSRSIGFPKLEADISRYRRQHVVGSLFYSNFKVNDLSLNFYCF

SEQ ID NO: 169502 - protein, 487 aa, Zea Mays
MQCPKKMAQQQTNPNAPTRQGVLQPAAGNRNQAYNRGKVNHLEAEAIQDAPDVAVGMFSVESHPAKVLFDTGATHSFVTATRVELHNISVEAMMPPMRINSVGGKVQTDKICSNIMVEIRGIGFPSDLIVIDTPGIDVILGMNWLMKYEANVSCDKRTVTLKSPSGEEVVAELRMPKSAEGVCHQISVDSKEPNPLEAIKVVSDFPDVFPEELTGMPPERKDEFAIELIPGTAPISKRAYRVSGPELVELKKQIDEMLEKGYIRPSTSPWAAPVLFVEKKDGTKRMCIDYRALNEVTVKNKYPLPRTEDLFDQLRGASVFSKIHLRSGYHQLRIRPSDIPKTAFITKYGLYEFTVMSFGLTNASAFFMYLMNSVFMDYLDKFVVVFIDDILIYSQSEEDHVEHLKMVLQRLREHQLYAKLGKCEFWIHEVLFLGHIINQDELAVDPKKVADILNWKAPKDVRGIKSFIGMAGYYMRFIEGFSRLLGQ

SEQ ID NO: 169503 - protein, 274 aa, Zea Mays
MSRIVCLHGVPKKIVSDRGTQFTSHFWQQLQEALGTHLNFSSAYHPQTDGQTERTNQILEDMLRACALQDKSGWDKRLPYAEFSYNNSYQASLKMSPFQALYGRSCRTPLHWDQPGERQVFGPDILLEAEENIKMVRENLKIAQSRQRSYADRRRRELSFEVGDYVYLKVSPIRGVRRFGVKGKLAPRYVGPYQIQAKRGEVAYQLNLPESLSAVHNVFHVSQLKKCLRVPEEQLPVEGLEVQEDLTYIEKPTQILEFADRVTRRNTIRMCKVR

SEQ ID NO: 169504 - protein, 87 aa, Zea Mays
MRLPAQGRRDLPIRSSPTGGNGSFCRPSRLVCLEPRSGCCRGTGRALAPPAPLSPTPRTSPSLLDATEVRSLFHEHPIDGLQSLALG

SEQ ID NO: 169505 - protein, 194 aa, Zea Mays
MARITEQMGRTSLMAAAHLLPTPSTRAPSISWGRSAFMVAAIKGIRSSALGSARIKGTAGGSSRGRKERLGDPRGWKERLRRGCGMRAWGCEMRSDELVCGIWEILSAGSKSEHLCHASGWTEEILYPCADLGSNFPCAGVAAAIGGGCCGRGEEEAGGSRGVCREGAGCAVGAAAACGLGRTCAMQVVGRQHY

SEQ ID NO: 169506 - protein, 72 aa, Zea Mays
MRVLTLCAAMASSTARVFAVMLRREGGGGGGRGTDIATALYTIWFSIQRYQLAIYYLELSTLKSCLQSQTIF

SEQ ID NO: 169507 - protein, 449 aa, Zea Mays
MMPGMDEPLLGNGLKTSGKRESLVVAEVRKQMYLAGPLIAAWILQNIVQMISIMFVGHLGELALSSASIATSFAGVTGFSLLSGMASSLDTLCGQSFGAKQYYLLGIYKQRAILVLTLVSLVVAIIWSYTGQILLLFGQDPEIAAGAGSYIRWMIPALFVYGPLQCHVRFLQTQNIVLPVMLSSGATALNHLLVCWLLVYKIACRNTWRGFSKEAFHDITSFLRLGIPSALMVCLEWWSFELLVLLSGLLPNPKLETSVLSISLNTGSLAFMIPFGLSAAISTRVSNELGAGRPHAAHLATRVVMVLAIVVGVLIGLAMILVRNIWGYAYSNEKEVVKYISKMMPILAVSFLFDCVQCVLSGVARGCGWQKIGACVNLGAYYLIGIPAAFCFAFMYHLGGMGLWLGIICALVIQMLLLLTITLCSNWEKEALKAKDRVFSTSVPADMMT

SEQ ID NO: 169508 - protein, 448 aa, Zea Mays
MYLAGPLIAAWILQNIVQMISIMFVGHLGELALSSASIATSFAGVTGFSLLSGMASSLDTLCGQSFGAKQYYLLGIYKQRAILVLTLVSLVVAIIWSYTGQILLLFGQDPEIAAGAGSYIRWMIPALFVYGPLQCHVRFLQTQNIVLPVMLSSGATALNHLLVCWLLVYKIGMGNKGAALANAISYFTNVSILAIYVRLAPACRNTWRGFSKEAFHDITSFLRLGIPSALMVCLEWWSFELLVLLSGLLPNPKLETSVLSISLNTGSLAFMIPFGLSAAISTRVSNELGAGRPHAAHLATRVVMVLAIVVGVLIGLAMILVRNIWGYAYSNEKEVVKYISKMMPILAVSFLFDCVQCVLSGVARGCGWQKIGACVNLGAYYLIGIPAAFCFAFMYHLGGMGLWLGIICALVIQMLLLLTITLCSNWEKEALKAKDRVFSTSVPADMMT

SEQ ID NO: 169509 - protein, 128 aa, Zea Mays
MNRIELQPDWYAQEAPCEAHDPRAGDQPQSGGHPRRRVLVAQVRPETHQGVALPTHGARLPRPEACGARPRRPVDADRHLRGRAPPQPRLRPGPAAAVARAAAGAAQPLIWLPACSVLSITSSCCHKL

SEQ ID NO: 169510 - protein, 317 aa, Zea Mays
MAPAPEPTAAAAGRKRKKPHGPSKIIAKKSADPKRAYAKKKKEKHKQKEKKSRLKPAEPDQIAATIGDGVAGATVLLSALMQPSRQLEFLLRSFERASKMRLSPLELDSYSEGCMVQLAEGAAQDVESFGDHVKGVFGSSWKEELCEGNHIDGEIAVGSPTLLVISSSALRSLDLLRGLKMFTKECRPVKLFAKHLKVEEQVAMLNARVNIACGTPSRIKKLIDMEALSLSRLKLVVLDMQKDAKSFTLFTLPQVSNEFWDLYKGYLDPKIREGNMKICFYGAVSERDITKTFSLHIQVEQRNTIYLRIDNELHEDQ

SEQ ID NO: 169511 - protein, 206 aa, Zea Mays
MAPAPEPTAAAAGRKRKKPHGPSKIIAKKSADPKRAYAKKKKEKHKQKEKKSRLKPAEPDQIAATIGDGVAGATVLLSALMQPSRQLEFLLRSFERASKMRLSPLELDSYSEGCMVQLAEGAAQDVESFGDHVKGVFGSSWKEELCEGNHIDGEIAVGSPTLLVISSSALRSLDLLRGLKMFTKECRPVKLFAKHLKVEEQDQKTN

SEQ ID NO: 169512 - protein, 197 aa, Zea Mays
MAPAPEPTAAAAGRKRKKPHGPSKIIAKKSADPKRAYAKKKKEKHKQKEKKSRLKPAEPDQIAATIGDGVAGATVLLSALMQPSRQLEFLLRSFERASKMRLSPLELDSYSEGCMVQLAEGAAQDVESFGDHVKGVFGSSWKEELCEGNHIDGEIAVGSPTLLVISSSALRSLDLLRMPTSKALCQTLESGGAGGDA

SEQ ID NO: 169513 - protein, 124 aa, Zea Mays
MAPAPEPTAAAAGRKRKKPHGPSKIIAKKSADPKRAYAKKKKEKHKQKEKKSRLKPAEPDQIAATIGDGVAGATVLLSALMQPSRQLEFLLRSFERASKMRLSPLELDSYSACGGSSPGRRELR

SEQ ID NO: 169514 - protein, 237 aa, Zea Mays
MAPAPEPTAAAAGRKRKKPHGPSKIIAKKSADPKRAYAKKKKEKHKQKEKKSRLKPAEPDQIAATIGDGVAGATVLLSALMQPSRQLEFLLRSFERASKMRLSPLELDSYSEGCMVQLAEGAAQDVESFGDHVKGVFGSSWKEELCEGNHIDGEIAVGSPTLLVISSSALRSLDLLRGLKMFTKECRPVKLFAKHLKVEEQVAMLNARVNIACGTPSRLAATLTSSLPMQYPSEESS

SEQ ID NO: 169515 - protein, 242 aa, Zea Mays
MAPAPEPTAAAAGRKRKKPHGPSKIIAKKSADPKRAYAKKKKEKHKQKEKKSRLKPAEPDQIAATIGDGVAGATVLLSALMQPSRQLEFLLRSFERASKMRLSPLELDSYSEGCMVQLAEGAAQDVESFGDHVKGVFGSSWKEELCEGNHIDGEIAVGSPTLLVISSSALRSLDLLRGLKMFTKECRPVKLFAKHLKVEEQVAMLNARVNIACGTPSRRSMFHFIKKEYPKFQHHSRRTQSI

SEQ ID NO: 169516 - protein, 446 aa, Zea Mays
MRRPLASAALRLRFFSSTSPARLLSPCPFLLSRRDDDGGREASSSPLPPLPPSGSAFSPRPLLFSASAAAGLFSLHGGWWRQALPPAASRPLGSVSDAAPVRLTISRSYSLRVAKGKKKAHFDDEHSHRAVNMALWCNFLVFSLKFGVWISTSSHVMLAELVHSVADFANQALLAYGLSSSRRAPDALHPYGYSKERFVWSLISAVGIFCLGSGATIVHGVQNLWNSHAVRKGAEAEGMSIWDYIWRGHDPTSVAVMTEDGAAVTGLAIAAASLVAVQMTGNAMYDPIGSIIVGNLLGMVAIFLIQRNRHALIGRAIDDHDMQRVLEFLKSDPVVDALYDCKSEVIGPGFFRFKAEIDFNGVVLVQNYLERTGRGSWAKQFREAAMSKDDTELLRVMANYGEDVVEALGYEVDRLESEIQKLVPGIKHVDIEAHNPEGLALRAEVL

SEQ ID NO: 169517 - protein, 408 aa, Zea Mays
MRRPLASAALRLRFFSSTSPARLLSPCPFLLSRRDDDGGREASSSPLPPLPPSGSAFSPRPLLFSASAAAGLFSLHGGWWRQALPPAASRPLGSVSDAAPVRLTISRSYSLRVAKGKKKAHFDDEHSHRAVNMALWCNFLVFSLKFGVWISTSSHVMLAELVHSVADFANQALLAYGLSSSRRAPDALHPYGYSKERFVWSLISAVGIFCLGSGATIVHGVQNLWNSHPPENIHWAALVIGGSFLIEGASLLVAIKAVRKGAEAEGMSIWDYIWRGHDPTSVAVMTEDGAAVTGLAIAAASLVAVQMTGNAMYDPIGSIIVGNLLGMVAIFLIQRNRHALIGRAIDDHDMQRVLEFLKSDPVVDALYDCKSEISMELFWYKIIWKGLDVGVGQNSSGKLQCPRMIRNC

SEQ ID NO: 169518 - protein, 135 aa, Zea Mays
MRRPLASAALRLRFFSSTSPARLLSPCPFLLSRRDDDGGREASSSPLPPLPPSGSAFSPRPLLFSASAAAGLFSLHGGWWRQALPPAASRPLGSVSDAAPVRLTISRSYSLRVAKGKKKAHFDDEHRCQNIAYPA

SEQ ID NO: 169519 - protein, 307 aa, Zea Mays
MEADSMVAMGCGGFYWQSPPRFLLEPLDLADIVDSMYVPTNEADEPVSGLCSSNRPAEDYSSSAEGANSCSAAVVPSPPPPPGVTTTTTRNMDMERTRRRKLNERLYALRSVVPNITKMDKASIVRDAIAHIEHLQEQERRLLAEISVLQSSDDGTAAAAAVKTEDAAATGGAAYDVDSVPWRKKPRAVPLPSVYFTDNPTSSISSSPPVRILEQVQVSQAGERVAVVSLWCSRGRDAVGKICLALEPLRLRVVTATITARGDTVFHTLFVETGETGGARLKEAILAALARLNVLANADQVVHELLG

SEQ ID NO: 169520 - protein, 306 aa, Zea Mays
MEADSMVAMGCGGFYWQSPPRFLLEPLDLADIVDSMYVPTNEADEPVSGLCSSNRPAEDYSSSAEGANSCSAAVVPSPPPPPGVTTTTTRNMDMERTRRRKLNERLYALRSVVPNITKMDKASIVRDAIAHIEHLQEQERRLLAEISVLQSSDDGTAAAAAVKTEDAAATGGAAYDVDSVPWRKKPRAVPLPSVYFTDNPTSSISSSPPVRILEVQVSQAGERVAVVSLWCSRGRDAVGKICLALEPLRLRVVTATITARGDTVFHTLFVETGETGGARLKEAILAALARLNVLANADQVVHELLG

SEQ ID NO: 169521 - protein, 282 aa, Zea Mays
MVSWCVRAGSSMYVPTNEADEPVSGLCSSNRPAEDYSSSAEGANSCSAAVVPSPPPPPGVTTTTTRNMDMERTRRRKLNERLYALRSVVPNITKMDKASIVRDAIAHIEHLQEQERRLLAEISVLQSSDDGTAAAAAVKTEDAAATGGAAYDVDSVPWRKKPRAVPLPSVYFTDNPTSSISSSPPVRILEVQVSQAGERVAVVSLWCSRGRDAVGKICLALEPLRLRVVTATITARGDTVFHTLFVETGETGGARLKEAILAALARLNVLANADQVVHELLG

SEQ ID NO: 169522 - protein, 275 aa, Zea Mays
MEADSMVAMGCGGFYWQSPPRFLLEPLDLADIVDSSMYVPTNEADEPVSGLCSSNRPAEDYSSSAEGANSCSAAVVPSPPPPPGVTTTTTRNMDMERTRRRKLNERLYALRSVVPNITKMDKASIVRDAIAHIEHLQEQERRLLAEISVLQSSDDGTAAAAAVKTEDAAATGGAAYDVDSVPWRKKPRAVPLPSVYFTDNPTSSISSSPPVRILEVQVSQAGERVAVVSLWCSRGRDAVGKICLALEPLRLRVVTATITARGDTVFHTLFVELLN

SEQ ID NO: 169523 - protein, 141 aa, Zea Mays
MIVLHEYPLSMVDHVGFRRFVGALQPLFKIGTRNMIRSDIMKHYEVEKKKAIEYMAGIQSRVAVTTDLWTSDNQKRGYMAITAHFIDESWTLRNIIMRFIYVPAPHTADVIGEELYESLVEWNLDEKISSVTLDNCTTNDA

SEQ ID NO: 169524 - protein, 150 aa, Zea Mays
MIVLHEYPLSMVDHVGFRRFVGALQPLFKIGTRNMIRSDIMKHYEVEKKKAIEYMAGIQSRVAVTTDLWTSDNQKRGYMAITAHFIDESWTLRNIIMRFIYVPAPHTADVIGEELYESLVEWNLDEKISSVTLDNCTTNDAKANKHGAQI

SEQ ID NO: 169525 - protein, 149 aa, Zea Mays
MIVLHEYPLSMVDHVGFRRFVGALQPLFKIGTRNMIRSDIMKHYEVEKKKAIEYMAGIQSRVAVTTDLWTSDNQKRGYMAITAHFIDESWTLRNIIMRFIYVPAPHTADVIGEELYESLVEWNLDEKISSVTLDNCTTNDAANKHGAQI

SEQ ID NO: 169526 - protein, 196 aa, Zea Mays
MEPLPIPHPPAPPPALTSALAHLRSLLSAASSALAALPSPLQPHPITPIACIPSPQSTTTKPPLPPPVTAINLPLPAAPAPYSDCPAVVRLRPSPTSTAISLPAFLAAVCADFSSSTTGPSPSHPPRILPSELSLLRRELDSWATGGHHLPGSYSYAVARVGASFCSDVMPRWEAELRQWVLENSPRRWCCKCRRE

SEQ ID NO: 169527 - protein, 428 aa, Zea Mays
MEPLPIPHPPAPPPALTSALAHLRSLLSAASSALAALPSPLQPHPITPIACIPSPQSTTTKPPLPPPVTAINLPLPAAPAPYSDCPAVVRLRPSPTSTAISLPAFLAAVCADFSSSTTGPSPSHPPRILPSELSLLRRELDSWATGGHHLPGSYSYAVARVGASFCSDVMPRWEAELRQWVLENSPRYGVKVNVTDADHILVLLCLLLKAMALEARYLLEGMQNVDNEGLGFDPRAMRFECPRLVEGVSWLGAQLGVLYGESNGKLFMLASVKEAVLQMAYCLALCAGDGAASVGGSDAGDVVAGPVFLSQVAASIVALHERFYLEKTKALQAQRPSKYQLLLEYSQALERGILERSNRPNYRAVLEYDGILSRRVENKESARAKTKEELLAEERDYKRRRTSYRGKKVNRNPTETGRWHWLSCGSSC

SEQ ID NO: 169528 - protein, 225 aa, Zea Mays
MWTPFLQRKFLQAVELLGEDASPKKIQLLMNVNSVSRKQISAHLQKHRKKVEKELRNSNANNSSHGIGGASNSRPSRIFEISHGRFQYNRPDVQPEHRSDESVSVEQTETIEETQSNRLYEAMRRALQLGSVFEEPQLPNDPPAGKDAREVEEVEMTMRDGNYRDAGTDAFGDKNEASGTHSSDGNNAKVKSKDDSADKLVSCHDELRPVVTLVTYSDSEDGETL

SEQ ID NO: 169529 - protein, 78 aa, Zea Mays
MSLRPSEREQMRKGNYKQTVDAEESRHRREGQMMDMRKAKCEESLQKKRRDGFPASAAGMPPMVHSTALQQKSPQSKR

SEQ ID NO: 169530 - protein, 156 aa, Zea Mays
MSLRPSEREQMRKGNYKQTVDAEESRHRREGQMMDMRKAKCEESLQKKRRDGFPASAAGMPPMVHSTALQQKLEATTQFRKLLSIVPPIEEVISTGVVPRFIEFLTREDHPQLQFEAAWALTNIASGTSENTKVVVESGAVPIFVKLLNSLKRGCS

SEQ ID NO: 169531 - protein, 367 aa, Zea Mays
MMGNPVDAEAPILSCFARRLDIEVVTMSLRRLGPTTVLLCLPSVEASTRAFGDGKPVPFLHELADMVCAGISRTSFAGVPHDDATLPVQTSQLDDPSVVSPTLESFEVELSPLTTDDLPLTPSPSDVENLCQFSCVENEVDKDFLPKSTHLQTLPVGIPEPTHPDLIVYTRRRFHKKKAIGGNEDGGIVPDTALATVEASGGHSLKVIDGCTDMVDIHHQAKTINIAQEDLETSQRSDATSLATAQTEFFSKLAKKVAGILSNPAELSTQRCKQAPAATPHHSRRNARVGVEFDKQELYLRSTKMAMKALKVIGEAEGVTQQAKEDYTEVFSENLPMAHVEALATLFGWTVPEELKMGLSSAVVSAC

SEQ ID NO: 169532 - protein, 175 aa, Zea Mays
MPVEDRAALLTQVAGLSEEQARDVEFVLEMIPSIEVDMKCETEGEEGIQEGDVVTMYAWVSLQRRNGLTAALPHCPNFLFHKEENFWLLLANVASNDVWLSQKVSFMDEATAITAASKAIQETQEALGASAKEIGNAVREAVDRVKKGSRLVMGKFQAPAEGTHNLTSFVCATLG

SEQ ID NO: 169533 - protein, 372 aa, Zea Mays
MAAAEENSSLFLIFILTMIALPLVPYTILRLCRAASEKAKTIHCRCSGCHRSGKYRKSIYKRISNFSTCSNLTILLLWIVMIFLVYYIKLVSREVQVFEPFSILGLEAGASESDIKKSYRRLSIQYHPDKNPDPEAHKYFIEYISKAYQALTDPISRENYEKYGHPDGRQGLQMGIALPKFLLNIDGASGGIMLLGIVGFCILLPLMIAVIYLSRSSKYTGNYVMHQTLSTYYYFMKPSLAPSKVIDVFIKAAEYMEMPVRRSDDEPLQKLFVAVRSELNLDLKNIKTEQAKFWKQHPSLVKMELLIQAHLTCESFALTPALLKDYRHMLELAPRLLEELVKFYQGIPMVLDGSGLHSVLLSFLKILSRLYH

SEQ ID NO: 169534 - protein, 369 aa, Zea Mays
MHQTLSTYYYFMKPSLAPSKVIDVFIKAAEYMEMPVRRSDDEPLQKLFVAVRSELNLDLKNIKTEQAKFWKQHPSLVKMELLIQAHLTCESFALTPALLKDYRHMLELAPRLLEELVKIAVLPRNPHGFGWLRPALSVIELSQNIIQAVPLSARKASGANSEGIAPFLQLPHFTEATVKKIARKKIRAFQELCDMPVEDRAALLTQVAGLSEEQARDVEFVLEMIPSIEVDMKCETEGEEGIQEGDVVTMYAWVSLQRRNGLTAALPHCPNFLFHKEENFWLLLANVASNDVWLSQKVSFMDEATAITAASKAIQETQEALGASAKEIGNAVREAVDRVKKGSRLVMGKFQAPAEGTHNLTSFVCATLG

SEQ ID NO: 169535 - protein, 374 aa, Zea Mays
MAAAEENSSLFLIFILTMIALPLVPYTILRLCRAASEKAKTIHCRCSGCHRSGKYRKSIYKRISNFSTCSNLTILLLWIVMIFLVYYIKLVSREVQVFEPFSILGLEAGASESDIKKSYRRLSIQYHPDKNPDPEAHKYFIEYISKAYQALTDPISRENYEKYGHPDGRQGLQMGIALPKFLLNIDGASGGIMLLGIVGFCILLPLMIAVIYLSRSSKYTGNYVMHQTLSTYYYFMKPSLAPSKVIDVFIKAAEYMEMPVRRSDDEPLQKLFVAVRSELNLDLKNIKTEQAKFWKQHPSLVKMELLIQAHLTCESFALTPALLKDYRHMLELAPRLLEELVKVLFYQGIPMVLDGSGLHSVLLSFLKILSRLYH

SEQ ID NO: 169536 - protein, 157 aa, Zea Mays
MSSMLLSGCSGSLLQLALLHRLDGYSVHADSDPEAVLLRLGYVKPEVISWTPRIIVFHNFLSSEECDYLMAIARPRLQISTVVDVATGKGVKSDVRTSSGMFVNSEERKSPVVQAIEKRISVFSQIPKENGELIQVLRYEASQYYRPHHDYFSDTVS

SEQ ID NO: 169537 - protein, 208 aa, Zea Mays
MSSMLLSGCSGSLLQLALLHRLDGYSVHADSDPEAVLLRLGYVKPEVISWTPRIIVFHNFLSSEECDYLMAIARPRLQISTVVDVATGKGVKSDVRTSSGMFVNSEERKSPVVQAIEKRISVFSQIPKENGELIQVLRYEASQYYRPHHDYFSDTFNLKRGGQRVATMLMYLTDGVVGGETHFPQLVSVPGRRWRVQLWRKRGQRIVC

SEQ ID NO: 169538 - protein, 128 aa, Zea Mays
MVRDEMDEAEDDFLIRAGLVGTGRVGPTPGVTPARCLIIAMHTATHGFRRVRPVQSLLTLRRSITGLARSLILPFDCPFHSRLFGFQSIDVFRRLGSTANTWDSSHGLVWNPISIFSMKFSLFSLEKI

SEQ ID NO: 169539 - protein, 194 aa, Zea Mays
MAIQVKPEVISWTPRIIVFHNFLSSEECDYLMAIARPRLQISTVVDVATGKGVKSDVRTSSGMFVNSEERKSPVVQAIEKRISVFSQIPKENGELIQVLRYEASQYYRPHHDYFSDTFNLKRGGQRVATMLMYLTDGVVGGETHFPQEMESAAVEETWSKDCVLSQTKGTLFSSGAWDWMVTQTQTVSTAGALF

SEQ ID NO: 169540 - protein, 220 aa, Zea Mays
MARWRARRLLPLATFVTLGMILGSLLQLALLHRLDGYSVHADSDPEAVLLRLGYVKPEVISWTPRIIVFHNFLSSEECDYLMAIARPRLQISTVVDVATGKGVKSDVRTSSGMFVNSEERKSPVVQAIEKRISVFSQIPKENGELIQVLRYEASQYYRPHHDYFSDTFNLKRGGQRVATMLMYLTDGVVGGETHFPQLVSVPGRRWRVQLWRKRGQRIVC

SEQ ID NO: 169541 - protein, 78 aa, Zea Mays
MLHVLPTQVSKSFSYIVCADSMNSSCSFRTGYVELVGFCSLQTDCSSGHSDSPQRVCIWSCPVSLADTDVRCASRLQQ

SEQ ID NO: 169542 - protein, 99 aa, Zea Mays
MDKLIVSKPLSIGYLYSVAELKSGAYSKDTTNISLHATSTFAASKISVIHDNALPIALLGTVEYELPHVPPWFFHAGSQKLYGVLAGIIRLVGLSTVSG

SEQ ID NO: 169543 - protein, 327 aa, Zea Mays
MISGAAGSSLSIEQAILRLIEALMIVLNDKENLSALGKHKNENHSGGSESIEHILQMLRQLPTKNISDKISHDEITNDSISNVNNSFADRKALHVKRTKNGLSKQLLAIHSSEKVRNAVVSGVKGLLSSCSSTLKRTKMLLLECLCVLACDDAAAVSEAAQDALDHLFNQGHNLVTENEISDTFTRLVERLPQVVLGSEETTTLSHARMLLALTFYAGHSSQFSGSMDKLIVSKPLSIGYLYSVAELKSGAYSKDTTNISLHATSTFAASKISVIHDNALPIALLGTVEYELPHVPPWFFHAGSQKLYGVLAGIIRLVGLSTVSGTL

SEQ ID NO: 169544 - protein, 229 aa, Zea Mays
MPSPPCASYTKLGQCCARQLQLRVADTLFNSSNTRSAFKVGKLANLLLCLVSTVSGKLDFAPNPMQMIFHYFFLQEFKLIESVELAPLRKLIDPLTGVQIDRKHRSGSSQGADRSSDRLIEALMIVLNDKENLSALGKHKNENHSGGSESIEHILQMLRQLPTKNISDKISHDEITNDSISNVNNSFADRKALHVKRTKNGLSKQLVMLINCCVLHSHMCVFLVSYSLK

SEQ ID NO: 169545 - protein, 126 aa, Zea Mays
MPSPPCASYTKLGQCCARQLQLRVADTLFNSSNTRSAFKVGKLANLLLCLVSTVSGKLDFAPNPMQMIFHYFFLQEFKLIESVELAPLRKLIDPLTGVQIDRKHRSGSSQGADRSSDRSVLGSLRL

SEQ ID NO: 169546 - protein, 129 aa, Zea Mays
MISGAAGSSLSIEQAILRLIEALMIVLNDKENLSALGKHKNENHSGGSESIEHILQMLRQLPTKNISDKISHDEITNDSISNVNNSFADRKALHVKRTKNGLSKQLVMLINCCVLHSHMCVFLVSYSLK

SEQ ID NO: 169547 - protein, 196 aa, Zea Mays
MIVLNDKENLSALGKHKNENHSGGSESIEHILQMLRQLPTKNISDKISHDEITNDSISNVNNSFADRKALHVKRTKNGLSKQLLAIHSSEKVRNAVVSGVKGLLSSCSSTLKRTKMLLLECLCVLACDDAAAVSEAAQDALDHLFNQGHNLVTENEISDTFTRLVERLPQVVLGSEETTTLSHARMLLALTFYAGP

SEQ ID NO: 169548 - protein, 1405 aa, Zea Mays
MNEIVKLADELLPSLPVGTISLPVYSGVHMKGCSVKKSTSSKQGEHGSTANELSGREKLLRDQPELLQQFGMDLLPTMTQVYGSSVSGPIRHRCLSVIGKLMYYSSAEMIQSLLSTTNISSFLAGILAWKDPQVLIPALQIAEVLMEKLPEIFLKMFVREGVVHAVESLICPELSGQVTPHVDSITSSHNRRNRRRNNAVNTGNNLPDGPKGSNSMIANSPPSMAEVPNNSLRALVSNHAKSFKDKYFPSEPGSSDIAVTDDLLKLRALCAKLNTTADTIKTKAKGKSKVVSDNSFDVLCNIEEQLDDIIAEMLSELSKGDGVSTFEFIGSGVVTALLTYLSCGTFGREKVSEANIPNLRHQAVRRYKTFISFALPNDKDGNKTPMAFLVHKLQSALSSLERFPVVLSHSGRASTLGGSRLTTGLGSLSQPIKLRLCRAPGEKSLKDFSSNVVLIDSLASLAAVEDFLWPRVQRTEPVLKPPMSSANNSGSGAASSTACAPSIPSETQSVRRTSLRSKSSAATSGAIKKDYQEGSINTSKGKGKAVLKLSLDEPKGPHTRNAARRKATSEKDVELKPSHGHITSEDEDLDASPVEIDDALILDDDDEDVPDDEDDDHEAVLRGSLPSCVPERVHDVKLGDADDSSVASLANDNQAQPSSGSSTKNTSSRGLDTAEFRSPATFGSRGAMSFAAAAMAGLTPVGGRGIRGSRDRNGLPLGARATEHYNKLIFTAAGKQLNKHLTVYQAVQRQVVHAEDDEDRFGGSDLPDDGNHFWDDIRGDVFTITYQKADNTAEKGSVGGSASVPKSSKSDSCRTLSEKQCTSLLDSILQGELPCDLEKSNQTYNILSLLHVLEGLNQLSPRLRLQSACDDFAEGKVATLNGLYDVGAKVPSKEFINSKMTPKLARQIQDVLALCSGSLPSWCYQLTKACPFLFPFETRRQYFYSTAFGLSRALHRLQQQPGNDNNTAFEREVRIGRLQRQKVRVSRNRILDSAAKVMEMFSNQKAVLEVEYFGEVGTGLGPTLEFYTLLSRELQRVDLGLWRSHSSDNSGMQIDANADDLIRSKNHESESLTESRNIVQSPLGLFPQPWPPTAAASEGSKFFKVVEYFRLVGRVMAKALQDGRLLDLPLSTAFYKLLLGQELDLYDILSFDTEFGKTLQELQILVARKQFLDSCSSESQKIDLCFRGAPVEDLYLDFTLPGYPEYVLKEGGENAEVNICNLEEYISLVVDATVKTGIMRQVEAFKAGFNQVFDISSLQIFSPQELDYLICGRCELWEPETLPEHIKFDHGYTSKSPAIINFLEIMAEFTPEQQHAFCQFVTGAPRLPPGGLAALNPKLTIVRKHSSVANNNSNATGATESADDDLPSVMTCANYLKLPPYSTKAIMLKKLLYAINEGQGSFDLS

SEQ ID NO: 169549 - protein, 1592 aa, Zea Mays
MDLAEQSLQALKKISLEHPTACLRAGALMAVLSYLDFFSTGVQRVALSTAANMCRKLPSDASDFVMEAVPLLTNLLNYHDSKVLEHASVCLTRIAESFSPFPEKLDELCSHGLVAQAASLVSVSNSAGQASLSTSTYTGVIRLLSICASGSPLAAKTLLLLGISGILKDILSGSGLVAGTTVSPALTRPADQMNEIVKLADELLPSLPVGTISLPVYSGVHMKGCSVKKSTSSKQGEHGSTANELSGREKLLRDQPELLQQFGMDLLPTMTQVYGSSVSGPIRHRCLSVIGKLMYYSSAEMIQSLLSTTNISSFLAGILAWKDPQVLIPALQIAEVLMEKLPEIFLKMFVREGVVHAVESLICPELSGQVTPHVDSITSSHNRRNRRRNNAVNTGNNLPDGPKGSNSMIANSPPSMAEVPNNSLRALVSNHAKSFKDKYFPSEPGSSDIAVTDDLLKLRALCAKLNTTADTIKTKAKGKSKVVSDNSFDVLCNIEEQLDDIIAEMLSELSKGDGVSTFEFIGSGVVTALLTYLSCGTFGREKVSEANIPNLRHQAVRRYKTFISFALPNDKDGNKTPMAFLVHKLQSALSSLERFPVVLSHSGRASTLGGSRLTTGLGSLSQPIKLRLCRAPGEKSLKDFSSNVVLIDSLASLAAVEDFLWPRVQRTEPVLKPPMSSANNSGSGAASSTACAPSIPSETQSVRRTSLRSKSSAATSGAIKKDYQEGSINTSKGKGKAVLKLSLDEPKGPHTRNAARRKATSEKDVELKPSHGHITSEDEDLDASPVEIDDALILDDDDEDVPDDEDDDHEAVLRGSLPSCVPERVHDVKLGDADDSSVASLANDNQAQPSSGSSTKNTSSRGLDTAEFRSPATFGSRGAMSFAAAAMAGLTPVGGRGIRGSRDRNGLPLGARATEHYNKLIFTAAGKQLNKHLTVYQAVQRQVVHAEDDEDRFGGSDLPDDGNHFWDDIRGDVFTITYQKADNTAEKGSVGGSASVPKSSKSDSCRTLSEKQCTSLLDSILQGELPCDLEKSNQTYNILSLLHVLEGLNQLSPRLRLQSACDDFAEGKVATLNGLYDVGAKVPSKEFINSKMTPKLARQIQDVLALCSGSLPSWCYQLTKACPFLFPFETRRQYFYSTAFGLSRALHRLQQQPGNDNNTAFEREVRIGRLQRQKVRVSRNRILDSAAKVMEMFSNQKAVLEVEYFGEVGTGLGPTLEFYTLLSRELQRVDLGLWRSHSSDNSGMQIDANADDLIRSKNHESESLTESRNIVQSPLGLFPQPWPPTAAASEGSKFFKVVEYFRLVGRVMAKALQDGRLLDLPLSTAFYKLLLGQELDLYDILSFDTEFGKTLQELQILVARKQFLDSCSSESQKIDLCFRGAPVEDLYLDFTLPGYPEYVLKEGGENAEVNICNLEEYISLVVDATVKTGIMRQVEAFKVFDISSLQIFSPQELDYLICGRCELWEPETLPEHIKFDHGYTSKSPAIINFLEIMAEFTPEQQHAFCQFVTGAPRLPPGGLAALNPKLTIVRKHSSVANNNSNATGATESADDDLPSVMTCANYLKLPPYSTKAIMLKKLLYAINEGQGSFDLS

SEQ ID NO: 169550 - protein, 855 aa, Zea Mays
MKGGRLHRPEPPQTHLAMAAAAAAPPIPAPNPTDDWVDGSWTVDCSCGVTFDDGEEMVSCDECSVWVHTRCARYVRGVHTSFSCHKCRRSKRVPSSADEAEVAELLAELPTHRPPPLYRRWAEVPLPARVHVHGLPGGGDGALFRGAPAFSAALWRCTGYVPKRFGFRYCEFPSWADDNDGADALFALAREKPREMTDDVLISTEPKKEKHYVRSLSCRGKKIDSNQQAMTPLTKAKKREPDSWKNECQQSEGCGIQDSICDDGHAETNMVSSDLLTAKTKKKMEESLEPSGENNNCEQVEISSKDGKKVPMKLEVSSGVQTTSSIVEQEVHSGFVGVEVTMYKQQPEEDHIVCSRPDITSSGPIKVQDIQGLPKQPNQASNLQVVAGVPDLLIGQPKPQTIKTEPSSQENKAAHCVDLVSDDHESNKQGLGDAAVLSIVQKDSSNLKYGSVSHEHLKSEAQNPRHTVAENPNSTLGSAKVCTSFSGSVSTPPELSHSLASKEPSSGNSDCSKKEELLSPTVSKHDPVKFSEDSSQEVTRYSEKVQLKDSQPSAPKSSQASRIHLSTVKHRLPVSKEQSQKIALTGGTSARSFHGEVPSLQSRNKAAACSSSQKKDKIYQRIINVTQDSSNNSAPTELRASDSAAPLSDEQLALLLHQQLNSSPRVPRVPRCHQAAGAQMLHSTGSSVFSKRYSSHGGRDHAAVIKKRNREDSLKDSEDTKRTEKRHRVSSTEHAPVKNSCRSAENIASEQKIRGICPTGANAGLSKDDLMDTIVSHNLPGLIDEIVSKDRNITYVELCDAIHQHFRDSRKSNGGDSLYRSYADAIKGCLRKRREWAHLFDQASKANRGKQLIVT

SEQ ID NO: 169551 - protein, 845 aa, Zea Mays
MKGGRLHRPEPPQTHLAMAAAAAAPPIPAPNPTDDWVDGSWTVDCSCGVTFDDGEEMVSCDECSVWVHTRCARYVRGVHTSFSCHKCRRSKRVPSSADEAEVAELLAELPTHRPPPLYRRWAEVPLPARVHVHGLPGGGDGALFRGAPAFSAALWRCTGYVPKRFGFRYCEFPSWADDNDGADALFALAREKPREMTDDVLISTEPKKEKHYVRSLSCRGKKIDSNQQAMTPLTKAKKREPDSWKNECQQSEGCGIQDSICDDGHAETNMVSSDLLTAKTKKKMEESLEPSGENNNCEQVEISSKDGKKVPMKLEVSSGVQTTSSIVEQEVHSGFVGVEVTMYKQQPEEDHIVCSRPDITSSGPIKVQDIQGLPKQPNQASNLQVVAGVPDLLIGQPKPQTIKTEPSSQENKAAHCVDLVSDDHESNKQGLGDAAVLSIVQKDSSNLKYGSVSHEHLKSEAQNPRHTVAENPNSTLGSAKVCTSFSGSVSTPPELSHSLASKEPSSGNSDCSKKEELLSPTVSKHDPVKFSEDSSQEVTRYSEKVQLKDSQPSAPKSSQASRIHLSTVKHRLPVSKEQSQKIALTGGTSARSFHGEVPSLQSRNKAAACSSSQKKDKIYQRIINVTQDSSNNSAPTELRASDSAAPLSDEQLALLLHQQLNSSPRVPRVPRCHQAAGAQMLHSTGSSVFSKRYSSHGGRDHAAVIKKRNREDSLKDSEDTKRTEKRHRVSSTEHAPVKNSCRSAENIASEQKIRGICPTGANAGLSKDDLMDTIVSHNLPGLIDEIVSKDRNITYVELCDAIHQHFRDSRKSNGGDSLYRSYADAIKGCLRKRREWAHLFDQASK

SEQ ID NO: 169552 - protein, 227 aa, Zea Mays
MAHAAAAAAVPLRRPLLFLKEARLLSTLATPLPGLRHPRALRPTGPLPSDAEDTDDPDAGDGAAVSFKKSRNELKREARRAVKWGMDLAKFSPPQIKRILSAASLEREVFDALMLVKKFGPDVREGRRRQFNYIGSLLRDAQPELMDTLIQASKDGDERKLYTLLSEGKLLVEEEEEEEEDLPDGEEENQEYMKIADRWFDGLLCKDISVTNEVYSVHSVEFDRQLL

SEQ ID NO: 169553 - protein, 117 aa, Zea Mays
MLLFNINAYWIEHCIFSYNMVYGICELTCNIWHLYHFKIFICFSCSLEHNGYMCCFTHCLFVRERCSKQALELLGDMCGSGVQPNIVVYNCFMGIAIREILRSMIICVISFLCNHCA

SEQ ID NO: 169554 - protein, 98 aa, Zea Mays
MFLPMTQWGFLFFYILFDHRLSSSALFRCTLSINDLNLSESSNAKVDVVGCICAFLYVTFNTFSLEQIMIVLAYRTETVPALWNFIKWCLANRRWQLF

SEQ ID NO: 169555 - protein, 131 aa, Zea Mays
MMTMNTAHSASSAARPHRWKVRHLLPRRQWKESLISSPAVLGRSTTSPPAAPQRQWKAWLVQGDSSLRRQRHQLLGGVAASLQLHIFWLALLNLCILSYLLSLTVGISRVRIVFASDGGLNWVLCVTDVLL

SEQ ID NO: 169556 - protein, 114 aa, Zea Mays
MSRASSHPPPLPPPRRHGCPLRPSSTPMMTMNTAHSASSAARPHRWKVRHLLPRRQWKESLISSPAVLGRSTTSPPAAPQRQWKAWLVQGDSSLRRQRHQLLGGVAASLQLHIF

SEQ ID NO: 169557 - protein, 50 aa, Zea Mays
MTSLSITVMTLNLHEGEQPSESPNSWEKRRDICVSVITSYSPTILCTQQG

SEQ ID NO: 169558 - protein, 341 aa, Zea Mays
MKADSGIGDRDASKVSVKKEEAANIKIVELAMHRWSGQFSRPFLFGLLNDGTLLCYHAYYFEGSESNVQCAPFSPHGGSPDIGNATDSRLRNLRFCRVSIDISSRDDISCLVRPRITIFNNVGGYEGLFLGGPRPTWVFVCRQRFRVHPQLCDGPIVAFTVLHNVNCCRGLIYVTSQGFLKICQLPSAYNYDNYWPVQKVPLHGTPHQVTYYGEQSLYPLIVSVPQVRPLNQVLSSMADQELGLHMENDVTSGGDLQEVYTVDEFEVRIMELGKSNGRWETRSTIPMQSFENALTVRIVTLQNTSTKENETLMAIGTAYVQGEDVAARGRVLLFSFSKSEN

SEQ ID NO: 169559 - protein, 751 aa, Zea Mays
MFSSKNGEILLLTVVYDGRAVQRLDLMKSKASVLSSGATTLGSSFIFLGSRLADSLLVQFSCGMPTSVLPDLTDEPADIESDLPFSKRLKRIPSDVLQDVTSVEELSFHNKAVPNIVDSAEKISFVVRDALINVGPLKDFAYGLRTNSDPNAAGIAKQSNYELVCCSGHGKNGTLSALQQSIRPDLITEVELPSCTGIWTVYYKSSRGNTTDNNEYHAYLIISLESRTMVLQTGDDLGEVTETVDYNVQGSTIAAGNLFGRCRVIQVYAKGARVLDGSFMTQELNFSMHTSESSLNSEPLAAASASIADPYVLLKMSDGSIRLLIGDPSTCTISINAPAIFASSSERISACTLYCDRGPEPWLRKTHTDAWLSTDVGEAIDDNDNSSHDLSDIYCIICYESGKLEIFEVPSFKRVFSVDNFVSGPAILFDVFSRNSTKDSGIGDRDASKVSVKKEEAANIKIVELAMHRWSGQFSRPFLFGLLNDGTLLCYHAYYFEGSESNVQCAPFSPHGGSPDIGNATDSRLRNLRFCRVSIDISSRDDISCLVRPRITIFNNVGGYEGLFLGGPRPTWVFVCRQRFRVHPQLCDGPIVAFTVLHNVNCCRGLIYVTSQGFLKICQLPSAYNYDNYWPVQKVPLHGTPHQVTYYGEQSLYPLIVSVPQVRPLNQVLSSMADQELGLHMENDVTSGGDLQEVYTVDEFEVRIMELGKSNGRWETRSTIPMQSFENALTVRIVTLQVCMSSTLVWILHSN

SEQ ID NO: 169560 - protein, 1061 aa, Zea Mays
MSYAAYKMMHLPTGIDHCAAGFITHSPADAAAFSTPAPAPTAAAGPDGDIDSTAARAPRRVGPTPNLVVSAANVLEVYAVRAEVATGAEDAGNSSSTGTILDGISGARLELVCHYRCKQMALASLHSLLAVNFRLHGNIESMAVLSDGTENRRDSIAVTFNDAKITCLEFDDSINGLRTSSMHCFEGPEWFHLKRGRESFAWGPIIKGDPQGRCGAVLVYGLQIIILKAAQVGQSLVGEDEPTRVLSSTAVRIESSYVIDLRDLEMNHIKDFTFVHGYIEPVLVILHEREPTWAGRISSKSQTCMLSAFSISMGLKQHPMIWSAAKLPHDAYQLLAVPPPISGILVICANSIHYHSQSTSCSLALNSFSSQPDGSPEILKTSFHVELDVAKATWLSHDIVMFSSKNGEILLLTVVYDGRAVQRLDLMKSKASVLSSGATTLGSSFIFLGSRLADSLLVQFSCGMPTSVLPDLTDEPADIESDLPFSKRLKRIPSDVLQDVTSVEELSFHNKAVPNIVDSAEKISFVVRDALINVGPLKDFAYGLRTNSDPNAAGIAKQSNYELVCCSGHGKNGTLSALQQSIRPDLITEVELPSCTGIWTVYYKSSRGNTTDNNEYHAYLIISLESRTMVLQTGDDLGEVTETVDYNVQGSTIAAGNLFGRCRVIQVYAKGARVLDGSFMTQELNFSMHTSESSLNSEPLAAASASIADPYVLLKMSDGSIRLLIGDPSTCTISINAPAIFASSSERISACTLYCDRGPEPWLRKTHTDAWLSTDVGEAIDDNDNSSHDLSDIYCIICYESGKLEIFEVPSFKRVFSVDNFVSGPAILFDVFSRNSTKDSGIGDRDASKVSVKKEEAANIKIVELAMHRWSGQFSRPFLFGLLNDGTLLCYHAYYFEGSESNVQCAPFSPHGGSPDIGNATDSRLRNLRFCRVSIDISSRDDISCLVRPRITIFNNVGGYEGLFLGGPRPTWVFVCRQRFRVHPQLCDGPIVAFTVLHNVNCCRGLIYVTSQGFLKICQLPSAYNYDNYWPVQKVPLHGTPHQVTYYGEQSLYPLIVRFAP

SEQ ID NO: 169561 - protein, 602 aa, Zea Mays
MSYAAYKMMHLPTGIDHCAAGFITHSPADAAAFSTPAPAPTAAAGPDGDIDSTAARAPRRVGPTPNLVVSAANVLEVYAVRAEVATGAEDAGNSSSTGTILDGISGARLELVCHYRLHGNIESMAVLSDGTENRRDSIAVTFNDAKITCLEFDDSINGLRTSSMHCFEGPEWFHLKRGRESFAWGPIIKGDPQGRCGAVLVYGLQIIILKAAQVGQSLVGEDEPTRVLSSTAVRIESSYVIDLRDLEMNHIKDFTFVHGYIEPVLVILHEREPTWAGRISSKSQTCMLSAFSISMGLKQHPMIWSAAKLPHDAYQLLAVPPPISGILVICANSIHYHSQSTSCSLALNSFSSQPDGSPEILKTSFHVELDVAKATWLSHDIVMFSSKNGEILLLTVVYDGRAVQRLDLMKSKASVLSSGATTLGSSFIFLGSRLADSLLVQFSCGMPTSVLPDLTDEPADIESDLPFSKRLKRIPSDVLQDVTSVEELSFHNKAVPNIVDSAEKISFVVRDALINVGPLKDFAYGLRTNSDPNAAGIAKQSNYELVCCSGHGKNGTLSALQQSIRPDLITEVWNYQVAQVFGQFTTRVLVEIQLTIMNIMLI

SEQ ID NO: 169562 - protein, 811 aa, Zea Mays
MSYAAYKMMHLPTGIDHCAAGFITHSPADAAAFSTPAPAPTAAAGPDGDIDSTAARAPRRVGPTPNLVVSAANVLEVYAVRAEVATGAEDAGNSSSTGTILDGISGARLELVCHYRCKQMALASLHSLLAVNFRLHGNIESMAVLSDGTENRRDSIAVTFNDAKITCLEFDDSINGLRTSSMHCFEGPEWFHLKRGRESFAWGPIIKGDPQGRCGAVLVYGLQIIILKAAQVGQSLVGEDEPTRVLSSTAVRIESSYVIDLRDLEMNHIKDFTFVHGYIEPVLVILHEREPTWAGRISSKSQTCMLSAFSISMGLKQHPMIWSAAKLPHDAYQLLAVPPPISGILVICANSIHYHSQSTSCSLALNSFSSQPDGSPEILKTSFHVELDVAKATWLSHDIVMFSSKNGEILLLTVVYDGRAVQRLDLMKSKASVLSSGATTLGSSFIFLGSRLADSLLVQFSCGMPTSVLPDLTDEPADIESDLPFSKRLKRIPSDVLQDVTSVEELSFHNKAVPNIVDSAEKISFVVRDALINVGPLKDFAYGLRTNSDPNAAGIAKQSNYELVCCSGHGKNGTLSALQQSIRPDLITEVELPSCTGIWTVYYKSSRGNTTDNNEYHAYLIISLESRTMVLQTGDDLGEVTETVDYNVQGSTIAAGNLFGRCRVIQVYAKGARVLDGSFMTQELNFSMHTSESSLNSEPLAAASASIADPYVLLKMSDGSIRLLIGDPSTCTISINAPAIFASSSERISACTLYCDRGPEPWLRKTHTDAWLSTDVGEAIDDNDNSSHDLSDIYCIICYESGFWNRGSRCF

SEQ ID NO: 169563 - protein, 794 aa, Zea Mays
MSYAAYKMMHLPTGIDHCAAGFITHSPADAAAFSTPAPAPTAAAGPDGDIDSTAARAPRRVGPTPNLVVSAANVLEVYAVRAEVATGAEDAGNSSSTGTILDGISGARLELVCHYRLHGNIESMAVLSDGTENRRDSIAVTFNDAKITCLEFDDSINGLRTSSMHCFEGPEWFHLKRGRESFAWGPIIKGDPQGRCGAVLVYGLQIIILKAAQVGQSLVGEDEPTRVLSSTAVRIESSYVIDLRDLEMNHIKDFTFVHGYIEPVLVILHEREPTWAGRISSKSQTCMLSAFSISMGLKQHPMIWSAAKLPHDAYQLLAVPPPISGILVICANSIHYHSQSTSCSLALNSFSSQPDGSPEILKTSFHVELDVAKATWLSHDIVMFSSKNGEILLLTVVYDGRAVQRLDLMKSKASVLSSGATTLGSSFIFLGSRLADSLLVQFSCGMPTSVLPDLTDEPADIESDLPFSKRLKRIPSDVLQDVTSVEELSFHNKAVPNIVDSAEKISFVVRDALINVGPLKDFAYGLRTNSDPNAAGIAKQSNYELVCCSGHGKNGTLSALQQSIRPDLITEVVELPSCTGIWTVYYKSSRGNTTDNNEYHAYLIISLESRTMVLQTGDDLGEVTETVDYNVQGSTIAAGNLFGRCRVIQVYAKGARVLDGSFMTQELNFSMHTSESSLNSEPLAAASASIADPYVLLKMSDGSIRLLIGDPSTCTISINAPAIFASSSERISACTLYCDRGPEPWLRKTHTDAWLSTDVGEAIDDNDNSSHDLSDIYCIICYESGFWNRGSRCF

SEQ ID NO: 169564 - protein, 793 aa, Zea Mays
MSYAAYKMMHLPTGIDHCAAGFITHSPADAAAFSTPAPAPTAAAGPDGDIDSTAARAPRRVGPTPNLVVSAANVLEVYAVRAEVATGAEDAGNSSSTGTILDGISGARLELVCHYRLHGNIESMAVLSDGTENRRDSIAVTFNDAKITCLEFDDSINGLRTSSMHCFEGPEWFHLKRGRESFAWGPIIKGDPQGRCGAVLVYGLQIIILKAAQVGQSLVGEDEPTRVLSSTAVRIESSYVIDLRDLEMNHIKDFTFVHGYIEPVLVILHEREPTWAGRISSKSQTCMLSAFSISMGLKQHPMIWSAAKLPHDAYQLLAVPPPISGILVICANSIHYHSQSTSCSLALNSFSSQPDGSPEILKTSFHVELDVAKATWLSHDIVMFSSKNGEILLLTVVYDGRAVQRLDLMKSKASVLSSGATTLGSSFIFLGSRLADSLLVQFSCGMPTSVLPDLTDEPADIESDLPFSKRLKRIPSDVLQDVTSVEELSFHNKAVPNIVDSAEKISFVVRDALINVGPLKDFAYGLRTNSDPNAAGIAKQSNYELVCCSGHGKNGTLSALQQSIRPDLITEVELPSCTGIWTVYYKSSRGNTTDNNEYHAYLIISLESRTMVLQTGDDLGEVTETVDYNVQGSTIAAGNLFGRCRVIQVYAKGARVLDGSFMTQELNFSMHTSESSLNSEPLAAASASIADPYVLLKMSDGSIRLLIGDPSTCTISINAPAIFASSSERISACTLYCDRGPEPWLRKTHTDAWLSTDVGEAIDDNDNSSHDLSDIYCIICYESGFWNRGSRCF

SEQ ID NO: 169565 - protein, 678 aa, Zea Mays
MSYAAYKMMHLPTGIDHCAAGFITHSPADAAAFSTPAPAPTAAAGPDGDIDSTAARAPRRVGPTPNLVVSAANVLEVYAVRAEVATGAEDAGNSSSTGTILDGISGARLELVCHYRLHGNIESMAVLSDGTENRRDSIAVTFNDAKITCLEFDDSINGLRTSSMHCFEGPEWFHLKRGRESFAWGPIIKGDPQGRCGAVLVYGLQIIILKAAQVGQSLVGEDEPTRVLSSTAVRIESSYVIDLRDLEMNHIKDFTFVHGYIEPVLVILHEREPTWAGRISSKSQTCMLSAFSISMGLKQHPMIWSAAKLPHDAYQLLAVPPPISGILVICANSIHYHSQSTSCSLALNSFSSQPDGSPEILKTSFHVELDVAKATWLSHDIVMFSSKNGEILLLTVVYDGRAVQRLDLMKSKASVLSSGATTLGSSFIFLGSRLADSLLVQFSCGMPTSVLPDLTDEPADIESDLPFSKRLKRIPSDVLQDVTSVEELSFHNKAVPNIVDSAEKISFVVRDALINVGPLKDFAYGLRTNSDPNAAGIAKQSNYELVCCSGHGKNGTLSALQQSIRPDLITEVLQTGDDLGEVTETVDYNVQGSTIAAGNLFGRCRVIQVYAKGARVLDGSFMTQELNFSMHTSESSLNSEPLAAASASIADPYVLLKMSDGSIRLLIGGMVHLYPVCL

SEQ ID NO: 169566 - protein, 305 aa, Zea Mays
MVQALPQYSDQIDKLTLHVEIAGKLNNIIKEHHLKDVGQLEQDLVFGDAGTKELISFLRTRMDVSREHKLRLLMIYASINPEKFFESEKGAKLMQLAGLSADDMIVVNNMRCLRGADSKKSSVGAFTLKFDLQKKKPGIRKERTGEESTWMLSRFYPILEDLIEKLSKGELPKDEYHCMNDPSPSFRGIPGSTSARTSPAHQPAQSMRSRRIGGTWARPRNSDDGYSSDSVLKHASSDFRKLGQRLFIFVIGGATRSELRVAHKLSGKLKREIILGSSSLDDPPQFITKLKMLSTEELSLDDLQI

SEQ ID NO: 169567 - protein, 369 aa, Zea Mays
MSMDSDSSSHSGADYRSFRQITRDRLLVEMLRSTRKSSKSSWKVLIMDKLTVKIMSFSCKMADITEEGVSLVEDLYKRRQPLPSMDAIYFMQPTKENVDIFMSDMSGKNSLYKKAYVFFSSPVQRELVAHIKKDSTVLTRISALSEMNLEYFAIDSQGFITDHDKALEELFSEDAEGSHKYNACLNTMATRIATVFASLREFPRVHYRVARTIDASTLTTLRDLVPTKLAASLWNSLVRFKSTIPEFPQTETCELLIVDRSIDQIAPIIHEWTYDAMCHDLLCMDGNKYVQEVPSKNGSANEKKEVLLEDHDPVWLELRHAHIAHVNETLHEKMTSFVSKNKAAQLQQIWWRVIYQAVAENGSSSSTIQ

SEQ ID NO: 169568 - protein, 521 aa, Zea Mays
MNLEYFAIDSQGFITDHDKALEELFSEDAEGSHKYNACLNTMATRIATVFASLREFPRVHYRVARTIDASTLTTLRDLVPTKLAASLWNSLVRFKSTIPEFPQTETCELLIVDRSIDQIAPIIHEWTYDAMCHDLLCMDGNKYVQEVPSKNGSANEKKEVLLEDHDPVWLELRHAHIAHVNETLHEKMTSFVSKNKAAQLQQARSGGELSTKQLQKMVQALPQYSDQIDKLTLHVEIAGKLNNIIKEHHLKDVGQLEQDLVFGDAGTKELISFLRTRMDVSREHKLRLLMIYASINPEKFFESEKGAKLMQLAGLSADDMIVVNNMRCLRGADSKKSSVGAFTLKFDLQKKKPGIRKERTGEESTWMLSRFYPILEDLIEKLSKGELPKDEYHCMNDPSPSFRGIPGSTSARTSPAHQPAQSMRSRRIGGTWARPRNSDDGYSSDSVLKHASSDFRKLGQRLFIFVIGGATRSELRVAHKLSGKLKREIILGSSSLDDPPQFITKLKMLSTEELSLDDLQI

SEQ ID NO: 169569 - protein, 522 aa, Zea Mays
MSMDSDSSSHSGADYRSFRQITRDRLLVEMLRSTRKSSKSSWKVLIMDKLTVKIMSFSCKMADITEEGVSLVEDLYKRRQPLPSMDAIYFMQPTKENVDIFMSDMSGKNSLYKKAYVFFSSPVQRELVAHIKKDSTVLTRISALSEMNLEYFAIDSQGFITDHDKALEELFSEDAEGSHKYNACLNTMATRIATVFASLREFPRVHYRVARTIDASTLTTLRDLVPTKLAASLWNSLVRFKSTIPEFPQTETCELLIVDRSIDQIAPIIHEWTYDAMCHDLLCMDGNKYVQEVPSKNGSANEKKEVLLEDHDPVWLELRHAHIAHVNETLHEKMTSFVSKNKAAQLQQARSGGELSTKQLQKMVQALPQYSDQIDKLTLHVEIAGKLNNIIKEHHLKDVGQLEQDLVFGDAGTKELISFLRTRMDVSREHKLRLLMIYASINPEKFFESEKGAKLMQLAGLSADDMIVVNNMRCLRGADSKKSSVGAFTLKFDLQKKKPGIRKERTGEESTWMLSRFYPILE

SEQ ID NO: 169570 - protein, 611 aa, Zea Mays
MSMDSDSSSHSGADYRSFRQITRDRLLVEMLRSTRKSSKSSWKVLIMDKLTVKIMSFSCKMADITEEGVSLVEDLYKRRQPLPSMDAIYFMQPTKENVDIFMSDMSGKNSLYKKAYVFFSSPVQRELVAHIKKDSTVLTRISALSEMNLEYFAIDSQGFITDHDKALEELFSEDAEGSHKYNACLNTMATRIATVFASLREFPRVHYRVARTIDASTLTTLRDLVPTKLAASLWNSLVRFKSTIPEFPQTETCELLIVDRSIDQIAPIIHEWTYDAMCHDLLCMDGNKYVQEVPSKNGSANEKKEVLLEDHDPVWLELRHAHIAHVNETLHEKMTSFVSKNKAAQLQQARSGGELSTKQLQKMVQALPQYSDQIDKLTLHVEIAGKLNNIIKEHHLKDVGQLEQDLVFGDAGTKELISFLRTRMDVSREHKLRLLMIYASINPEKFFESEKGAKLMQLAGLSADDMIVVNNMRCLRGADSKKSSVGAFTLKFDLQKKKPGIRKERTGEESTWMLSRFYPILEDLIEKLSKGELPKDEYHCMNDPSPSFRGIPGSTSARTSPAHQPAQSMRSRRIGGTWARPRNSDDGYSRYVQPRCVKGYLLQLFVVVSIH

SEQ ID NO: 169571 - protein, 875 aa, Zea Mays
MVAATALSFSFLSLATTLFLLLLRSLINNKKRHCRLPPSPPSSLPVIGHLHLLKKPLHRTLSALAAQHGPVLLFRFGSRRVVHVADPAVAAECLSTHDVTFANRPRLPSARYLSNDYTTLGSSSYGPNWRNLRRIATVDVFSSHRVLCSADVRASEVRNMARQLFKAAAGADASRPARCDVKARAFEIALNTVARVIAGKRYYGDGSVASEEAERFRAMVREYLAMHGASNLQDFVPVLALVDIGGVNKRAIRLSKARNEWAQRLIDEHRAAAAAGREQGKTMVGDLLEKQASDPETYSDKVIRALCLSILQAGTDTSSSTIEWGMALLLNHPAAMAKAKAEIDEVIGTARILEEADLPNLPYLGCIIKETLRLHPVGPLLAPHESASDCSVGGYDIPAGTMLLVNVHAMHRDARVWEEPERFSPERFEGGNSDGKWMLPFGMGRRRCPGEGLAVKMVGLALGTLLQCFEWRRTGDEEVDMTEASGLTMPKSVPLEAFYWPLPRADLHEDRNNYRQIGRFTSTATPPPLRVCGSRHMELLRDSISMVSLAVLVTAVCARAASSWLRPGLPRLASLLPMVAFLAAAPLAFSSAIIRGLAGFFLGWLGVFKVVLLAVGRGPLDPALPVLPFVFTTALPVKLRCSSTGAAAACRAKSVSLVSCAVKVAVIAAILHVYQYTDQLHLYTRLALYSVHIYCFLDFLLPCIAAAGGALGMDMEPQFDKPYLASSLRDFWGRRWNLVVSDILRPSVYGPVRARAGKAPAVLATFLVSGLMHEVMIYYLTLRSPTGEMTAFFLLHGVCCIAEESCARRWMQWGWRPPPRPVATLLVVVFVAGTAFWLFFPQICREGMEELLLEEWAAVGAFFNDAARKLLQMFT

SEQ ID NO: 169572 - protein, 131 aa, Zea Mays
MQLASKGSPVVQNAVLPQPSATAAVTTDKAVLDPVISLAAAKKPTHTDTSDMPIMRKASLHRFLEKRRIASVQRPYQTAPSDVAPVKETESQPWLGLGPNAVKSNLNLSCDSEIFANSFLLHHLQIVSVKQ

SEQ ID NO: 169573 - protein, 73 aa, Zea Mays
MMRDITCKLHTRDSSKSWRQAGSDGSSQLILKEPSTNVVLADHVTTKKWEKIVDFDDHLDDISKDWSNPGLLD

SEQ ID NO: 169574 - protein, 240 aa, Zea Mays
MVKKIICPLFQIGPDSYLFEKGRRSILTQPLQYSKHDWRLHDMCPISLDKPDIHKVQVNKSDYDNVKVVLYLKKVEQEELEKLARKAQLLPWVAWVGITMLLEKGADVNARNYCGQVLSSKQPLRICGEGLSRFIPSTDPTYVGASDTGFALFLVTRADYLSGRTSLHFATHDGFVRCIRLLVADFVPSVALEDIASSVVDGGDCQTNSGSSPNSSSGQKFNESYVLSMNLILLFETITI

SEQ ID NO: 169575 - protein, 235 aa, Zea Mays
MVEETVVGDGEASTSAASAHASIAARAGDGGTRRAWGSEERRPGAGDGEQSRYAPLDSCLFTTAITTSDERYNWPVPWPERLDVSYASVPDDSASNKEKFEADTKYWKQLISELCRAYVDKAGCCLSIMLAWAEAISGAPGVQPLLCPQGGPLLRKEVIGGDRKHQSRLDENKGSIILNFTNLCAMWNYANVQWPHSVGCLSCLQRSALVQCTIQRGSFIQALQLHNKVQTSLGS

SEQ ID NO: 169576 - protein, 279 aa, Zea Mays
MALAADKRLAAAAPYLPAELIPDIARHLTTLQDFFALRAACRSYRTALPPSRAVLASQPPHLLVPHHASSPCSLALIHPLCRRLLRFRAPSPPFPSAVVASDGARVVTFDHFARELSIIHLLSGDRVRVPDAPFLFSRAVLAGDLVLLIAPGWVQYCRLGDGRWREAYCRLGGCGGSLFGGLYMMVGMLAVNGVLYALLNTCQLAVAELMDNKVELKLLGGEVGDHVRDAWMESKDFMLGACAGVPILIFKVSVKPEYKVFRWEPAEQRFTWNSRGLHI

SEQ ID NO: 169577 - protein, 225 aa, Zea Mays
MATELGPALNVGHLLLPPMARAPSLLHLPPRHAPLYRVPAQPTPWLPARAFSRAQLSSLSLSSPSRLHLPAELGSLAACSFPAPSSPRSIASSLSRVVRSACPRARFSFPSRRSELAVPFPCCGGWSLLLGSADARDLPAKFLHRWSPRHVRWSPCVLGHGRHRAVESRPPQLGTPYIAVIARIPYCAHELHCLVVIARAPLLDPSSFFSSLPCSAVHRHHPAVR

SEQ ID NO: 169578 - protein, 169 aa, Zea Mays
MPSEVFETRTGACGPDTLGGSATRTTPSRATGEIPFFLVYGAEACLPPEIIMGSPRVQSFDESMQEQLRREDVDFIDEHRWRATIRNAQYNQALRRYHQRFVHSRELRVGDLVLRRVLNREGLHKLSPNWEGPFNVTGICRPRCVRLATTEGVSLPNPWNIEHLHKFYP

SEQ ID NO: 169579 - protein, 125 aa, Zea Mays
MLSANKPIGGYVAPSYKLRTTLLVQERTRVERMLQPMKETLSSKEDSPMFLRAITTEGISKTEHISEKMLAVIDDVGAQNVVQVITDNAANCRAAGIKVEQKHPHFLDPLCCAYFESCFKEHMCS

SEQ ID NO: 169580 - protein, 313 aa, Zea Mays
MHAARPWDRLHTSIWGVSSPSVTLILGEFHLPCLLLSTSPSPSFLQHERQLSEHDSCSVLQGRKKGDDGTSLNQQSLVIYIIIESRTTKAMGSNGRDHRRGVPRPPPLPLYRDWEEEEVVKAGRRRQSPLAQSSTSPAAAAGVANKKRLSKQLSMKETTREVKWEKRKRQIQRQRSSMRLSEADDRAGGSTAVCPVDGEASSSAERVATGITDGDLDELRGSMDLGFRFDEQKGGQDLCDTLPALDFYFAVNRQVSEPRMSFPTSTSSGPSLSATKSSPNLCGTPSPGDNPLLVKTRLRHWAQVVACSVKHSS

SEQ ID NO: 169581 - protein, 87 aa, Zea Mays
MTPRLRGSEATINALLPHDVDGARVEGVGRRCTAAINALLHPDLRASALDFHGRLSTPTIGSPWITPQPRPPWTAMDGAVPHLELIN

SEQ ID NO: 169582 - protein, 125 aa, Zea Mays
MKLDGTLEMRVWCNGLKPSRGHLGDVEVAVALRTRRGRTSARRQATAGEFLGSRRAVAERAAGDGWGISREPTSCCRESSRSSRQQRSWGAERRHDDTGARDSGVQQLHTMMCQRRRRERVQFQP

SEQ ID NO: 169583 - protein, 140 aa, Zea Mays
MIHGLPTRKLQEGRDRDWQVVTTERRVQVRQVLGRPSREESGLRTGMRGALREGSSRQWRSAAPHNDVPEKETRTRAVSAMIHGLPTRKLQEGRDRDWQVVTTERRVQVRQVLGRPSREESGLRTGMRGALREGSSAAAA

SEQ ID NO: 169584 - protein, 144 aa, Zea Mays
MVRRASSPRFPPCLLPVSDERGSRRPRRCPAPRLCFSLCHGRARRVPLFESVNLHLAPSSFHGCRRLQAWGIAELAQPFPITRRRSSIPSHAALCSLVLAPALCLAPSLLHLFPWPPAALVLPQALVELFYGALDASPFTRCPY

SEQ ID NO: 169585 - protein, 301 aa, Zea Mays
MAGAHDTVDAQLLEVRGQVDGLAADIRTMHERLDSTVTSTTESFNQLDLAQTATRTTLDTILACLDALTTKMEQDYGGDAEQDDGDHRGRARRVVRHPPNDLFSKIKFKIPPFNGKYDPAAYLDWELEVEQKFSCHDIAAHSQVKAAISEFTDFALIWWREYKIKHPTAIPTTWDQLKAVMRHRFVPSYYARDLLNKMQHFQQGSKFVEDYFQELQKGMILCGILEDNDTAMARFCGGLNREIQDILDYKEYYVMTTLFEYACKAEREVQGRRSKPYSNPFAGRSSTSTSAPVPPAPNTSS

SEQ ID NO: 169586 - protein, 546 aa, Zea Mays
MDYLRTVVPSQLLAERGSNLVVINPGSGNVRMGFASQDVPFNIPHCIARHINPQEGEEPRFSVRDQMLNCHATSSQNAERESAYDIIAALMKIPFLDDEEMPSPNQPLPPKMGRVDGFSSQQNRDDNKFTWTDVSERIIKPSTPFDRSVYKDAEEDTLPSTSDDDNGQDFKENKYKEMIFGEDALKIPPSESYCLSRPIRRGHFNVSHNYSVHQVLEDLRTIWNWILTEKLHINPRDRGLYSAILVLGETFDNREIKEMLSIVLHDLGFSTAVVHQEALSAAFGNGLSTTCVVNIGAQVTQVVCVEDGVALPHTALALPYGGDDISRCLLWVQRRHGTWPNFQTDPMSNPIDMLMLNKIKESYSQIKTGSIDAAVLVHSYDNERSGGHQKTRLSAINVPPMGLLYPRVLVPEEYPPPPRSWFQDYDDMLEDTWQTSDGLYPSGNGRVDLQKKLFGSIQLVGGAASTAGLAQVLEQRVRTKISANQSIEKVEVLQSRTYPLFVPWKGGVDAWIHREDWIKNGVHIGSGRKYKDSYFLQAQVMCYYNV

SEQ ID NO: 169587 - protein, 413 aa, Zea Mays
MIFGEDALKIPPSESYCLSRPIRRGHFNVSHNYSVHQVLEDLRTIWNWILTEKLHINPRDRGLYSAILVLGETFDNREIKEMLSIVLHDLGFSTAVVHQEALSAAFGNGLSTTCVVNIGAQVTQVVCVEDGVALPHTALALPYGGDDISRCLLWVQRRHGTWPNFQTDPMSNPIDMLMLNKIKESYSQIKTGSIDAAVLVHSYDNERSGGHQKTRLSAINVPPMGLLYPRVLVPEEYPPPPRSWFQDYDDMLEDTWQTSDGLYPSGNGGFGMWDSYPMFPTRLKKFDNIGLVEAIISSVLSTGRVDLQKKLFGSIQLVGGAASTAGLAQVLEQRVRTKISANQSIEKVEVLQSRTYPLFVPWKGGVILGVLDIGKDAWIHREDWIKNGVHIGSGRKYKDSYFLQAQVMCYYNV

SEQ ID NO: 169588 - protein, 500 aa, Zea Mays
MKIPFLDDEEMPSPNQPLPPKMGRVDGFSSQQNRDDNKFTWTDVSERIIKPSTPFDRSVYKDAEEDTLPSTSDDDNGQDFKENKYKEMIFGEDALKIPPSESYCLSRPIRRGHFNVSHNYSVHQVLEDLRTIWNWILTEKLHINPRDRGLYSAILVLGETFDNREIKEMLSIVLHDLGFSTAVVHQEALSAAFGNGLSTTCVVNIGAQVTQVVCVEDGVALPHTALALPYGGDDISRCLLWVQRRHGTWPNFQTDPMSNPIDMLMLNKIKESYSQIKTGSIDAAVLVHSYDNERSGGHQKTRLSAINVPPMGLLYPRVLVPEEYPPPPRSWFQDYDDMLEDTWQTSDGLYPSGNGGFGMWDSYPMFPTRLKKFDNIGLVEAIISSVLSTGRVDLQKKLFGSIQLVGGAASTAGLAQVLEQRVRTKISANQSIEKVEVLQSRTYPLFVPWKGGVILGVLDIGKDAWIHREDWIKNGVHIGSGRKYKDSYFLQAQVMCYYNV

SEQ ID NO: 169589 - protein, 524 aa, Zea Mays
MLNCHATSSQNAERESAYDIIAALMKIPFLDDEEMPSPNQPLPPKMGRVDGFSSQQNRDDNKFTWTDVSERIIKPSTPFDRSVYKDAEEDTLPSTSDDDNGQDFKENKYKEMIFGEDALKIPPSESYCLSRPIRRGHFNVSHNYSVHQVLEDLRTIWNWILTEKLHINPRDRGLYSAILVLGETFDNREIKEMLSIVLHDLGFSTAVVHQEALSAAFGNGLSTTCVVNIGAQVTQVVCVEDGVALPHTALALPYGGDDISRCLLWVQRRHGTWPNFQTDPMSNPIDMLMLNKIKESYSQIKTGSIDAAVLVHSYDNERSGGHQKTRLSAINVPPMGLLYPRVLVPEEYPPPPRSWFQDYDDMLEDTWQTSDGLYPSGNGGFGMWDSYPMFPTRLKKFDNIGLVEAIISSVLSTGRVDLQKKLFGSIQLVGGAASTAGLAQVLEQRVRTKISANQSIEKVEVLQSRTYPLFVPWKGGVILGVLDIGKDAWIHREDWIKNGVHIGSGRKYKDSYFLQAQVMCYYNV

SEQ ID NO: 169590 - protein, 207 aa, Zea Mays
MIFGEDALKIPPSESYCLSRPIRRGHFNVSHNYSVHQVLEDLRTIWNWILTEKLHINPRDRGLYSAILVLGETFDNREIKEMLSIVLHDLGFSTAVVHQEALSAAFGNGLSTTCVVNIGAQVTQVVCVEDISRCLLWVQRRHGTWPNFQTDPMSNPIDMLMLNKIKESYSQIKTGSIDAAVLVHSYDNERSGGHQKTRLSAINVPRL

SEQ ID NO: 169591 - protein, 511 aa, Zea Mays
MDYLRTVVPSQLLAERGSNLVVINPGSGNVRMGFASQDVPFNIPHCIARHINPQEGEEPRFSVRDQMLNCHATSSQNAERESAYDIIAALMKIPFLDDEEMPSPNQPLPPKMGRVDGFSSQQNRDDNKFTWTDVSERIIKPSTPFDRSVYKDAEEDTLPSTSDDDNGQDFKENKYKEMIFGEDALKIPPSESYCLSRPIRRGHFNVSHNYSVHQVLEDLRTIWNWILTEKLHINPRDRGLYSAILVLGETFDNREIKEMLSIVLHDLGFSTAVVHQEALSAAFGNGLSTTCVVNIGAQVTQVVCVEDGVALPHTALALPYGGDTGSIDAAVLVHSYDNERSGGHQKTRLSAINVPPMGLLYPRVLVPEEYPPPPRSWFQDYDDMLEDTWQTSDGLYPSGNGRVDLQKKLFGSIQLVGGAASTAGLAQVLEQRVRTKISANQSIEKVEVLQSRTYPLFVPWKGGVILGVLDIGKDAWIHREDWIKNGVHIGSGRKYKDSYFLQAQVMCYYNV

SEQ ID NO: 169592 - protein, 536 aa, Zea Mays
MDYLRTVVPSQLLAERGSNLVVINPGSGNVRMGFASQDVPFNIPHCIARHINPQEGEEPRFSVRDQNAERESAYDIIAALMKIPFLDDEEMPSPNQPLPPKMGRVDGFSSQQNRDDNKFTWTDVSERIIKPSTPFDRSVYKDAEEDTLPSTSDDDNGQDFKENKYKEMIFGEDALKIPPSESYCLSRPIRRGHFNVSHNYSVHQVLEDLRTIWNWILTEKLHINPRDRGLYSAILVLGETFDNREIKEMLSIVLHDLGFSTAVVHQEALSAAFGNGLSTTCVVNIGAQVTQVVCVEDGVALPHTALALPYGGDTGSIDAAVLVHSYDNERSGGHQKTRLSAINVPPMGLLYPRVLVPEEYPPPPRSWFQDYDDMLEDTWQTSDGLYPSGNGGFGMWDSYPMFPTRLKKFDNIGLVEAIISSVLSTGRVDLQKKLFGSIQLVGGAASTAGLAQVLEQRVRTKISANQSIEKVEVLQSRTYPLFVPWKGGVILGVLDIGKDAWIHREDWIKNGVHIGSGRKYKDSYFLQAQVMCYYNV

SEQ ID NO: 169593 - protein, 581 aa, Zea Mays
MDYLRTVVPSQLLAERGSNLVVINPGSGNVRMGFASQDVPFNIPHCIARHINPQEGEEPRFSVRDQMLNCHATSSQNAERESAYDIIAALMKIPFLDDEEMPSPNQPLPPKMGRVDGFSSQQNRDDNKFTWTDVSERIIKPSTPFDRSVYKDAEEDTLPSTSDDDNGQDFKENKYKEMIFGEDALKIPPSESYCLSRPIRRGHFNVSHNYSVHQVLEDLRTIWNWILTEKLHINPRDRGLYSAILVLGETFDNREIKEMLSIVLHDLGFSTAVVHQEALSAAFGNGLSTTCVVNIGAQVTQVVCVEDGVALPHTALALPYGGDDISRCLLWVQRRHGTWPNFQTDPMSNPIDMLMLNKIKESYSQIKTGSIDAAVLVHSYDNERSGGHQKTRLSAINVPPMGLLYPRVLVPEEYPPPPRSWFQDYDDMLEDTWQTSDGLYPSGNGGFGMWDSYPMFPTRLKKFDNIGLVEAIISSVLSTGRVDLQKKLFGSIQLVGGAASTAGLAQVLEQRVRTKISANQSIEKVEVLQSRTYPLFVPWKGGVDAWIHREDWIKNGVHIGSGRKYKDSYFLQAQVMCYYNV

SEQ ID NO: 169594 - protein, 360 aa, Zea Mays
MIFGEDALKIPPSESYCLSRPIRRGHFNVSHNYSVHQVLEDLRTIWNWILTEKLHINPRDRGLYSAILVLGETFDNREIKEMLSIVLHDLGFSTAVVHQEALSAAFGNGLSTTCVVNIGAQVTQVVCVEDGVALPHTALALPYGGDTGSIDAAVLVHSYDNERSGGHQKTRLSAINVPPMGLLYPRVLVPEEYPPPPRSWFQDYDDMLEDTWQTSDGLYPSGNGGFGMWDSYPMFPTRLKKFDNIGLVEAIISSVLSTGRVDLQKKLFGSIQLVGGAASTAGLAQVLEQRVRTKISANQSIEKVEVLQSRTYPLFVPWKGGVDAWIHREDWIKNGVHIGSGRKYKDSYFLQAQVMCYYNV

SEQ ID NO: 169595 - protein, 396 aa, Zea Mays
MIFGEDALKIPPSESYCLSRPIRRGHFNVSHNYSVHQVLEDLRTIWNWILTEKLHINPRDRGLYSAILVLGETFDNREIKEMLSIVLHDLGFSTAVVHQEALSAAFGNGLSTTCVVNIGAQVTQVVCVEDISRCLLWVQRRHGTWPNFQTDPMSNPIDMLMLNKIKESYSQIKTGSIDAAVLVHSYDNERSGGHQKTRLSAINVPPMGLLYPRVLVPEEYPPPPRSWFQDYDDMLEDTWQTSDGLYPSGNGGFGMWDSYPMFPTRLKKFDNIGLVEAIISSVLSTGRVDLQKKLFGSIQLVGGAASTAGLAQVLEQRVRTKISANQSIEKVEVLQSRTYPLFVPWKGGVILGVLDIGKDAWIHREDWIKNGVHIGSGRKYKDSYFLQAQVMCYYNV

SEQ ID NO: 169596 - protein, 591 aa, Zea Mays
MDYLRTVVPSQLLAERGSNLVVINPGSGNVRMGFASQDVPFNIPHCIARHINPQEGEEPRFSVRDQMLNCHATSSQNAERESAYDIIAALMKIPFLDDEEMPSPNQPLPPKMGRVDGFSSQQNRDDNKFTWTDVSERIIKPSTPFDRSVYKDAEEDTLPSTSDDDNGQDFKENKYKEMIFGEDALKIPPSESYCLSRPIRRGHFNVSHNYSVHQVLEDLRTIWNWILTEKLHINPRDRGLYSAILVLGETFDNREIKEMLSIVLHDLGFSTAVVHQEALSAAFGNGLSTTCVVNIGAQVTQVVCVEDGVALPHTALALPYGGDDISRCLLWVQRRHGTWPNFQTDPMSNPIDMLMLNKIKESYSQIKTGSIDAAVLVHSYDNERSGGHQKTRLSAINVPPMGLLYPRVLVPEEYPPPPRSWFQDYDDMLEDTWQTSDGLYPSGNGGFGMWDSYPMFPTRLKKFDNIGLVEAIISSVLSTGRVDLQKKLFGSIQLVGGAASTAGLAQVLEQRVRTKISANQSIEKVEVLQSRTYPLFVPWKGGVILGVLDIGKDAWIHREDWIKNGVHIGSGRKYKDSYFLQAQVVRPSKPS

SEQ ID NO: 169597 - protein, 405 aa, Zea Mays
MDYLRTVVPSQLLAERGSNLVVINPGSGNVRMGFASQDVPFNIPHCIARHINPQEGEEPRFSVRDQMLNCHATSSQNAERESAYDIIAALMKIPFLDDEEMPSPNQPLPPKMGRVDGFSSQQNRDDNKFTWTDVSERIIKPSTPFDRSVYKDAEEDTLPSTSDDDNGQDFKENKYKEMIFGEDALKIPPSESYCLSRPIRRGHFNVSHNYSVHQVLEDLRTIWNWILTEKLHINPRDRGLYSAILVLGETFDNREIKEMLSIVLHDLGFSTAVVHQEALSAAFGNGLSTTCVVNIGAQVTQVVCVEDGVALPHTALALPYGGDDISRCLLWVQRRHGTWPNFQTDPMSNPIDMLMLNKIKESYSQIKTGSIDAAVLVHSYDNERSGGHQKTRLSAINKGAFMFMP

SEQ ID NO: 169598 - protein, 176 aa, Zea Mays
MDYLRTVVPSQLLAERGSNLVVINPGSGNVRMGFASQDVPFNIPHCIARHINPQEGEEPRFSVRDQMLNCHATSSQNAERESAYDIIAALMKIPFLDDEEMPSPNQPLPPKMGRVDGFSSQQNRDDNKFTWTDVSERIIKPSTPFGQYTRMLRKILCQAHLMMIMDRTLKRISIKK

SEQ ID NO: 169599 - protein, 314 aa, Zea Mays
MAAVTLGTETDGSILCPSSLNSVVGIKPTVGLTSRAGVIPVSPRQDTVGPICRTVADAVHVLDAIVGYDEPDAVATGAAAKYIPDGGYAQFLKMDGLRGKRIGVPAGFFGFPDGSVRQMVYQQHLDTLRRHGAVVTEDLSIANLDVIQNATVSGELAALAAEFKIALNAYLSSDLSRSPVASLAELIVFNNAHPDEEMLKQFGQLIFLVAQNTTGIGAAETAAIQQLDDLTAGGVEKVMRQHQLDAIVAPDSSSATVLAIGGLPGIAVPAGYDELGAPFGITFGGLKGYESRLIEIAYAFEQATKARKPPMFKN

SEQ ID NO: 169600 - protein, 319 aa, Zea Mays
MGKETEVNEYELQRAANIRENMKRMRSLNLPVPSTMVNEANGSHRASKKHKTRKLAYSTNGPTLRSRTQRDIVDDNHEDSTSENSYGESKYPINDEEQPTGHHNIRKGRGPTLKKNIYSNSGGPKISITLNEYGQPVGRNIKEFGNFIGTLVRKNIPVSSEDWRLVDSKKKFELWTKVKEYYELDESGIDYVITSAAKKWREFKADLKMKYFDETLSFEELIAKRDQRVKESDWEWLITYWMSPEAEVRTNRGKDNRSKLTMSHAAGSKSYARVGHELAEQQGRPARRDEIYVKTHTRKNKEGDIVPLPGAEIFIVNKR

SEQ ID NO: 169601 - protein, 58 aa, Zea Mays
MAEENHVVAGAGQKLYWSRQTRATAVQRLRFAAHCCLHALTCTLPKKRDENNHTLWDS

SEQ ID NO: 169602 - protein, 62 aa, Zea Mays
MPNHSPSPSQLVIFLLALVSVPWMLIPKPLLLKKQNQHSTRIFLLLLYYLQGSRGICVAIFL

SEQ ID NO: 169603 - protein, 118 aa, Zea Mays
MLSWNTLFVAPLPPMQGCLVWASGSRCAEGTSCFSEGAEAELGAEGTRRSSSGAEGTSCVFSNFLFGKCQKLMTDVILFLIFFSIFGIYTYIRFGRGVTYVTYVNMIFWYIYQIWNQI

SEQ ID NO: 169604 - protein, 135 aa, Zea Mays
MFLIYTTIVFSTHAYTQAWHDTCNIENNMAKEYAILIVLISMVLVVSCNVVDGSAADMRHATLPRKGLKEDIKLAINGVNSPVSSISGQASSNSETGTDNDMSSATAFTSKVTTTQGSHRGYEIHGFQGSKISPP

SEQ ID NO: 169605 - protein, 1020 aa, Zea Mays
MRDARAPQLQQRAHGGVGVVVVLLVLLAGAASGQQQAQPPPVVPPADLPDVERQLNNLTNDIAVTISDKFSFCVADLEEDWNEAFNYTSDLSFVDRCLTETQGDLVQRLCTPDEVKFYLASLYDRDGDKNINLKTNINCNISSWGRGCDAGWACAADPVVVVRDPRNGVPLRARGCQACCEGFFCPRGLTCMLPCPLGSYCPRATANQTTGLCDPYKYQITPNSTNGCGGADMWADIQSTEEIFCPAGYHCPSTTRKDNCSTGHYCRLGSTAQEKCIIKGSCDENTENENVKILGACIVGALCLLLLVIYNCSDKFLSIRERRKARSRENAIQLARQQLKAQEGWRAAKQFARRHVSGMQGHLSRTFSRRVSFRQPVDPHSSSRRVQEAPLMTQEIRNLTFTGVVAMAKDQQREITRPLIKVEFRDLTLMLGNNKKKKLLRSINGELRPGRVTAVMGPSGAGKTTFLNAVTGKLNGYKMTGSVLVNGKDVNIRSYKKIIGFVPQDDIVHGNLTVEENLWFSAKCRLPASMKHRDKVLVVERVIDSLDLQGTRNSLVGTVEKRGISGGQRKRVNVGIEMVMEPSLLILDEPTSGLDSSSSQLLLRALRHEALEGVNVCAVVHQPSYTLYNMFDDLMLLAKGGLVVYNGPVKTVEEYFTTTLGIHVPDRVNPPDHYIDILEGIVKPESAGIIKAKHLPVHWMLHNGYEVPSDMQDDAKEIGEQTPQLRSGSSVSAGSTPHCLPLRNAFAEERDRLEQHLSKPKDLSSRKTAGILMQYKYYLGRVTKQRLREARLLMVDFLILGLAGICLGTIAKLSDKTFGMPGYIYTIIAVSLLCKIAALRSFSLERLQYFRERESGMSSLAYFLARDTIDHFSTVVKPIIYLSMFYYFNNPRSTIADNYIVLLALVYCVTGIGYTFAICFSPGSAQLCSALVPVVLTLLATQKSTPTFIKRLCYSKWALEGFIIVNAKKYPGVWLITRCGLLFQNQFDIHNYKLCILILFMYGLFFRMVAFAAMILLKKR

SEQ ID NO: 169606 - protein, 605 aa, Zea Mays
MRDARAPQLQQRAHGGVGVVVVLLVLLAGAASGQQQAQPPPVVPPADLPDVERQLNNLTNDIAVTISDKFSFCVADLEEDWNEAFNYTSDLSFVDRCLTETQGDLVQRLCTPDEVKFYLASLYDRDGDKNINLKTNINCNISSWGRGCDAGWACAADPVVVVRDPRNGVPLRARGCQACCEGFFCPRGLTCMLPCPLGSYCPRATANQTTGLCDPYKYQITPNSTNGCGGADMWADIQSTEEIFCPAGYHCPSTTRKDNCSTGHYCRLGSTAQEKCIIKGSCDENTENENVKILGACIVGALCLLLLVIYNCSDKFLSIRERRKARSRENAIQLARQQLKAQEGWRAAKQFARRHVSGMQGHLSRTFSRRVSFRQPVDPHSSSRRVQEAPLMTQEMSDSAVFASESRSEITEVVMPSVVVDVSDGGEVVVVDTKEDKPAPKGKHRSTHTQVFKYAYGEIEKEKFQQQQESRNLTFTGVVAMAKDQQREITRPLIKVEFRDLTLMLGNNKKKKLLRSINGELRPGRVTAVMGPSGAGKTTFLNAVTGKLNGYKMTGSVLVNGKDVNIRSYKKIIGFVPQDDIVHGNLTVEENLWFSAKCSIATRCW

SEQ ID NO: 169607 - protein, 199 aa, Zea Mays
MASWCLTALHYLTALAVDLVGPPHVESASSAIVTQLHASTSMARIRCIARKSVIPFLPSRLVERPLRRTVPGQFSHLERLHRRLHEEQEQQDSSSLPQQEVESDRPPSPAPQPEMPPAPPQDIPAAGGDPDGDGDDADAGGSSSHDTELSEKLEPDGWIARPITRDAARGCHFHDALDTLLRRAFDRDTWSIEYRCVVY

SEQ ID NO: 169608 - protein, 552 aa, Zea Mays
MRNSVSERSFLIESDDDDDAAVEDGKRRGLGGGGGGDDDDDGSDSSSPCDSPRVVAARCSQPSSYTQQWPQSYRQSIDMYSSVHSPNLSFLGTPSLSRLSNSFLTNSFRGKPPEIISSLIKPLLPTSIASASDDQQQQQHEDVRKSSHYLPPSRKASSLQRIPEDQRPMVGGHEVGPYRQCSYTQGVMNGVNVLCGVGILSTPYAVKQGGWLGLVILAVLGALAWYTGILLRRCLDSKDGLETYPDIGHAAFGTAGRIIISIILYMELYACCIEYLILESDNLSKLFPNAHLTMGNLTLDSHMLFAILTALVVMPTTWLRDLSCLSFISAGGVIASIVIVSCLFWVGLVDHVGTVESEGTALNLPGIPIAIGLYGYCYSGHGVFPNIYSSLKKSNQFPAVLFTCIALSTVLFAAAAIMGYIMFGESTESQFTLNLPPNLVASKIAVWTTVTNPITKYALTMTPLALSLEELLPPNKQTYPNIMMLRSALVVSSLIIALSVPFFGLVMSLVGSFLTMFVAYILPCACFLSILRSKVTWYQIFLAEKYSVPCVL

SEQ ID NO: 169609 - protein, 868 aa, Zea Mays
MEAPPSALPWWLATTACSAPPTPAASSVAGRLAFLFLSPCLQRALLAAIDLLFLVVALAVILRARLARSNDGLSLGLDHREREPLLAKPATTDQAPPPLRRSWSFQHGLALATSAVQAAAALVLLLLLALLRRSGRTTGLLAAECAFLAAHAVAHLAAAWVVAVEKNTAGTSPARLHPLHLRFFWLATAAFAALYAGCAAARYAAAEPLVPDDPLAFAWLALSLPLLYFSATGSTGLVVDSNGGGRAAAATEETYATASWFSLATFGWINPLIAKGSRATLAADQVPPVAPPDTAEAAYVLFTSNWPAPAPGSSKAQRPVLTALLRSFWPQFLLTAVLGVAHLSVMYIGPSLVDRFVEFVRRGGEFTEGLQLVAVLLVGKAAETLASHHYEFQGQKLGMRINAALLAAVYRKSLRLSTGARRAHGAGAIVNYMEVDAQEVADVTHQLHNLWLMPLEIAVALALLYTHLGPAVLTAVAAIAVVTVVVAFANKLNIEYQFKFLAKRDERMKAITELLNYIGVIKLQAWEETFGNKIRKLREEELGWLAKSMYFMCANTVVLWSGPLAMTVLVFGTCVLTGIQLDAGKVFTATAFFRMLDGPMQSFPEAIAAVTQATVSVGRLDRYLLDAELDDSAVEQVDGTGIDTSAVVVEVCDGVFAWDMRGNKQRKESEDGESEEEKDVEGTPVLETVLKGINVEVRKGELVAVVGMVGSGKSSLLSCIMGEMEKISGTVRVCGSTAYVSQTAWIQNGTIQENILFGQPMYAERYKEVIHSCCLEKDFEMMEFGDQTEIGERGINLSGGQKQRIQLARAVYQHCDIYLLDDVFSAVDAHTGSNIFKECLRGTLKGKTVILVTHQMDFLHNVENIFVS

SEQ ID NO: 169610 - protein, 469 aa, Zea Mays
MYAERYKEVIHSCCLEKDFEMMEFGDQTEIGERGINLSGGQKQRIQLARAVYQHCDIYLLDDVFSAVDAHTGSNIFKECLRGTLKGKTVILVTHQMDFLHNVENIFVMRDGMIAQSGKYDELIEADSDFADLVAAHDSSMELVEQRCQVEKPEHFQPTTVVRIPSLRSRSIGKGEKVVVAPEIEAATSKIIKEEERESGQVSWRVYKLYMTEAWGWWGVMGMVSFAVVWQCSDMASDYWLSYETSGGIQFNPSLFIGVYVAIAAFSMVLQVIKTLLETVLGLQTAQIFFEKMFDSILHAPMSFFDTTPSGRILSRASSDQTTIDVVLAFFIGLTISMYISVLSTIIVTCQVAWPSVVAVIPLLLLNIWYRNLYLATSRELTRLEGVTKAPVIDHLSETVLGVTTIRCFKKEKEFFHENLDKINSSLRMYFHNYAANEWLGFRLELIGTLLLSITAFLMISLPSNFIKKG

SEQ ID NO: 169611 - protein, 1215 aa, Zea Mays
MEAPPSALPWWLATTACSAPPTPAASSVAGRLAFLFLSPCLQRALLAAIDLLFLVVALAVILRARLARSNDGLSLGLDHREREPLLAKPATTDQAPPPLRRSWSFQHGLALATSAVQAAAALVLLLLLALLRRSGRTTGLLAAECAFLAAHAVAHLAAAWVVAVEKNTAGTSPARLHPLHLRFFWLATAAFAALYAGCAAARYAAAEPLVPDDPLAFAWLALSLPLLYFSATGSTGLVVDSNGGGRAAAATEETYATASWFSLATFGWINPLIAKGSRATLAADQVPPVAPPDTAEAAYVLFTSNWPAPAPGSSKAQRPVLTALLRSFWPQFLLTAVLGVAHLSVMYIGPSLVDRFVEFVRRGGEFTEGLQLVAVLLVGKAAETLASHHYEFQGQKLGMRINAALLAAVYRKSLRLSTGARRAHGAGAIVNYMEVDAQEVADVTHQLHNLWLMPLEIAVALALLYTHLGPAVLTAVAAIAVVTVVVAFANKLNIEYQFKFLAKRDERMKAITELLNYIGVIKLQAWEETFGNKIRKLREEELGWLAKSMYFMCANTVVLWSGPLAMTVLVFGTCVLTGIQLDAGKVFTATAFFRMLDGPMQSFPEAIAAVTQATVSVGRLDRYLLDAELDDSAVEQVCDGVFAWDMRGNKQRKESEDGESEEEKDVEGTPVLETVLKGINVEVRKGELVAVVGMVGSGKSSLLSCIMGEMEKISGTVRVCGSTAYVSQTAWIQNGTIQENILFGQPMYAERYKEVIHSCCLEKDFEMMEFGDQTEIGERGINLSGGQKQRIQLARAVYQHCDIYLLDDVFSAVDAHTGSNIFKECLRGTLKGKTVILVTHQMDFLHNVENIFVMRDGMIAQSGKYDELIEADSDFADLVAAHDSSMELVEQRCQVEKPEHFQPTTVVRIPSLRSRSIGKGEKVVVAPEIEAATSKIIKEEERESGQVSWRVYKLYMTEAWGWWGVMGMVSFAVVWQCSDMASDYWLSYETSGGIQFNPSLFIGVYVAIAAFSMVLQVIKTLLETVLGLQTAQIFFEKMFDSILHAPMSFFDTTPSGRILSRASSDQTTIDVVLAFFIGLTISMYISVLSTIIVTCQVAWPSVVAVIPLLLLNIWYRNLYLATSRELTRLEGVTKAPVIDHLSETVLGVTTIRCFKKEKEFFHENLDKINSSLRMYFHNYAANEWLGFRLELIGTLLLSITAFLMISLPSNFIKKG

SEQ ID NO: 169612 - protein, 105 aa, Zea Mays
MKGVCPNPLSLLPPTVHDLTSSAMALSQPLVAAPSMAALPLLDVLASTGARLAPLSSQLEPTSGSGCQSCHQGCPLPLPLVGPCPCCAAGSPPRPLLPSVRPCLP

SEQ ID NO: 169613 - protein, 243 aa, Zea Mays
MQPYSPGVHVLKHFKGRTNEKSKDVTTLDWNGEGTLLATGSYDGQARIWSRDGDLKQTLFKHKGPIFSLKWNKKGDFLLSGSVDKTAIVWDTKTWECKQQFEFHSAPTLDVDWRNNNSFATCSTDNMIYVCKIGEQRPIKAFSGHQSEVNAIKWDPTGSFLASCSDDWTAKIWSMKQDKCIFDFKEHTKAQEQTILISSCFWLAHLLIQPSSFGKLSRDAFCTACPVIGNQCILLHLALTAST

SEQ ID NO: 169614 - protein, 535 aa, Zea Mays
MLRETNLSPPSHRAVLALAAAPLPRLPPAPAALSPAPPAMGLLTSAELNYLVFRYLQESGFIHAAFTLGYEAGIHKCGIDGNAVPPGALITIVQKGLQYIELEASSDENYDEVERDFALLEPLEIITKDVEELQQIVKRRKIERSQTELEKDKGKEKERNEEHERRPCGEREREQHEKEKEQVRDKDKSEKDRDHDKEKEKERERQHAERTDKVKHEDDSLVGAGPTPMDVSTTVQEISNTDVTVLEGHSSEVFACAWSPTSSLLASGSGDSTARIWTIPYGPCGSDMQPYSPGVHVLKHFKGRTNEKSKDVTTLDWNGEGTLLATGSYDGQARIWSRDGDLKQTLFKHKGPIFSLKWNKKGDFLLSGSVDKTAIVWDTKTWECKQQFEFHSAPTLDVDWRNNNSFATCSTDNMIYVCKIGEQRPIKAFSGHQSEVNAIKWDPTGSFLASCSDDWTAKIWSMKQDKCIFDFKEHTKEIYTIRWSPTGPGTNNPNQQLLLARKTRIIALRKKMKRSKGLTTHPYKPNTTTTKKNHL

SEQ ID NO: 169615 - protein, 553 aa, Zea Mays
MLRETNLSPPSHRAVLALAAAPLPRLPPAPAALSPAPPAMGLLTSAELNYLVFRYLQESGFIHAAFTLGYEAGIHKCGIDGNAVPPGALITIVQKGLQYIELEASSDENYDEVERDFALLEPLEIITKDVEELQQIVKRRKIERSQTELEKDKGKEKERNEEHERRPCGEREREQHEKEKEQVRDKDKSEKDRDHDKEKEKERERQHAERTDKVKHEDDSLVGAGDSTARIWTIPYGPCGSDMQPYSPGVHVLKHFKGRTNEKSKDVTTLDWNGEGTLLATGSYDGQARIWSRDGDLKQTLFKHKGPIFSLKWNKKGDFLLSGSVDKTAIVWDTKTWECKQQFEFHSAPTLDVDWRNNNSFATCSTDNMIYVCKIGEQRPIKAFSGHQSEVNAIKWDPTGSFLASCSDDWTAKIWSMKQDKCIFDFKEHTKEIYTIRWSPTGPGTNNPNQQLLLASASFDSTIKLWEVEQGRLLYSLSGHRQPVYSVAFSPDGEYLASGSLDQCLHIWSVKEGRVLKTYRGTGGIFEVCWNIEGTKIAACFSNNTVCVMDFRM

SEQ ID NO: 169616 - protein, 485 aa, Zea Mays
MLRETNLSPPSHRAVLALAAAPLPRLPPAPAALSPAPPAMGLLTSAELNYLVFRYLQESGFIHAAFTLGYEAGIHKCGIDGNAVPPGALITIVQKGLQYIELEASSDENYDEVERDFALLEPLEIITKDVEELQQIVKRRKIERSQTELEKDKGKEKERNEEHERRPCGEREREQHEKEKEQVRDKDKSEKDRDHDKEKEKERERQHAERTDKVKHEDDSLVGAGDSTARIWTIPYGPCGSDMQPYSPGVHVLKHFKGRTNEKSKDVTTLDWNGEGTLLATGSYDGQARIWSRDGDLKQTLFKHKGPIFSLKWNKKGDFLLSGSVDKTAIVWDTKTWECKQQFEFHSAPTLDVDWRNNNSFATCSTDNMIYVCKIGEQRPIKAFSGHQSEVNAIKWDPTGSFLASCSDDWTAKIWSMKQDKCIFDFKEHTKAQEQTILISSCFWLAHLLIQPSSFGKLSRDAFCTACPVIGNQCILLHLALTAST

SEQ ID NO: 169617 - protein, 245 aa, Zea Mays
MQPYSPGVHVLKHFKGRTNEKSKDVTTLDWNGEGTLLATGSYDGQARIWSRDGDLKQTLFKHKGPIFSLKWNKKGDFLLSGSVDKTAIVWDTKTWECKQQFEFHSAPTLDVDWRNNNSFATCSTDNMIYVCKIGEQRPIKAFSGHQSEVNAIKWDPTGSFLASCSDDWTAKIWSMKQDKCIFDFKEHTKEIYTIRWSPTGPGTNNPNQQLLLASSNEQKKNFLGHQWVFWDSAHGSAITSLIMQV

SEQ ID NO: 169618 - protein, 233 aa, Zea Mays
MLRETNLSPPSHRAVLALAAAPLPRLPPAPAALSPAPPAMGLLTSAELNYLVFRYLQESGFIHAAFTLGYEAGIHKCGIDGNAVPPGALITIVQKGLQYIELEASSDENYDEVERDFALLEPLEIITKDVEELQQIVKRRKIERSQTELEKDKGKEKERNEEHERRPCGEREREQHEKEKEQVRDKDKSEKDRDHDKEKEKERERQHAERTDKVKHEDDSLVGAGRWGMNTKE

SEQ ID NO: 169619 - protein, 183 aa, Zea Mays
MAAVPWSEFLLAPISSLRRPSSMAAAFFSRRVLPSPSPSPRRPACPAFIHGRSPPMSRPSQAPASIPVRAWRLRCSGAQALARSSSARHLLELAPVFLLGAQIPARLCVARVAFRCSYACCREALCSVRLHRVVVRAKLLAPRYRRFLVPRWSCAPAAPCSAKCVDQCSSRVGKIGTDVLAEY

SEQ ID NO: 169620 - protein, 270 aa, Zea Mays
MPIPCALLSAERLLHACLSLPGACSRQAPAPFRGRVLSSTAGRAQLLSLGAHSSLSPLVPAMAAVPWSEFLLARISSLRRPSSMAAAFFSRRVLPSPSPSPRRPACPAFIHGRSPPMSRPSQAPASIPVRAWRLRCSGAQALARSSSARHLLELAPVFLLGAQIPARLCVARVAFRCFYACCREALCSVHLHRVVVRAKLLAPRYRRFLVPAGRAPLQLPVRQNVWTSARRVLGRSAPMFLPNIDCLILGRSTHAWCSMNGSNRIALSKS

SEQ ID NO: 169621 - protein, 50 aa, Zea Mays
MHVSDPHPSERFRKLARFHCSCLEHHGGGGSGTVLADDGIDDDEIHLQEC

SEQ ID NO: 169622 - protein, 120 aa, Zea Mays
MHVSDPHPSERFRKLARFHCSCLEHHGGGGSGTVLADDGIDDDEFLLLLLVILPPLALASCTAFNGPSAGTGVAPNLDSERWKKWWLTTPRGYRALQARKLLFIFFLCYLSLYYHVLSDG

SEQ ID NO: 169623 - protein, 87 aa, Zea Mays
MRERLLANLRKLPQIVEGWNGPEDNDVQPSQFAKAVTKEVTYLHRILSQTLLEVEVQTIFRQVVQIFHSHITEAFSKLEVNTPSGKE

SEQ ID NO: 169624 - protein, 323 aa, Zea Mays
MTKIKAVLDQETWVAVDVPEEFQAIVLSLSSTYSSVNGMEMPSTDDNSKFSDHRSTSQEPTYSAKNIADNGKVTSGTGENKVEFTSQTENNVAGNLKSTLQTIVHGGVGYHMVNCGLILLKMLSEYVDISKCLPSLSLEVVQRVVEILKLFNTRTCQLVLGAGAMQVSGLKSITSKHLALASQIISFMHSLIPDIRRVLFLKIPEARKHLLMSELDRVAQDYKIHRDEIHNKLVQIMRERLLANLRKLPQIVEGWNGPEDNDVQPSQFAKAVTKEVTYLHRILSQTLLEVEVQTIFRQVVQIFHSHITEAFSKLEVNTPSGKE

SEQ ID NO: 169625 - protein, 275 aa, Zea Mays
MGNLDGTLGVDASNPTLQHGGTVIPDTQENDSSRGSNTLTRSTSKIPFVQGKTNDFSIINSLKNVRADVLRENTEAVFAACDAAHGRWAKLLGVRSALHPRLRLQEFLIIYNITEEFIAATEKIGGRLGYNIRGILHQQSKQFVDYQHNVRMTKIKAVLDQETWVAVDVPEEFQAIVLSLSSTYSSVNGMEMPSTDDNSKFSDHRSTSQEPTYSAKNIADNGKVTSGTGENKVEFTSQTENNVAGNLKSTLQTIVHGGVGYHMWFNTVEDVIRIR

SEQ ID NO: 169626 - protein, 482 aa, Zea Mays
MGNLDGTLGVDASNPTLQHGGTVIPDTQENDSSRGSNTLTRSTSKIPFVQGKTNDFSIINSLKNVRADVLRENTEAVFAACDAAHGRWAKLLGVRSALHPRLRLQEFLIIYNITEEFIAATEKIGGRLGYNIRGILHQQSKQFVDYQHNVRMTKIKAVLDQETWVAVDVPEEFQAIVLSLSSTYSSVNGMEMPSTDDNSKFSDHRSTSQEPTYSAKNIADNGKVTSGTGENKVEFTSQTENNVAGNLKSTLQTIVHGGVGYHMVNCGLILLKMLSEYVDISKCLPSLSLEVVQRVVEILKLFNTRTCQLVLGAGAMQVSGLKSITSKHLALASQIISFMHSLIPDIRRVLFLKIPEARKHLLMSELDRVAQDYKIHRDEIHNKLVQIMRERLLANLRKLPQIVEGWNGPEDNDVQPSQFAKAVTKLPICIAFFPKHCLRLRCKQYSGKWFKYSIHILQKHFQNWKSILPLAKNRYAAYLCIF

SEQ ID NO: 169627 - protein, 462 aa, Zea Mays
MGNLDGTLGVDASNPTLQHGGTVIPDTQENDSSRGSNTLTRSTSKIPFVQGKTNDFSIINSLKNVRADVLRENTEAVFAACDAAHGRWAKLLGVRSALHPRLRLQEFLIIYNITEEFIAATEKIGGRLGYNIRGILHQQSKQFVDYQHNVRMTKIKAVLDQETWVAVDVPEEFQAIVLSLSSTYSSVNGMEMPSTDDNSKFSDHRSTSQEPTYSAKNIADNGKVTSGTGENKVEFTSQTENNVAGNLKSTLQTIVHGGVGYHMVNCGLILLKMLSEYVDISKCLPSLSLEVVQRVVEILKLFNTRTCQLVLGAGAMQVSGLKSITSKHLALASQIISFMHSLIPDIRRVLFLKIPEARKHLLMSELDRVAQDYKIHRDEIHNKLVQIMRERLLANLRKLPQIVEGWNGPEDNDVQPSQFAKAVTKASGSNIPFTYYRSIFKIGSQYSLWQRIGMLLICASFS

SEQ ID NO: 169628 - protein, 615 aa, Zea Mays
MFETSSSSMFFFVDAISYGNVDEEESFILRDRLLPLIICLLRTDKLPAVLRIYRDTLITVMKASIKTTVGELLPVLTARPIDSDSVTGDRATDADAGGQSLANKLRSLSSEGFVQLLSAIFRIVQVHLQQAAEVKRIVEWVMGNLDGTLGVDASNPTLQHGGTVIPDTQENDSSRGSNTLTRSTSKIPFVQGKTNDFSIINSLKNVRADVLRENTEAVFAACDAAHGRWAKLLGVRSALHPRLRLQEFLIIYNITEEFIAATEKIGGRLGYNIRGILHQQSKQFVDYQHNVRMTKIKAVLDQETWVAVDVPEEFQAIVLSLSSTYSSVNGMEMPSTDDNSKFSDHRSTSQEPTYSAKNIADNGKVTSGTGENKVEFTSQTENNVAGNLKSTLQTIVHGGVGYHMVNCGLILLKMLSEYVDISKCLPSLSLEVVQRVVEILKLFNTRTCQLVLGAGAMQVSGLKSITSKHLALASQIISFMHSLIPDIRRVLFLKIPEARKHLLMSELDRVAQDYKIHRDEIHNKLVQIMRERLLANLRKLPQIVEGWNGPEDNDVQPSQFAKAVTKEVTYLHRILSQTLLEVEVQTIFRQVVQIFHSHITEAFSKLEVNTPSGKE

SEQ ID NO: 169629 - protein, 418 aa, Zea Mays
MILSTVKRKASSPLNGTDHEGNVDEEESFILRDRLLPLIICLLRTDKLPAVLRIYRDTLITVMKASIKTTVGELLPVLTARPIDSDSVTGDRATDADAGGQSLANKLRSLSSEGFVQLLSAIFRIVQVHLQQAAEVKRIVEWVMGNLDGTLGVDASNPTLQHGGTVIPDTQENDSSRGSNTLTRSTSKIPFVQGKTNDFSIINSLKNVRADVLRENTEAVFAACDAAHGRWAKLLGVRSALHPRLRLQEFLIIYNITEEFIAATEKIGGRLGYNIRGILHQQSKQFVDYQHNVRMTKIKAVLDQETWVAVDVPEEFQAIVLSLSSTYSSVNGMEMPSTDDNSKFSDHRSTSQEPTYSAKNIADNGKVTSGTGENKVEFTSQTENNVAGNLKSTLQTIVHGGVGYHMWFNTVEDVIRIR

SEQ ID NO: 169630 - protein, 925 aa, Zea Mays
MASRPPLRTTSVASVSSSTESPTSTGPPGGVPQSITALLNNPLPSAAASSYSWLSWPPPTITLPDAAPPPPSHPCEVTRADFAPYLAAVSDPFARFADIRLHASAELAAASDAEGAPAVSSGLAACLREVPALFFKEDFALEDGPTFQVACPLDDEALQERLGQHLDVVEAHLVREIALRSESFYEAQGRLRGLDGEIVTTVGRIRELREVVRVLTGDLVGAARQVQELNATRGNLVTLQQKLTVILYVSQALTALKLLVAAADCAGALDVIDNLQNLLLGTSLDSVNSILSAEFVHAAVPDGKAVDVMILSTVKRKASSPLNGTDHEGNVDEEESFILRDRLLPLIICLLRTDKLPAVLRIYRDTLITVMKASIKTTVGELLPVLTARPIDSDSVTGDRATDADAGGQSLANKLRSLSSEGFVQLLSAIFRIVQVHLQQAAEVKRIVEWVMGNLDGTLGVDASNPTLQHGGTVIPDTQENDSSRGSNTLTRSTSKIPFVQGKTNDFSIINSLKNVRADVLRENTEAVFAACDAAHGRWAKLLGVRSALHPRLRLQEFLIIYNITEEFIAATEKIGGRLGYNIRGILHQQSKQFVDYQHNVRMTKIKAVLDQETWVAVDVPEEFQAIVLSLSSTYSSVNGMEMPSTDDNSKFSDHRSTSQEPTYSAKNIADNGKVTSGTGENKVEFTSQTENNVAGNLKSTLQTIVHGGVGYHMVNCGLILLKMLSEYVDISKCLPSLSLEVVQRVVEILKLFNTRTCQLVLGAGAMQVSGLKSITSKHLALASQIISFMHSLIPDIRRVLFLKIPEARKHLLMSELDRVAQDYKIHRDEIHNKLVQIMRERLLANLRKLPQIVEGWNGPEDNDVQPSQFAKAVTKEVTYLHRILSQTLLEVEVQTIFRQVVQIFHSHITEAFSKLEVNTPSGKE

SEQ ID NO: 169631 - protein, 617 aa, Zea Mays
MILSTVKRKASSPLNGTDHEGNVDEEESFILRDRLLPLIICLLRTDKLPAVLRIYRDTLITVMKASIKTTVGELLPVLTARPIDSDSVTGDRATDADAGGQSLANKLRSLSSEGFVQLLSAIFRIVQVHLQQAAEVKRIVEWVMGNLDGTLGVDASNPTLQHGGTVIPDTQENDSSRGSNTLTRSTSKIPFVQGKTNDFSIINSLKNVRADVLRENTEAVFAACDAAHGRWAKLLGVRSALHPRLRLQEFLIIYNITEEFIAATEKIGGRLGYNIRGILHQQSKQFVDYQHNVRMTKIKAVLDQETWVAVDVPEEFQAIVLSLSSTYSSVNGMEMPSTDDNSKFSDHRSTSQEPTYSAKNIADNGKVTSGTGENKVEFTSQTENNVAGNLKSTLQTIVHGGVGYHMVNCGLILLKMLSEYVDISKCLPSLSLEVVQRVVEILKLFNTRTCQLVLGAGAMQVSGLKSITSKHLALASQIISFMHSLIPDIRRVLFLKIPEARKHLLMSELDRVAQDYKIHRDEIHNKLVQIMRERLLANLRKLPQIVEGWNGPEDNDVQPSQFAKAVTKEVTYLHRILSQTLLEVEVQTIFRQVVQIFHSHITEAFSKLEVNTPSGKE

SEQ ID NO: 169632 - protein, 461 aa, Zea Mays
MGNLDGTLGVDASNPTLQHGGTVIPDTQENDSSRGSNTLTRSTSKIPFVQGKTNDFSIINSLKNVRADVLRENTEAVFAACDAAHGRWAKLLGVRSALHPRLRLQEFLIIYNITEEFIAATEKIGGRLGYNIRGILHQQSKQFVDYQHNVRMTKIKAVLDQETWVAVDVPEEFQAIVLSLSSTYSSVNGMEMPSTDDNSKFSDHRSTSQEPTYSAKNIADNGKVTSGTGENKVEFTSQTENNVAGNLKSTLQTIVHGGVGYHMVNCGLILLKMLSEYVDISKCLPSLSLEVVQRVVEILKLFNTRTCQLVLGAGAMQVSGLKSITSKHLALASQIISFMHSLIPDIRRVLFLKIPEARKHLLMSELDRVAQDYKIHRDEIHNKLVQIMRERLLANLRKLPQIVEGWNGPEDNDVQPSQFAKAVTKEVTYLHRILSQTLLEVEVQTIFRFAEHDLEKYLTLQ

SEQ ID NO: 169633 - protein, 286 aa, Zea Mays
MVVLVATAARWPGGSTAARARPPAARGRAPLRVAAEPEHKAATVRFEKYRLLSWMKPIRHDVRAQMSNVNVGAGSYGGDEANGHGEHLDTSATGDPNKLAKQLSGSRYLQPVGVVLFLCALATSFFVFFKGQSSAVVAMLAKSGFTAAFTLIFVSEIGDKTFFIAALLAMQYQRALVLLGSMAALSLMTIVSVIIGRIFQSVPAQFQTTLPIGEYSAVALLAFFGFKSIKDALALPDNANGNLQGNSESGELAEAEELVKEKVVLVQKVLVLRNLFKIIIACFYTT

SEQ ID NO: 169634 - protein, 71 aa, Zea Mays
MKGVPVLVRFKSVKHQMLRLGTCITCPRSSCCGDWRRGRRSRGGTQVSARTAGPATSASGGKAETPICNWS

SEQ ID NO: 169635 - protein, 67 aa, Zea Mays
MHATSLLFVFCLLIICLQAPLFILLRNKHFFGKRKHKKPLLFYVHALHVTLGFLCNMVISLMNILPR

SEQ ID NO: 169636 - protein, 270 aa, Zea Mays
MQYFFLLLDKDHWLMRWPIVILMVTSSGSQETICYTKGLAPDCWLAHMDRLLTEGVDQDEKKSIVENMIKLVDLYYAALDGHKVDVDRHLRVKAYPHFMEKKGFESYHSSSILGRIYDETEEIIAQQCDEQIQITTLPCFSEVEATPECTSLWEHRYQEYLTKSRGLFDLGKEEKNDEFQKLYQHYKHLLYDADELEETSRDLSDVFMEACAIYRIVYERAWCTRSVSRCRFVWNVAGAALCHLHATKYAAQRGEKTALCPLSVIRQLYI

SEQ ID NO: 169637 - protein, 835 aa, Zea Mays
MDARDWVYEGGPHRVQKNCALPTARMMMGVRLLRLCGDLGRPRKCRGWSLAGGRRWQPRTPRGSTDDHRGGPHRSWRCACNHLHARCRRAITDVVGVDEAGFAGGQNHVDWEPKVPARGGRSQVVAVAVTRAKTWLAVAVYKDPGKETKKKDSEQGDIKKCTSPVRCYFICTKSGWRGDEAYIPIDKCRKLFMHIHTAPTIANYMKRFHLILSKTLTLDVDLSTIDVILIDDEPCRDEHGNIVMLDGKRLIHTDGTGFISENLAKKCPSRIIKGKKSKVYMHQGETTPLLMQVRLFYNGYAVKGTLLVDKRISNNTIVIRPSMVKVKADPKLCRMKSLSSLEIVSTSHQSNRTSTSRILIALLHYGGVKAEYFMELLHNAIEGVNNARYSFRHALKLAYGYANMEDSMLERMIHSGIPLEEPYLLSRLSFMAKQEMKVFREGKLPIDECYYLMGTTDPTGTLKPNEVCVILDSGQYSGDVLVFKHPGLHFGDIHILTARQIDGLEKNFIGYSKNAILFPTSGQRSLADEMANSDFDGDEFWVSRNNMLLKTFEKRSEPWVELLKLKETQHRLSKPGDLNELILERVLFNECLTTMFIPNYTKGLAPDCWLAHMDRLLTEGVDQDEKKSIVENMIKLVDLYYAALDGHKVDVDRHLRVKAYPHFMEKKGFESYHSSSILGRIYDETEEIIAQQCDEQIQITTLPCFSEVEATPECTSLWEHRYQEYLTKSRGLFDLGKEEKNDEFQKLYQHYKHLLYDADELEETSRDLSDVFMEACAIYRIVYERAWCTRSVSRCRFVWNVAGAALCHLHATKYAAQRGEKTALCPLSVIRQLYI

SEQ ID NO: 169638 - protein, 592 aa, Zea Mays
MLDGKRLIHTDGTGFISENLAKKCPSRIIKGKKSKVYMHQGETTPLLMQVRLFYNGYAVKGTLLVDKRISNNTIVIRPSMVKVKADPKLCRMKSLSSLEIVSTSHQSNRTSTSRILIALLHYGGVKAEYFMELLHNAIEGVNNARYSFRHALKLAYGYANMEDSMLERMIHSGIPLEEPYLLSRLSFMAKQEMKVFREGKLPIDECYYLMGTTDPTGTLKPNEVCVILDSGQYSGDVLVFKHPGLHFGDIHILTARQIDGLEKNFIGYSKNAILFPTSGQRSLADEMANSDFDGDEFWVSRNNMLLKTFEKRSEPWVELLKLKETQHRLSKPGDLNELILERVLFNECLTTMFIPNYTKGLAPDCWLAHMDRLLTEGVDQDEKKSIVENMIKLVDLYYAALDGHKVDVDRHLRVKAYPHFMEKKGFESYHSSSILGRIYDETEEIIAQQCDEQIQITTLPCFSEVEATPECTSLWEHRYQEYLTKSRGLFDLGKEEKNDEFQKLYQHYKHLLYDADELEETSRDLSDVFMEACAIYRIVYERAWCTRSVSRCRFVWNVAGAALCHLHATKYAAQRGEKTALCPLSVIRQLYI

SEQ ID NO: 169639 - protein, 495 aa, Zea Mays
MQPPGPPLATPQPLPPAVAAELAQLESRLGQVAGEPARHELAELGEVAAVRVLRRIARSQEQVRTLTGYIVSAAVQETFALNAQAVPTAESRACNSSAPSLSDGSVQGPQCASELRMEEVTAGLSNYRMAICEGQGQEDHAVMMAIDNPPDCIPPWGWDQDCIEVDNLVPGIASQANQMPMQYGDRDRIQELVSIVPHGVRMLAESLENGRASELQNYVQNGIPEQWMVPADQRMESTSSRLQHVLKCLQGVGPFGHHLGPECAIMIPKPEPNVVVENLFREIASPHITDNKLRNTASPQMCALEDLEFSKRFLILSYLCRNNLEDEVVLTVDYIKSLKFLSMVHFESQIWRKFGQKNFQASNRAATDRAKNFDSDPTTTKLYHCNIEIRGESIFFVLKGPYMENKRTYLQKVLGDDNVLLVKFMVSSDKSTDFYRQHYHRVVEDGIVLGLRRYNFFVYKDPGKETKKKDSEQGDIKKCTSPVSFDTFQNSNTGC

SEQ ID NO: 169640 - protein, 643 aa, Zea Mays
MHIHTAPTIANYMKRFHLILSKTLTLDVDLSTIDVILIDDEPCRDEHGNIVMLDGKRLIHTDGTGFISENLAKKCPSRIIKGKKSKVYMHQGETTPLLMQVRLFYNGYAVKGTLLVDKRISNNTIVIRPSMVKVKADPKLCRMKSLSSLEIVSTSHQSNRTSTSRILIALLHYGGVKAEYFMELLHNAIEGVNNARYSFRHALKLAYGYANMEDSMLERMIHSGIPLEEPYLLSRLSFMAKQEMKVFREGKLPIDECYYLMGTTDPTGTLKPNEVCVILDSGQYSGDVLVFKHPGLHFGDIHILTARQIDGLEKNFIGYSKNAILFPTSGQRSLADEMANSDFDGDEFWVSRNNMLLKTFEKRSEPWVELLKLKETQHRLSKPGDLNELILERVLFNECLTTMFIPNYTKGLAPDCWLAHMDRLLTEGVDQDEKKSIVENMIKLVDLYYAALDGHKVDVDRHLRVKAYPHFMEKKGFESYHSSSILGRIYDETEEIIAQQCDEQIQITTLPCFSEVEATPECTSLWEHRYQEYLTKSRGLFDLGKEEKNDEFQKLYQHYKHLLYDADELEETSRDLSDVFMEACAIYRIVYERAWCTRSVSRCRFVWNVAGAALCHLHATKYAAQRGEKTALCPLSVIRQLYI

SEQ ID NO: 169641 - protein, 555 aa, Zea Mays
MHQGETTPLLMQVRLFYNGYAVKGTLLVDKRISNNTIVIRPSMVKVKADPKLCRMKSLSSLEIVSTSHQSNRTSTSRILIALLHYGGVKAEYFMELLHNAIEGVNNARYSFRHALKLAYGYANMEDSMLERMIHSGIPLEEPYLLSRLSFMAKQEMKVFREGKLPIDECYYLMGTTDPTGTLKPNEVCVILDSGQYSGDVLVFKHPGLHFGDIHILTARQIDGLEKNFIGYSKNAILFPTSGQRSLADEMANSDFDGDEFWVSRNNMLLKTFEKRSEPWVELLKLKETQHRLSKPGDLNELILERVLFNECLTTMFIPNYTKGLAPDCWLAHMDRLLTEGVDQDEKKSIVENMIKLVDLYYAALDGHKVDVDRHLRVKAYPHFMEKKGFESYHSSSILGRIYDETEEIIAQQCDEQIQITTLPCFSEVEATPECTSLWEHRYQEYLTKSRGLFDLGKEEKNDEFQKLYQHYKHLLYDADELEETSRDLSDVFMEACAIYRIVYERAWCTRSVSRCRFVWNVAGAALCHLHATKYAAQRGEKTALCPLSVIRQLYI

SEQ ID NO: 169642 - protein, 569 aa, Zea Mays
MQPPGPPLATPQPLPPAVAAELAQLESRLGQVAGEPARHELAELGEVAAVRVLRRIARSQEQVRTLTGYIVSAAVQETFALNAQAVPTAESRACNSSAPSLSDGSVQGPQCASELRMEEVTAGLSNYRMAICEGQGQEDHAVMMAIDNPPDCIPPWGWDQDCIEVDNLVPGIASQANQMPMQYGDRDRIQELVSIVPHGVRMLAESLENGRASELQNYVQNGIPEQWMVPADQRMESTSSRLQHVLKCLQGVGPFGHHLGPECAIMIPKPEPNVVVENLFREIASPHITDNKLRNTASPQMCALEDLEFSKRFLILSYLCRNNLEDEVVLTVDYIKSLKFLSMVHFESQIWRKFGQKNFQASNRAATDRAKNFDSDPTTTKLYHCNIEIRGESIFFVLKFTRIQEKRRKRKTVNRGISRNALRLFHLILSKTLTLDVDLSTIDVILIDDEPCRDEHGNIVMLDGKRLIHTDGTGFISENLAKKCPSRIIKGKKSKVYMHQGETTPLLMQVRLFYNGYAVKGTLLVDKRISNNTIVIRPSMVKVKADPKLCRMKSLSSLEIVSTSCIWIC

SEQ ID NO: 169643 - protein, 100 aa, Zea Mays
MFLLAVLRHSTRIIYPRSCLHQTNWTLDPLRPIHARVAASNTMCASFRHIGLLLLGRHIEVLDIPSLWKTCLSPSRSKGKTLLKCFAIFPCRQFSRKPGP

SEQ ID NO: 169644 - protein, 613 aa, Zea Mays
MQPPGPPLATPQPLPPAVAAELAQLESRLGQVAGEPARHELAELGEVAAVRVLRRIARSQEQVRTLTGYIVSAAVQETFALNAQAVPTAESRACNSSAPSLSDGSVQGPQCASELRMEEVTAGLSNYRMAICEGQGQEDHAVMMAIDNPPDCIPPWGWDQDCIEVDNLVPGIASQANQMPMQYGDRDRIQELVSIVPHGVRMLAESLENGRASELQNYVQNGIPEQWMVPADQRMESTSSRLQHVLKCLQGVGPFGHHLGPECAIMIPKPEPNVVVENLFREIASPHITDNKLRNTASPQMCALEDLEFSKRFLILSYLCRNNLEDEVVLTVDYIKSLKFLSMVHFESQIWRKFGQKNFQASNRAATDRAKNFDSDPTTTKLYHCNIEIRGESIFFVLKGPYMENKRTYLQKVLGDDNVLLVKFMVSSDKSTDFYRQHYHRVVEDGIVLGLRRYNFFVYKDPGKETKKKDSEQGDIKKCTSPVRCYFICTKSGWRGDEAYIPIDKCRKLFMHIHTAPTIANYMKRFHLILSKTLTLDVDLSTIDVILIDDEPCRDEHGNIVMLDGKRLIHTDGTGFISENLAKKCPSRIIKGKKSKVCTLGPVLAIFFTETYY

SEQ ID NO: 169645 - protein, 209 aa, Zea Mays
MAGRCVYKDPGKETKKKDSEQGDIKKCTSPVRCYFICTKSGWRGDEAYIPIDKCRKLFMHIHTAPTIANYMKRFHLILSKTLTLDVDLSTIDVILIDDEPCRDEHGNIVMLDGKRLIHTDGTGFISENLAKKCPSRIIKGKKSKVYMHQGETTVRLFYNGYAVKGTLLVDKRIYLSINRDPYIIEIDLSVNGDPSHIGMLYRDSNTPSV

SEQ ID NO: 169646 - protein, 412 aa, Zea Mays
MQPPGPPLATPQPLPPAVAAELAQLESRLGQVAGEPARHELAELGEVAAVRVLRRIARSQEQVRTLTGYIVSAAVQETFALNAQAVPTAESRACNSSAPSLSDGSVQGPQCASELRMEEVTAGLSNYRMAICEGQGQEDHAVMMAIDNPPDCIPPWGWDQDCIEVDNLVPGIASQANQMPMQYGDRDRIQELVSIVPHGVRMLAESLENGRASELQNYVQNGIPEQWMVPADQRMESTSSRLQHVLKCLQGVGPFGHHLGPECAIMIPKPEPNVVVENLFREIASPHITDNKLRNTASPQMCALEDLEFSKRFLILSYLCRNNLEDEVVLTVDYIKSLKFLSMVHFESQIWRKFGQKNFQASNRAATDRAKNFDSDPTTTKLYHCNIEIRGESIFFVLKVSFDTFQNSNTGC

SEQ ID NO: 169647 - protein, 666 aa, Zea Mays
MQPPGPPLATPQPLPPAVAAELAQLESRLGQVAGEPARHELAELGEVAAVRVLRRIARSQEQVRTLTGYIVSAAVQETFALNAQAVPTAESRACNSSAPSLSDGSVQGPQCASELRMEEVTAGLSNYRMAICEGQGQEDHAVMMAIDNPPDCIPPWGWDQDCIEVDNLVPGIASQANQMPMQYGDRDRIQELVSIVPHGVRMLAESLENGRASELQNYVQNGIPEQWMVPADQRMESTSSRLQHVLKCLQGVGPFGHHLGPECAIMIPKPEPNVVVENLFREIASPHITDNKLRNTASPQMCALEDLEFSKRFLILSYLCRNNLEDEVVLTVDYIKSLKFLSMVHFESQIWRKFGQKNFQASNRAATDRAKNFDSDPTTTKLYHCNIEIRGESIFFVLKGPYMENKRTYLQKVLGDDNVLLVKFMVSSDKSTDFYRQHYHRVVEDGIVLGLRRYNFFVYKDPGKETKKKDSEQGDIKKCTSPVRCYFICTKSGWRGDEAYIPIDKCRKLFMHIHTAPTIANYMKRFHLILSKTLTLDVDLSTIDVILIDDEPCRDEHGNIVMLDGKRLIHTDGTGFISENLAKKCPSRIIKGKKSKVYMHQGETTPLLMQVRLFYNGYAVKGTLLVDKRIYLSINRDPYIIEIDLSVNGDPSHIGMLYRDSNTPSV

SEQ ID NO: 169648 - protein, 473 aa, Zea Mays
MQPPGPPLATPQPLPPAVAAELAQLESRLGQVAGEPARHELAELGEVAAVRVLRRIARSQEQVRTLTGYIVSAAVQETFALNAQAVPTAESRACNSSAPSLSDGSVQGPQCASELRMEEVTAGLSNYRMAICEGQGQEDHAVMMAIDNPPDCIPPWGWDQDCIEVDNLVPGIASQANQMPMQYGDRDRIQELVSIVPHGVRMLAESLENGRASELQNYVQNGIPEQWMVPADQRMESTSSRLQHVLKCLQGVGPFGHHLGPECAIMIPKPEPNVVVENLFREIASPHITDNKLRNTASPQMCALEDLEFSKRFLILSYLCRNNLEDEVVLTVDYIKSLKFLSMVHFESQIWRKFGQKNFQASNRAATDRAKNFDSDPTTTKLYHCNIEIRGESIFFVLKGPYMENKRTYLQKVLGDDNVLLVKFMVSSDKSTDFYRQHYHRVVEDGIVLGLRRYNFFAVLGLLVFRLIPLVFF

SEQ ID NO: 169649 - protein, 160 aa, Zea Mays
MAPTRALPALWLSMAAAASYVVGEKYCRLCYLKGSSMVPTIQAQGDVGLLDRRCLAGYDFSHGDVVVFRLSTDHGMKMVQRLIALPGDWIQIPEKRDIRQVPSGHCWVEGDNAGNSWDSRHYGPVRAFSLTIILSRFSSICSVSFFNKNCHLYVGSVYTF

SEQ ID NO: 169650 - protein, 349 aa, Zea Mays
MLLHLPPFAQLLSSESRRPMCVKSQLILNIIYVYIFANENSVSKVTAAEATAKEIESQAAAQVFRGCTWIFRRGCMLISLDSNSALVICLDIDRKHLLIQIEPKGVNSSRWNKSTRAHPVVLFPRISSWRNLRLELERGCMLISLDSNSALVICLDIDRKHLLIQIEPKGVNSSRSIDIDQQSEKHKSMSRVSASVERELVHEQPTDDDASALAYLVRRRCPNTYLFFYGHALEDRVVRMTFIAKPTYSSRRKYLNDLLDADLVSLSRGDRKRWHNMRAAAEAAAEAAAQAARLLLRLSLLTMQAMKTKPDGAAGSVCSLELQSLIYFLLILDLVNLGHCAYHAECLVF

SEQ ID NO: 169651 - protein, 242 aa, Zea Mays
MISGRSLVRRAEGDVIAGRSGAGEGAGGVVVGVAVGRRACALEHLRVVGRAAHRRRAVLPGAAVARAAVGDARALARYDAAAGRCDDAEVPGAHGVYVARASRGAAVAAAARGRHAHRHVEAVDEADVVEVRPAAARRGERDLDERDRRRRPAALARDVARAAVGRGAGEAPGGGVGHAARARPQRAGPCPRRRRVHAGRGGRRQVEARPRERRRAGAVERAHPHRVLAGVGEDERRRSIHA

SEQ ID NO: 169652 - protein, 411 aa, Zea Mays
MGHIMKKTMIRAKSALQSLTIDEHGVDGSKIYLYGEGWNFGEVAENQRGINGSQLNMSGTGIGSFNDRIRDAINGGSPFGNPLQQGFSTGLFLEPNGFYQGNETETRLTLATYADHIQIGLAGNLKDYVVISHTGEARKGSEIRTFDGSPVGYASSPIETINYASAHDNETLFDIISLKTPMDLSIDERCRINHLSTSMIALSQGIPFFHAGDEILRSKSLDRDSYDSGDWFNKIDFTYETNNWGVGLPPREKNEGSWPLMKPRLENPSFKPAKHDIIAALDKFIDILKIRYSSPLFRLTTASDIVQRVHFHNTGPSLVPGVIVMSIEDARNDRHDMAQIDETFSCVVTVFNVCPYEVSIEIPDLASLRLQLHPVQVNSSDALARQSAYDTATGRFTVPKRTAAVFVEPRC

SEQ ID NO: 169653 - protein, 499 aa, Zea Mays
MVQALNRLGLRVVMDVVYNHLYSSGPFAITSVLDKIVPGYYLRRDSNGQTENSAAVNNTASEHFMVDRLIVDDLLNWAVNYKVDGFRFDLMGHIMKKTMIRAKSALQSLTIDEHGVDGSKIYLYGEGWNFGEVAENQRGINGSQLNMSGTGIGSFNDRIRDAINGGSPFGNPLQQGFSTGLFLEFCLGPFLQPNGFYQGNETETRLTLATYADHIQIGLAGNLKDYVVISHTGEARKGSEIRTFDGSPINYASAHDNETLFDIISLKTPMDLSIDERCRINHLSTSMIALSQGIPFFHAGDEILRSKSLDRDSYDSGDWFNKIDFTYETNNWGVGLPPREKNEGSWPLMKPRLENPSFKPAKHDIIAALDKFIDILKIRYSSPLFRLTTASDIVQRVHFHNTGPSLVPGVIVMSIEDARNDRHDMAQIDETFSCVVTVFNVCPYEVSIEIPDLASLRLQLHPVQVNSSDALARQSAYDTATGRFTVPKRTAAVFVEPRC

SEQ ID NO: 169654 - protein, 882 aa, Zea Mays
MGFLLDARAYWVTKSLIAWNISDQKTSLFLYASRNATMCMSSQDMKGYDSKVELQPENDGLPSSVTQKFPFISSYRAFRIPSSVDVATLVKCQLAVASFDAHGNRQDVTGLQLPGVLDDMFAYTGPLGTIFSEEAVSMYLWAPTAQDVSVSFYDGPAGPLLETVQLNELNGVWSVTGPRNWENRYYLYEVTVYHQTTGNIEKCLAADPYARGLSANSTRTWLVDINNETLKPLAWDGLAAEKPRLDSFSDISIYELHIRDFSAHDSTVDCPFRGGFCAFTFQDSVGIEHLKKLSDAGLTHVHLLPSFQFGGVDDIKSNWKCVDEIELSKLPPGSDLQQAAIVAIQEEDPYNWGYNPVVWGVPKGSYASNPDGPSRIIEYRLMVQALNRLGLRVVMDVVYNHLYSSGPFAITSVLDKIVPGYYLRRDSNGQTENSAAVNNTASEHFMVDRLIVDDLLNWAVNYKVDGFRFDLMGHIMKKTMIRAKSALQSLTIDEHGVDGSKIYLYGEGWNFGEVAENQRGINGSQLNMSGTGIGSFNDRIRDAINGGSPFGNPLQQGFSTGLFLEPNGFYQGNETETRLTLATYADHIQIGLAGNLKDYVVISHTGEARKGSEIRTFDGSPVGYASSPIETINYASAHDNETLFDIISLKTPMDLSIDERCRINHLSTSMIALSQGIPFFHAGDEILRSKSLDRDSYDSGDWFNKIDFTYETNNWGVGLPPREKNEGSWPLMKPRLENPSFKPAKHDIIAALDKFIDILKIRYSSPLFRLTTASDIVQRVHFHNTGPSLVPGVIVMSIEDARNDRHDMAQIDETFSCVVTVFNVCPYEVSIEIPDLASLRLQLHPVQVNSSDALARQSAYDTATGRFTVPKRTAAVFVEPRC

SEQ ID NO: 169655 - protein, 629 aa, Zea Mays
MLLHAGPSFLLAPPPRFAAAPSSASPRRSRTPQSSPPTSHFARPADPVAQRVRPVAPRPPMATAEEGASSDVGVAVAESAQGFLLDARAYWVTKSLIAWNISDQKTSLFLYASRNATMCMSSQDMKGYDSKVELQPENDGLPSSVTQKFPFISSYRAFRIPSSVDVATLVKCQLAVASFDAHGNRQDVTGLQLPGVLDDMFAYTGPLGTIFSEEAVSMYLWAPTAQDVSVSFYDGPAGPLLETVQLNELNGVWSVTGPRNWENRYYLYEVTVYHQTTGNIEKCLAADPYARGLSANSTRTWLVDINNETLKPLAWDGLAAEKPRLDSFSDISIYELHIRDFSAHDSTVDCPFRGGFCAFTFQDSVGIEHLKKLSDAGLTHVHLLPSFQFGGVDDIKSNWKCVDEIELSKLPPGSDLQQAAIVAIQEEDPYNWGYNPVVWGVPKGSYASNPDGPSRIIEYRLMVQALNRLGLRVVMDVVYNHLYSSGPFAITSVLDKIVPGYYLRRDSNGQTENSAAVNNTASEHFMVDRLIVDDLLNWAVNYKVDGFRFDLMGHIMKKTMPNGFYQGNETETRLTLATYADHIQIGLAGNLKDYVVISHTGEARKGSEIRTFDGSPVGYASSPIETVNF

SEQ ID NO: 169656 - protein, 808 aa, Zea Mays
MLLHAGPSFLLAPPPRFAAAPSSASPRRSRTPQSSPPTSHFARPADPVAQRVRPVAPRPPMATAEEGASSDVGVAVAESAQGFLLDARAYWVTKSLIAWNISDQKTSLFLYASRNATMCMSSQDMKGYDSKVELQPENDGLPSSVTQKFPFISSYRAFRIPSSVDVATLVKCQLAVASFDAHGNRQDVTGLQLPGVLDDMFAYTGPLGTIFSEEAVSMYLWAPTAQDVSVSFYDGPAGPLLETVQLNELNGVWSVTGPRNWENRYYLYEVTVYHQTTGNIEKCLAADPYARGLSANSTRTWLVDINNETLKPLAWDGLAAEKPRLDSFSDISIYELHIRDFSAHDSTVDCPFRGGFCAFTFQDSVGIEHLKKLSDAGLTHVHLLPSFQFGGVDDIKSNWKCVDEIELSKLPPGSDLQQAAIVAIQEEDPYNWGYNPVVWGVPKGSYASNPDGPSRIIEYRLMVQALNRLGLRVVMDVVYNHLYSSGPFAITSVLDKIVPGYYLRRDSNGQTENSAAVNNTASEHFMVDRLIVDDLLNWAVNYKVDGFRFDLMGHIMKKTMIRAKSALQSLTIDEHGVDGSKIYLYGEGWNFGEVAENQRGINGSQLNMSGTGIGSFNDRIRDAINGGSPFGNPLQQGFSTGLFLEFCLGPFLQPNGFYQGNETETRLTLATYADHIQIGLAGNLKDYVVISHTGEARKGSEIRTFDGSPVGYASSPIETINYASAHDNETLFDIISLKTPMDLSIDERCRINHLSTSMIALSQGIPFFHAGDEILRSKSLDRDSYDSGDWFNKYYSILWILMQTPVTS

SEQ ID NO: 169657 - protein, 526 aa, Zea Mays
MLLHAGPSFLLAPPPRFAAAPSSASPRRSRTPQSSPPTSHFARPADPVAQRVRPVAPRPPMATAEEGASSDVGVAVAESAQGFLLDARAYWVTKSLIAWNISDQKTSLFLYASRNATMCMSSQDMKGYDSKVELQPENDGLPSSVTQKFPFISSYRAFRIPSSVDVATLVKCQLAVASFDAHGNRQDVTGLQLPGVLDDMFAYTGPLGTIFSEEAVSMYLWAPTAQDVSVSFYDGPAGPLLETVQLNELNGVWSVTGPRNWENRYYLYEVTVYHQTTGNIEKCLAADPYARGLSANSTRTWLVDINNETLKPLAWDGLAAEKPRLDSFSDISIYELHIRDFSAHDSTVDCPFRGGFCAFTFQDSVGIEHLKKLSDAGLTHVHLLPSFQFGGVDDIKSNWKCVDEIELSKLPPGSDLQQAAIVAIQEEDPYNWGYNPVVWGVPKGSYASNPDGPSRIIEYRLMVQALNRLGLRVVMDVVYNHLYSSGPFAITSVLDKIVPGYYLRRDSNGQTENSAAVNNTAIVALG

SEQ ID NO: 169658 - protein, 546 aa, Zea Mays
MLLHAGPSFLLAPPPRFAAAPSSASPRRSRTPQSSPPTSHFARPADPVAQRVRPVAPRPPMATAEEGASSDVGVAVAESAQGFLLDARAYWVTKSLIAWNISDQKTSLFLYASRNATMCMSSQDMKGYDSKVELQPENDGLPSSVTQKFPFISSYRAFRIPSSVDVATLVKCQLAVASFDAHGNRQDVTGLQLPGVLDDMFAYTGPLGTIFSEEAVSMYLWAPTAQDVSVSFYDGPAGPLLETVQLNELNGVWSVTGPRNWENRYYLYEVTVYHQTTGNIEKCLAADPYARGLSANSTRTWLVDINNETLKPLAWDGLAAEKPRLDSFSDISIYELHIRDFSAHDSTVDCPFRGGFCAFTFQDSVGIEHLKKLSDAGLTHVHLLPSFQFGGVDDIKSNWKCVDEIELSKLPPGSDLQQAAIVAIQEEDPYNWGYNPVVWGVPKGSYASNPDGPSRIIEYRLMVQALNRLGLRVVMDVVYNHLYSSGPFAITSVLDKIVPGYYLRRDSNGQTENSAAVNNTASEHFMVDRLIVDDLLNWAVNYKLLP

SEQ ID NO: 169659 - protein, 416 aa, Zea Mays
MLLHAGPSFLLAPPPRFAAAPSSASPRRSRTPQSSPPTSHFARPADPVAQRVRPVAPRPPMATAEEGASSDVGVAVAESAQGFLLDARAYWVTKSLIAWNISDQKTSLFLYASRNATMCMSSQDMKGYDSKVELQPENDGLPSSVTQKFPFISSYRAFRIPSSVDVATLVKCQLAVASFDAHGNRQDVTGLQLPGVLDDMFAYTGPLGTIFSEEAVSMYLWAPTAQDVSVSFYDGPAGPLLETVQLNELNGVWSVTGPRNWENRYYLYEVTVYHQTTGNIEKCLAADPYARGLSANSTRTWLVDINNETLKPLAWDGLAAEKPRLDSFSDISIYELHIRDFSAHDSTVDCPFRGGFCAFTFQDSVGIEHLKKLSDAGLTHVHLLPSFQFGGVDDIKSNWKCVGKDSTLSACFTRQM

SEQ ID NO: 169660 - protein, 339 aa, Zea Mays
MVQALNRLGLRVVMDVVYNHLYSSGPFAITSVLDKIVPGYYLRRDSNGQTENSAAVNNTASEHFMVDRLIVDDLLNWAVNYKVDGFRFDLMGHIMKKTMIRAKSALQSLTIDEHGVDGSKIYLYGEGWNFGEVAENQRGINGSQLNMSGTGIGSFNDRIRDAINGGSPFGNPLQQGFSTGLFLEPNGFYQGNETETRLTLATYADHIQIGLAGNLKDYVVISHTGEARKGSEIRTFDGSPVGYASSPIETINYASAHDNETLFDIISLKTPMDLSIDERCRINHLSTSMIALSQGIPFFHAGDEILRSKSLDRDSYDSGDWFNKYYSILWILMQTPVTS

SEQ ID NO: 169661 - protein, 677 aa, Zea Mays
MFAYTGPLGTIFSEEAVSMYLWAPTAQDVSVSFYDGPAGPLLETVQLNELNGVWSVTGPRNWENRYYLYEVTVYHQTTGNIEKCLAADPYARGLSANSTRTWLVDINNETLKPLAWDGLAAEKPRLDSFSDISIYELHIRDFSAHDSTVDCPFRGGFCAFTFQDSVGIEHLKKLSDAGLTHVHLLPSFQFGGVDDIKSNWKCVDEIELSKLPPGSDLQQAAIVAIQEEDPYNWGYNPVVWGVPKGSYASNPDGPSRIIEYRLMVQALNRLGLRVVMDVVYNHLYSSGPFAITSVLDKIVPGYYLRRDSNGQTENSAAVNNTASEHFMVDRLIVDDLLNWAVNYKVDGFRFDLMGHIMKKTMIRAKSALQSLTIDEHGVDGSKIYLYGEGWNFGEVAENQRGINGSQLNMSGTGIGSFNDRIRDAINGGSPFGNPLQQGFSTGLFLEPNGFYQGNETETRLTLATYADHIQIGLAGNLKDYVVISHTGEARKGSEIRTFDGSPVGYASSPIETINYASAHDNETLFDIISLKTPMDLSIDERCRINHLSTSMIALSQGIPFFHAGDEILRSKSLDRDSYDSGDWFNKIDFTYETNNWGVGLPPREKNEGSWPLMKPRLENPSFKPAKHDIIAALDKFIDILKIRYSSPLFRLTTASDIVVHGFFVNLTRLLYCYHIDE

SEQ ID NO: 169662 - protein, 763 aa, Zea Mays
MFAYTGPLGTIFSEEAVSMYLWAPTAQDVSVSFYDGPAGPLLETVQLNELNGVWSVTGPRNWENRYYLYEVTVYHQTTGNIEKCLAADPYARGLSANSTRTWLVDINNETLKPLAWDGLAAEKPRLDSFSDISIYELHIRDFSAHDSTVDCPFRGGFCAFTFQDSVGIEHLKKLSDAGLTHVHLLPSFQFGGVDDIKSNWKCVDEIELSKLPPGSDLQQAAIVAIQEEDPYNWGYNPVVWGVPKGSYASNPDGPSRIIEYRLMVQALNRLGLRVVMDVVYNHLYSSGPFAITSVLDKIVPGYYLRRDSNGQTENSAAVNNTASEHFMVDRLIVDDLLNWAVNYKVDGFRFDLMGHIMKKTMIRAKSALQSLTIDEHGVDGSKIYLYGEGWNFGEVAENQRGINGSQLNMSGTGIGSFNDRIRDAINGGSPFGNPLQQGFSTGLFLEPNGFYQGNETETRLTLATYADHIQIGLAGNLKDYVVISHTGEARKGSEIRTFDGSPVGYASSPIETINYASAHDNETLFDIISLKTPMDLSIDERCRINHLSTSMIALSQGIPFFHAGDEILRSKSLDRDSYDSGDWFNKIDFTYETNNWGVGLPPREKNEGSWPLMKPRLENPSFKPAKHDIIAALDKFIDILKIRYSSPLFRLTTASDIVQRVHFHNTGPSLVPGVIVMSIEDARNDRHDMAQIDETFSCVVTVFNVCPYEVSIEIPDLASLRLQLHPVQVNSSDALARQSAYDTATGRFTVPKRTAAVFVEPRC

SEQ ID NO: 169663 - protein, 680 aa, Zea Mays
MLLHAGPSFLLAPPPRFAAAPSSASPRRSRTPQSSPPTSHFARPADPVAQRVRPVAPRPPMATAEEGASSDVGVAVAESAQGFLLDARAYWVTKSLIAWNISDQKTSLFLYASRNATMCMSSQDMKGYDSKVELQPENDGLPSSVTQKFPFISSYRAFRIPSSVDVATLVKCQLAVASFDAHGNRQDVTGLQLPGVLDDMFAYTGPLGTIFSEEAVSMYLWAPTAQDVSVSFYDGPAGPLLETVQLNELNGVWSVTGPRNWENRYYLYEVTVYHQTTGNIEKCLAADPYARGLSANSTRTWLVDINNETLKPLAWDGLAAEKPRLDSFSDISIYELHIRDFSAHDSTVDCPFRGGFCAFTFQDSVGIEHLKKLSDAGLTHVHLLPSFQFGGVDDIKSNWKCVDEIELSKLPPGSDLQQAAIVAIQEEDPYNWGYNPVVWGVPKGSYASNPDGPSRIIEYRLMVQALNRLGLRVVMDVVYNHLYSSGPFAITSVLDKIVPGYYLRRDSNGQTENSAAVNNTASEHFMVDRLIVDDLLNWAVNYKVDGFRFDLMGHIMKKTMPNGFYQGNETETRLTLATYADHIQIGLAGNLKDYVVISHTGEARKGSEIRTFDGSPVGYASSPIETINYASAHDNETLFDIISLKTPMDLSIDERCRINHLSTSMIALSQISQFQPIQWV

SEQ ID NO: 169664 - protein, 214 aa, Zea Mays
MDKAPQSDMERRLVEQLREGKFAKNAPVQSGRRGCYYTSIPASTSLLETILAKNYEGQEDLFLGELQFAFIAFMMGQSLEAFMQWKALVSLLLSCSDAPLHTRTNMFIKFIRTLYYQLKHGFQHTQDSKSGDMGNSLCLDETWFSRDIFLYRLSKDFFTVVFEAPVVDGDLLSWARKLKSLLETTFGWDLEDDAVNLIDEDDEFAPVVVEMDGS

SEQ ID NO: 169665 - protein, 232 aa, Zea Mays
MDKAPQSDMERRLVEQLREGKFAKNAPVQSGRRGCYYTSIPASVKHKDISGGDLTALNLDKTSLLETILAKNYEGQEDLFLGELQFAFIAFMMGQSLEAFMQWKALVSLLLSCSDAPLHTRTNMFIKFIRTLYYQLKHGFQHTQDSKSGDMGNSLCLDETWFSRDIFLYRLSKDFFTVVFEAPVVDGDLLSWARKLKSLLETTFGWDLEDDAVNLIDEDDEFAPVVVEMDGS

SEQ ID NO: 169666 - protein, 362 aa, Zea Mays
MASGGGAAARMDPEVATELVRKGATLLLLDVPQRTLFGIDTQMFSVGPKFKGMKMVPPGAHFVYYCSPNRHGNEFAPTVGFFLTTHQSEVIVRKWDVQEERLIKLSEEEDIRYSEAVRHFEFDDQLGPYNLDSYGDWKQLSDYLSPNVIERLEPIGGEITIAWESSWMDKAPQSDMERRLVEQLREGKFAKNAPVQSGRRGCYYTSIPASTSLLETILAKNYEGQEDLFLGELQFAFIAFMMGQSLEAFMQWKALVSLLLSCSDAPLHTRTNMFIKFIRTLYYQLKHGFQHTQDSKSGDMGNSLCLDETWFSRDIFLYRLSKARKLKSLLETTFGWDLEDDAVNLIDEDDEFAPVVVEMDGS

SEQ ID NO: 169667 - protein, 286 aa, Zea Mays
MASGGGAAARMDPEVATELVRKGATLLLLDVPQRTLFGIDTQMFSVGPKFKGMKMVPPGAHFVYYCSPNRHGNEFAPTVGFFLTTHQSEVIVRKWDVQEERLIKLSEEEDIRYSEAVRHFEFDDQLGPYNLDSYGDWKQLSDYLSPNVIERLEPIGGEITIAWESSWMDKAPQSDMERRLVEQLREGKFAKNAPVQSGRRGCYYTSIPASVKHKDISGGDLTALNLDKTSLLETILAKNYEGQEDLFLGELQFAFIAFMMGQSLEAFMQWKALVSLLLSCSDAVLC

SEQ ID NO: 169668 - protein, 124 aa, Zea Mays
MLQAIEKATQNQQIVNAIGKPIMRGPWYSASIAVNHAKHSVSCTFPVSGPQGNGLLKLKAVRLGDESWYSYVQPTEWEILIMDAILDVHTEDGKHTTMRVTIPDNTPAPPPADCTACKSHAAEK

SEQ ID NO: 169669 - protein, 529 aa, Zea Mays
MMVVTDLDDVFLPLPDDLLVNLVDSRHVVESFLDSLPNMFHDNVNVESALGPALKAAFMVMSQIGGKLLVFQSTLPSLGIGRLRLRGDDVRAYGTDKEHTLRVPEDSFYKQMAAEFTKYQIAVDIFSFSDKYSDIASLGSLAKYTGGQVYHYASFQTPTHGDKLKLELSRDLTRETAWESVMRIRCGKGVRFTTYHGHFMLRSTDLLALPAVDSDKAFAMQLSLEETLMTTQTVYFQVALLYTSSSGERRIRVHTAAAPVVTDLSEMYRQADTGAIVSLLGRIAIENSLSDKLDSVRQQLQLKLVKSLKEYRNLYVVQHRIGGRLIFPESLRFLPLYILAICKSLALRGGYADVSLDERCAAGFCMMILPVKRLLNFIYPSLYRVDEVLTMEPNKVDDVSLKRLPLTFQCLDTGGLYLLDDGFTFLVWLGRMLPPELVNNILGVSLANFPDLSKIVLRECDNELSRNFMKILRSLREKDPSYHQLCRVVRQGEQPREGYLLLSNLVEDQMAGTSSYVDWIQQIHRQTQS

SEQ ID NO: 169670 - protein, 544 aa, Zea Mays
MQPPMGSERRTPPGRPVSAFVPGAAVPPPPFAAGGPFAPPPRQGVPPPQSGAAAPAFGAAPPAAMGGGFRGPPPSQGPYGAGTLPHGPFASAPPPQGSFTSAPPSQGSFASAPPSQSPFTSPPPSQGPFAAGPPPTGPFAATPAPFRPPPSSLAQPQSPTGGALPAPPTYARPPPPLQSQGYYPGAPPANPQYSMSRPAFQQPMQNMPPPPMGPATTFGNQAAYPSAGPPVGGTLQSLVEDFQSLSLSSTPGSLDPGVDVKGLPRPLDGDEEPVKLMEAYPLNCHPRYFRLTTHAIPASQSLVSRWHLPLGAVVHPLAESPDGDEVPVINFGSAGVIRCRRCRTYINPYATFADAGRKWRCNLCALLNDVPGEYFCGLDASGRRYDTDQRPELSKGTVEFVAPTEYMVRPPMPPSYFFIIDVSVSAVQSGLLEVVAKTIKSCLDELPGFPRTQIGFLTFDSTLHFHNFKSSLSQPQMMVVTDLDDVFLPLPDDLLVNLVDSRHVVESFLDSLPNMFHDNVNVESALGPALKAAFMVMDNYEIPL

SEQ ID NO: 169671 - protein, 173 aa, Zea Mays
MKTPGQVSLGFDLEWRPFPRRGEPPCKVAVMQLCMEKTLCYVLHIAHSGVPPILKTLLEDSSSIKVGICIDNDARKMLNDYNVCVQPLMDLSTLANVKLASPKRWSLASLTEMITCKELPKPSNIRMGNWEADVLSKQQLQYAATDAYISWYLYEALQTLPDYTIEAESVKAQ

SEQ ID NO: 169672 - protein, 300 aa, Zea Mays
MAMHPVAGAGAPPASSVHGNVEYDDFHWDDAAEAELQAFEAAYASASASAKRRRLPDWTSPSPSPSYHLHRSQNPVSSGSTPSWTLTPHTPQDNVRARRQQISFSGKIVYCRTPTEAEKAATDILLKIERMKTPGQVSLGFDLEWRPFPRRGEPPCKVAVMQLCMEKTLCYVLHIAHSGVPPILKTLLEDSSSIKVGICIDNDARKMLNDYNVCVQPLMDLSTLANVKLASPKRWSLASLTEMITCKELPKPSNIRMGNWEADVLSKQQLQYAATDAYISWYLYETLPDYTIEAESVKAQ

SEQ ID NO: 169673 - protein, 215 aa, Zea Mays
MSKRDNVRARRQQISFSGKIVYCRTPTEAEKAATDILLKIERMKTPGQVSLGFDLEWRPFPRRGEPPCKVAVMQLCMEKTLCYVLHIAHSGVPPILKTLLEDSSSIKVGICIDNDARKMLNDYNVCVQPLMDLSTLANVKLASPKRWSLASLTEMITCKELPKPSNIRMGNWEADVLSKQQLQYAATDAYISWYLYEALQTLPDYTIEAESVKAQ

SEQ ID NO: 169674 - protein, 232 aa, Zea Mays
MQTLRPAPASFLVPPAPQLLRTAPPPAPRANAAALAAASHGWFPSPHRACRRRRRVTRSASSGASATVASVDDAKKDVLIALSQIIDPDFGTDIVSCGFIKDLEVSEALEEVSFRLELTTPACPIKDEFEQKANEVVAALPWVKKVDVTMSAQPAQPVYGGELPEGLQKISNIIAVSSCKGGVGKSTVAVNLAYTLAGMGARVGIFDADVFGPSLPTMVSPENRLLVMVHLL

SEQ ID NO: 169675 - protein, 394 aa, Zea Mays
MQTLRPAPASFLVPPAPQLLRTAPPPAPRANAAALAAASHGWFPSPHRACRRRRRVTRSASSGAASATVASVDDAKKDVLIALSQIIDPDFGTDIVSCGFIKDLEVSEALEEVSFRLELTTPACPIKDEFEQKANEVVAALPWVKKVDVTMSAQPAQPVYGGELPEGLQKISNIIAVSSCKGGVGKSTVAVNLAYTLAGMGARVGIFDADVFGPSLPTMVSPENRLLVMNPESKYILPTEYLGVKMVSFGFAGQGRAIMRGPMVSGVINQLLTTTDWGELDYLVIDMPPGTGDIHLTLCQVAPLTAAVIVTTPQKLAFIDVAKGVRMFSKLKVPCVAVVENMCYFDADGKRYYPFGQGSGTQVVQQFGIPHLFDLPIRPTGSNPNTPINSGPPL

SEQ ID NO: 169676 - protein, 287 aa, Zea Mays
MVSFGFAGQGRAIMRGPMVSGVINQLLTTTDWGELDYLVIDMPPGTGDIHLTLCQVAPLTAAVIVTTPQKLAFIDVAKGVRMFSKLKVPCVAVVENMCYFDADGKRYYPFGQGSGTQVVQQFGIPHLFDLPIRPTLSASGDTGIPEVVADPQGDVANTFQNLGACVVQQCAKIRQQVSTAVSYDRSIKAIRVKVPDSDEEFLLHPATVRRNDRSAQSVDEWTGEQKVQYSDIPDDIEPEEIRPMGNYAVSITWPDGFSQIAPYDQLEMLERLVEAPSPAAASAVASS

SEQ ID NO: 169677 - protein, 300 aa, Zea Mays
MQTLRPAPASFLVPPAPQLLRTAPPPAPRANAAALAAASHGWFPSPHRACRRRRRVTRSASSGASATVASVDDAKKDVLIALSQIIDPDFGTDIVSCGFIKDLEVSEALEEVSFRLELTTPACPIKDEFEQKANEVVAALPWVKKVDVTMSAQPAQPVYGGELPEGLQKISNIIAVSSCKGGVGKSTVAVNLAYTLAGMGARVGIFDADVFGPSLPTMVSPENRLLVMNPESKYILPTEYLGVKMVSFGFAGQGRAIMRGPMVSGVINQLLTTTDWGELDYLVIDMPPGTGDIHLTLCQQ

SEQ ID NO: 169678 - protein, 67 aa, Zea Mays
MEVLGRCTYPPLSRKSRTDTSPCSKGDIVPVSVFKYGSTKIGNQSSKTNAEQSFAPSKQFNIRKLKF

SEQ ID NO: 169679 - protein, 124 aa, Zea Mays
MISGSFILLNRELQGCTANGYGEATTTGIEFTIGGDDSAARHPWTRAEVERAVYRGRCKGGEEPSNHLNIVDGEVCRKRISAHNTTRRTRRASKSRARDLAGTEDKRTERNMSGSSTAMGTRMW

SEQ ID NO: 169680 - protein, 337 aa, Zea Mays
MESKQWGKTPQEAVGAGGGRQVDLDEEDDLEEFRLPMGHRPTENLDTDGLQQASVYTQLTASNVGFRLLQKMGWKTGKGLGKNEQGILEPIRADMRDAKLGVGKQEEDDFFTSEENVQRKKLNIELEETEEHIKKREVIAEREHKIRSEVKEIQKVFFCNLCNKQYKLAHEFESHLSSYDHNHRKRFKEMREMQSSSGSRDDRQKREQQREEKELAKIAQLADAHRKQQKDKQEKSETEDAAPKNMAASSNQDQRQTLKFGFSKMAPSKVDISRIPFNLFAFQDFARNVGSMTYKLLRCSLLIGKSCSAVEFLWPQATAASSCRIRLHISFPRTSNI

SEQ ID NO: 169681 - protein, 387 aa, Zea Mays
MDGASSSLPLPQPPPQVYLRRPVPPPGPPLQAAPRVQPFSAPAPIPIFSSKPRAAVRSPIPPPHLPAAVTSAPAPLAATAEAPSRPPPASTDQPPQQQTGAMPPPPAPAPAGKGGPKPKAQLNEQNSGEYSQSENNVVETAQGHDKETTPGPVKATKRIKKLKASKHNLNNTNSGAIEGDADPSLSSLNHCRYDSSLSLLTKKFINLLQGAEDGALDLNKAAETLEVQKRRIYDITNVLEGVHLIEKGLKNMVRWKGFDISKPKDIERQISSLKEELESLYDEELRLDDEIREAKEKLQALALDGDKRKSLYLLKEDINKIPHFQRSTMIAINAPRGTCVEVPDPNADQYMYGNLGLQEKHYKIVLRSSMGPVDCYLIRASWWQQTD

SEQ ID NO: 169682 - protein, 89 aa, Zea Mays
MCYISTVSQYFLWSRATVVPSSIVWMKTRKMCARPPHTPNLWFLSPLRVYLHIRMRALIETPFHLCADMGTVTAQNVHPHAVTAGHFNE

SEQ ID NO: 169683 - protein, 173 aa, Zea Mays
MVNAGRPIAAQAVARPRHQRHTVRAARGRAYASHGSLGSRQDVLRRSVCEAQRNQHGALQQHASTSGLAVVARSGTYIFVGGDAYQLAWLTSYHLTGYAHTWFWRLESDERQVTWPQFKIMCQQHFGSLAAVAAFAATFVMLSVLIPPPSSGAAITATLDPKSDVQERVIAPR

SEQ ID NO: 169684 - protein, 548 aa, Zea Mays
MAFLVPFLLGLSSVLAAWIYSEFLGYRASSSHEKVHSDVHVGDKTIKENDRAVLLEEGESKPPSTKAPNMSARAKLIRFITLDESFLVGNRATLRAIAEFGIILVYFYTCDRTNIFAESKKNYNRDMFLFLYILLVVASTITSLKKHPENSVVSGKTVFYLNRNQTDEWRGWMQVLFLMYHYFAASEIYNAIRVFIACYVWMTGFGNFSYYYKKKDFSIARFAQMMWRVNFFAMSCCMVLDNDYMLYYIAPMHTLFTLMVYGSLFVLNKYNEIPSVMAIKIAGCLLTVILIWEIPGVFEIFWAPFTFLLGYKNPEPSKMNLPLLHEWRFRSGLDRYIWIIGMIYAYFHPNVERWMEKLEESETKVRVLIKGTIVTASLMAGYLWYEYIYKLDKHTYNKYHPYTSWIPITIYVCLRNCTQQLRSTHLSLFVLVKNIFFTDLSFYSWLGKITMESYISQFHIWLRSSIPNGQPKLLLSFLPDYPMLNFLLTTTIFLSVSFRVFKLTNVLKEAFIPTRDNKCLYQNFIAGVAVFACLYCSSLFFKTYQQYS

SEQ ID NO: 169685 - protein, 320 aa, Zea Mays
MAFLVPFLLGLSSVLAAWIYSEFLGYRASSSHEKVHSDVHVGDKTIKENDRAVLLEEGESKPPSTKAPNMSARAKLIRFITLDESFLVGNRATLRAIAEFGIILVYFYTCDRTNIFAESKKNYNRDMFLFLYILLVVASTITSLKKHPENSVVSGKTVFYLNRNQTDEWRGWMQVLFLMYHYFAASEIYNAIRVFIACYVWMTGFGNFSYYYKKKDFSIARFAQMMWRVNFFAMSCCMVLDNDYMLYYIAPMHTLFTLMVYGSLFVLNKYNEIPSVMAIKIAGCLLTVILIWEIPGVFEIFWAPFTFLLGKVTKTQSLLR

SEQ ID NO: 169686 - protein, 483 aa, Zea Mays
MFQDFLQSSSFPLWSKIDNSGFWRQLTVREGRCPAEAVVSQNAESQISEVMLIVQVCSTSVDEALMKEEFDKLSAALVQGAATCSPPLPLTTIVVQDHKGISNAAPTDCPLIPLLVPKGDKLDGTSEDKTRIHDHISNLKFSISPTAFFQVNTLAAERLYALAGDWANLNSDTLLFDVCCGTGTIGLTLAQRVGMVVGIEMNESAVSDAHRNALINGIKNCRFVCGKAEDVMGPLLTEYLGSPQQQAAASKSNSEIDDTSKTEDMIGCASYDGENIDSSKQRHDNAEGQQPMDTSVDHPTCASEVDGMDVVDCNHDENNVASGEQNCGEASLINGKPIETSSDNSLEQGKTCKDGSSSPNNNVLAANACQFKNVVAIVDPPRVGLHPTVIKALRTHPRIRRLVYISCNPDSLVANGIELCTPTPEKQEKNKGNRGWRSMSSAGLARQRTKSMPNSEPFIPKRAMAVDLFPHTPHCEMVMLFER

SEQ ID NO: 169687 - protein, 736 aa, Zea Mays
MEDVLTPPPQPELAGEKRKREESSLDASIEDAPSAPASTCSAEDAAGSDVARHPMWKTSLCSFFRRRGAGAEGCSHGDSCRYAHTEEELRPRPDGTWDPTSDRAKELRKVAAEAQEEAEEEVTVDEQSLDKCLVGLPRGWTADRLKSLLQDQGISYATAKKKKGMTVGFVTFQSVEQLTNAVQVLKENPSDGKQIKIVDANRRSHQKAHAGAPVSNTGTATENGSSPTTPAEETSVPESVSSSKKGARDAVTPLAHMTYIDQLEHKKQSMAQILKKLTRNARKACPPTIPHPDWVFKSKEIGGLPCKFEGILESPVVNGYRNKCEFSVGYSLEGKKTVGFMLGNFREGVTAVEEPENCPNVSEISCKYAKMFQDFLQSSSFPLWSKIDNSGFWRQLTVCSTSVDEALMKEEFDKLSAALVQGAATCSPPLPLTTIVVQDHKGISNAAPTDCPLIPLLVPKGDKLDGTSEDKTRIHDHISNLKFSISPTAFFQVNTLAAERLYALAGDWANLNSDTLLFDVCCGTGTIGLTLAQRVGMVVGIEMNESAVSDAHRNALINGIKNCRFVCGKAEDVMGPLLTEYLGSPQQQAAASKSNSEIDDTSKTEDMIGCASYDGENIDSSKQRHDNAEGQQPMDTSVDHPTCASEVDGMDVVDCNHDENNVASGEQNCGEASLINGKPIETSSDNSLEQGKTCKDGSSSPNNNVLAANACQFKNVVAIVDPPRVGLHPTVHFLQP

SEQ ID NO: 169688 - protein, 107 aa, Zea Mays
MQTAVGVFGGEKYTDGVNAPPLMVENAGHSGRPAVSSLNCPPFIAVETCREHLGVHPCDKRRSITEYRPLFPAIDFSLASLSYCPFMSHFLGIAFLQICICLFADRE

SEQ ID NO: 169689 - protein, 191 aa, Zea Mays
MELGATTALYPLHRCKTIYLVRHAQGIHNVAGEKDFGAYMSHELFDAQLTPLGWNQVDGLREHVKKSGLAEKIELVITSPLLRTMQTAVGVFGGEKYTDGVNAPPLMVENAGHSGRPAVSSLNCPPFIAVETCREHLGVHPCDKRRSITEYRPLFPAIDFSLASLSYCPFMSHFLGIAFLQICICLFADRE

SEQ ID NO: 169690 - protein, 200 aa, Zea Mays
MQTAVGVFGGEKYTDGVNAPPLMVENAGHSGRPAVSSLNCPPFIAVETCREHLGVHPCDKRRSITEYRPLFPAIDFSLIENDGDVLWEPDVRETNEAVALRGMKFMDWLWTREEKEIAIVSHSGFLFHTLSMYSKECHPTIRDEVSKHFANCELRSMVLVDRSMLGSYSSRFNYAGKNPTGLDVPSDIADKKQVDEAQKN

SEQ ID NO: 169691 - protein, 116 aa, Zea Mays
MIIHLLCFPGPAAGAPPSPSSSASVRVPVGLPHDRRAKSRLVPPFRCASSGMELGATTALYPLHRCKTIYLVRHAQGIHNVAGEKDFGAYMSHELFDAQLTPLGWNQVRSMVCGSM

SEQ ID NO: 169692 - protein, 153 aa, Zea Mays
MFIVFGNNMATGKYAKGSSEALGTEDRNSMAETEIDEGDGNAVPSPIDDIGASSSVPRPRKKAKVTSNEEAGLIGAFKDGAERLAMAIEKAGSDDLPPDLLQTLQSIPGFDDTHKAFYFAYLVKNPGLARQFPTLPLTYQISLLARFVSENFP

SEQ ID NO: 169693 - protein, 296 aa, Zea Mays
MAFVYHKKMESEGAGEHFVEQADGSGHVVWTSAMSAYMLSNLASLVAEGIRTSTGFKKVHLNMCAKALNDYFKMKLTGEQVKNHLRTWKRRYAKINRLRKLSAASWNEDNYMITLDHEHYANYVQDHKSDAEFLNKPLENYKEMFIVFGNNMATGKYAKGSSEALGTEDRNSMAETEIDEGDGNAVPSPIDDIGASSSVPRPRKKAKVTSNEEAGLIGAFKDGAERLAMAIEKAGSDDLPPDLLQTLQSIPGFDDTHKAFYFAYLVKNPGLARQFPTLPLTYQISLLARFVSENFP

SEQ ID NO: 169694 - protein, 133 aa, Zea Mays
MNPKPFFGGSAVQQKRTDESAPAPLAAVKIVLPSILTLSPLNLILEAAQAQASGRPVARAAGGGHPSRRRRAAVCPAHASGHPSRRTASRRPSKRTASVRPGFHPGELQNFSTHNTFQEPKAASGDRRRSMSL

SEQ ID NO: 169695 - protein, 910 aa, Zea Mays
MAKKLLFFCFPIPVLYHAPAGAPRLVASQSLFPGKLVRCRQESQVEQLWHSCALDLRIPQDVRNKFHYSLLFNTISNSYRENDNKSYPQKVGIEEATTATFSPAEVANTFLDCLNKHNFPFSDHGLQKHQEETISLLPNSNSINLPFAMKRRRLLEEDSAIAPPRPKAKQAIRSVLSSEGEAHLLVTTVKKSGKPEPKNKSKDNSGTIIAGLSVACVALVALICSSRKSCSTPIDVNRLGALSTSSSASQRKEFKFPPIKAEVREMSMKSEFERRSNVQAMKLSSHEITTIAGRPATSTNSQDVKSAVAAVPSSNASDSICKPAAGPAPAPPPPPRPGYPLPKAPPAPSAPTPPVPPPKMPTAAGSSNPPPPGPPPPPAPRPAVGPGPPPSPSSAGPGPPPPPGRGGAGPPPPAMPGGPKARGPPPLKKAGNVAGPPVADNKTKLKPFFWDKVTANPDQAMVWDQIKAGSFQFNEEMIESLFGCHAADKKNADGKKDLAAKDTPQFVRILDAKKAQNLAISLKALSVSADEVRNAVMEGHELPIDLIQTLIRWTPSSDEELRLRLYTGELTQLGPAEQFLRTIIDIPYLYQRLDVLLFMSTLPEEAANAEQSFKTLEVACHELRNSRLFKKLLEAVLKTGNRMNDGTFRGGAQAFKLDTLLKLSDVKGVDGKTTLLHFVVQEIIRSEGVRAVRAAKEQNNSSISSVTSDDLTEDVSDDTEHYKQLGLGVVSSLGDDLQNVRKAAILDADTLTISVASLGHKLVKANEFLNTGMKSLDEDSGFHRKLGEFIEQSQVRVTQLLEEEKKLRALVRTTVDYFHGSTGKDEGLRLFVVVRDFLGILDKVCREVKEAAAKAAANNKKPSAAGSGSKGRQPSQSSSSFRDPRQQLVPAIKDRRSAAARSSSSSSDSD

SEQ ID NO: 169696 - protein, 551 aa, Zea Mays
MPTAAGSSNPPPPGPPPPPAPRPAVGPGPPPSPSSAGPGPPPPPGRGGAGPPPPAMPGGPKARGPPPLKKAGNVAGPPVADNKTKLKPFFWDKVTANPDQAMVWDQIKAGSFQFNEEMIESLFGCHAADKKNADGKKDLAAKDTPQFVRILDAKKAQNLAISLKALSVSADEVRNAVMEGHELPIDLIQTLIRWTPSSDEELRLRLYTGELTQLGPAEQFLRTIIDIPYLYQRLDVLLFMSTLPEEAANAEQSFKTLEVACHELRNSRLFKKLLEAVLKTGNRMNDGTFRGGAQAFKLDTLLKLSDVKGVDGKTTLLHFVVQEIIRSEGVRAVRAAKEQNNSSISSVTSDDLTEDVSDDTEHYKQLGLGVVSSLGDDLQNVRKAAILDADTLTISVASLGHKLVKANEFLNTGMKSLDEDSGFHRKLGEFIEQSQVRVTQLLEEEKKLRALVRTTVDYFHGSTGKDEGLRLFVVVRDFLGILDKVCREVKEAAAKAAANNKKPSAAGSGSKGRQPSQSSSSFRDPRQQLVPAIKDRRSAAARSSSSSSDSD

SEQ ID NO: 169697 - protein, 687 aa, Zea Mays
MINSLGVAGWGVGGIEAVVAMLGQPMGMVLPGVVGFKLSGKLQDGVTTTDIVLTMTQMLRKHGAIGKFVEFYGVGVGELSLPARATIANMSPEYGATMGFFPVDQVALDYLKLTGRSDETVSMIEAYLRANKMFVDKHEPETERVFSSYLELDLSEVEPCVSGPKRPHDRVPLKEMKSDWHACLDNEVGFKGYAVPKEQQGKVVKFDFHGRPAEIKHGSVVLAAICSSTNTSNPSVMIGAGLVAKKACELGLEVKPWVKTSLTPGSVVATEYLKHSGLQDYLNQQGFHVAAHGCATCVGNSGDLDGSVSAAITENDIVAAAVLSANRNFEGRVNPLTRANYLASPPLVVAYALAGTVDIGFEEEPIGVGKGGKEIFLRDIWPSNQEIDEVVESSVQTHLFKKVYDSIMERNPRWNQLPVPKEALYPWDDRSTYIRKPTYLEGMSMTPPGPPTVTEAYCLLNLGDSITTDHISYSGKIPEGTPAAKYLLEYGVEPKNFSSYGGRRGNNEVVMRGAFANMRIVNKLLNGEAGPWTIHVPTGEKLYVYDAAMKYKSEGHDMVIIAGSEYGSGSSRDSAAKGPMLLGVKSVIAKSFERIHRSNLVGMGIIPLCFQAGEDADSLGLTGRERYTIHLPTSTAEISPGQDVTVTTHDGRSFTCTLRLDTQLEVTYFNHGGILPYMVRNLAAQMK

SEQ ID NO: 169698 - protein, 727 aa, Zea Mays
MMHWIETRSWSSNATKKGLLFLNGHPMLSTTCRFSLLVQALYTSLGVAGWGVGGIEAVVAMLGQPMGMVLPGVVGFKLSGKLQDGVTTTDIVLTMTQMLRKHGAIGKFVEFYGVGVGELSLPARATIANMSPEYGATMGFFPVDQVALDYLKLTGRSDETVSMIEAYLRANKMFVDKHEPETERVFSSYLELDLSEVEPCVSGPKRPHDRVPLKEMKSDWHACLDNEVGFKGYAVPKEQQGKVVKFDFHGRPAEIKHGSVVLAAICSSTNTSNPSVMIGAGLVAKKACELGLEVKPWVKTSLTPGSVVATEYLKHSGLQDYLNQQGFHVAAHGCATCVGNSGDLDGSVSAAITENDIVAAAVLSANRNFEGRVNPLTRANYLASPPLVVAYALAGTVDIGFEEEPIGVGKGGKEIFLRDIWPSNQEIDEVVESSVQTHLFKKVYDSIMERNPRWNQLPVPKEALYPWDDRSTYIRKPTYLEGMSMTPPGPPTVTEAYCLLNLGDSITTDHISYSGKIPEGTPAAKYLLEYGVEPKNFSSYGGRRGNNEVVMRGAFANMRIVNKLLNGEAGPWTIHVPTGEKLYVYDAAMKYKSEGHDMVIIAGSEYGSGSSRDSAAKGPMLLGVKSVIAKSFERIHRSNLVGMGIIPLCFQAGEDADSLGLTGRERYTIHLPTSTAEISPGQDVTVTTHDGRSFTCTLRLDTQLEVTYFNHGGILPYMVRNLAAQMK

SEQ ID NO: 169699 - protein, 290 aa, Zea Mays
MAAATGYSDAPTDEQLLAYSELPIHGRDMAEVFAVRIPAIAGGDPPPRGIISFYGGHCCSDFIYSWNSLEEEEDTSKQTCDSQGNLVLTGPSMATSAESPIAFTFYLHDGSPQAGEAAEDDEDIGRIICDCIGDDFSNYNRAIVETVQMGYGLAEVIYAVLNNGVQGRVAVKLARLPVSKAGEEDATAILGRIVARSKLFDVGCVLFYKEGDNGVSVRPGGLIQLAREALAVPLHMPLTIELDLHRCSGDEIVGGVLEFNPAIDGQHTERLVGQNGAELEVAISWSEYPW

SEQ ID NO: 169700 - protein, 238 aa, Zea Mays
MAATWRRCSPCASRPSPEETRRPVASSLSTAATAAAISFTAGTHWKRKKTPRSKPATASPQAGEAAEDDEDIGRIICDCIGDDFSNYNRAIVETVQMGYGLAEVIYAVLNNGVQGRVAVKLARLPVSKAGEEDATAILGRIVARSKLFDVGCVLFYKEGDNGVSVRPGGLIQLAREALAVPLHMPLTIELDLHRCSGDEIVGGVLEFNPAIDGQHTERLVGQNGAELEVAISWSEYPW

SEQ ID NO: 169701 - protein, 242 aa, Zea Mays
MYAMDGNVLFTIARTDLHHYMALPPFIHHLESAKKGNLVLTGPSWATSAYSPIAFTLYLHDGSPQAGEAAEDDEDIGRIICDCIDGDFSNYNRAIVETVQTGYGPAEVIYAVLSNGVQGRVAIKLARLPVSKAGEEDATAILGRIVARSKLFDVGCVLFYKEGDNGVSVRPGGLIQLAREALAVPLHMPLTIELDLHRCSGDEIVGGVLEFNPATNGQHTERLVGENGAELEVTISWSQYPW

SEQ ID NO: 169702 - protein, 163 aa, Zea Mays
MRAQGWRASLPCLSSTVLRRLPWMSGRCFDRRPPRRPSFFSKPGSTPEPPQPFATAVMLPLLRAPSHGAWPDLPAARRRTPLRAAVALSLCRLLPLLASHAAPAHLRVRPRRAERREVSPPSRAFSSSARCSYFSSPCAQPAFLHDACSALPSPCTSWYSDSS

SEQ ID NO: 169703 - protein, 78 aa, Zea Mays
MGETPVWNHRDIGRRRHGWLGGRMGSLGRPSGFGRCRLDVTITLRVIRPEPSDHEQTDPAQSRTFKIHAIDCMIHGPD

SEQ ID NO: 169704 - protein, 126 aa, Zea Mays
MVCQVRPFCSPRPPHASTRAPPPVPPPLHRRPGRCRAPSPSRWRGQASRYQNSWIPNLRRMLMLTITACTQRRTFYRVCKISHGEVWSRNNSAATRCQRRGPLRRRLRQHIYQFELFIPLLWSLFL

SEQ ID NO: 169705 - protein, 155 aa, Zea Mays
MQVKLNRQRHVQRHGERFPRQLNQPPRSHVHSIVTLFVEEHAADVEQLAASNDPPKNGGGVFFSSFGHRRASKFDGDPALDAVAQDGIDHFSGAIARLDSLDYGPVVVGEVVADAVAEYPPDVLVVLGGFSGLRAGCRRFASRCLLPLPVDSSCK

SEQ ID NO: 169706 - protein, 167 aa, Zea Mays
MQVKLNRQRHVQRHGERFPRQLNQPPRSHVHSIVTLFVEEHAADVEQLAASNDPPKNGGGVFFSSFGHRRASKFDGDPALDAVAQDGIDHFSGAIARLDSLDYGPVVVGEVVADAVAEYPPDVLVVLGGFSGLRAAIMEVEEESNWTGCRRFASRCLLPLPVDSSCK

SEQ ID NO: 169707 - protein, 150 aa, Zea Mays
MDEYIRVDNDFRQRREEAYRYSEMTRGFRGRLHPRHVRTIHNPNSSDNKGNHTQGQQSSQSSGTQQSSYRPPAPRGRGGRSFGGRFNSQPRRLFCLFCGEVKGHKTRTCQVTIQKQKQIAEAEVRQNQLKQVLHTASCYSPYILLRSFVQ

SEQ ID NO: 169708 - protein, 98 aa, Zea Mays
MGRSKGRGLGRPGEGVRHRREKWMERGTRRMPRPEEVEADSVHGWGKGERQGIGTASREGGRCCCQELEDENERRLVQVMRTYGRFQKLSTWKNFENF

SEQ ID NO: 169709 - protein, 53 aa, Zea Mays
MTSAWGASLILVFDQIIQASGSFTSIILGSTRFLSSASCDQLTNLNDMHNAHE

SEQ ID NO: 169710 - protein, 129 aa, Zea Mays
MSRELAHAYKAAKVECDGSVENQGGDGNQHQSREKQTTNCTIKDEPVTLEPQVFETPWSIEHEDTMTLAGATLETQRDLGFKRKIEDTQVEASMKPSQLTRKEKAVKAASDGQASLLSYFARKQGRSMK

SEQ ID NO: 169711 - protein, 379 aa, Zea Mays
MCGRARCTLSPAEVARAFGFPTTSANAGGGGDGPAVPTLHLNRFRPSYNVLPGAYLPVGAMRALPGCAHGGGGSDGEGPVIQCMKWGLVPSFTGKAEKPDYFRMFNARSESVKEKVSFRRLIQKNRCLVAVEGFYEWKKNGSKKQPYYIHFQDHRPLVFAALYDAWTNSEGSKDYVDAWLNDVSVKLEEITAPYEGADLVWYPVTSALGKASFDGPECIKEVHIGATDKPISKFFTKKSTAYDLSGKYENMSRELAHAYKAAKVECDGSVENQGGDGNQHQSREKQTTNCTIKDEPVTLEPQVFETPWSIEHEDTMTLAGATLETQRDLGFKRKIEDTQVEASMKPSQLTRKEKAVKAASDGQASLLSYFARKQGRSMK

SEQ ID NO: 169712 - protein, 386 aa, Zea Mays
MCGRARCTLSPAEVARAFGFPTTSANAGGGGDGPAVPTLHLNRFRPSYNVLPGAYLPVGAMRALPGCAHGGGGSDGEGPVIQCMKWGLVPSFTGKAEKPDYFRMFNARSESVKEKVSFRRLIQKNRCLVAVEGFYEWKKNGSKKQPYYIHFQDHRPLVFAALYDAWTNSEDRMPVILGSKDYVDAWLNDVSVKLEEITAPYEGADLVWYPVTSALGKASFDGPECIKEVHIGATDKPISKFFTKKSTAYDLSGKYENMSRELAHAYKAAKVECDGSVENQGGDGNQHQSREKQTTNCTIKDEPVTLEPQVFETPWSIEHEDTMTLAGATLETQRDLGFKRKIEDTQVEASMKPSQLTRKEKAVKAASDGQASLLSYFARKQGRSMK

SEQ ID NO: 169713 - protein, 202 aa, Zea Mays
MCGRARCTLSPAEVARAFGFPTTSANAGGGGDGPAVPTLHLNRFRPSYNVLPGAYLPVGAMRALPGCAHGGGGSDGEGPVIQCMKWGLVPSFTGKAEKPDYFRMFNARSESVKEKVSFRRLIQKNRCLVAVEGFYEWKKNGSKKQPYYIHFQDHRPLVFAALYDAWTNSEGEITHTFTILTTHASTSLNWLHGLVSSDIRIG

SEQ ID NO: 169714 - protein, 325 aa, Zea Mays
MKWGLVPSFTGKAEKPDYFRMFNARSESVKEKVSFRRLIQKNRCLVAVEGFYEWKKNGSKKQPYYIHFQDHRPLVFAALYDAWTNSEGEITHTFTILTTHASTSLNWLHDRMPVILGSKDYVDAWLNDVSVKLEEITAPYEGADLVWYPVTSALGKASFDGPECIKEVHIGATDKPISKFFTKKSTAYDLSGKYENMSRELAHAYKAAKVECDGSVENQGGDGNQHQSREKQTTNCTIKDEPVTLEPQVFETPWSIEHEDTMTLAGATLETQRDLGFKRKIEDTQVEASMKPSQLTRKEKAVKAASDGQASLLSYFARKQGRSMK

SEQ ID NO: 169715 - protein, 258 aa, Zea Mays
MCGRARCTLSPAEVARAFGFPTTSANAGGGGDGPAVPTLHLNRFRPSYNVLPGAYLPVGAMRALPGCAHGGGGSDGEGPVIQCMKWGLVPSFTGKAEKPDYFRMFNARSESVKEKVSFRRLIQKNRCLVAVEGFYEWKKNGSKKQPYYIHFQDHRPLVFAALYDAWTNSEGEITHTFTILTTHASTSLNWLHDRMPVILGSKDYVDAWLNDVSVKLEEITAPYEGADLVWYPVTSALGKASFDGPECIKEIFLQSWSS

SEQ ID NO: 169716 - protein, 174 aa, Zea Mays
MCGRARCTLSPAEVARAFGFPTTSANAGGGGDGPAVPTLHLNRFRPSYNVLPGAYLPVGAMRALPGCAHGGGGSDGEGPVIQCMKWGLVPSFTGKAEKPDYFRMFNARSESVKEKVSFRRLIQKNRCLVAVEGFYEWKKNGSKKQPYYIHFQDHRPLVFAALYDAWTNSEDFYA

SEQ ID NO: 169717 - protein, 441 aa, Zea Mays
MAAPSGGGGGGAGEGSSSAAAAMTIGAHGVDQVTEAMWQMNLGDAMELGPYPERVGDPDCSYYMRTGMCRFGMTCKFNHPADRKLAVAAARMKGEYPQRIGQPECQYYLKTGTCKFGATCKFHHPREKAAMATRVQLNELGYPLRLNEKECAYYLRTGQCKFGSTCKFHHPQPSTMMVAVRGSVYSPGQSATSPGHHAYQGAVTSWPLSRSASFIASPRWPGHSSYAQVIVPPGLVQVPGWSPYAIGSSSSDDQQRTPGAAQYYTGSRQSGTPGIGDRGMFSSYQAGSVPVGLYAVQTENVFPERPDQPECQFYMKTGDCKFGSVCKFHHPRERIIPTPNCALSPLGLPLRPGEPICSFYNRYGMCKFGPNCKFHHPMGNPMYGHASSPTSEAQTSRRMLAHVPSHPEVSPDSGSGRSRRIVHSDSQQIPSVERITEREAS

SEQ ID NO: 169718 - protein, 251 aa, Zea Mays
MAAPSGGGGGGAGEGSSSAAAAMTIGAHGVDQVTEAMWQMNLGDAMELGPYPERVGDPDCSYYMRTGMCRFGMTCKFNHPADRKLAVAAARMKGEYPQRIGQPECQYYLKTGTCKFGATCKFHHPREKAAMATRVQLNELGYPLRLNEKECAYYLRTGQCKFGSTCKFHHPQPSTMMVAVRGSVYSPGQSATSPGHHAYQGAVTSWPLSRSASFIASPRWPGHSSYAQVIVPPGLVQVPGWSPYAFFFSNL

SEQ ID NO: 169719 - protein, 219 aa, Zea Mays
MAAPSGGGGGGAGEGSSSAAAAMTIGAHGVDQVTEAMWQMNLGDAMELGPYPERVGDPDCSYYMRTGMCRFGMTCKFNHPADRKLAVAAARMKGEYPQRIGQPECQYYLKTGTCKFGATCKFHHPREKAAMATRVQLNELGYPLRLNEKECAYYLRTGQCKFGSTWGCNKLALVEICFFHCKSKVARSFKLCTSYCSSWACSGPRVESLCCADWFFILG

SEQ ID NO: 169720 - protein, 246 aa, Zea Mays
MAAPSGGGGGGAGEGSSSAAAAMTIGAHGVDQVTEAMWQMNLGDAMELGPYPERVGDPDCSYYMRTGMCRFGMTCKFNHPADRKLAVAAARMKGEYPQRIGQPECQYYLKTGTCKFGATCKFHHPREKAAMATRVQLNELGYPLRLNEKECAYYLRTGQCKFGSTCKFHHPQPSTMMVAVRGSVYSPGQSATSPGHHAYQGAVTSWPLSRSASFIASPRWPGHSSYAQVIVPPGLVQVPGWSPYAA

SEQ ID NO: 169721 - protein, 82 aa, Zea Mays
MALLAFDFPRVISCFPIPIDRTGLIPMDPWFSQTPLRLFDDAKPEGLVVGEADAERDDGNGGTRLQRRSGHNSWSGVIIGAH

SEQ ID NO: 169722 - protein, 849 aa, Zea Mays
MATNREASSGVDEGARVGHGHDDGEGSRHEGERHQVVTSRSVGAEGQRTEATTIGWGRGGDLVVGYGGGPTLPRKAINTGFSQTDLAIEVYPLRLQLILMSRGERTFIRISKKGTVGQLHKMACKVFDLAPDEVCIWDYYGRTKHSLMDSLDKTLDDANIQMDQNILVEVTTDASGSLDGLVKRNNFFESDAPKSGLPDENFAANNYASRSYSSSLTPSIYLRSPNGDLDNVHGSSGMITRGSPLGLTGLLNLGNTCYMNSAIQCLVHTPQFTKYFCEDYHREINRQNPLGNVGELALAFGELLRKLWAPGGRAPVSPRPFKMKLSRFASQFSGYNQHDSQELLAFLLDGLHEDLNRVKHRPYINSGDADGRSDEEVADEYWANHIARNNSIIVDVCQGQYKSTLVCPVCGKVSVTFDPFMYLSLPLQFASTRSVTAVVFSCDGSVPPTPFTVNVPKQGRCRDLLQALGAACSLKNGEKLLIAEIRNHKIYRFIDDPVLQLSTISDDDHLAVYKLPKLEKRVNYIQFVHRHEDLDHGNNNSLTSWKPYGVPLLAQISRNEIVTGFDIHELVHKMLVPVLRNPDSLHLAVQSSVSTRTHSYHTDSSKCQLLLVDDSNTVIEKSNDAIRIPQSSLATVFFINWPKADLKKIDTHHLEYLPEVFMYAPPAKRTRGEALSLYACLDAFLREEPLVPEDMWYCPRCKEQRQASKKLDLWRLPEVLVIHLKRFSFSRSTKQKLETFVNFPIHDLDLTNYIANKKTSERQIYELYAVSNHYGNMASGHYTAHIKLVDENRWYNFDDSHVASIDEDEVKTAAAYVLFYRRVREQDIARGTSNGSQLYAKRSHGYSHR

SEQ ID NO: 169723 - protein, 838 aa, Zea Mays
MATNREASSGVDEGARVGHGHDDGEGSRHEGERHQVVTSRSVGAEGQRTEATTIGWGRGGDLVVGYGGGPTLPRKAINTGFSQTDLAIEVYPLRLQLILMSRGERTFIRISKKGTVGQLHKMACKVFDLAPDEHSLMDSLDKTLDDANIQMDQNILVEVTTDASGSLDGLVKRNNFFESDAPKSGLPDENFAANNYASRSYSSSLTPSIYLRSPNGDLDNVHGSSGMITRGSPLGLTGLLNLGNTCYMNSAIQCLVHTPQFTKYFCEDYHREINRQNPLGNVGELALAFGELLRKLWAPGGRAPVSPRPFKMKLSRFASQFSGYNQHDSQELLAFLLDGLHEDLNRVKHRPYINSGDADGRSDEEVADEYWANHIARNNSIIVDVCQGQYKSTLVCPVCGKVSVTFDPFMYLSLPLQFASTRSVTAVVFSCDGSVPPTPFTVNVPKQGRCRDLLQALGAACSLKNGEKLLIAEIRNHKIYRFIDDPVLQLSTISDDDHLAVYKLPKLEKRVNYIQFVHRHEDLDHGNNNSLTSWKPYGVPLLAQISRNEIVTGFDIHELVHKMLVPVLRNPDSLHLAVQSSVSTRTHSYHTDSSKCQLLLVDDSNTVIEKSNDAIRIPQSSLATVFFINWPKADLKKIDTHHLEYLPEVFMYAPPAKRTRGEALSLYACLDAFLREEPLVPEDMWYCPRCKEQRQASKKLDLWRLPEVLVIHLKRFSFSRSTKQKLETFVNFPIHDLDLTNYIANKKTSERQIYELYAVSNHYGNMASGHYTAHIKLVDENRWYNFDDSHVASIDEDEVKTAAAYVLFYRRVREQDIARGTSNGSQLYAKRSHGYSHR

SEQ ID NO: 169724 - protein, 793 aa, Zea Mays
MEIEIHDNLVEGRDYILLPQQVWEKLHGWYGGGPTLPRKAINTGFSQTDLAIEVYPLRLQLILMSRGERTFIRISKKVCIWDYYGRTKHSLMDSLDKTLDDANIQMDQNILVEVTTDASGSLDGLVKRNNFFESDAPKSGLPDENFAANNYASRSYSSSLTPSIYLRSPNGDLDNVHGSSGMITRGSPLGLTGLLNLGNTCYMNSAIQCLVHTPQFTKYFCEDYHREINRQNPLGNVGELALAFGELLRKLWAPGGRAPVSPRPFKMKLSRFASQFSGYNQHDSQELLAFLLDGLHEDLNRVKHRPYINSGDADGRSDEEVADEYWANHIARNNSIIVDVCQGQYKSTLVCPVCGKVSVTFDPFMYLSLPLQFASTRSVTAVVFSCDGSVPPTPFTVNVPKQGRCRDLLQALGAACSLKNGEKLLIAEIRNHKIYRFIDDPVLQLSTISDDDHLAVYKLPKLEKRVNYIQFVHRHEDLDHGNNNSLTSWKPYGVPLLAQISRNEIVTGFDIHELVHKMLVPVLRNPDSLHLAVQSSVSTRTHSYHTDSSKCQLLLVDDSNTVIEKSNDAIRIPQSSLATVFFINWPKADLKKIDTHHLEYLPEVFMYAPPAKRTRGEALSLYACLDAFLREEPLVPEDMWYCPRCKEQRQASKKLDLWRLPEVLVIHLKRFSFSRSTKQKLETFVNFPIHDLDLTNYIANKKTSERQIYELYAVSNHYGNMASGHYTAHIKLVDENRWYNFDDSHVASIDEDEVKTAAAYVLFYRRVREQDIARGTSNGSQLYAKRSHGYSHR

SEQ ID NO: 169725 - protein, 813 aa, Zea Mays
MEIEIHDNLVEGRDYILLPQQVWEKLHGWYGGGPTLPRKAINTGFSQTDLAIEVYPLRLQLILMSRGERTFIRISKKGTVGQLHKMACKVFDLAPDEVCIWDYYGRTKHSLMDSLDKTLDDANIQMDQNILVEVTTDASGSLDGLVKRNNFFESDAPKSGLPDENFAANNYASRSYSSSLTPSIYLRSPNGDLDNVHGSSGMITRGSPLGLTGLLNLGNTCYMNSAIQCLVHTPQFTKYFCEDYHREINRQNPLGNVGELALAFGELLRKLWAPGGRAPVSPRPFKMKLSRFASQFSGYNQHDSQELLAFLLDGLHEDLNRVKHRPYINSGDADGRSDEEVADEYWANHIARNNSIIVDVCQGQYKSTLVCPVCGKVSVTFDPFMYLSLPLQFASTRSVTAVVFSCDGSVPPTPFTVNVPKQGRCRDLLQALGAACSLKNGEKLLIAEIRNHKIYRFIDDPVLQLSTISDDDHLAVYKLPKLEKRVNYIQFVHRHEDLDHGNNNSLTSWKPYGVPLLAQISRNEIVTGFDIHELVHKMLVPVLRNPDSLHLAVQSSVSTRTHSYHTDSSKCQLLLVDDSNTVIEKSNDAIRIPQSSLATVFFINWPKADLKKIDTHHLEYLPEVFMYAPPAKRTRGEALSLYACLDAFLREEPLVPEDMWYCPRCKEQRQASKKLDLWRLPEVLVIHLKRFSFSRSTKQKLETFVNFPIHDLDLTNYIANKKTSERQIYELYAVSNHYGNMASGHYTAHIKLVDENRWYNFDDSHVASIDEDEVKTAAAYVLFYRRVREQDIARGTSNGSQLYAKRSHGYSHR

SEQ ID NO: 169726 - protein, 426 aa, Zea Mays
MEIEIHDNLVEGRDYILLPQQVWEKLHGWYGGGPTLPRKAINTGFSQTDLAIEVYPLRLQLILMSRGERTFIRISKKGTVGQLHKMACKVFDLAPDEVCIWDYYGRTKHSLMDSLDKTLDDANIQMDQNILVEVTTDASGSLDGLVKRNNFFESDAPKSGLPDENFAANNYASRSYSSSLTPSIYLRSPNGDLDNVHGSSGMITRGSPLGLTGLLNLGNTCYMNSAIQCLVHTPQFTKYFCEDYHREINRQNPLGNVGELALAFGELLRKLWAPGGRAPVSPRPFKMKLSRFASQFSGYNQHDSQELLAFLLDGLHEDLNRVKHRPYINSGDADGRSDEEVADEYWANHIARNNSIIVDVCQGQYKSTLVCPVCGKVSVTFDPFMYLSLPLQFASTRSVTAVVFSCDGSVPPTPFTVNVPKQDTES

SEQ ID NO: 169727 - protein, 527 aa, Zea Mays
MKLSRFASQFSGYNQHDSQELLAFLLDGLHEDLNRVKHRPYINSGDADGRSDEEVADEYWANHIARNNSIIVDVCQGQYKSTLVCPVCGKVSVTFDPFMYLSLPLQFASTRSVTAVVFSCDGSVPPTPFTVNVPKQGRCRDLLQALGAACSLKNGEKLLIAEIRNHKIYRFIDDPVLQLSTISDDDHLAVYKLPKLEKRVNYIQFVHRHEDLDHGNNNSLTSWKPYGVPLLAQISRNEIVTGFDIHELVHKMLVPVLRNPDSLHLAVQSSVSTRTHSYHTDSSKCQLLLVDDSNTVIEKSNDAIRIPQSSLATVFFINWPKADLKKIDTHHLEYLPEVFMYAPPAKRTRGEALSLYACLDAFLREEPLVPEDMWYCPRCKEQRQASKKLDLWRLPEVLVIHLKRFSFSRSTKQKLETFVNFPIHDLDLTNYIANKKTSERQIYELYAVSNHYGNMASGHYTAHIKLVDENRWYNFDDSHVASIDEDEVKTAAAYVLFYRRVREQDIARGTSNGSQLYAKRSHGYSHR

SEQ ID NO: 169728 - protein, 503 aa, Zea Mays
MEMVVAAPALPAEVERALIRDITVAADAHAKEGDTFFLITTRWWQSWIDYLIQDLTGATSNGSHHHEFGSKTPRRPGAIDNTDLIDDVPLEVSNMEIEIHDNLVEGRDYILLPQQVWEKLHGWYGGGPTLPRKAINTGFSQTDLAIEVYPLRLQLILMSRGERTFIRISKKVCIWDYYGRTKHSLMDSLDKTLDDANIQMDQNILVEVTTDASGSLDGLVKRNNFFESDAPKSGLPDENFAANNYASRSYSSSLTPSIYLRSPNGDLDNVHGSSGMITRGSPLGLTGLLNLGNTCYMNSAIQCLVHTPQFTKYFCEDYHREINRQNPLGNVGELALAFGELLRKLWAPGGRAPVSPRPFKMKLSRFASQFSGYNQHDSQELLAFLLDGLHEDLNRVKHRPYINSGDADGRSDEEVADEYWANHIARNNSIIVDVCQGQYKSTLVCPVCGKVSVTFDPFMYLSLPLQFASTRSVTAVVFSCDGSVPPTPFTVNVPKQGLTIVCP

SEQ ID NO: 169729 - protein, 520 aa, Zea Mays
MEMVVAAPALPAEVERALIRDITVAADAHAKEGDTFFLITTRWWQSWIDYLIQDLTGATSNGSHHHEFGSKTPRRPGAIDNTDLIDDVPLEVSNMEIEIHDNLVEGRDYILLPQQVWEKLHGWYGGGPTLPRKAINTGFSQTDLAIEVYPLRLQLILMSRGERTFIRISKKGTVGQLHKMACKVFDLAPDEVCIWDYYGRTKHSLMDSLDKTLDDANIQMDQNILVEVTTDASGSLDGLVKRNNFFESDAPKSGLPDENFAANNYASRSYSSSLTPSIYLRSPNGDLDNVHGSSGMITRGSPLGLTGLLNLGNTCYMNSAIQCLVHTPQFTKYFCEDYHREINRQNPLGNVGELALAFGELLRKLWAPGGRAPVSPRPFKMKLSRFASQFSGYNQHDSQELLAFLLDGLHEDLNRVKHRPYINSGDADGRSDEEVADEYWANHIARNNSIIVDVCQGQYKSTLVCPVCGKVSVTFDPFMYLSLPLQFASTRSVTAVVFSCDGSVPPTPFTVNVPKQDTES

SEQ ID NO: 169730 - protein, 887 aa, Zea Mays
MEMVVAAPALPAEVERALIRDITVAADAHAKEGDTFFLITTRWWQSWIDYLIQDLTGATSNGSHHHEFGSKTPRRPGAIDNTDLIDDVPLEVSNMEIEIHDNLVEGRDYILLPQQVWEKLHGWYGGGPTLPRKAINTGFSQTDLAIEVYPLRLQLILMSRGERTFIRISKKVCIWDYYGRTKHSLMDSLDKTLDDANIQMDQNILVEVTTDASGSLDGLVKRNNFFESDAPKSGLPDENFAANNYASRSYSSSLTPSIYLRSPNGDLDNVHGSSGMITRGSPLGLTGLLNLGNTCYMNSAIQCLVHTPQFTKYFCEDYHREINRQNPLGNVGELALAFGELLRKLWAPGGRAPVSPRPFKMKLSRFASQFSGYNQHDSQELLAFLLDGLHEDLNRVKHRPYINSGDADGRSDEEVADEYWANHIARNNSIIVDVCQGQYKSTLVCPVCGKVSVTFDPFMYLSLPLQFASTRSVTAVVFSCDGSVPPTPFTVNVPKQGRCRDLLQALGAACSLKNGEKLLIAEIRNHKIYRFIDDPVLQLSTISDDDHLAVYKLPKLEKRVNYIQFVHRHEDLDHGNNNSLTSWKPYGVPLLAQISRNEIVTGFDIHELVHKMLVPVLRNPDSLHLAVQSSVSTRTHSYHTDSSKCQLLLVDDSNTVIEKSNDAIRIPQSSLATVFFINWPKADLKKIDTHHLEYLPEVFMYAPPAKRTRGEALSLYACLDAFLREEPLVPEDMWYCPRCKEQRQASKKLDLWRLPEVLVIHLKRFSFSRSTKQKLETFVNFPIHDLDLTNYIANKKTSERQIYELYAVSNHYGNMASGHYTAHIKLVDENRWYNFDDSHVASIDEDEVKTAAAYVLFYRRVREQDIARGTSNGSQLYAKRSHGYSHR

SEQ ID NO: 169731 - protein, 907 aa, Zea Mays
MEMVVAAPALPAEVERALIRDITVAADAHAKEGDTFFLITTRWWQSWIDYLIQDLTGATSNGSHHHEFGSKTPRRPGAIDNTDLIDDVPLEVSNMEIEIHDNLVEGRDYILLPQQVWEKLHGWYGGGPTLPRKAINTGFSQTDLAIEVYPLRLQLILMSRGERTFIRISKKGTVGQLHKMACKVFDLAPDEVCIWDYYGRTKHSLMDSLDKTLDDANIQMDQNILVEVTTDASGSLDGLVKRNNFFESDAPKSGLPDENFAANNYASRSYSSSLTPSIYLRSPNGDLDNVHGSSGMITRGSPLGLTGLLNLGNTCYMNSAIQCLVHTPQFTKYFCEDYHREINRQNPLGNVGELALAFGELLRKLWAPGGRAPVSPRPFKMKLSRFASQFSGYNQHDSQELLAFLLDGLHEDLNRVKHRPYINSGDADGRSDEEVADEYWANHIARNNSIIVDVCQGQYKSTLVCPVCGKVSVTFDPFMYLSLPLQFASTRSVTAVVFSCDGSVPPTPFTVNVPKQGRCRDLLQALGAACSLKNGEKLLIAEIRNHKIYRFIDDPVLQLSTISDDDHLAVYKLPKLEKRVNYIQFVHRHEDLDHGNNNSLTSWKPYGVPLLAQISRNEIVTGFDIHELVHKMLVPVLRNPDSLHLAVQSSVSTRTHSYHTDSSKCQLLLVDDSNTVIEKSNDAIRIPQSSLATVFFINWPKADLKKIDTHHLEYLPEVFMYAPPAKRTRGEALSLYACLDAFLREEPLVPEDMWYCPRCKEQRQASKKLDLWRLPEVLVIHLKRFSFSRSTKQKLETFVNFPIHDLDLTNYIANKKTSERQIYELYAVSNHYGNMASGHYTAHIKLVDENRWYNFDDSHVASIDEDEVKTAAAYVLFYRRVREQDIARGTSNGSQLYAKRSHGYSHR

SEQ ID NO: 169732 - protein, 346 aa, Zea Mays
MQDLLRRFSFDVICRVSLGVDPGCLDPALPAPRLAAAFDAAAGIIARRGAAPVAAVWKAKRALDVGSERQLREEIAVIHEAVMDLIHIRKKECGLRVNGGDGRRSDLLSRMIECGYPDEAIRDMVISFIMAGRDTTSSALTWFFWLLTRHRDVEREVLREITGGGASHAAAGGQGKMRALHAALCETMRLYPPVAWDSKHAAAGDVLPDGTRVERGDRVTYFQYGMGRMESIWGADAGEFSLRRWLSIIPEENAAPAPPAAVAGLSPFKYPVFQAGPRTCLGKEMAFVQMKFVASTVLRRFELVPVDEGRVPVFLPLMTAHMGDGLNVTVRSRSGEHVASAASSGN

SEQ ID NO: 169733 - protein, 124 aa, Zea Mays
MLNSENVQEDGVYLLENGEDGLIYVGNMVNPATLEQIFGVSSLAALPAQLALEQFDNELSRKVNEVVNEIRRQRCSYLRLRQCRRGEPSGDFFRSFLVEDKAPGVFSYVEFLVHVHRQIQSKMT

SEQ ID NO: 169734 - protein, 286 aa, Zea Mays
MRVRCSQGLQVQDYYGNFCKRVPTDIDLPAIDSDKTVMVTFKHDDKLPENVECGFQCALLYTTVYGQRRIRVINLSLSCTNLLANLFRYADLETQFSCFLKQALVKSLGLRTDGRLDDRSYWISVASSVSVVLAVPLVFPRLIPIHDLTSRDDDDSLIPSPLMLNSENVQEDGVYLLENGEDGLIYVGNMVNPATLEQIFGVSSLAALPAQLALEQFDNELSRKVNEVVNEIRRQRCSYLRLRQCRRGEPSGDFFRSFLVEDKAPGVFSYVEFLVHVHRQIQSKMT

SEQ ID NO: 169735 - protein, 534 aa, Zea Mays
MASSPQPPPPFAAQNPTAQGSGQGPPGSGVGALPGAFANLQISRGAAPPPGAPRGLTPQQAPPTLAARPGPPPSAARPAFPGSPPAPPFVRAPTPSTSASPPFGGQPGVMSQPPPPFGGPPGASSQPPPPFGVPPGVVSQAPSLFGGPPATASQASSPFVGHSVAASQAAPFGAPPVAGSHPPPFGGPPGAGPQPAPPLRQTFAGQPGPMAAAAAWTQPPPPSFGAPQQPPPPFGSRPAGQPLFATQSAPAAQQLPFMGPPRVNAPAFGPPSWQTQGAGSGAMQPPLRMPGIPGSMQPNTLGPPGTPTIPYSPHAGTQVSTPSKIDPNQIPRPMRESSVIIYETRQGGQATIPPAASSEFIVKDTGNCSPRLMRCTVNQIPCTGDLLTTSGMPLALMVQPFSLPHPSEEHIQLVDFGEMGPIRCSRCKAYINPFMKFVDQGRHFICNLCGFRNDTPRDYMCNLGPDGRRRDADDRPELSRGTVEFVATKEFLVRDPMPAVYFFLIDVSMNAIQTGATAAACSAISQAISDLPQT

SEQ ID NO: 169736 - protein, 312 aa, Zea Mays
MAELFGWDVPEVGQEGPRTMVGIATFDSAIHFYSLKRAQQQPLMLIVPDVQDVYTPLQTDLILPVSECRDNLEQLLESIPSMFENNRVADSAFGAAMKAGFLAMKSTGGKLLVFQSVLPSLGIGSLSAREAEGRANITTGDKPVDNTLKTMALEFAEYQVCVDVFLTTQSYVDIASISVVPQTTGGRSGQEKAKGGNCLVSWEIVQRTKATGIWRSWGSQSSKIRLGFMYSVAMATKNRYCSAMGGLPIQVLRNSQALFAAAMHIIVGNGKDTKFWTDRWLNGSSVAELAPNLLLAVSTKRCTVSQALNNRR

SEQ ID NO: 169737 - protein, 663 aa, Zea Mays
MASSPQPPPPFAAQNPTAQGSGQGPPGSGVGALPGAFANLQISRGAAPPPGAPRGLTPQQAPPTLAARPGPPPSAARPAFPGSPPAPPFVRAPTPSTSASPPFGGQPGVMSQPPPPFGGPPGASSQPPPPFGVPPGVVSQAPSLFGGPPATASQASSPFVGHSVAASQAAPFGAPPVAGSHPPPFGGPPGAGPQPAPPLRQTFAGQPGPMAAAAAWTQPPPPSFGAPQQPPPPFGSRPAGQPLFATQSAPAAQQLPFMGPPRVNAPAFGPPSWQTQGAGSGAMQPPLRMPGIPGSMQPNTLGPPGTPTIPYSPHAGTQVSTPSKIDPNQIPRPMRESSVIIYETRQGGQATIPPAASSEFIVKDTGNCSPRLMRCTVNQIPCTGDLLTTSGMPLALMVQPFSLPHPSEEHIQLVDFGEMGPIRCSRCKAYINPFMKFVDQGRHFICNLCGFRNDTPRDYMCNLGPDGRRRDADDRPELSRGTVEFVATKEFLVRDPMPAVYFFLIDVSMNAIQTGATAAACSAISQAISDLPEGPRTMVGIATFDSAIHFYSLKRAQQQPLMLIVPDVQDVYTPLQTDLILPVSECRDNLEQLLESIPSMFENNRVADSAFGAAMKAGFLAMKSTGGKLLVFQSAREAEGRANITTGDKVCIVAYLHILILSY

SEQ ID NO: 169738 - protein, 422 aa, Zea Mays
MASSPQPPPPFAAQNPTAQGSGQGPPGSGVGALPGAFANLQISRGAAPPPGAPRGLTPQQAPPTLAARPGPPPSAARPAFPGSPPAPPFVRAPTPSTSASPPFGGQPGVMSQPPPPFGGPPGASSQPPPPFGVPPGVVSQAPSLFGGPPATASQASSPFVGHSVAASQAAPFGAPPVAGSHPPPFGGPPGAGPQPAPPLRQTFAGQPGPMAAAAAWTQPPPPSFGAPQQPPPPFGSRPAGQPLFATQSAPAAQQLPFMGPPRVNAPAFGPPSWQTQGAGSGAMQPPLRMPGIPGSMQPNTLGPPGTPTIPYSPHAGTQVSTPSKIDPNQIPRPMRESSVIIYETRQGGQATIPPAASSEFIVKDTGNCSPRLMRCTVNQIPCTGDLLTTSGMPLALMVQPFSLPHPSEEHIQSIATLAQVMP

SEQ ID NO: 169739 - protein, 751 aa, Zea Mays
MQEGCKAYLLDDSAASLLMRCHTCSKGVLDFFPELPPCVVNMQALVTSTDPDAPLGSGADSIPTHVGEGALEPGHGDVAVGGLVELGAVPVPVEATTRRRTPTLSFAGNYSQHALTIWRPSFMQSAVRGPGAFNVYGRAGEHPAPWTDPPGPLDRAPAVGTFQIELQQQAQVRSDQSASRTSGRGEALESRADQDVCEDRPHDAQTSAVEEAMAAGAGDPGQLDQLLLLDPYAEDDITNYCVEFHNAVVTTIYSSIIIKPETGSSSSSSFACSTNCPSQALHNIGKPSLVAVVTIAGTPSSTLIDAQVVLGEMQPREHSTLMTATIELRFILWYFFILDLVALQQSPPWPQPVKSLVVVGYILPKPPWLAFDRGNLFRIHYTCSTRSASLQYTLQLSPDAGNIQNQCLDLCLVNLITGSALNVRVQQLLVSVGSPSNALVLKIPIQGVVDALHRKTLQGTGLNEEQMRQASVADNGHRQLNKILVDLDQDNITAKNYAIAFYTEKHIQIPCLGGEHEVTFFHEYRDSVERVFVDHPSYHRPGNLYGAKVVLLGFQHYAVMLGTTVIIPTALVPQMGGKYEDKVVVIQTLMFVVGMNTLRQSFLGTRLPAVTGGSYTFVLYTISIILGGRSANEPSSHIKFLGIMRGTHGALIVASALQIIVAFSGLWCNVARYLSSLSATPLVALVVFGLYELEIPRAGKIKALSVDAVIVFGSQRIPQVIHSVMWIMFILFRVIWCLQFSWDPGGSNWWK

SEQ ID NO: 169740 - protein, 87 aa, Zea Mays
MDGNTPMDRWQAKIRKLRQYLTRWAKHTNGINKKEKKSLLNNLDELDRIAESTILTQQELDLKCCVHNRLANLLREEEIKWYQRAKV

SEQ ID NO: 169741 - protein, 79 aa, Zea Mays
MSTRHRGSQDQNGFTPTESTDTPPPSLLPRRVHATLAISPLPLCGGLCGSGQTEAKLTHDEACGQLKGPRSASLHRFGP

SEQ ID NO: 169742 - protein, 338 aa, Zea Mays
MAASWRAVALSVVTLAWLLGGGAWAFPAEDLVTRLPGQPPVTFRQFAGYVDVDVKAGRSLFYYFAEAQENAAAKPLTLWLNGGPGCSSIGGGAFTELGPFYPRGDGRGLRLNKKSWNKASNLLFVESPAGVGWSYSNTSSDYITGDARTANDMLRFLLGWYAKFPEYRSRALFLTGESYAGHYIPQIADVLVTHNERSKGLKFNIKGVAIGNPLLKLDRDVPATYEYFWSHGMISDETFLAISHSCDFEDYTFNNDSPHNESKPCNDAIAEANAVVGDYVNNYDVILDVCYPSIVMQELRLRQRQRSVWEWMSACPTKGSSISTYQRCSRPCTLTGRT

SEQ ID NO: 169743 - protein, 821 aa, Zea Mays
MTPRGNKYFLLLVDDLSRYMWMAAISSKDQAIDAVKRIQMQAERESGLKLKTLRTDRGGEFTSGEFAEYCMASGIHRQHTAPYSPQQNGIVERRNGTVVATTRSMLKAKKLPGWFWGEAVKTAVYVLNRCPTKSVDGMTPFEAWHGKKPAVHHLKTFGCIVYVRNTVPHLKKLEDRGRKMIFIGYEEGTKAYRAYDPITERVHISRDVIFDEQAQWDWETQEDINSENEDQDVFTMEYAIRKQTHSEGDEKTAGESEDEHSAGGLSPRTPHVDTGHVSEEEDEMQEVEFASPPEGNIDEYLDAYRAEYDPLRFRKVDGLLESKTPPGYATRRLLDEELHAVSADEPISFGEAERSLSWRKAMMEEMKSIEDNQTWTLVDLPPGRKAIGLKWVYKVKRDEQGAVSKHKARLVVKGYAQQHGIDYDEVFAPVARLDSVRLLIALAAHESWEVHHMDVKSAFLNGELGEEVTMKSLGFRKSISEPAIYLRRNIKSQLVVGVYVDDLIITGTNCEDIKLFKEEMAAVFKMTDLGLLKYYLGIEVRQNKEGISLSQGAYAEKILEKNGMRECNPCQTPMETRLKLSKLSTEPLVDVTVYRSIVGSLRYLVNTRPDLVFAVGYVSRFLEEPHKDHMMAVKHILRYVKGTKNWGLWFGRKGRKEAGLIGYSDSDYAGDVDSRKSTTGVVFFLNNSPVTWTSMKQKVVAQSTCEAEYIAAANAACQALWLSRVLAEVQGVSLKAPMLKVDNKSAIALIKNPVLHGQSKHIEVKYHFVRECAENGQIKVDFIRSEEQLGDFLTKPLGKTKFQELRSKVGLVDVDRLHHKA

SEQ ID NO: 169744 - protein, 241 aa, Zea Mays
MHACLVTLLARIFKDCGQKTVQLPVLGEVLILSVGIVPFCAVFAILWAVYRHASFAWIGQDVLGICLMITVLQMARLPNIKVASALLSAAFVYDIFWVFISPLIFHESVMIAVARGDNTGESIPMLLRIPRFFDPWGGYDMIGFGDIIFPGLLVGFSYRFDRANRKGVLSGYFLWLIVGYAVGLFITYLALFLMDGHGQPALLYLVPCTLGVIVILGWLRGELYELWNFGKSPGENFVNEP

SEQ ID NO: 169745 - protein, 261 aa, Zea Mays
MSSWFVWVLIVLFCIGGIEGMHACLVTLLARIFKDCGQKTVQLPVLGEVLILSVGIVPFCAVFAILWAVYRHASFAWIGQDVLGICLMITVLQMARLPNIKVASALLSAAFVYDIFWVFISPLIFHESVMIAVARGDNTGESIPMLLRIPRFFDPWGGYDMIGFGDIIFPGLLVGFSYRFDRANRKGVLSGYFLWLIVGYAVGLFITYLALFLMDGHGQPALLYLVPCTLGVIVILGWLRGELYELWNFGKSPGENFVNEP

SEQ ID NO: 169746 - protein, 649 aa, Zea Mays
MDDAAAEEEASMFETSHVLGALLASSPLLARAWDRCTAASAAAPWFVHGEDGGKVYVGFSGVQAALTAAGAAVAGGGADIFAPVSLGGDAAGRMFAPLVAAEPDPAATGEPVAVQALALQCFLKLCCSPDFQMLLNQIRGKAVVFTGHSLGGAVAALTALHYLCISSSSSPPAPPVLCVTFGSPLLGNEALSRAILREHWGGNFCHVVSQHDVVPRLLFCSPDAVPAHIIVGMQLQQWPAWTRHTGAVSTVTAHMADTDKDVLRQLIQTHVGAVAVEQKLAASETTGGSPYRPFGTYVLCSPEGAACVDNPTAAVQMLYATFASQSSAGAESPEAAHSCYGELVLKMPHHLLLKRWLRVDDDMPATPNYDDGVSLALEASGIDVMVRAMEASTARHWLKTSKRAGRRPSLNCARLATQLGRVTPCRAQIEWYKALFDAEMGYYDAFKQRRSPRKYTKVNLNRIKLGQFWDRVLSMLDAGQLPHDFHRRAKWVNASRFYQLLVEPLDIADYHRHGHHLTSGSYMTHGRERRYELFDRWWHEKGCTGAGGGITSSMSAASASSRRRSKYAGLTQDPCFWARVEEAREQTESARRERDVAELAMKLEELQEFERYSRELVATKEVSVDVLAPQSSYTLWVEDWNQLKLRAQG

SEQ ID NO: 169747 - protein, 148 aa, Zea Mays
MQAVADEIVLVNVDPQKPPKAWNLVKLLDEFVSLGGKLSESFKDIREQNLQSALEQMQGWGPVKADSFALPNMPLPPDSFRGIRKRTSSITRWFSICVDDTSKKGRYTNTVNLLRKYFGDFLIATYLNAVQESRYDDAYIEGSTIEDS

SEQ ID NO: 169748 - protein, 170 aa, Zea Mays
MQGWGPVKADSFALPNMPLPPDSFRGIRKRTSSITRWFSICVDDTSKKGRYTNTVNLLRKYFGDFLIATYLNAVQESRYDDAYIGGIEREVLLKTLDTLWKDHLVNMNKLSSAVNVRSFGHRNPLEEYKIDGCRFFISMLSATRRLTVESLVHYWSSPMESEEIFNTEDQ

SEQ ID NO: 169749 - protein, 723 aa, Zea Mays
MAGGGGGSLSSPSASFLSSPTPTPPPRLLRRCSTKSASRDSPILRPKKPPPLFCAAAATPTPAPAAASKSAGSWRDLCSLNAWVVRDYRRLVDSVGALEPALRRLSEEQLKAKTAEFRSRLTRGETLADVQADAFAVVREAARRTLGMRHFDVQIIGGAVLHDGCIAEMKTGEGKTLVSTLAAYLNALTGKGVHVVTVNDYLAQRDAEWMGRVHRFLGLTVGLIQAGMKSDERRASYRCDITYTNNSELGFDYLRDNLSRNKEQLVMRWPRPFHFAIVDEVDSVLIDEGRNPLLISGEDNRDAVRYPIAAKVAELLMEGVHYTVELKGNNIDLTEDGVAHAEIILGTDDLWDENDPWARFVMNALKAKVFYRRDVQYIVRDGKAIIINEEKEFSKMFKMPVIEVPTNLPNIRVDLPIQAFATARGKWQYVRAEVESMFQLGRPVLVGTTSVESSEYLSELLKVHKIPHNVLNARPKYAAREAEIIAQAGRKHAITISTNMAGRGTDIILGGNPKMLAKEIVEDNILPFLTHEPPNIDMEGESTSHKGLSNVELSPSSVGLLAKAAIMSKYIHKSERNEWSLSKAKSTIAESIEMGQMIGMEKLQERMTEESEMYPLCDAIGLAYLSVLRDCEVHCSFEGAAVKRLGGLHVVGTSLHESRRIDNQLRGRAGRQGDPGSTRFMVSLQDEIFQKFNLDTEWAVRLISRITNDEDIAIESNVVVKQV

SEQ ID NO: 169750 - protein, 224 aa, Zea Mays
MAGRGTDIILGGNPKMLAKEIVEDNILPFLTHEPPNIDMEGESTSHKGLSNVELSPSSVGLLAKAAIMSKYIHKSERNEWSLSKAKSTIAESIEMGQMIGMEKLQERMTEESEMYPLCDAIGLAYLSVLRDCEVHCSFEGAAVKRLGGLHVVGTSLHESRRIDNQLRGRAGRQGDPGSTRFMVSLQDEIFQKFNLDTEWAVRLISRITNDEDIAIESNVVVKQV

SEQ ID NO: 169751 - protein, 342 aa, Zea Mays
MTGTAKTEEKEFSKMFKMPVIEVPTNLPNIRVDLPIQAFATARGKWQYVRAEVESMFQLGRPVLVGTTSVESSEYLSELLKVHKIPHNVLNARPKYAAREAEIIAQAGRKHAITISTNMAGRGTDIILGGNPKMLAKEIVEDNILPFLTHEPPNIDMEGESTSHKGLSNVELSPSSVGLLAKAAIMSKYIHKSERNEWSLSKAKSTIAESIEMGQMIGMEKLQERMTEESEMYPLCDAIGLAYLSVLRDCEVHCSFEGAAVKRLGGLHVVGTSLHESRRIDNQLRGRAGRQGDPGSTRFMVSLQDEIFQKFNLDTEWAVRLISRITNDEDIAIESNVVVKQV

SEQ ID NO: 169752 - protein, 430 aa, Zea Mays
MAGGGGGSLSSPSASFLSSPTPTPPPRLLRRCSTKSASRDSPILRPKKPPPLFCAAAATPTPAPAAASKSAGSWRDLCSLNAWVVRDYRRLVDSVGALEPALRRLSEEQLKAKTAEFRSRLTRGETLADVQADAFAVVREAARRTLGMRHFDVQIIGGAVLHDGCIAEMKTGEGKTLVSTLAAYLNALTGKGVHVVTVNDYLAQRDAEWMGRVHRFLGLTVGLIQELGFDYLRDNLSRNKEQLVMRWPRPFHFAIVDEVDSVLIDEGRNPLLISGEDNRDAVRYPIAAKVAELLMEGVHYTVELKGNNIDLTEDGVAHAEIILGTDDLWDENDPWARFVMNALKAKVFYRRDVQYIVRDGKAIIINELTGRVEPKRRWSDGIHQAVEAKEGLKIQADSVIVAQITYQSLFKLYPKLSGMTGTAKTECREF

SEQ ID NO: 169753 - protein, 614 aa, Zea Mays
MKTGEGKTLVSTLAAYLNALTGKGVHVVTVNDYLAQRDAEWMGRVHRFLGLTVGLIQAGMKSDERRASYRCDITYTNNSELGFDYLRDNLSRNKEQLVMRWPRPFHFAIVDEVDSVLIDEGRNPLLISGEDNRDAVRYPIAAKVAELLMEGVHYTVELKGNNIDLTEDGVAHAEIILGTDDLWDENDPWARFVMNALKAKVFYRRDVQYIVRDGKAIIINELTGRVEPKRRWSDGIHQAVEAKEGLKIQADSVIVAQITYQSLFKLYPKLSGMTGTAKTEEKEFSKMFKMPVIEVPTNLPNIRVDLPIQAFATARGKWQYVRAEVESMFQLGRPVLVGTTSVESSEYLSELLKVHKIPHNVLNARPKYAAREAEIIAQAGRKHAITISTNMAGRGTDIILGGNPKMLAKEIVEDNILPFLTHEPPNIDMEGESTSHKGLSNVELSPSSVGLLAKAAIMSKYIHKSERNEWSLSKAKSTIAESIEMGQMIGMEKLQERMTEESEMYPLCDAIGLAYLSVLRDCEVHCSFEGAAVKRLGGLHVVGTSLHESRRIDNQLRGRAGRQGDPGSTRFMVSLQDEIFQKFNLDTEWAVRLISRITNDEDIAIESNVVVKQV

SEQ ID NO: 169754 - protein, 359 aa, Zea Mays
MAGGGGGSLSSPSASFLSSPTPTPPPRLLRRCSTKSASRDSPILRPKKPPPLFCAAAATPTPAPAAASKSAGSWRDLCSLNAWVVRDYRRLVDSVGALEPALRRLSEEQLKAKTAEFRSRLTRGETLADVQADAFAVVREAARRTLGMRHFDVQIIGGAVLHDGCIAEMKTGEGKTLVSTLAAYLNALTGKGVHVVTVNDYLAQRDAEWMGRVHRFLGLTVGLIQAGMKSDERRASYRCDITYTNNSELGFDYLRDNLSRNKEQLVMRWPRPFHFAIVDEVDSVLIDEGRNPLLISGEDNRDAVRYPIAAKVAELLMEGVHYTVELKGNNIDLTEDGVAHAEIILGTDDLWDENDPWAS

SEQ ID NO: 169755 - protein, 782 aa, Zea Mays
MAGGGGGSLSSPSASFLSSPTPTPPPRLLRRCSTKSASRDSPILRPKKPPPLFCAAAATPTPAPAAASKSAGSWRDLCSLNAWVVRDYRRLVDSVGALEPALRRLSEEQLKAKTAEFRSRLTRGETLADVQADAFAVVREAARRTLGMRHFDVQIIGGAVLHDGCIAEMKTGEGKTLVSTLAAYLNALTGKGVHVVTVNDYLAQRDAEWMGRVHRFLGLTVGLIQAGMKSDERRASYRCDITYTNNSELGFDYLRDNLSRNKEQLVMRWPRPFHFAIVDEVDSVLIDEGRNPLLISGEDNRDAVRYPIAAKVAELLMEGVHYTVELKGNNIDLTEDGVAHAEIILGTDDLWDENDPWARFVMNALKAKVFYRRDVQYIVRDGKAIIINELTGRVEPKRRWSDGIHQAVEAKEGLKIQADSVIVAQITYQSLFKLYPKLSGMTGTAKTEEKEFSKMFKMPVIEVPTNLPNIRVDLPIQAFATARGKWQYVRAEVESMFQLGRPVLVGTTSVESSEYLSELLKVHKIPHNVLNARPKYAAREAEIIAQAGRKHAITISTNMAGRGTDIILGGNPKMLAKEIVEDNILPFLTHEPPNIDMEGESTSHKGLSNVELSPSSVGLLAKAAIMSKYIHKSERNEWSLSKAKSTIAESIEMGQMIGMEKLQERMTEESEMYPLCDAIGLAYLSVLRDCEVHCSFEGAAVKRLGGLHVVGTSLHESRRIDNQLRGRAGRQGDPGSTRFMVSLQDEIFQKFNLDTEWAVRLISRITNDEDIAIESNVVVKQV

SEQ ID NO: 169756 - protein, 773 aa, Zea Mays
MAGGGGGSLSSPSASFLSSPTPTPPPRLLRRCSTKSASRDSPILRPKKPPPLFCAAAATPTPAPAAASKSAGSWRDLCSLNAWVVRDYRRLVDSVGALEPALRRLSEEQLKAKTAEFRSRLTRGETLADVQADAFAVVREAARRTLGMRHFDVQIIGGAVLHDGCIAEMKTGEGKTLVSTLAAYLNALTGKGVHVVTVNDYLAQRDAEWMGRVHRFLGLTVGLIQAGMKSDERRASYRCDITYTNNSELGFDYLRDNLSRNKEQLVMRWPRPFHFAIVDEVDSVLIDEGRNPLLISGEDNRDAVRYPIAAKVAELLMEGVHYTVELKGNNIDLTEDGVAHAEIILGTDDLWDENDPWARFVMNALKAKVFYRRDVQYIVRDGKAIIINELTGRVEPKRRWSDGIHQAVEAKEGLKIQADSVIVAQITYQSLFKLYPKLSGMTGTAKTEEKEFSKMFKMPVIEVPTNLPNIRTARGKWQYVRAEVESMFQLGRPVLVGTTSVESSEYLSELLKVHKIPHNVLNARPKYAAREAEIIAQAGRKHAITISTNMAGRGTDIILGGNPKMLAKEIVEDNILPFLTHEPPNIDMEGESTSHKGLSNVELSPSSVGLLAKAAIMSKYIHKSERNEWSLSKAKSTIAESIEMGQMIGMEKLQERMTEESEMYPLCDAIGLAYLSVLRDCEVHCSFEGAAVKRLGGLHVVGTSLHESRRIDNQLRGRAGRQGDPGSTRFMVSLQDEIFQKFNLDTEWAVRLISRITNDEDIAIESNVVVKQV

SEQ ID NO: 169757 - protein, 713 aa, Zea Mays
MAGGGGGSLSSPSASFLSSPTPTPPPRLLRRCSTKSASRDSPILRPKKPPPLFCAAAATPTPAPAAASKSAGSWRDLCSLNAWVVRDYRRLVDSVGALEPALRRLSEEQLKAKTAEFRSRLTRGETLADVQADAFAVVREAARRTLGMRHFDVQIIGGAVLHDGCIAEMKTGEGKTLVSTLAAYLNALTGKGVHVVTVNDYLAQRDAEWMGRVHRFLGLTVGLIQAGMKSDERRASYRCDITYTNNSELGFDYLRDNLSRNKEQLVMRWPRPFHFAIVDEVDSVLIDEGRNPLLISGEDNRDAVRYPIAAKVAELLMEGVHYTVELKGNNIDLTEDGVAHAEIILGTDDLWDENDPWARFVMNALKAKVFYRRDVQYIVRDGKAIIINELTGRVEPKRRWSDGIHQAVEAKEGLKIQADSVIVAQITYQSLFKLYPKLSGMTGTAKTEEKEFSKMFKMPVIEVPTNLPNIRVDLPIQAFATARGKWQYVRAEVESMFQLGRPVLVGTTSVESSEYLSELLKVHKIPHNVLNARPKYAAREAEIIAQAGRKHAITISTNMAGRGTDIILGGNPKMLAKEIVEDNILPFLTHEPPNIDMEGESTSHKGLSNVELSPSSVGLLAKAAIMSKYIHKSERNEWSLSKAKSTIAESIEMGQMIGMEKLQERMTEESEMYPLCDAIGLAYLSVLRDCEVHCSFEGAAVKRLAARQSRQTG

SEQ ID NO: 169758 - protein, 432 aa, Zea Mays
MAGGGGGSLSSPSASFLSSPTPTPPPRLLRRCSTKSASRDSPILRPKKPPPLFCAAAATPTPAPAAASKSAGSWRDLCSLNAWVVRDYRRLVDSVGALEPALRRLSEEQLKAKTAEFRSRLTRGETLADVQADAFAVVREAARRTLGMRHFDVQIIGGAVLHDGCIAEMKTGEGKTLVSTLAAYLNALTGKGVHVVTVNDYLAQRDAEWMGRVHRFLGLTVGLIQAGMKSDERRASYRCDITYTNNSELGFDYLRDNLSRNKEQLVMRWPRPFHFAIVDEVDSVLIDEGRNPLLISGEDNRDAVRYPIAAKVAELLMEGVHYTVELKGNNIDLTEDGVAHAEIILGTDDLWDENDPWARFVMNALKAKVFYRRDVQYIVRDGKAIIINELTGRVEPKRRWSDGIHQAVEAKEGLKIQFLVCNANCNLIRQTR

SEQ ID NO: 169759 - protein, 272 aa, Zea Mays
MRHFDVQIIGGAVLHDGCIAEMKTGEGKTLVSTLAAYLNALTGKGVHVVTVNDYLAQRDAEWMGRVHRFLGLTVGLIQAGMKSDERRASYRCDITYTNNSELGFDYLRDNLSRNKEQLVMRWPRPFHFAIVDEVDSVLIDEGRNPLLISGEDNRDAVRYPIAAKVAELLMEGVHYTVELKGNNIDLTEDGVAHAEIILGTDDLWDENDPWARFVMNALKAKVFYRRDVQYIVRDGKAIIINELYLAACAGEALHMYRHMHLYIFLFEFFEGT

SEQ ID NO: 169760 - protein, 52 aa, Zea Mays
MFLSLHSFLPSHQNLVCTEAGHTINCCCGDHSGQFAALPWPERFKKGRAVVI

SEQ ID NO: 169761 - protein, 59 aa, Zea Mays
MSQPHSAFMSNNPSCQRERVHGMSSSQRLQQLVSLFIRLIPFGNLSQPTWYYRGSGQSM

SEQ ID NO: 169762 - protein, 699 aa, Zea Mays
MAQKWGNIYIVNPKWVDQSVARRACQDENSYLVCQTSSAFSGSKSSHKEQQNPEISSASASFQPVPATSVDDSVSMSQHLPASFGDASRISSTDIVGAPSVQETDDMQVDSHIAEDSEPENDDLYLSNCRISLVGFEEKELLRLVMLIRNGGGSRHILLSEKLTHIVIGTPSDEEKKEVRRLAAWGVINIVKVTWLEDCNKAKKEVKVSSMHIATELLLKGFSQVSMENSADTRETKVAKSSGGIFHVPTVNDLHEKHHEKGVSSERKPKRGKHENSISKTRSAARTEKSSQQNGLANVSEYQLQYKVTSIMNSGSSRSNIFKGRTFSFSNSFSHDKRPEVVDWVRDGGGVMVDDIHSTAADFIIECHGQNSLPCDFSHSLVSTQWIRSCLEENCLQDVGSHPIFSPLRCRIPFPGFESFRFCISLSQYGEKERHLLKNLCFLLGAKFTDKAYKGVTHLICKFASGLKYEVYSKRGTPTITSEWLYECVKQDKLLPVDHFQPKPLTSQDKDAYPCTASQYSTQATRFDSSELLSGCQVTKNNATHNSVNEETTMPAVSRKRRISVPGKVNGICGNIEKTEKQLDNSSVPDVADAIEVLSSKIFQPDNSVVQEQKDTHSFDISRSWLNMQQKQDSTSVTKVQNLNSVPVPSPAPTTYYPFSETQTESQVVGYEEDLTGRQKIIDRVRSQSINVTPSSEIL

SEQ ID NO: 169763 - protein, 672 aa, Zea Mays
MAQKWGNIYIVNPKWVDQSVARRATSVDDSVSMSQHLPASFGDASRISSTDIVGAPSVQETDDMQVDSHIAEDSEPENDDLYLSNCRISLVGFEEKELLRLVMLIRNGGGSRHILLSEKLTHIVIGTPSDEEKKEVRRLAAWGVINIVKVTWLEDCNKAKKEVKVSSMHIATELLLKGFSQVSMENSADTRETKVAKSSGGIFHVPTVNDLHEKHHEKGVSSERKPKRGKHENSISKTRSAARTEKSSQQNGLANVSEYQLQYKVTSIMNSGSSRSNIFKGRTFSFSNSFSHDKRPEVVDWVRDGGGVMVDDIHSTAADFIIECHGQNSLPCDFSHSLVSTQWIRSCLEENCLQDVGSHPIFSPLRCRIPFPGFESFRFCISLSQYGEKERHLLKNLCFLLGAKFTDKAYKGVTHLICKFASGLKYEVYSKRGTPTITSEWLYECVKQDKLLPVDHFQPKPLTSQDKDAYPCTASQYSTQATRFDSSELLSGCQVTKNNATHNSGNSGIFAVNEETTMPAVSRKRRISVPGKVNGICGNIEKTEKQLDNSSVPDVADAIEVLSSKIQDVQSPRSIFQPDNSVVQEQKDTHSFDISRSWLNMQQKQDSTSVTKVQNLNSVPVPSPAPTTYYPFSETQTESQVVGYEEDLTGRQKIIDRVRSQSINVTPSSEIL

SEQ ID NO: 169764 - protein, 908 aa, Zea Mays
MTPSYNSGPAGPAGGRRAATFAGACVFLSRNLVAPEVFDAVHDALRLNGAEVLLCADPSRTGPLDFHVISSSSHERFADMRSKGLNLLGPQCILSCAKERRFLPKQSYTCCLAMDGVKTLCSGFEKSEKVRIEELVTAMGGHLLTKHSMDVNFVIVKDVLAAKYKWALNTLKKPIVTMKWLEQCWIEHRVVPHEPYRILPFTGLNICVTKLDPDERKKLEKIVVRNGGQFSACLTRKCTHLVANKPGGDKYVMAQKWGNIYIVNPKWVDQSVARRATSVDDSVSMSQHLPASFGDASRISSTDIVGAPSVQETDDMQVDSHIAEDSEPENDDLYLSNCRISLVGFEEKELLRLVMLIRNGGGSRHILLSEKLTHIVIGTPSDEEKKEVRRLAAWGVINIVKVTWLEDCNKAKKEVKVSSMHIATELLLKGFSQVSMENSADTRETKVAKSSGGIFHVPTVNDLHEKHHEKGVSSERKPKRGKHENSISKTRSAARTEKSSQQNGLANVSEYQLQYKVTSIMNSGSSRSNIFKGRTFSFSNSFSHDKRPEVVDWVRDGGGVMVDDIHSTAADFIIECHGQNSLPCDFSHSLVSTQWIRSCLEENCLQDVGSHPIFSPLRCRIPFPGFESFRFCISLSQYGEKERHLLKNLCFLLGAKFTDKAYKGVTHLICKFASGLKYEVYSKRGTPTITSEWLYECVKQDKLLPVDHFQPKPLTSQDKDAYPCTASQYSTQATRFDSSELLSGCQVTKNNATHNSVNEETTMPAVSRKRRISVPGKVNGICGNIEKTEKQLDNSSVPDVADAIEVLSSKIFQPDNSVVQEQKDTHSFDISRSWLNMQQKQDSTSVTKVQNLNSVPVPSPAPTTYYPFSETQTESQVVGYEEDLTGRQKIIDRVRSQSINVTPSSEIL

SEQ ID NO: 169765 - protein, 656 aa, Zea Mays
MAQKWGNIYIVNPKWVDQSVARRATSVDDSVSMSQHLPASFGDASRISSTDIVGAPSVQETDDMQVDSHIAEDSEPENDDLYLSNCRISLVGFEEKELLRLVMLIRNGGGSRHILLSEKLTHIVIGTPSDEEKKEVRRLAAWGVINIVKVTWLEDCNKAKKEVKVSSMHIATELLLKGFSQVSMENSADTRETKVAKSSGGIFHVPTVNDLHEKHHEKGVSSERKPKRGKHENSISKTRSAARTEKSSQQNGLANVSEYQLQYKVTSIMNSGSSRSNIFKGRTFSFSNSFSHDKRPEVVDWVRDGGGVMVDDIHSTAADFIIECHGQNSLPCDFSHSLVSTQWIRSCLEENCLQDVGSHPIFSPLRCRIPFPGFESFRFCISLSQYGEKERHLLKNLCFLLGAKFTDKAYKGVTHLICKFASGLKYEVYSKRGTPTITSEWLYECVKQDKLLPVDHFQPKPLTSQDKDAYPCTASQYSTQATRFDSSELLSGCQVTKNNATHNSVNEETTMPAVSRKRRISVPGKVNGICGNIEKTEKQLDNSSVPDVADAIEVLSSKIFQPDNSVVQEQKDTHSFDISRSWLNMQQKQDSTSVTKVQNLNSVPVPSPAPTTYYPFSETQTESQVVGYEEDLTGRQKIIDRVRSQSINVTPSSEIL

SEQ ID NO: 169766 - protein, 960 aa, Zea Mays
MTPSYNSGPAGPAGGRRAATFAGACVFLSRNLVAPEVFDAVHDALRLNGAEVLLCADPSRTGPLDFHVISSSSHERFADMRSKGLNLLGPQCILSCAKERRFLPKQSYTCCLAMDGVKTLCSGFEKSEKVRIEELVTAMGGHLLTKHSMDVNFVIVKDVLAAKYKWALNTLKKPIVTMKWLEQCWIEHRVVPHEPYRILPFTGLNICVTKLDPDERKKLEKIVVRNGGQFSACLTRKCTHLVANKPGGDKYVMAQKWGNIYIVNPKWVDQSVARRACQDENSYLVCQTSSAFSGSKSSHKEQQNPEISSASASFQPVPATSVDDSVSMSQHLPASFGDASRISSTDIVGAPSVQETDDMQVDSHIAEDSEPENDDLYLSNCRISLVGFEEKELLRLVMLIRNGGGSRHILLSEKLTHIVIGTPSDEEKKEVRRLAAWGVINIVKVTWLEDCNKAKKEVKVSSMHIATELLLKGFSQVSMENSADTRETKVAKSSGGIFHVPTVNDLHEKHHEKGVSSERKPKRGKHENSISKTRSAARTEKSSQQNGLANVSEYQLQYKVTSIMNSGSSRSNIFKGRTFSFSNSFSHDKRPEVVDWVRDGGGVMVDDIHSTAADFIIECHGQNSLPCDFSHSLVSTQWIRSCLEENCLQDVGSHPIFSPLRCRIPFPGFESFRFCISLSQYGEKERHLLKNLCFLLGAKFTDKAYKGVTHLICKFASGLKYEVYSKRGTPTITSEWLYECVKQDKLLPVDHFQPKPLTSQDKDAYPCTASQYSTQATRFDSSELLSGCQVTKNNATHNSVNEETTMPAVSRKRRISVPGKVNGICGNIEKTEKQLDNSSVPDVADAIEVLSSKIQDVQSPRSIFQPDNSVVQEQKDTHSFDISRSWLNMQQKQDSTSVTKVQNLNSVPVPSPAPTTYYPFSETQTESQVVGYEEDLTGRQKIIDRVRSQSINVTPSSEIL

SEQ ID NO: 169767 - protein, 917 aa, Zea Mays
MTPSYNSGPAGPAGGRRAATFAGACVFLSRNLVAPEVFDAVHDALRLNGAEVLLCADPSRTGPLDFHVISSSSHERFADMRSKGLNLLGPQCILSCAKERRFLPKQSYTCCLAMDGVKTLCSGFEKSEKVRIEELVTAMGGHLLTKHSMDVNFVIVKDVLAAKYKWALNTLKKPIVTMKWLEQCWIEHRVVPHEPYRILPFTGLNICVTKLDPDERKKLEKIVVRNGGQFSACLTRKCTHLVANKPGGDKYVMAQKWGNIYIVNPKWVDQSVARRATSVDDSVSMSQHLPASFGDASRISSTDIVGAPSVQETDDMQVDSHIAEDSEPENDDLYLSNCRISLVGFEEKELLRLVMLIRNGGGSRHILLSEKLTHIVIGTPSDEEKKEVRRLAAWGVINIVKVTWLEDCNKAKKEVKVSSMHIATELLLKGFSQVSMENSADTRETKVAKSSGGIFHVPTVNDLHEKHHEKGVSSERKPKRGKHENSISKTRSAARTEKSSQQNGLANVSEYQLQYKVTSIMNSGSSRSNIFKGRTFSFSNSFSHDKRPEVVDWVRDGGGVMVDDIHSTAADFIIECHGQNSLPCDFSHSLVSTQWIRSCLEENCLQDVGSHPIFSPLRCRIPFPGFESFRFCISLSQYGEKERHLLKNLCFLLGAKFTDKAYKGVTHLICKFASGLKYEVYSKRGTPTITSEWLYECVKQDKLLPVDHFQPKPLTSQDKDAYPCTASQYSTQATRFDSSELLSGCQVTKNNATHNSVNEETTMPAVSRKRRISVPGKVNGICGNIEKTEKQLDNSSVPDVADAIEVLSSKIQDVQSPRSIFQPDNSVVQEQKDTHSFDISRSWLNMQQKQDSTSVTKVQNLNSVPVPSPAPTTYYPFSETQTESQVVGYEEDLTGRQKIIDRVRSQSINVTPSSEIL

SEQ ID NO: 169768 - protein, 708 aa, Zea Mays
MAQKWGNIYIVNPKWVDQSVARRACQDENSYLVCQTSSAFSGSKSSHKEQQNPEISSASASFQPVPATSVDDSVSMSQHLPASFGDASRISSTDIVGAPSVQETDDMQVDSHIAEDSEPENDDLYLSNCRISLVGFEEKELLRLVMLIRNGGGSRHILLSEKLTHIVIGTPSDEEKKEVRRLAAWGVINIVKVTWLEDCNKAKKEVKVSSMHIATELLLKGFSQVSMENSADTRETKVAKSSGGIFHVPTVNDLHEKHHEKGVSSERKPKRGKHENSISKTRSAARTEKSSQQNGLANVSEYQLQYKVTSIMNSGSSRSNIFKGRTFSFSNSFSHDKRPEVVDWVRDGGGVMVDDIHSTAADFIIECHGQNSLPCDFSHSLVSTQWIRSCLEENCLQDVGSHPIFSPLRCRIPFPGFESFRFCISLSQYGEKERHLLKNLCFLLGAKFTDKAYKGVTHLICKFASGLKYEVYSKRGTPTITSEWLYECVKQDKLLPVDHFQPKPLTSQDKDAYPCTASQYSTQATRFDSSELLSGCQVTKNNATHNSVNEETTMPAVSRKRRISVPGKVNGICGNIEKTEKQLDNSSVPDVADAIEVLSSKIQDVQSPRSIFQPDNSVVQEQKDTHSFDISRSWLNMQQKQDSTSVTKVQNLNSVPVPSPAPTTYYPFSETQTESQVVGYEEDLTGRQKIIDRVRSQSINVTPSSEIL

SEQ ID NO: 169769 - protein, 123 aa, Zea Mays
MPSGRSPGQHLPRQRRRRSPSTRARSCVRARLTPFLAPTPSPRRRRRAWLDARRLRATRARQAPGCVCRRRASRLGRRQVVVAIRGGGGGAPWRHHAGVVLRARFPGCFISASSRKNECSCGT

SEQ ID NO: 169770 - protein, 733 aa, Zea Mays
MLDVCAPHGPAKLPAAFVAGVRVAWVAGRWWWRSVAVGAARHGVTTRASFFGLDSQNFQTRDPSQLLWIGPVPGDIAEIEAYCRIFRAAEQLHTAVMSALCDPETGECPVRYDVESEDLPILEDKVTAVLGCMLALLNRGRNEVLSGRSGVASAFHGSVDSTSDMIPPLTLFRGDMKRCCESMQLALASYLVPSEPRGLNIWRKLQRLKNACYDAGFSRPDGYPCPTLFANWFPVYLSIVSDDSGTDEPEVAFWRGGQVSEEGLAWLLEKGFKTIVDLREEDVKDDLYLSAVQEAVSSGKIEVVNMLVEIGTAPSAEQVKQFAALVSDGAKKPIYLHSKEGVSRTSAMVSRWKQYVTRSERLAVQNHYINGNGKVLTSDKTKQHTGSPSSSMNRTEIGMVTESDRTMNNGESCEIDIETARHNLEVTNALSDDQSTQQGEMLGTGTEPLSNFKLESNPLKAQFPTCDIFSRKEMSKFFRSKKVYPKSVLNSRRQSSSLLVSRRKQNFSTERNGTIDYEAAEFTILESSNGTSFDNDYILSVSSGITDGKPSNNGAFSLIEKKEREVSVTTFDTRASASSSNGKVQVGSQKTAEKNGTPYLERNNSNNVDGSMCASATGVVRLQSRRKAEMFLVRTDGFSCTREKVTESSLAFTHPSTQQQMLMWKSPPKTVLLLKKLGDELMEEAKEVASFLHHQEKMNVLVEPDVHDTFARIPGYGFVQTFYTQDTRCKVMG

SEQ ID NO: 169771 - protein, 141 aa, Zea Mays
MRLRCEIFRSGKAMPDKVFDVLNEVVVDRGSNPYLSKIECYEHNHLITKVQGDGVIVATPTGSTAYSTAAGGSMIPDEARSNAWVSFDGKRRQQLSRGDSVRISMSQHPLPTVNKSDQTGDWFRSLIRCLNWNERLDQKAL

SEQ ID NO: 169772 - protein, 778 aa, Zea Mays
MLDVCAPHGPAKLPAAFVAGVRVAWVAGRWWWRSVAVGAARHGVTTRASFFGLDSQTRDPSQLLWIGPVPGDIAEIEAYCRIFRAAEQLHTAVMSALCDPETGECPVRYDVESEDLPILEDKVTAVLGCMLALLNRGRNEVLSGRSGVASAFHGSVDSTSDMIPPLTLFRGDMKRCCESMQLALASYLVPSEPRGLNIWRKLQRLKNACYDAGFSRPDGYPCPTLFANWFPVYLSIVSDDSGTDEPEVAFWRGGQVSEEGLAWLLEKGFKTIVDLREEDVKDDLYLSAVQEAVSSGKIEVVNMLVEIGTAPSAEQVKQFAALVSDGAKKPIYLHSKEGVSRTSAMVSRWKQYVTRSERLAVQNHYINGNGKVLTSDKTKQHTGSPSSSMNRTEIGMVTESDRTMNNGESCEIDIETARHNLEVTNALSDDQSTQQGEMLGTGTEPLSNFKLESNPLKAQFPTCDIFSRKEMSKFFRSKKVYPKSVLNSRRQSSSLLVSRRKQNFSTERNGTIDYEAAEFTILESSNGTSFDNDYILSVSSGITDGKPSNNGAFSLIEKKEREVSVTTFDTRASASSSNGKVQVGSQKTAEKNGTPYLERNNSNNVDGSMCASATGVVRLQSRRKAEMFLVRTDGFSCTREKVTESSLAFTHPSTQQQMLMWKSPPKTVLLLKKLGDELMEEAKEVASFLHHQEKMNVLVEPDVHDTFARIPGYGFVQTFYTQDTSDLHERVDFVTCLGGDGLILHASNLFRTSVPPVVSFNLGSLGFLTSHNVHFNNL

SEQ ID NO: 169773 - protein, 781 aa, Zea Mays
MLDVCAPHGPAKLPAAFVAGVRVAWVAGRWWWRSVAVGAARHGVTTRASFFGLDSQNFQTRDPSQLLWIGPVPGDIAEIEAYCRIFRAAEQLHTAVMSALCDPETGECPVRYDVESEDLPILEDKVTAVLGCMLALLNRGRNEVLSGRSGVASAFHGSVDSTSDMIPPLTLFRGDMKRCCESMQLALASYLVPSEPRGLNIWRKLQRLKNACYDAGFSRPDGYPCPTLFANWFPVYLSIVSDDSGTDEPEVAFWRGGQVSEEGLAWLLEKGFKTIVDLREEDVKDDLYLSAVQEAVSSGKIEVVNMLVEIGTAPSAEQVKQFAALVSDGAKKPIYLHSKEGVSRTSAMVSRWKQYVTRSERLAVQNHYINGNGKVLTSDKTKQHTGSPSSSMNRTEIGMVTESDRTMNNGESCEIDIETARHNLEVTNALSDDQSTQQGEMLGTGTEPLSNFKLESNPLKAQFPTCDIFSRKEMSKFFRSKKVYPKSVLNSRRQSSSLLVSRRKQNFSTERNGTIDYEAAEFTILESSNGTSFDNDYILSVSSGITDGKPSNNGAFSLIEKKEREVSVTTFDTRASASSSNGKVQVGSQKTAEKNGTPYLERNNSNNVDGSMCASATGVVRLQSRRKAEMFLVRTDGFSCTREKVTESSLAFTHPSTQQQMLMWKSPPKTVLLLKKLGDELMEEAKEVASFLHHQEKMNVLVEPDVHDTFARIPGYGFVQTFYTQDTSDLHERVDFVTCLGGDGLILHASNLFRTSVPPVVSFNLGSLGFLTSHNVHFNNL

SEQ ID NO: 169774 - protein, 972 aa, Zea Mays
MLDVCAPHGPAKLPAAFVAGVRVAWVAGRWWWRSVAVGAARHGVTTRASFFGLDSQTRDPSQLLWIGPVPGDIAEIEAYCRIFRAAEQLHTAVMSALCDPETGECPVRYDVESEDLPILEDKVTAVLGCMLALLNRGRNEVLSGRSGVASAFHGSVDSTSDMIPPLTLFRGDMKRCCESMQLALASYLVPSEPRGLNIWRKLQRLKNACYDAGFSRPDGYPCPTLFANWFPVYLSIVSDDSGTDEPEVAFWRGGQVSEEGLAWLLEKGFKTIVDLREEDVKDDLYLSAVQEAVSSGKIEVVNMLVEIGTAPSAEQVKQFAALVSDGAKKPIYLHSKEGVSRTSAMVSRWKQYVTRSERLAVQNHYINGNGKVLTSDKTKQHTGSPSSSMNRTEIGMVTESDRTMNNGESCEIDIETARHNLEVTNALSDDQSTQQGEMLGTGTEPLSNFKLESNPLKAQFPTCDIFSRKEMSKFFRSKKVYPKSVLNSRRQSSSLLVSRRKQNFSTERNGTIDYEAAEFTILESSNGTSFDNDYILSVSSGITDGKPSNNGAFSLIEKKEREVSVTTFDTRASASSSNGKVQVGSQKTAEKNGTPYLERNNSNNVDGSMCASATGVVRLQSRRKAEMFLVRTDGFSCTREKVTESSLAFTHPSTQQQMLMWKSPPKTVLLLKKLGDELMEEAKEVASFLHHQEKMNVLVEPDVHDTFARIPGYGFVQTFYTQDTSDLHERVDFVTCLGGDGLILHASNLFRTSVPPVVSFNLGSLGFLTSHNFKDFRQDSRDLIHGNNTLGVYITLRMRLRCEIFRSGKAMPDKVFDVLNEVVVDRGSNPYLSKIECYEHNHLITKVQGDGVIVATPTGSTAYSTAAGGSMVHPNVPCMLFTPICPHSLSFRPVILPDSARLELKIPDEARSNAWVSFDGKRRQQLSRGDSVRISMSQHPLPTVNKSDQTGDWFRSLIRCLNWNERLDQKAL

SEQ ID NO: 169775 - protein, 949 aa, Zea Mays
MLDVCAPHGPAKLPAAFVAGVRVAWVAGRWWWRSVAVGAARHGVTTRASFFGLDSQNFQTRDPSQLLWIGPVPGDIAEIEAYCRIFRAAEQLHTAVMSALCDPETGECPVRYDVESEDLPILEDKVTAVLGCMLALLNRGRNEVLSGRSGVASAFHGSVDSTSDMIPPLTLFRGDMKRCCESMQLALASYLVPSEPRGLNIWRKLQRLKNACYDAGFSRPDGYPCPTLFANWFPVYLSIVSDDSGTDEPEVAFWRGGQVSEEGLAWLLEKGFKTIVDLREEDVKDDLYLSAVQEAVSSGKIEVVNMLVEIGTAPSAEQVKQFAALVSDGAKKPIYLHSKEGVSRTSAMVSRWKQYVTRSERLAVQNHYINGNGKVLTSDKTKQHTGSPSSSMNRTEIGMVTESDRTMNNGESCEIDIETARHNLEVTNALSDDQSTQQGEMLGTGTEPLSNFKLESNPLKAQFPTCDIFSRKEMSKFFRSKKVYPKSVLNSRRQSSSLLVSRRKQNFSTERNGTIDYEAAEFTILESSNGTSFDNDYILSVSSGITDGKPSNNGAFSLIEKKEREVSVTTFDTRASASSSNGKVQVGSQKTAEKNGTPYLERNNSNNVDGSMCASATGVVRLQSRRKAEMFLQQMLMWKSPPKTVLLLKKLGDELMEEAKEVASFLHHQEKMNVLVEPDVHDTFARIPGYGFVQTFYTQDTSDLHERVDFVTCLGGDGLILHASNLFRTSVPPVVSFNLGSLGFLTSHNFKDFRQDSRDLIHGNNTLGVYITLRMRLRCEIFRSGKAMPDKVFDVLNEVVVDRGSNPYLSKIECYEHNHLITKVQGDGVIVATPTGSTAYSTAAGGSMVHPNVPCMLFTPICPHSLSFRPVILPDSARLELKIPDEARSNAWVSFDGKRRQQLSRGDSVRISMSQHPLPTVNKSDQTGDWFRSLIRCLNWNERLDQKAL

SEQ ID NO: 169776 - protein, 344 aa, Zea Mays
MLDVCAPHGPAKLPAAFVAGVRVAWVAGRWWWRSVAVGAARHGVTTRASFFGLDSQVASFLHHQEKMNVLVEPDVHDTFARIPGYGFVQTFYTQDTSDLHERVDFVTCLGGDGLILHASNLFRTSVPPVVSFNLGSLGFLTSHNFKDFRQDSRDLIHGNNTLGVYITLRMRLRCEIFRSGKAMPDKVFDVLNEVVVDRGSNPYLSKIECYEHNHLITKVQGDGVIVATPTGSTAYSTAAGGSMVHPNVPCMLFTPICPHSLSFRPVILPDSARLELKIPDEARSNAWVSFDGKRRQQLSRGDSVRISMSQHPLPTVNKSDQTGDWFRSLIRCLNWNERLDQKAL

SEQ ID NO: 169777 - protein, 413 aa, Zea Mays
MEVSRWTPAAGLLLLLLLPLAATPSRAATMARSPSSSTAVFQLQGDVYPTGHYYVTMNIGNPAKPYFLDVDTGSDLTWLQCDAPCRSCNKVPHPLYRPTANRLVPCANALCTALHSGQGSNNKCPSPKQCDYQIKYTDSASSQGVLINDSFSLPMRSSNIRPGLTFGCGYDQQVGKNGAVQAAIDGMLGLGRGSVSLVSQLKQQGITKNVVGHCLSTNGGGFLFFGDDVVPSSRVTWVPMAQRTSGNYYSPGSGTLYFDRRSLGVKPMEVVFDSGSTYTYFTAQPYQAVVSALKGGLSKSLKQVSDPTLPLCWKGQKAFKSVFDVKNEFKSMFLSFASAKNAAMEIPPENYLIKNGNVCLGILDGTAAKLSFNVIGDITMQDQMVIYDNEKSQLGWARGACTRSAKSILSSFP

SEQ ID NO: 169778 - protein, 299 aa, Zea Mays
MEVSRWTPAAGLLLLLLLPLAATPSRAATMARSPSSSTAVFQLQGDVYPTGCGYDQQVGKNGAVQAAIDGMLGLGRGSVSLVSQLKQQGITKNVVGHCLSTNGGGFLFFGDDVVPSSRVTWVPMAQRTSGNYYSPGSGTLYFDRRSLGVKPMEVVFDSGSTYTYFTAQPYQAVVSALKGGLSKSLKQVSDPTLPLCWKGQKAFKSVFDVKNEFKSMFLSFASAKNAAMEIPPENYLIVTKNGNVCLGILDGTAAKLSFNVIGDITMQDQMVIYDNEKSQLGWARGACTRSAKSILSSFP

SEQ ID NO: 169779 - protein, 2138 aa, Zea Mays
MDLSMASLNLSEPRDSRESTSPAPSTSSSISREKGDLAEVDDPESAMSTVARLLEDLHASMVSPSGKEATTRRLLELARAKKEARILIGSHSQAMPLLISTLRVGSSAAKVNAAALLSALCKEEDLRVRVLLGGCIPPLISLLKSESAEAKKAAAEAIYEVSSGGLLDDHIGRKIFVTEGVVPTLWDLLNPRSHQDRVVEGFVTGALRNLCGDKDGYWKATLEAGGVEIITGLLSSKNTASQSNAASLLARFISASGDSIPKVIDAGAVKALLHLLNRDNIISVRESAADALEALSSKSSIAKKAVVDAGGLPILIGAVVAPSKECMQGGTCHSLQSHAVRALSNICGGTTSLLLYLGELCQAPRSPVPLADILGALAYSLMVFDGSDDKSFDPVEIEITLVALLKSHDSKLDRILEALASLYGNDCFSDRLDHSYSKKVLVGLITIAPADVQELLVRALTSLCCDGVGIWEALGKREGVQLLISLLGLSSEQQQEYAVSLLAILSDEVDDSKWAITAAGGIPPLVQLLETGSQKAKEDAAYIMWNMCSDSDDIRACIESAGAVMALIWLLKSGSPGGQEASVKALKKLIRSADSAMINQLLALLLSDSLSSKAHVITVLGHVLVLAPQRALIQSGAPANKVLRSLVLVLESSNEETQEIAATVLADIFTMRQDICDVMAIDEIVQPCMKLLTSGNQVIATQSARALGALSCSASSMSKNKMSCLTEGDVRPLIEMAKTSSIDVAETAFAALANLLSDAQIAKEALDDNIVLALTRVLKDGSLEGKISASRSLRQLVNQFPLSEVLPDYLQCCFIIHALLVCLSGISLENVTSLEPLDVLTLMATTKEGSHYSPPLCTGFLEVPESLEPLVRCISIGLPPVQDKSIQILASLCQGRPSLLGEYLNRSQGCITSLATRVIESNDMEIRISSAVILISAMRDSRERSIDVLEASKVLKNLISALIDMLKQHSSLTSLDIEIWKPSTEKSSLNYEQDVLSVPELGKVSEETVALWLLSLICSYHGRSKYTVMELNGVDTVSDRLASYTANRQYEDSENIWTCALLLATLFQDSVVVQSSEITRTIPSLASLLKSDDIINKYFAAQALASLVSTGSRGIQLAIANSGAVLGAVALIGQVESDMPNLVTMAEEFKLSDNPCQIMLRSLFELEDVCTGASARRSIPLLVDLLKPMPDRPGAPLIALHLLTQLAEGSESNKIAMAEAGALDALTKYLSLSPQDSTETTITNLLGILYTNPDLLYHESSRSTSNQLVAVLRLGSRSSRLSAVRTLQKLFDSENIRDTEVARQAIQPLLDMLESGTEIEQQAALGALIKLSAGNIAKDSAMFDVEGNTLENLYKVLSFSSSLELKKDAAQLCYILFENSTVRASPIATECLQPLISLMTSGSSLAIEPAVCALNRLLDEDYNAEIAATSEVIDLLVSFVPGTNYQLSEACIGALIKLGKDRPNCKLDMVKAGIIEHALDMILDVPVSVSSSIAELLRILTNNSGIAKSSAAAKMVEPLFLLLRRPDVTMWDQHSALQALVNILEKPQSLAALKLTPSQIIEPLISFLESPSQAIQQLGTEVLSHLLEQEHFQQDITTKNAVVPLVQLAGIGILSLQQTAVKALENISQSWPKAVADAGGIFELSKVIVQDDPQPSQALWESAALVLCNVLRYNSDNYVKVSMAVLVRLLNSTMESTVTIALSALLVQEKSSSRCAVAMAEAGAVRALLELLKSHRCEESAARLLEALINNSRVRETKVAKYAIAPLAQYLLDPQSKNQSAKFLVTLALGDIFQHEALARASDSVSACRALVSLLEDQPTDDMTTVAICALQSLVMHSRTNRRAVAEAGGILVVQELLLSPNVDISGQAALLMKYLFSNHTLQEYVSNELIRSLTAALERELLSTSTINEVILKTIYVIFSNFKKVRFSEAATLCIPHLVCALKDGNEAAQESVLDTLCLLKESWPQMNEDIAKAQSLISAEAIPVLQMLMKTCPPSFHERADSLLHCLPGCLTVTIIRGNNLKQTMGGTNAFCCLQIGNGPPRQTKVVNHSMCPAWNEGFTWLFDVAPKGQKLYIICKSKNTFGKSTLGRVTIQIDKVVTEGVYSGFFSLSHDGGKDGSRTLEIEIVWSNRPSNDCM

SEQ ID NO: 169780 - protein, 1912 aa, Zea Mays
MDLSMASLNLSEPRDSRESTSPAPSTSSSISREKGDLAEVDDPESAMSTVARLLEDLHASMVSPSGKEATTRRLLELARAKKEARILIGSHSQAMPLLISTLRVGSSAAKVNAAALLSALCKEEDLRVRVLLGGCIPPLISLLKSESAEAKKAAAEAIYEVSSGGLLDDHIGRKIFVTEGVVPTLWDLLNPRSHQDRVVEGFVTGALRNLCGDKDGYWKATLEAGGVEIITGLLSSKNTASQSNAASLLARFISASGDSIPKVIDAGAVKALLHLLNRDNIISVRESAADALEALSSKSSIAKKAVVDAGGLPILIGAVVAPSKECMQGGTCHSLQSHAVRALSNICGGTTSLLLYLGELCQAPRSPVPLADILGALAYSLMVFDGSDDKSFDPVEIEITLVALLKSHDSKLDRILEALASLYGNDCFSDRLDHSYSKKVLVGLITIAPADVQELLVRALTSLCCDGVGIWEALGKREGVQLLISLLGLSSEQQQEYAVSLLAILSDEVDDSKWAITAAGGIPPLVQLLETGSQKAKEDAAYIMWNMCSDSDDIRACIESAGAVMALIWLLKSGSPGGQEASVKALKKLIRSADSAMINQLLALLLSDSLSSKAHVITVLGHVLVLAPQRALIQSGAPANKVLRSLVLVLESSNEETQEIAATVLADIFTMRQDICDVMAIDEIVQPCMKLLTSGNQVIATQSARALGALSCSASSMSKNKMSCLTEGDVRPLIEMAKTSSIDVAETAFAALANLLSDAQIAKEALDDNIVLALTRVLKDGSLEGKISASRSLRQLVNQFPLSEVLPDYLQCCFIIHALLVCLSGISLENVTSLEPLDVLTLMATTKEGSHYSPPLCTGFLEVPESLEPLVRCISIGLPPVQDKSIQILASLCQGRPSLLGEYLNRSQGCITSLATRVIESNDMEIRISSAVILISAMRDSRERSIDVLEASKVLKNLISALIDMLKQHSSLTSLDIEIWKPSTEKSSLNYEQDVLSVPELGKVSEETVALWLLSLICSYHGRSKYTVMELNGVDTVSDRLASYTANRQEQYEDSENIWTCALLLATLFQDSVVVQSSEITRTIPSLASLLKSDDIINKYFAAQALASLVSTGSRGIQLAIANSGAVLGAVALIGQVESDMPNLVTMAEEFKLSDNPCQIMLRSLFELEDVCTGASARRSIPLLVDLLKPMPDRPGAPLIALHLLTQLAEGSESNKIAMAEAGALDALTKYLSLSPQDSTETTITNLLGILYTNPDLLYHESSRSTSNQLVAVLRLGSRSSRLSAVRTLQKLFDSENIRDTEVARQAIQPLLDMLESGTEIEQQAALGALIKLSAGNIAKDSAMFDVEGNTLENLYKVLSFSSSLELKKDAAQLCYILFENSTVRASPIATECLQPLISLMTSGSSLAIEPAVCALNRLLDEDYNAEIAATSEVIDLLVSFVPGTNYQLSEACIGALIKLGKDRPNCKLDMVKAGIIEHALDMILDVPVSVSSSIAELLRILTNNSGIAKSSAAAKMVEPLFLLLRRPDVTMWDQHSALQALVNILEKPQSLAALKLTPSQIIEPLISFLESPSQAIQQLGTEVLSHLLEQEHFQQDITTKNAVVPLVQLAGIGILSLQQTAVKALENISQSWPKAVADAGGIFELSKVIVQDDPQPSQALWESAALVLCNVLRYNSDNYVKVSMAVLVRLLNSTMESTVTIALSALLVQEKSSSRCAVAMAEAGAVRALLELLKSHRCEESAARLLEALINNSRVRETKVAKYAIAPLAQYLLDPQSKNQSAKFLVTLALGDIFQHEALARASDSVSACRALVSLLEDQPTDDMTTVAICALQSLVMHSRTNRRAVAEAGGILVVQELLLSPNVDISGQAALLMKYLFSNHTLQEYVSNELIRSLTDHICDIQQLQKGSVF

SEQ ID NO: 169781 - protein, 1075 aa, Zea Mays
MDLSMASLNLSEPRDSRESTSPAPSTSSSISREKGDLAEVDDPESAMSTVARLLEDLHASMVSPSGKEATTRRLLELARAKKEARILIGSHSQAMPLLISTLRVGSSAAKVNAAALLSALCKEEDLRVRVLLGGCIPPLISLLKSESAEAKKAAAEAIYEVSSGGLLDDHIGRKIFVTEGVVPTLWDLLNPRSHQDRVVEGFVTGALRNLCGDKDGYWKATLEAGGVEIITGLLSSKNTASQSNAASLLARFISASGDSIPKVIDAGAVKALLHLLNRDNIISVRESAADALEALSSKSSIAKKAVVDAGGLPILIGAVVAPSKECMQGGTCHSLQSHAVRALSNICGGTTSLLLYLGELCQAPRSPVPLADILGALAYSLMVFDGSDDKSFDPVEIEITLVALLKSHDSKLDRILEALASLYGNDCFSDRLDHSYSKKVLVGLITIAPADVQELLVRALTSLCCDGVGIWEALGKREGVQLLISLLGLSSEQQQEYAVSLLAILSDEVDDSKWAITAAGGIPPLVQLLETGSQKAKEDAAYIMWNMCSDSDDIRACIESAGAVMALIWLLKSGSPGGQEASVKALKKLIRSADSAMINQLLALLLSDSLSSKAHVITVLGHVLVLAPQRALIQSGAPANKVLRSLVLVLESSNEETQEIAATVLADIFTMRQDICDVMAIDEIVQPCMKLLTSGNQVIATQSARALGALSCSASSMSKNKMSCLTEGDVRPLIEMAKTSSIDVAETAFAALANLLSDAQIAKEALDDNIVLALTRVLKDGSLEGKISASRSLRQLVNQFPLSEVLPDYLQCCFIIHALLVCLSGISLENVTSLEPLDVLTLMATTKEGSHYSPPLCTGFLEVPESLEPLVRCISIGLPPVQDKSIQILASLCQGRPSLLGEYLNRSQGCITSLATRVIESNDMEIRISSAVILISAMRDSRERSIDVLEASKVLKNLISALIDMLKQHSSLTSLDIEIWKPSTEKSSLNYEQDVLSVPELGKVSEETVALWLLSLICSYHGRSKYTVMELNGVDTVSDRLASYTANRQTQKIYGLVPFCWLLCFRIQWLFSLLK

SEQ ID NO: 169782 - protein, 496 aa, Zea Mays
MGKQENVDKGAICTIELDVQKVQQFANAIENSYWFELFIDDLPLWGFVGETDKNNEKKHYLYTHKNIVVKYNGNRIIHVNLTQESPKLLEAGKKLDMTYSVKWVQTNVAFARRFEVYLDYPFFEHQIHWFSIFNSFMMVIFLTGLVSMILMRTLRNDYAKYAREDDDLESLERDVNEESGWKLVHGDVFRPPRGQVFLSALVGIGTQLAALILLVIVLAIVVMLYVGRGAIITTFIVCYALTSFISGYVSGGLYSRNGGKNWIKAMILTASLFPFLCFSIGLLLNTIAIFYRSLAAIPFGTMVVMFILWAFISFPLVLLGTVVGRNWSGAPNNPCRVKTIPRPIPEKKWYLTPSVISLMGGLLPFGSIFIEMYFVFTSFWNYKVYYVYGFMLLVFVILIIVTICVTIVGTYFLLNAENYHWQWTSFFSAASTALYVYLYSIYYYHVKTKMSGFFQTSFYFGYTLMFCLGLGILCGAVGYLGSTLFVRRIYRNIKCD

SEQ ID NO: 169783 - protein, 400 aa, Zea Mays
MTYSVKWVQTNVAFARRFEVYLDYPFFEHQIHWFSIFNSFMMVIFLTGLVSMILMRTLRNDYAKYAREDDDLESLERDVNEESGWKLVHGDVFRPPRGQVFLSALVGIGTQLAALILLVIVLAIVVMLYVGRGAIITTFIVCYALTSFISGYVSGGLYSRNGGKNWIKAMILTASLFPFLCFSIGLLLNTIAIFYRSLAAIPFGTMVVMFILWAFISFPLVLLGTVVGRNWSGAPNNPCRVKTIPRPIPEKKWYLTPSVISLMGGLLPFGSIFIEMYFVFTSFWNYKVYYVYGFMLLVFVILIIVTICVTIVGTYFLLNAENYHWQWTSFFSAASTALYVYLYSIYYYHVKTKMSGFFQTSFYFGYTLMFCLGLGILCGAVGYLGSTLFVRRIYRNIKCD

SEQ ID NO: 169784 - protein, 90 aa, Zea Mays
MLLDSVLLPEFDATAGACEGGRGRVRGRALGFLALVFSGAGPIGPVPAQALCIVFLCYMPDALFIMPEIEENCKNDRTNFVRCIKSNTLW

SEQ ID NO: 169785 - protein, 84 aa, Zea Mays
MASLGRTSKGWKHLATVIAPEQPSTASSSYLCFRRLAVAAVWSQQACTAVKAGVRYSQSASMYGCKGWSQAAAVLLLGGGCTRT

SEQ ID NO: 169786 - protein, 131 aa, Zea Mays
MFLGRFFLRSQAERPWRRRRGIDGSGTLDGQTDFKLNMRLSLSAAREENLTVNPGRWRVLYLGDLEDGESWKNIKRMETPCHGNSARTAVDGFKLLLVFPAFGCCGCMESASMYGCKGWSQVQPVSKHVRL

SEQ ID NO: 169787 - protein, 226 aa, Zea Mays
MAATPPQPSGSSPRRSLPASPSLSRLLLAGVLLLQPWRAPLLPWMPHPLLAPLASPVRAPSPRLPMAGFVLTQPLLCFFHGRVSFSFVVAVFLCRGLAQPFLLFPLARVQSSSPLRLPWWPSRPCRLELARLRSRPGSLLWLAASLCLNWSTFTLLPMVGQPRRCCYLVVASWPDFVIASALLCLVCRRSPAVQRIRRAVLCVGVPSLQTSSSPMVTDLILASCAR

SEQ ID NO: 169788 - protein, 550 aa, Zea Mays
MASRDDGWGGGEDGSSLFEGMVLFAPEPTAAEDSVPAPAPAPAPAEDSVPVPAAVPELPSAARHDADAASSVPPPLDEDLFSDLTLFAPPQEPLSLEQTPPPLLPQGEDRSHAALAPRAASPYSGALSAAVHLVAAQEEEGPCASAAAAISASTIAFLDASPYPAATRTLDQLPDRQLDVHVNGYEAHAEAVDVDTNSPHVVEAVDVDTNSPRVEEEEAKEDDDGKEDEDAGVAALGVKERLGLLRSQISGKLDSIQQRAAAVAAKRRLLAGRRRKVAEEATSVASRHKDLERELEVACEAEDFERAESISDSLAALEKEKDGLLTALRDAELDYDSVDSELQEVLESRIAAEEEAAILLEQFAKDANEHAISESKQAQELSSKEIEGWQTSMELLETKKLEMEVETQLVLEARSGLEGSIEHLVEEDKLEEGTLSIKGEVLTKELADLLELVRLKEAEIAENNARIHEVQERISAVVSRFHGSQSDVDLKLNSLKEAQCKLDLETEALVLKKNEIDNFISLTEQKDSELREIYWCLFSLKQKLANNQLK

SEQ ID NO: 169789 - protein, 74 aa, Zea Mays
MESQSGVQDALRLESGLSICVLDCDDKLKPVIGTSFGSLEEVEELYKIYALENFIGCNIPEHIEIHPPSDVHSQ

SEQ ID NO: 169790 - protein, 852 aa, Zea Mays
MNNLFEDGDEPAKKIKTVSVVGFGGLGKTTLVKAVYDKVKKEFDCSAFVSIGQKCDLKKVFKDVLYDLDKQNHENIIASEMDEKQLIDKLQEFLADKRYLVVIDDIWDISTWKLIRCALVESNPGSRIIITTRICEVAKKVGGVYNKKPLSLDDSKTLFYTRVFAGESMSLDNISGEVCNKILRKCGGVPLSIITIASLLVGKQREDWSKVYDYIGFGHEDNEVIGNMRKILAFSYYNLPPYLKTCLLHLSIFPEDHKIEKNSLIWRWIAEGFVIGREELGLFEVGESYFNELINRSMIRWIELSSRSKIRDGCGIHDMVLDLIRTLSGEVNLVTVSDVEQQCTTSSSYSPVRSISARRLAFHKKRSIEHNPGTEIGQVRSFNAFNCSGSRMPRLLSFRVLRVLALENCNFSAGNCCLGNIGKLHQLRYLGLVETSIRDDLLPGETGRLKFLQTLDVRRSGIKILPASVGELRKLMCLRATEGTRMMAEIGKLASLEELEVHSVDKSPNFATGLGQLTKVRVLEIHFDEMDESTEKALMESLRNLRKIQSLQIWSKKERTIDLGGLLEDWTPTPSNLRQLMLRGIHLPRRPSWIDPSCVPLLSYLSLTVQAVQVQDLEILGRLPLLSYLYIWSEGINCLSYTATSRDEFQNLRYLDTNLEIMCGQQGALPMVEKLTCRASMGKYVAFARSSMPFDDGSVVNPAAVAEAELPVILPLDIGWPVNMPCLRGITYLLDYQDCSAKEWAHVETLLMHVRKIHPNCPPFRIKKNCRDKEITMIDAIIYLEDVKDVFKDNPSKYSEFLDLLQDYRRDRIKIKDLIIRLKTLFTGHDPNLILDFSVFLPGEWAITLGDL

SEQ ID NO: 169791 - protein, 652 aa, Zea Mays
MSLDNISGEVCNKILRKCGGVPLSIITIASLLVGKQREDWSKVYDYIGFGHEDNEVIGNMRKILAFSYYNLPPYLKTCLLHLSIFPEDHKIEKNSLIWRWIAEGFVIGREELGLFEVGESYFNELINRSMIRWIELSSRSKIRDGCGIHDMVLDLIRTLSGEVNLVTVSDVEQQCTTSSSYSPVRSISARRLAFHKKRSIEHNPGTEIGQVRSFNAFNCSGSRMPRLLSFRVLRVLALENCNFSAGNCCLGNIGKLHQLRYLGLVETSIRDDLLPGETGRLKFLQTLDVRRSGIKILPASVGELRKLMCLRATEGTRMMAEIGKLASLEELEVHSVDKSPNFATGLGQLTKVRVLEIHFDEMDESTEKALMESLRNLRKIQSLQIWSKKERTIDLGGLLEDWTPTPSNLRQLMLRGIHLPRRPSWIDPSCVPLLSYLSLTVQAVQVQDLEILGRLPLLSYLYIWSEGINCLSYTATSRDEFQNLRYLDTNLEIMCGQQGALPMVEKLTCRASMGKYVAFARSSMPFDDGSVVNPAAVAEAELPVILPLDIGWPVNMPCLRGITYLLDYQDCSAKEWAHVETLLMHVRKIHPNCPPFRIKKNCRDKEITMIDAIIYLEDVKDVFKDNPSKYSEFLDLLQDYRRDRSLLLHALL

SEQ ID NO: 169792 - protein, 167 aa, Zea Mays
MANRLAPVLPILISPNQTAFVKGQRIHDNFMFVQQTVKALHKNKKKEAHILLKLDISKAFDSVSWSFLLEILRHIGFGQRWINLLCLLLSTSSTQVLVNGEPGETIYHRRGFKTGRSFVSNAIHFGHEYSECNNCICLTEVLYSQGFSLYLSWANWQTHKGGLAAIN

SEQ ID NO: 169793 - protein, 455 aa, Zea Mays
MSRTGLVIDKETGKPKGYGFCEYKDEETALSARRNLQGYEINGRQLRVDFAENGRNTDRNREKGRGGPGMTSNVDSQKQLAGTSVVGEANLHQPVGLPPAIHAASVMAGVLGGAQTANVQNGLPVQYGLGNDPLTHYLARMSRHQLHEVMVELKFLATQNKEQSKTLLQGIPQLPKALFQAQIMLGMVTPQMMHMAKSQQPSGSLSQSSSHLNEPYPQTDAMIPLVSRPSSLPTNIPPNPTVLQEQTATLHSIPQHQHASQPLVKMFPHGHQSGIAAQSPMLHQPLDGSSSVPTQSLVTSVGLTSQVQLPLVPQHPGPSVMPTSVPQLPLTHPHLAQVAVAPETLPNEISTLAEFTHPSKLRKLEDGTSVPGIVNSSHAVYTVPLQAVGPSGPSGSYSAGSVSLQQPGNEEQLTPDVESALLQQVLQLTPEQLSSLPPEQQQQVIELQKMLSVSK

SEQ ID NO: 169794 - protein, 349 aa, Zea Mays
MAGVLGGAQTANVQNGLPVQYGLGNDPLTHYLARMSRHQLHEVMVELKFLATQNKEQSKTLLQGIPQLPKALFQAQIMLGMVTPQMMHMAKSQQPSGSLSQSSSHLNEPYPQTDAMIPLVSRPSSLPTNIPPNPTVLQEQTATLHSIPQHQHASQPLVKMFPHGHQSGIAAQSPMLHQPLDGSSSVPTQSLVTSVGLTSQVQLPLVPQHPGPSVMPTSVPQLPLTHPHLAQVAVAPETLPNEISTLAEFTHPSKLRKLEDGTSVPGIVNSSHAVYTVPLQAVGPSGPSGSYSAGSVSLQQPGNEEQLTPDVESALLQQVLQLTPEQLSSLPPEQQQQVIELQKMLSVSK

SEQ ID NO: 169795 - protein, 510 aa, Zea Mays
MASAAGSAGGAGAGSGGLKTYFKTPEGRHKLQYEKTHSPAVVHYSHSGKTVSQMTVAYLKEKPAGQGSTPSTPSAGSGMRSAAARLLGTGNGSRALSFGSNGTSRAVSGSSRMGGGIGVSTSASGSQGMANYDGKGAYIIFNTADTLFISDLNSHDKDPIKSIHFSSSNPLCHAFDPEAKDGHDLLVGVFSGDVYSMSLRQQLQDPGKKPVSYQHFVNRDKDKDKDPSQGGAASSRSTCVAWVPEREGIFVVSHADGNLYVYDKCKDGNTDWTFPTVKDQSQVLISHAKSSKSNPIARWHICQGAINDISFSPDGAYLATVGRDGHLRVFDFAKEQLIFGGKSYYGALLCCSWSADGKYLLSGGEDDLVQVWSMDDRKIVAWGEGHNSWVSAVSFDPYWSPPNSDETEENVMYRFGSIGQDTQLLLWDLALEEIAVPLRHPSGGSPTFSSGSPSAQWDNACPPAGVLQPSPRMRDVPKLSPLVAHRTRVYPFLVQVLLLLMVGSQWILCR

SEQ ID NO: 169796 - protein, 438 aa, Zea Mays
MASAAGSAGGAGAGSGGLKTYFKTPEGRHKLQYEKTHSPAVVHYSHSGKTVSQMTVAYLKEKPAGQGSTPSTPSAGSGMRSAAARLLGTGNGSRALSFGSNGTSRAVSGSSRMGGGIGVSTSASGSQGMANYDGKGAYIIFNTADTLFISDLNSHDKDPIKSIHFSSSNPLCHAFDPEAKDGHDLLVGVFSGDVYSMSLRQQLQDPGKKPVSYQHFVNRDKDKDKDPSQGGAASSRSTCVAWVPEREGIFVVSHADGNLYVYDKCKDGNTDWTFPTVKDQSQVLISHAKSSKSNPIARWHICQGAINDISFSPDGAYLATVGRDGHLRVFDFAKEQLIFGGKSYYGALLCCSWSADGKYLLSGGEDDLVQVWSMDDRKIVAWGEGHNSWVSAVSFDPYWSPPNSDETEENVMYRFGSIGQVIFSSLGGNIWFLLWDTR

SEQ ID NO: 169797 - protein, 305 aa, Zea Mays
MASAAGSAGGAGAGSGGLKTYFKTPEGRHKLQYEKTHSPAVVHYSHSGKTVSQMTVAYLKEKPAGQGSTPSTPSAGSGMRSAAARLLGTGNGSRALSFGSNGTSRAVSGSSRMGGGIGVSTSASGSQGMANYDGKGAYIIFNTADTLFISDLNSHDKDPIKSIHFSSSNPLCHAFDPEAKDGHDLLVGVFSGDVYSMSLRQQLQDPGKKPVSYQHFVNRDKDKDKDPSQGGAASSRSTCVAWVPEREGIFVVSHADGNLYVYDKCKDGNTDWTFPTVKDQSQVLISHAKSKQSNCKVAHLSRCNQ

SEQ ID NO: 169798 - protein, 271 aa, Zea Mays
MASAAGSAGGAGAGSGGLKTYFKTPEGRHKLQYEKTHSPAVVHYSHSGKTVSQMTVAYLKEKPAGQGSTPSTPSAGSGMRSAAARLLGTGNGSRALSFGSNGTSRAVSGSSRMGGGIGVSTSASGSQGMANYDGKGAYIIFNTADTLFISDLNSHDKDPIKSIHFSSSNPLCHAFDPEAKDGHDLLVGVFSGDVYSMSLRQQLQDPGKKPVSYQHFVNRDKDKDKDPSQGGAASSRSTCVAWVPEREGIFVVSHADGNLARMEILIGHFQL

SEQ ID NO: 169799 - protein, 262 aa, Zea Mays
MLSAFFSVLPFRYAAIADQSKPSPLQPELNLPMLTRTRSMPSIRLAKYAKWFDDSSEDIRSLCGKALQMLRTHYGWESVDVTVPEIEEMRLAHYVTMGSECTASLAAKYLDSMDRSEVGWDVRIALSAYGSFSSRDYLSAQRLRCRQMYFHEKIFETADAIVTPMTGVTAYALQDDALSTGELDYINGAALVRYSIAGNFLGLPAITVPVGYDRGGLPVGLQFIGRPWSEATLLHLAYAMQEACGKKVLRKPKVHYDLLTKE

SEQ ID NO: 169800 - protein, 539 aa, Zea Mays
MASDPGAERARDGVEAVAGGARAGGRRLRPSCCPGPVGAGGGVQALDGAGLPQGVQIRTGYPYHGGAAIPGSRGGMFRAGPEHGLLHQLRPCGRAAAGRGLHPQIPARCVVYAYSSSSGGEGGVAGAPLSAMDGVLVAVKDELDCLPYPTSGGTRWLGSARRCAADAACVAQLRACGAVMAGKANMHELGAGTSGINPHHGATRNPYNVGRVSGGSSGGSAAAVCAGLCPVALGADGGGSVRMPAALCGVVGFKPTAGRLSNSGLLPLNWTVGMPGILAATVEDTLIAYAAIADQSKPSPLQQPELNLPMLTRTRSMPSIRLAKYAKWFDDSSEDIRSLCGKALQMLRTHYGWESVDVTVPEIEEMRLAHYVTMGSECTASLAAKYLDSMDRSEVGWDVRIALSAYGSFSSRDYLSAQRLRCRQMYFHEKIFETADAIVTPMTGVTAYALQDDALSTGELDYINGAALVRYSIAGNFLGLPAITVPVGYDRGGLPVGLQFIGRPWSEATLLHLAYAMQEACGKKVLRKPKVHYDLLTKE

SEQ ID NO: 169801 - protein, 518 aa, Zea Mays
MLAWVLETPVLGWIVLGVLKRDNLVYKLVSDAEIPEPPLFTATHTWQAAIQEQSVRVTESRLSPAERVQEAVACVPAAAQAQLEPAAGFRRWTVRDFHRAYRSGQATPTMVARRFLAAVEECSGPDLNMGFFISCDPADVLRQAEDSTRRYQQGAPLSAMDGVLVAVKDELDCLPYPTSGGTRWLGSARRCAADAACVAQLRACGAVMAGKANMHELGAGTSGINPHHGATRNPYNVGRVSGGSSGGSAAAVCAGLCPVALGADGGGSVRMPAALCGVVGFKPTAGRLSNSGLLPLNWTVGMPGILAATVEDTLIAYAAIADQSKPSPLQQPELNLPMLTRTRSMPSIRLAKYAKWFDDSSEDIRSLCGKALQMLRTHYGWESVDVTVPEIEEMRLAHYVTMGSECTASLAAKYLDSMDRSEVGWDVRIALSAYGSFSSRDYLSAQRLRCRQMYFHEKIFETADAIVTPMTGVTAYALQDDALSTGELDYINGGICAGEVLDRGQLPGAASDHRARRV

SEQ ID NO: 169802 - protein, 408 aa, Zea Mays
MDGVLVAVKDELDCLPYPTSGGTRWLGSARRCAADAACVAQLRACGAVMAGKANMHELGAGTSGINPHHGATRNPYNVGRVSGGSSGGSAAAVCAGLCPVALGADGGGSVRMPAALCGVVGFKPTAGRLSNSGLLPLNWTVGMPGILAATVEDTLIAYAAIADQSKPSPLQQPELNLPMLTRTRSMPSIRLAKYAKWFDDSSEDIRSLCGKALQMLRTHYGWESVDVTVPEIEEMRLAHYVTMGSECTASLAAKYLDSMDRSEVGWDVRIALSAYGSFSSRDYLSAQRLRCRQMYFHEKIFETADAIVTPMTGVTAYALQDDALSTGELDYINGAALVRYSIAGNFLGLPAITVPVGYDRGGLPVGLQFIGRPWSEATLLHLAYAMQEACGKKVLRKPKVHYDLLTKE

SEQ ID NO: 169803 - protein, 147 aa, Zea Mays
MDAAAIQEQSVRVTESRLSPAERVQEAVACVPAAAQAQLEPAAGFRRWTVRDFHRAYRSGQATPTMVARRFLAAVEECSGPDLNMGFFISCDPADVLRQAEDSTRRYQQGAPLSAMDGVLVAVKDELDCLPYPTSAQLAIDMPHLLP

SEQ ID NO: 169804 - protein, 168 aa, Zea Mays
MLAWVLETPVLGWIVLGVLKRDNLVYKLVSDAEIPEPPLFTATHTWQAIQEQSVRVTESRLSPAERVQEAVACVPAAAQAQLEPAAGFRRWTVRDFHRAYRSGQATPTMVARRFLAAVEECSGPDLNMGFFISCDPADVLRQAEDSTRRYQQGAWYMRIAVAAAAKAA

SEQ ID NO: 169805 - protein, 382 aa, Zea Mays
MLDITKCLYDAISRLEKAAEQESALAAAVEGVERQLGGNFSAPHNLIETMRERMFKPSLSTIITENTKVATVSLSDPVCVAARKMRELQVNSVIITAGNLLHGIFTPRDVLMRVVAQNLSPELTLVEKVMTAHPDCATLDTTILDALHIMHDGKFLHIPVLDGDGRVAACLDVLQLTHAAISMVEGGPGAATDVANTIMQKFWESALALEQPPEEDFDSHSELPLVMPSDARDGSSSIYRPAVDNLFVFKLQDKKGRMHRFTCGSESLDELISSVIQRLGMVDEKRVIQLLYEDDEGDKVLLTTNSDLTGAVFCAKSSGLKVLRLHIDNSDSSNEVVTQPLPELASSQGSQSMHVHYGYGLMACAIALTGVAVIVYLRHSKA

SEQ ID NO: 169806 - protein, 251 aa, Zea Mays
MLDITKCLYDAISRLEKAAEQESALAAAVEGVERQLGGNFSAPHNLIETMRERMFKPSLSTIITENTKVATVSLSDPVCVAARKMRELQVNSVIITAGNLLHGIFTPRDVLMRVVAQNLSPELTLVEKVMTAHPDCATLDTTILDALHIMHDGKFLHIPVLDGDGRVAACLDVLQLTHAAISMVSLSMAHALSFLIHLSNLSPSEMVFPLKVEGGPGAATDVANTIMQKFWESALALEQPPEEDFDSHRFS

SEQ ID NO: 169807 - protein, 298 aa, Zea Mays
MRELQVNSVIITAGNLLHGIFTPRDVLMRVVAQNLSPELTLVEKVMTAHPDCATLDTTILDALHIMHDGKFLHIPVLDGDGRVAACLDVLQLTHAAISMVEGGPGAATDVANTIMQKFWESALALEQPPEEDFDSHSELPLVMPSDARDGSSSIYRPAVDNLFVFKLQDKKGRMHRFTCGSESLDELISSVIQRLGMVDEKRVIQLLYEDDEGDKVLLTTNSDLTGAVFCAKSSGLKVLRLHIDNSDSSNEVVTQPLPELASSQGSQSMHVHYGYGLMACAIALTGVAVIVYLRHSKA

SEQ ID NO: 169808 - protein, 186 aa, Zea Mays
MDRYQRVEKPRNDTPISQNEIRITTQGRMRNYISYGMSLLEENGHDEISIKAMGRAINKTVMVVELIKRRVGGLHQNTATESVDITDTWEPLEEGLLPLETTRHVSMITVTLSKNPLDTSSPGYQPPIPAEEVKPAFDYDHEESYPTGRGRGRGGGRRGRGRGMSNGPPPPAYGYNEEWEAWWLRL

SEQ ID NO: 169809 - protein, 254 aa, Zea Mays
MDRYQRVEKPRNDTPISQNEIRITTQGRMRNYISYGMSLLEENGHDEISIKAMGRAINKTVMVVELIKRRVGGLHQNTATESVDITDTWEPLEEGLLPLETTRHVSMITVTLSKNPLDTSSPGYQPPIPAEEVKPAFDYDHEESYPTGRGRGRGGGRRGRGRGMSNGPPPPAYGYNEEWEEEGDYYNRGRGGYGYDYGYAPRGGYYEEQDEYYDEPEEYAPPPGRGRGRGRRGGMPWRGRGGRGPPRGGRGSYY

SEQ ID NO: 169810 - protein, 267 aa, Zea Mays
MDRYQRVEKPRNDTPISQNEIRITTQGRMRNYISYGMSLLEENGHDEISIKAMGRAINKTVMVVELIKRRVGGLHQNTATESVDITDTWEPLEEGLLPLETTRHVSMITVTLSKNPLDTSSPGYQPPIPAEEVKPAFDYDHEESYPTGRGRGRGGGRRGRGRGMSNGPPPPAYGYNEEWEEEGDYYNRGRGRGRLRGRGGRGRGGYGYDYGYAPRGGYYEEQDEYYDEPEEYAPPPGRGRGRGRRGGMPWRGRGGRGPPRGGRGSYY

SEQ ID NO: 169811 - protein, 258 aa, Zea Mays
MDRYQRVEKPRNDTPISQNEIRITTQGRMRNYISYGMSLLEENGHDEISIKAMGRAINKTVMVVELIKRRVGGLHQNTATESVDITDTWEPLEEGLLPLETTRHVSMITVTLSKNPLDTSSPGYQPPIPAEEVKPAFDYDHEESYPTGRGRGRGGGRRGRGRGMSNGPPPPAYGYNEEWEEEGDYYNRGRGRGRGGYGYDYGYAPRGGYYEEQDEYYDEPEEYAPPPGRGRGRGRRGGMPWRGRGGRGPPRGGRGSYY

SEQ ID NO: 169812 - protein, 77 aa, Zea Mays
MVYSKDMATGEGAEDMTDAVQNLEEELVRVNANDEEDGEDMTSVETPRRSVDSTSSSSKKRKKEWKGKKTSSSDPMK

SEQ ID NO: 169813 - protein, 520 aa, Zea Mays
MAAVAGVSEPPMVEQVITEFFAKSLHVILESRSPYDSSRNFTLPSPPSSPLAGSQPRDRWFNLALRDCPAALENFDLWRQSNLEPLVIDIVLLQRDNTRTASVEASRIIERWVIKYETSRSGNVIKNTDKNARSSCSQDHSLYRRAYIGSTVLFRSLYLVVRLLPAYHLFEELNSSGRICPLSLLHRISSFVEPFTRAEDAEMKHFAFAPIETLLGSLSLSVSYVPVLELAAVPEQSTPMPPELIKDYVGSPTTDFLRKLDSLPSDGIAPACFPVTRRHSWSTGHGVRPPASPFLMSSEPHGRLQPCMPTDNSPTAYIHPHITSSSEKKRNTVNEECYSSPPLSPSPSHPPSSYPRNPFFRYGSAPLSIPTVRAGGGGSRLPPSPRRKDKQQCSSQNENLTHSPNDKSIVSKDLVKLSEFHNAKYLQKVLSFGNDDLMYFRGLKLTHTSSKLFIMDELDERELVFAWEDKDTIIDQLNSFMRGRIGNRTSVGKIRNILFSSGLISLTGRTMNRARNLEAR

SEQ ID NO: 169814 - protein, 92 aa, Zea Mays
MEEQAKLRDALNDALREEVQRLKIATGQVPNINGNPFNGGLPQQQQVPSYFSQPQGMQYFSSHQGQHQHPNHHPQSSSNGGGQSLSDSMDFM

SEQ ID NO: 169815 - protein, 718 aa, Zea Mays
MAVGDALRRLCEEIGWSYAVFWKAIGAADPVHLVREDGYCGHTSCPVGSEPSESLPLPSDAGCSVPAADTICWLVNNDMASQVHVVGQGIVGRAAFSGNHQWIVHGTANGHGLSSEVAAEVNNQFRVGIKTIAIIPVLPRGVLQLGSTGLVMENTNFVMFAKKLCSQLNNRSSMAASASVKNTSSQHGQSRPDTATVSTSTPPNALLSASLLKVAQQNGHPVREHSVYAERDLRFIQQASICESQFGSNLQSGVMNSCLTSPSFASVKKQSLLMNSIGQLQFSNNVHSSADLAREIILKSLGRQDSSICENTNMNMHRGRYVVSLGRQDSSVCENTNMNMHRGRYVVSNDINGSRNFDFLPIGAKESRANLSIPASSQILDHMPGTLQQKQSLVPFRVTQSSEFSKKVENPESGSFQIPSVTTSDSGGQVSNSFNMVQENRLSMSNNVRQVQKIDRFSDPSANVSTQRMKNRDECEPGMPIERASSFLVEPGADNDLFDMFGSEFHQSSHNVGADLVTWSGTESQNSDRDVPESSICFNSSPLFSSLDNELHYSGILSLTDTDQLLDAVISNVNPSGKQCPDNSASCKTALMDVPSTSHLCSIDLKRCESPSVPSLLIKHELAQFAKQPCLVDKSEDGCLSQNNGMHKSQIRLWIESGQNMKCESASASNSKGLDVPSKANRKRSRPGESPKPRPKDRQLIQDRIKELRELVPNGAKH

SEQ ID NO: 169816 - protein, 565 aa, Zea Mays
MAVMSSQDSIGTVLKCMQKGAVDFLVKPVRKNELGNLWQHVWRRHAMNCQTNGSENNAASNHVSTNVANGSKTGENNDEESDAQSFGNKRETEIKSAETLPDIRRDEMAGSSKKIELQNKSNDGVNTKVDASKDSDGAPSESEKNVRSKCLNGITSAKVAEQIMDNALRITDASSRRPTNLGKDLAMTEPAADRKCQSLVMENNAVKEKNPGEKSKSAVIGHADSYPSQFLETNLGKQQYRNGYKNQEFREKDIFNHSNSSAFSRYGNRRIESSGEIQFLPSRCIVGQEQHVHGKDPVFQPNGVLLPPNDHNTGESTRQARITLDSSMEGADIICSSSAREDAGASSSSHRKDSMSHPSYGFVPVPIPVGAMMPYHCGAILQPVYYPQGPLMHCNSSAINKATIHQTSGQSNYREDCGSGRPSQVDEHKQSEEKHQLHHSRQIHRESGQPVDMVRAHMDHANQSASCSRDICKGSGCTGSGEADTNANTTVALESGNESGIQNSDRSHREAALMKFRMKRKDRCFDKKVRYHSRKKLAEQRPRVKGQFVSQKLKAAMATEAETDS

SEQ ID NO: 169817 - protein, 695 aa, Zea Mays
MSPDADAAAGGGGGGEASAGAGAGASSPPASASAAANGRALVRWDQILPRRSLRVLLVEHDDSTRQIVTALLRKCGYRVAAVADGMKAWEVMRERAYDFDLVLTEVAMPSLSGIQLLSRIAAAAECKNIPVIMMSSQDSIGTVLKCMQKGAVDFLVKPVRKNELGNLWQHVWRRHAMNCQTNGSENNAASNHVSTNVANGSKTGENNDEESDAQSFGNKRETEIKSAETLPDIRRDEMAGSSKKIELQNKSNDGVNTKVDASKDSDGAPSESEKNVRSKCLNGITSAKVAEQIMDNALRITDASSRRPTNLGKDLAMTEPAADRKCQSLVMENNAVKEKNPGEKSKSAVIGHADSYPSQFLETNLGKQQYRNGYKNQEFREKDIFNHSNSSAFSRYGNRRIESSGEIQFLPSRCIVGQEQHVHGKDPVFQPNGVLLPPNDHNTGESTRQARITLDSSMEGADIICSSSAREDAGASSSSHRKDSMSHPSYGFVPVPIPVGAMMPYHCGAILQPVYYPQGPLMHCNSSAINKATIHQTSGQSNYREDCGSGRPSQVDEHKQSEEKHQLHHSRQIHRESGQPVDMVRAHMDHANQSASCSRDICKGSGCTGSGEADTNANTTVALESGNESGIQNSDRSHREAALMKFRMKRKDRCFDKKVRYHSRKKLAEQRPRVKGQFVSQKLKAAMATEAETDS

SEQ ID NO: 169818 - protein, 494 aa, Zea Mays
MLLMGQRQEKTMMRKVMPKETEIKSAETLPDIRRDEMAGSSKKIELQNKSNDGVNTKVDASKDSDGAPSESEKNVRSKCLNGITSAKVAEQIMDNALRITDASSRRPTNLGKDLAMTEPAADRKCQSLVMENNAVKEKNPGEKSKSAVIGHADSYPSQFLETNLGKQQYRNGYKNQEFREKDIFNHSNSSAFSRYGNRRIESSGEIQFLPSRCIVGQEQHVHGKDPVFQPNGVLLPPNDHNTGESTRQARITLDSSMEGADIICSSSAREDAGASSSSHRKDSMSHPSYGFVPVPIPVGAMMPYHCGAILQPVYYPQGPLMHCNSSAINKATIHQTSGQSNYREDCGSGRPSQVDEHKQSEEKHQLHHSRQIHRESGQPVDMVRAHMDHANQSASCSRDICKGSGCTGSGEADTNANTTVALESGNESGIQNSDRSHREAALMKFRMKRKDRCFDKKVRYHSRKKLAEQRPRVKGQFVSQKLKAAMATEAETDS

SEQ ID NO: 169819 - protein, 224 aa, Zea Mays
MAGSSKKIELQNKSNDGVNTKVDASKDSDGAPSESEKNVRSKCLNGITSAKVAEQIMDNALRITDASSRRPTNLGKDLAMTEPAADRKCQSLVMENNAVKEKNPGEKSKSAVIGHADSYPSQFLETNLGKQQYRNGYKNQEFREKDIFNHSNSSAFSRYGNRRIESSGEIQFLPSRCIVGQEQHVHGKDPVFQPNGVLLPPNDHNTVVLGKMLVQVVLPIERTV

SEQ ID NO: 169820 - protein, 844 aa, Zea Mays
MDDQENEDQALEHILTDANAEPVMLSYAFLKSITNDFSCVIGRGGFGVVYKGYLHNGKTVAVKQLSKTDDFSEKQFHDELMCLIRVKHRNIVRFLGYCSDTQQKMADFNGRFVLADIRRRFLCFEFVPNKSLLHYLKEQSTGRDWKTRYQLIEGICQGLWYLHHEEHINHLDLKPENILLDDDMVPKISDFGLSRRFSGELNVIITENICGTLGYIAPEYLSKGEISFKADIFSLGIIIKKILMGSNDLSDFEKWHESQDVHCPQLNRCIQISQLCLEDDQHKRPTIGCIIDMLNDMKTTTTETIVSPGFGHSRNNSGSSEEYESCDSSHLPGIHHGEVHSATEASTCVSELLEQVQSLGVSTVPSSQLHRITSIPKGFGETNTHHIRSPGSTSESSKLLDVYPLELRFPLEPNKCTECPVTLTNRTDCYVGVWITPAKPHTCHGFYFSYLWWQFPSSSFFQIMDPHSTLVVTLVMDPLQLGLGLQDTEDKFQVLMIVMESQKDLENLNPSISSSTDNDMLRRVEELGGEVHRAILRAVSCDPASCKPEVVHSVPMVISAKTLENVLSIDVDLDMCWILASHRAGYVSIWNYNTQGRVTALKVTKEAGMLHSLTRTRSATTSCVYSAKFITRKKLFATGDGYGYICIYAYTMDKVKKFEAYHGKPVSLLAVHSTYPFLLSSSSCDRSIKLWAWDQQWACTRTFDAHTSGVQHVRFNPADVNTFVSVSCGGACVKVWEIHSSTPITTLFGPNNVDYFTDADRQFLLNIWSQKATILDLQTQKTVHRLLVHQREMRDVACHPTLPILATRLDDGTVCLWDATTYRLVVACEDGMEILKINMPTSTK

SEQ ID NO: 169821 - protein, 552 aa, Zea Mays
MVCNLLDLALTSLEHSSSIEELEASTCVSELLEQVQSLGVSTVPSSQLHRITSIPKGFGETNTHHIRSPGSTSESSKLLDVYPLELRFPLEPNKCTECPVTLTNRTDCYVGVWITPAKPHTCHGFYFSYLWWQFPSSSFFQIMDPHSTLVVTLVMDPLQLGLGLQDTEDKFQVLMIVMESQKDLENLNPSISSSTDNDMLRRVEELGGEVHRAILRAVSCDPASCKPEVVHSVPMVISAKTLENVLSIDVDLDMCWILASHRAGYVSIWNYNTQGRVTALKVTKEAGMLHSLTRTRSATTSCVYSAKFITRKKLFATGDGYGYICIYAYTMDKVKKFEAYHGKPVSLLAVHSTYPFLLSSSSCDRSIKLWAWDQQWACTRTFDAHTSGVQHVRFNPADVNTFVSVSCGGACVKVWEIHSSTPITTLFGPNNVDYFTDADRQFLLNIWSQKATILDLQTQKTVHRLLVHQREMRDVACHPTLPILATRLDDGTVCLWDATTYRLERIIRLESSILHTAFKDTADSIWYTTFVFFMVVHVRQNVNFGSSICTSV

SEQ ID NO: 169822 - protein, 580 aa, Zea Mays
MDDQENEDQALEHILTDANAEPVMLSYAFLKSITNDFSCVIGRGGFGVVYKGYLHNGKTVAVKQLSKTDDFSEKQFHDELMCLIRVKHRNIVRFLGYCSDTQQKMADFNGRFVLADIRRRFLCFEFVPNKSLLHYLKEQSTGRDWKTRYQLIEGICQGLWYLHHEEHINHLDLKPENILLDDDMVPKISDFGLSRRFSGELNVIITENICGTLGYIAPEYLSKGEISFKADIFSLGIIIKKILMGSNDLSDFEKWHESQDVHCPQLNRCIQISQLCLEDDQHKRPTIGCIIDMLNDMKTTTTETIVSPGFGHSRNNSGSSEEYESCDSSHLPGIHHGEVHSATEASTCVSELLEQVQSLGVSTVPSSQLHRITSIPKGFGETNTHHIRSPGSTSESSKLLDVYPLELRFPLEPNKCTECPVTLTNRTDCYVGVWITPAKPHTCHGFYFSYLWWQFPSSSFFQIMDPHSTLVVTLVMDPLQLGLGLQDTEDKFQVLMIVMESQKDLENLNPSISSSTDNDMLRRVEELGGEVHRAILRAVSCDPASCKPEVVHSVPMVCVAPFHLQYLSTEHTKKSFQQKL

SEQ ID NO: 169823 - protein, 410 aa, Zea Mays
MDPHSTLVVTLVMDPLQLGLGLQDTEDKFQVLMIVMESQKDLENLNPSISSSTDNDMLRRVEELGGEVHRAILRAVSCDPASCKPEVVHSVPMVISAKTLENVLSIDVDLDMCWILASHRAGYVSIWNYNTQGRVTALKVTKEAGMLHSLTRTRSATTSCVYSAKFITRKKLFATGDGYGYICIYAYTMDKVKKFEAYHGKPVSLLAVHSTYPFLLSSSSCDRSIKLWAWDQQWACTRTFDAHTSGVQHVRFNPADVNTFVSVSCGGACVKVWEIHSSTPITTLFGPNNVDYFTDADRQFLLNIWSQKATILDLQTQKTVHRLLVHQREMRDVACHPTLPILATRLDDGTVCLWDATTYRLERIIRLESSILHTAFKDTADSIWYTTFVFFMVVHVRQNVNFGSSICTSV

SEQ ID NO: 169824 - protein, 873 aa, Zea Mays
MDDQENEDQALEHILTDANAEPVMLSYAFLKSITNDFSCVIGRGGFGVVYKGYLHNGKTVAVKQLSKTDDFSEKQFHDELMCLIRVKHRNIVRFLGYCSDTQQKMADFNGRFVLADIRRRFLCFEFVPNKSLLHYLKEQSTGRDWKTRYQLIEGICQGLWYLHHEEHINHLDLKPENILLDDDMVPKISDFGLSRRFSGELNVIITENICGTLGYIAPEYLSKGEISFKADIFSLGIIIKKILMGSNDLSDFEKWHESQDVHCPQLNRCIQISQLCLEDDQHKRPTIGCIIDMLNDMKTTTTETIVSPGFGHSRNNSGSSEEYESCDSSHLPGIHHGEVHSATEASTCVSELLEQVQSLGVSTVPSSQLHRITSIPKGFGETNTHHIRSPGSTSESSKLLDVYPLELRFPLEPNKCTECPVTLTNRTDCYVGVWITPAKPHTCHGFYFSYLWWQFPSSSFFQIMDPHSTLVVTLVMDPLQLGLGLQDTEDKFQVLMIVMESQKDLENLNPSISSSTDNDMLRRVEELGGEVHRAILRAVSCDPASCKPEVVHSVPMVISAKTLENVLSIDVDLDMCWILASHRAGYVSIWNYNTQGRVTALKVTKEAGMLHSLTRTRSATTSCVYSAKFITRKKLFATGDGYGYICIYAYTMDKVKKFEAYHGKPVSLLAVHSTYPFLLSSSSCDRSIKLWAWDQQWACTRTFDAHTSGVQHVRFNPADVNTFVSVSCGGACVKVWEIHSSTPITTLFGPNNVDYFTDADRQFLLNIWSQKATILDLQTQKTVHRLLVHQREMRDVACHPTLPILATRLDDGTVCLWDATTYRLERIIRLESSILHTAFKDTADSIWYTTFVFFMVVHVRQNVNFGSSICTSV

SEQ ID NO: 169825 - protein, 327 aa, Zea Mays
MDDQENEDQALEHILTDANAEPVMLSYAFLKSITNDFSCVIGRGGFGVVYKGYLHNGKTVAVKQLSKTDDFSEKQFHDELMCLIRVKHRNIVRFLGYCSDTQQKMADFNGRFVLADIRRRFLCFEFVPNKSLLHYLKEQSTGRDWKTRYQLIEGICQGLWYLHHEEHINHLDLKPENILLDDDMVPKISDFGLSRRFSGELNVIITENICGTLGYIAPEYLSKGEISFKADIFSLGIIIKKILMGSNDLSDFEKWHESQDVHCPQLNRCIQISQLCLEDDQHKRPTIGCIIDMLNDMKTTTTETIVSPGFGHSRNNSGSSEEYVYLQ

SEQ ID NO: 169826 - protein, 117 aa, Zea Mays
MARGLIAKSASKSIFICRERVVWVMLQRQQGLMYHLNKQLAQKSDEDVHLTSLCAELKDEVMAARGKVAPLEEEVRLLKESLQMMTGERDESLRQASEASSRADSLAKDLEGERSKA

SEQ ID NO: 169827 - protein, 346 aa, Zea Mays
MPECPGGPNRTSSPEREHDQEAEEGGGADARAAEIKDALAPGLRLLARPFPPDELLVPEPGHVLRRAAAPPPGRGHGGGDGGQPVPAADAGAVGVLDAQADLPDVAAALVARDGGVERDAAAEHDGEARHGVPREPLAVDGHGAAAGRVERAAGGRVEEDPAELEVGRRDRRGGRRREALLQQRVDAERRAQEPVGGGVRLHDARQDADPRVAQVDGRHEARGQGLRRRGRGDRAREGEGVGEERPVTAVDAACAGQVADGGPHGEAERPPRGRVGGEAAEAGARAADRRQRRAIQAAEHEGEDVRREVLDARAADVVAGRRRGFHRPNTHGMRRTMAGGRPTGRQ

SEQ ID NO: 169828 - protein, 397 aa, Zea Mays
MPPQPNGGKVTPNLAMDAEATRLLNLTVLQRLDPAVEDILITAAHVTLYDFNIDLNQWSRKDVEGSLFVVKRNSQPRFQFIVMNRRNTGTDDFLACVLGRWFVFMMTHLWCLLPRSCTNDNLVEDLLSDFEYELQPPYLLYRNASQEVNGIWFYNQQDCEAVASLFGRILNAYAKVPPKPKVPSTKSEFEELEAVPTSAAIDGPLEPPPASAAVVLDTPDESLISYFSGAASIGSVSNAQPSGRVHPSTESIPSSHVPLIVPSAASTHQLPPSVASTASPLPVHGTNAHTSRPTNLVTPDFFAPPPSSSAPLAPPGASVVPTAPPLHPTSAASIQRSQYGTPLLQPFPPPTPPPSLNPSHSDRLTVTRDRVKDALQRLVQSDEFVDLVCRELQRSLV

SEQ ID NO: 169829 - protein, 414 aa, Zea Mays
MGPSDKLWSQSWEFAWRRSARHEWNEPPRALIRRPARRPLALKPKHPPPRPPPRSGSYQSALSCSLPAGCSGARPVALPRRRPRPPPEIGGMVSASSLLLPTSVRDLASCVSDGAVRVACTSPASTLTVSSSSSTTSSPPPATLSVAISYRATPQAPSSPPLLLRLTWSHSRHGPPTLSFAGPTASSPAVLLRRRRGTYCLPSSTSTSTHIPPLALFWDLTAARYSPASSPSPEPASGFYVVAVASAEVVLAVGDLAAEFIKAKFEGQIPWARSILPVSRTDRVVAAAPRPGGAVHTARVRFGEGAPEHEVAVGCCRAGAGRPGEEELWVSVDGKRAVHARRLRWNFRGNQTVFVDGAPVDVLWDLHGWWFQDPPGCAVVMLRARSALESRLWLEEEARAPGFALLVQALRTPP

SEQ ID NO: 169830 - protein, 117 aa, Zea Mays
MEVDDMLIQRMRLWRLVPSLYGHPSCDALSYRFQCCRAVPGRKRNHVGLPLSRSSMSSSPRTHPPFRITQISLYNHGHQELVLPFGLFRMEVCRMLLQILFLGLLNILDPNASFAQM

SEQ ID NO: 169831 - protein, 320 aa, Zea Mays
MEALHDKVKKQIIKEGHGRKPLKFATCFVHYRAWVQGSSHKFEDTWQEQHPIELVLGKEKKQMSGLGIGVGSMKSGERALLHVGWELGYGKEGSFSFPNVPPMADLVYEVELIGFDDVKEGKSRSDMTVEERIAAADRRKIEGNAYFKEKKLEEAMQQYEMAIAYMGDDFMFQLFGKYRDMALAVKNPCHLNMAACLIKLKRFDEAIAQCSIVLTEDESNVKALFRRGKAKSELGQTESAREDFLKAKKYSPEDKEIIRELRLLAEQDKALYQKQKELYKGLFGPSPEAKPKKAKYLVVFWQCLVSFILYLAGMFKRKNE

SEQ ID NO: 169832 - protein, 323 aa, Zea Mays
MAVVEEDAAASADPAAASDPAAGSSENEITVEEASFVHSEPPQDGSAPPVVSSDMEALHDKVKKQIIKEGHGRKPLKFATCFVHYRAWVQGSSHKFEDTWQEQHPIELVLGKEKKQMSGLGIGVGSMKSGERALLHVGWELGYGKEGSFSFPNVPPMADLVYEVELIGFDDVKEGKSRSDMTVEERIAAADRRKIEGNAYFKEKKLEEAMQQYEMVLTEDESNVKALFRRGKAKSELGQTESAREDFLKAKKYSPEDKEIIRELRLLAEQDKALYQKQKELYKGLFGPSPEAKPKKAKYLVVFWQCLVSFILYLAGMFKRKNE

SEQ ID NO: 169833 - protein, 328 aa, Zea Mays
MAVVEEDAAASADPAAASDPAAGSSENEITVEEASFVHSEPPQDGSAPPVVSSDMEALHDKVKKQIIKEGHGRKPLKFATCFVHYRAWVQGSSHKFEDTWQEQHPIELVLGKDLVYEVELIGFDDVKEGKSRSDMTVEERIAAADRRKIEGNAYFKEKKLEEAMQQYEMAIAYMGDDFMFQLFGKYRDMALAVKNPCHLNMAACLIKLKRFDEAIAQCSIVLTEDESNVKALFRRGKAKSELGQTESAREDFLKAKKYSPEDKEIIRELRLLAEQDKALYQKQKELYKGLFGPSPEAKPKKAKYLVVFWQCLVSFILYLAGMFKRKNE

SEQ ID NO: 169834 - protein, 373 aa, Zea Mays
MVRFRCETTEDYPRHLNLQVQKLTPSSLPTIAMADDAAAAAFAPSPSPPSPVAQPLPDLSPPPPFSPPAGTPASGAQTPSLPDTPASLDPDTPFSDATPTPADASDAALASDDGITNPSGGTAGKHMTLAPPAPPAKKPSKKKGGNSVWTRPASRKGKKKARQPGGLGHGSGGPAGAARGSNPRPNAGGEEEFLLVPATRLAAERSDDAPGQPVLLSRVFKSERIELSEDRLTAASTKGFRMVRATRGVAAGAWYFEVKVVHLGPTGHTRLGWATNKADLQTPVGFDAYGFGYRDVDGAKVTKAWRDKYADEGYGEGDVLGFYISLPDGERYEPKQPDLIQYKGMPFHVQVPKEEQKTPDPVPVHLLGCCTNS

SEQ ID NO: 169835 - protein, 109 aa, Zea Mays
MLHLPSHGSAPGRPLTQLQHPLAASSRSWLQIPQMGPRPCASRSSPPSTSCTPRCMATLLPSASSLPAPSSTNPPCTLVVPASPSASSDTTPTPSLSRPQQSGCTRLIE

SEQ ID NO: 169836 - protein, 113 aa, Zea Mays
MHGHTLTIRVISACTILDKSSMHIGRTRIAQCLVGYNTDTVLVTPATIRQICHRYTHGVLVCEWRKSLMEDEGEESVEQMSKTRQMCSCWCFSTIATSMRKHGLYRVTRTPWN

SEQ ID NO: 169837 - protein, 60 aa, Zea Mays
MCPQTPSLSPEYSHKAGLQAVITRMPLQARPVTQRRPRGARYNGPDHAWALEQDEAALRG

SEQ ID NO: 169838 - protein, 125 aa, Zea Mays
MHICMKTKGIACLMKETKYLLWEGSGEVQVGRAPSATTAAPFPGLAGHRCRHLLALVHERGIHGEAHQAVVGGIASSSPCPGVVVARGHHHRGLHELEAEPELVGLDVREPRHGAPEEELGGEAA

SEQ ID NO: 169839 - protein, 188 aa, Zea Mays
MLKKEEEMLQAVKERKAKDGNAFAREMLDERTKKAETWHHNAANRVAYSKPADPITCATFAQDVIEGRASVSQAHEHKHQPLIFGPASIVGGGLTSERERMTAQVFQPSYRMPTMSIEEAGLREMKMMEKWQERTAELMKESTSAWHKDGSSSAQEDEDAEEEKARAWDDWKDDNPRGAGNKKLTPCG

SEQ ID NO: 169840 - protein, 263 aa, Zea Mays
MTHKLILLVRCLRETKLQEIRERKERRGRSLRAAALSAPIEAGEEDDLENDGEEEREAWLATISLALCKAFDLLDMLKKEEEMLQAVKERKAKDGNAFAREMLDERTKKAETWHHNAANRVAYSKPADPITCATFAQDVIEGRASVSQAHEHKHQPLIFGPASIVGGGLTSERERMTAQVFQPSYRMPTMSIEEAGLREMKMMEKWQERTAELMKESTSAWHKDGSSSAQEDEDAEEEKARAWDDWKDDNPRGAGNKKLTPCG

SEQ ID NO: 169841 - protein, 268 aa, Zea Mays
MTNRRAQKVARFKRQKAAETKLQEIRERKERRGRSLRAAALSAPIEAGEEDDLENDGEEEREAWLATISLALCKAFDLLDMLKKEEEMLQAVKERKAKDGNAFAREMLDERTKKAETWHHNAANRVAYSKPADPITCATFAQDVIEGRASVSQAHEHKHQPLIFGPASIVGGGLTSERERMTAQVFQPSYRMPTMSIEEAGLREMKMMEKWQERTAELMKESTSAWHKDGSSSAQEDEDAEEEKARAWDDWKDDNPRGAGNKKLTPCG

SEQ ID NO: 169842 - protein, 170 aa, Zea Mays
MLEAAFVAVDLATPEQDLTLSDGHQQPRWPAVSKCEHGVYPANDELQLYDSGGGEGTPFLVIGEGTLASTTTFRYRSPRGRLRWSLLRPIPCGHPRAPLSSRWRPWDPGGSARAGPLRRGCLSYLKGSKKVKSRSLIQVWNNKISRDVKDLFLGVRFVSSEVIINVIDRL

SEQ ID NO: 169843 - protein, 226 aa, Zea Mays
MGAIGIVVRACAPLAPAAAAAPAPSGSSSRDAAQAQRWSKPTRTGRVLVLGGTGRVGGSTATALSKLRPDLGILVGGRNREKGESIAAKLGGQSEFVQVDTRNAGMLEEALQGVDLVVHTAGPFQRAEECTVLQAAISTKTPYIDVCDDTDYSWRAKGFHEQAKAAGVPAITTAGIYPGVSNVMAAELVHAARSENGEPERLRYWWCWSNNSDNKFSTSWGGCDCI

SEQ ID NO: 169844 - protein, 238 aa, Zea Mays
MLLNPSFRFFYYTAGTGGAGPTILTTSFLLLGEDVIAYNKGEEIKLKPYSGALNIDFGKGVRKKNVYLLNLPEVKSAFKILGVPTVSARFGTAPFFWNWGMQAFANFLPVEFLRDRNKVQKLVQSVDPLVRAVDGIAGEHVSMRVDLDCSNGRNTIGLFTHKKLSVSVGFATAAFALAVLEGNTQPGVWFPEEPEGIRIEARKLLLERASQGTSTFVMNKPSWMVETDPKEVGLGIFV

SEQ ID NO: 169845 - protein, 1061 aa, Zea Mays
MVPEENSSIINFEMARIAFKVLQGSLFSLWRLEENSVFPSILAALFVIEWECSMSLALDEEKCLESNIEDTEVGVSMCSSSKGCLEEEMHLKVNLAESIHVFCQSLSPSFWDNLHSCTLNRLATILPQCVRNLESFFDVLLSEGEHWPLWLMPSLQNGHLSVKVQLDPDITDEIELKHERFVAFVDRLILKLGFSEVVLGIPGNIQSATSQSIDITSPVSSLSRVWVAGEVLCTWTWKGGCALKTFLPLLVQYMKDESYLEINIVPLLLDTLLGGALMHDSGPWVLFNAWHLSDNEIDKIQDRFLRALVALLFTINTNDCLWRESDALVFFEQLLSNLFIGSSVNRKCLKILPYVMTSIIKQFSALNNGDSSYADLVRKSIQSWLDATISCLSSSSREVPVQDIEDWMQVVLSCFPLRITGGARELVAVVEREISDTERSLMLTLFQKYQIFYGSTASSLVTSGTAVSTTVELLGVKLTAVLVGYCWSNLKENDWHFVFRMVFKCIESSVLLVEEMTDGINDATINQVSSEDALEKLKLVVGTTDKLTLSLAESALVTMCQLNHLCNIQEAENSQCVQLIKSGDYAESNDKMVESVLRLFLASGVSEAITKSCSEEASSVIGSSRHAYLHFWELVASFIKNAPLQSRKSALESMELWGLTKGSVSGLYSILFSSQPIFHLQLAAFSLLLSEPFCQLSLVKNYSMGESCSSAQQSGTSQSAELMPDSDKTVHLREELSDLIEFPTSELLKTDLTARDRVDVFIAWSLLLSHLQTLPASSSIKGDVLQYIQEKVSPCILDCIFQHIPVKAAAPNGKKKDTELAPEAEAAAKASKNAIATCSLLPYLESLWPIGTLQMASLAGSLYGMMIRLLPSFVRTWFTTLRDRSLSYSIESFTKQWCSPPLLLDEFSQVKESVYGDENFSVSVNRSAFEIVATYKKEETGIDLVIRLPSCYPLRHVDVECTRSLGISEVKCRKWLLSLTSFVRSQNGAIAEAIRTWKSNFDKEFEGVEECPICYSILHTSNHNLPRLACKTCKHKFHGACLYKWFSTSNKSTCPLCQTPF

SEQ ID NO: 169846 - protein, 1779 aa, Zea Mays
MSSLITAVRKGIAPHLKSLMGPWWFSQFDPAPEVAQAARRSFEAAFPQSDRRLDALMLCVKETFLYLNENLKLTPQALSDKAIPMDELEDMHQRVMSSSLLAMATLIEILLGVKLQSCDGESTNTENKNMSKVRSTVLSSAEAAFCMHKCFLDVLKSKSSVIRSATYSLLTSYIKHVPHVFDEETMKKLSPTLLGAFHEKDASCHSSMWDTILVFSRKFPEAWSYCNIHKVVLSRVWHFLQNGCYGSKQVSYPLLVQFLDSMPPKAVMGQQFVFDFLHNLWAGRNQRQLSAADSLAFCGAFKQSFLWLLKNASRYSTGDSSDDVPIKLITDVLAKIVWRDYLLLSGDTIGGGVLLSRKTSGLAANMHYPTYYLQDLKKCITEILDVIADTENHLLNISCQSLLSDCLDIIQQGEKLSKFQNHVEQLVSFFLSLDQIVVCKGELWPLERLAKPLVEQSLPAIKFMDTPCLVKLLSVLVEIFGPTPLFFKTCKENDEKLDIKSYLEFFNDELLPWCLDGKYSTCNSKIDLLLSLFQDESFFDQWCSIIKCTTTEQKQSVDDKTSNILGRYELLTLLLQKIREKIAGGKLRNLQENGYLLQHLRLDILDSTAASVLCDLPASDCQVSFICAALGGADQEDQICFLSPETVCKILGSILKNLALVLKTSTFEWARLAHSLLPAEPEHLMVPEENSSIINFEMARIAFKVLQGSLFSLWRLEENSVFPSILAALFVIEWECSMSLALDEEKCLESNIEDTEVGVSMCSSSKGCLEEEMHLKVNLAESIHVFCQSLSPSFWDNLHSCTLNRLATILPQCVRYAVFQTRDLHAERTSILCSEWVVDMLKLTCLDHRNLESFFDVLLSEGEHWPLWLMPSLQNGHLSVKVQLDPDITDEIELKHERFVAFVDRLILKLGFSEVVLGIPGNIQSATSQSIDITSPVSSLSRVWVAGEVLCTWTWKGGCALKTFLPLLVQYMKDESYLEINIVPLLLDTLLGGALMHDSGPWVLFNAWHLSDNEIDKIQDRFLRALVALLFTINTNDCLWRESDALVFFEQLLSNLFIGSSVNRKCLKILPYVMTSIIKQFSALNNGDSSYADLVRKSIQSWLDATISCLSSSSREVPVQDIEDWMQVVLSCFPLRITGGARELVAVVEREISDTERSLMLTLFQKYQIFYGSTASSLVTSGTAVSTTVELLGVKLTAVLVGYCWSNLKENDWHFVFRMVFKCIESSVLLVEEMTDGINDATINQVSSEDALEKLKLVVGTTDKLTLSLAESALVTMCQLNHLCNIQEAENSQCVQLIKSGDYAESNDKMVESVLRLFLASGVSEAITKSCSEEASSVIGSSRHAYLHFWELVASFIKNAPLQSRKSALESMELWGLTKGSVSGLYSILFSSQPIFHLQLAAFSLLLSEPFCQLSLVKNYSMGESCSSAQQSGTSQSAELMPDSDKTVHLREELSDLIEFPTSELLKTDLTARDRVDVFIAWSLLLSHLQTLPASSSIKGDVLQYIQEKVSPCILDCIFQHIPVKAAAPNGKKKDTELAPEAEAAAKASKNAIATCSLLPYLESLWPIGTLQMASLAGSLYGMMIRLLPSFVRTWFTTLRDRSLSYSIESFTKQWCSPPLLLDEFSQVKESVYGDENFSVSVNRSAFEIVATYKKEETGIDLVIRLPSCYPLRHVDVECTRSLGISEVKCRKWLLSLTSFVRSQNGAIAEAIRTWKSNFDKEFEGVEECPICYSILHTSNHNLPRLACKTCKHKFHGACLYKWFSTSNKSTCPLCQTPF

SEQ ID NO: 169847 - protein, 888 aa, Zea Mays
MELKHERFVAFVDRLILKLGFSEVVLGIPGNIQSATSQSIDITSPVSSLSRVWVAGEVLCTWTWKGGCALKTFLPLLVQYMKDESYLEINIVPLLLDTLLGGALMHDSGPWVLFNAWHLSDNEIDKIQDRFLRALVALLFTINTNDCLWRESDALVFFEQLLSNLFIGSSVNRKCLKILPYVMTSIIKQFSALNNGDSSYADLVRKSIQSWLDATISCLSSSSREVPVQDIEDWMQVVLSCFPLRITGGARELVAVVEREISDTERSLMLTLFQKYQIFYGSTASSLVTSGTAVSTTVELLGVKLTAVLVGYCWSNLKENDWHFVFRMVFKCIESSVLLVEEMTDGINDATINQVSSEDALEKLKLVVGTTDKLTLSLAESALVTMCQLNHLCNIQEAENSQCVQLIKSGDYAESNDKMVESVLRLFLASGVSEAITKSCSEEASSVIGSSRHAYLHFWELVASFIKNAPLQSRKSALESMELWGLTKGSVSGLYSILFSSQPIFHLQLAAFSLLLSEPFCQLSLVKNYSMGESCSSAQQSGTSQSAELMPDSDKTVHLREELSDLIEFPTSELLKTDLTARDRVDVFIAWSLLLSHLQTLPASSSIKGDVLQYIQEKVSPCILDCIFQHIPVKAAAPNGKKKDTELAPEAEAAAKASKNAIATCSLLPYLESLWPIGTLQMASLAGSLYGMMIRLLPSFVRTWFTTLRDRSLSYSIESFTKQWCSPPLLLDEFSQVKESVYGDENFSVSVNRSAFEIVATYKKEETGIDLVIRLPSCYPLRHVDVECTRSLGISEVKCRKWLLSLTSFVRSQNGAIAEAIRTWKSNFDKEFEGVEECPICYSILHTSNHNLPRLACKTCKHKFHGACLYKWFSTSNKSTCPLCQTPF

SEQ ID NO: 169848 - protein, 1723 aa, Zea Mays
MLCVKETFLYLNENLKLTPQALSDKAIPMDELEDMHQRVMSSSLLAMATLIEILLGVKLQSCDGESTNTENKNMSKVRSTVLSSAEAAFCMHKCFLDVLKSKSSVIRSATYSLLTSYIKHVPHVFDEETMKKLSPTLLGAFHEKDASCHSSMWDTILVFSRKFPEAWSYCNIHKVVLSRVWHFLQNGCYGSKQVSYPLLVQFLDSMPPKAVMGQQFVFDFLHNLWAGRNQRQLSAADSLAFCGAFKQSFLWLLKNASRYSTGDSSDDVPIKLITDVLAKIVWRDYLLLSGDTIGGGVLLSRKTSGLAANMHYPTYYLQDLKKCITEILDVIADTENHLLNISCQSLLSDCLDIIQQGEKLSKFQNHVEQLVSFFLSLDQIVVCKGELWPLERLAKPLVEQSLPAIKFMDTPCLVKLLSVLVEIFGPTPLFFKTCKENDEKLDIKSYLEFFNDELLPWCLDGKYSTCNSKIDLLLSLFQDESFFDQWCSIIKCTTTEQKQSVDDKTSNILGRYELLTLLLQKIREKIAGGKLRNLQENGYLLQHLRLDILDSTAASVLCDLPASDCQVSFICAALGGADQEDQICFLSPETVCKILGSILKNLALVLKTSTFEWARLAHSLLPAEPEHLMVPEENSSIINFEMARIAFKVLQGSLFSLWRLEENSVFPSILAALFVIEWECSMSLALDEEKCLESNIEDTEVGVSMCSSSKGCLEEEMHLKVNLAESIHVFCQSLSPSFWDNLHSCTLNRLATILPQCVRYAVFQTRDLHAERTSILCSEWVVDMLKLTCLDHRNLESFFDVLLSEGEHWPLWLMPSLQNGHLSVKVQLDPDITDEIELKHERFVAFVDRLILKLGFSEVVLGIPGNIQSATSQSIDITSPVSSLSRVWVAGEVLCTWTWKGGCALKTFLPLLVQYMKDESYLEINIVPLLLDTLLGGALMHDSGPWVLFNAWHLSDNEIDKIQDRFLRALVALLFTINTNDCLWRESDALVFFEQLLSNLFIGSSVNRKCLKILPYVMTSIIKQFSALNNGDSSYADLVRKSIQSWLDATISCLSSSSREVPVQDIEDWMQVVLSCFPLRITGGARELVAVVEREISDTERSLMLTLFQKYQIFYGSTASSLVTSGTAVSTTVELLGVKLTAVLVGYCWSNLKENDWHFVFRMVFKCIESSVLLVEEMTDGINDATINQVSSEDALEKLKLVVGTTDKLTLSLAESALVTMCQLNHLCNIQEAENSQCVQLIKSGDYAESNDKMVESVLRLFLASGVSEAITKSCSEEASSVIGSSRHAYLHFWELVASFIKNAPLQSRKSALESMELWGLTKGSVSGLYSILFSSQPIFHLQLAAFSLLLSEPFCQLSLVKNYSMGESCSSAQQSGTSQSAELMPDSDKTVHLREELSDLIEFPTSELLKTDLTARDRVDVFIAWSLLLSHLQTLPASSSIKGDVLQYIQEKVSPCILDCIFQHIPVKAAAPNGKKKDTELAPEAEAAAKASKNAIATCSLLPYLESLWPIGTLQMASLAGSLYGMMIRLLPSFVRTWFTTLRDRSLSYSIESFTKQWCSPPLLLDEFSQVKESVYGDENFSVSVNRSAFEIVATYKKEETGIDLVIRLPSCYPLRHVDVECTRSLGISEVKCRKWLLSLTSFVRSQNGAIAEAIRTWKSNFDKEFEGVEECPICYSILHTSNHNLPRLACKTCKHKFHGACLYKWFSTSNKSTCPLCQTPF

SEQ ID NO: 169849 - protein, 1874 aa, Zea Mays
MGKQKGRASSSGMAASLVPHAHGAVPTVGFGGYHGAVRVEPAAPSDPDAPIRLTPDVDGEVLQNLKRLGRKDATTKIKALSTLSILFGQKPCEEVVQIVPQWAFEYKRLLLDYNREVRRATHEAMSSLITAVRKGIAPHLKSLMGPWWFSQFDPAPEVAQAARRSFEAAFPQSDRRLDALMLCVKETFLYLNENLKLTPQALSDKAIPMDELEDMHQRVMSSSLLAMATLIEILLGVKLQSCDGESTNTENKNMSKVRSTVLSSAEAAFCMHKCFLDVLKSKSSVIRSATYSLLTSYIKHVPHVFDEETMKKLSPTLLGAFHEKDASCHSSMWDTILVFSRKFPEAWSYCNIHKVVLSRVWHFLQNGCYGSKQVSYPLLVQFLDSMPPKAVMGQQFVFDFLHNLWAGRNQRQLSAADSLAFCGAFKQSFLWLLKNASRYSTGDSSDDVPIKLITDVLAKIVWRDYLLLSGDTIGGGVLLSRKTSGLAANMHYPTYYLQDLKKCITEILDVIADTENHLLNISCQSLLSDCLDIIQQGEKLSKFQNHVEQLVSFFLSLDQIVVCKGELWPLERLAKPLVEQSLPAIKFMDTPCLVKLLSVLVEIFGPTPLFFKTCKENDEKLDIKSYLEFFNDELLPWCLDGKYSTCNSKIDLLLSLFQDESFFDQWCSIIKCTTTEQKQSVDDKTSNILGRYELLTLLLQKIREKIAGGKLRNLQENGYLLQHLRLDILDSTAASVLCDLPASDCQVSFICAALGGADQEDQICFLSPETVCKILGSILKNLALVLKTSTFEWARLAHSLLPAEPEHLMVPEENSSIINFEMARIAFKVLQGSLFSLWRLEENSVFPSILAALFVIEWECSMSLALDEEKCLESNIEDTEVGVSMCSSSKGCLEEEMHLKVNLAESIHVFCQSLSPSFWDNLHSCTLNRLATILPQCVRYAVFQTRDLHAERTSILCSEWVVDMLKLTCLDHRNLESFFDVLLSEGEHWPLWLMPSLQNGHLSVKVQLDPDITDEIELKHERFVAFVDRLILKLGFSEVVLGIPGNIQSATSQSIDITSPVSSLSRVWVAGEVLCTWTWKGGCALKTFLPLLVQYMKDESYLEINIVPLLLDTLLGGALMHDSGPWVLFNAWHLSDNEIDKIQDRFLRALVALLFTINTNDCLWRESDALVFFEQLLSNLFIGSSVNRKCLKILPYVMTSIIKQFSALNNGDSSYADLVRKSIQSWLDATISCLSSSSREVPVQDIEDWMQVVLSCFPLRITGGARELVAVVEREISDTERSLMLTLFQKYQIFYGSTASSLVTSGTAVSTTVELLGVKLTAVLVGYCWSNLKENDWHFVFRMVFKCIESSVLLVEEMTDGINDATINQVSSEDALEKLKLVVGTTDKLTLSLAESALVTMCQLNHLCNIQEAENSQCVQLIKSGDYAESNDKMVESVLRLFLASGVSEAITKSCSEEASSVIGSSRHAYLHFWELVASFIKNAPLQSRKSALESMELWGLTKGSVSGLYSILFSSQPIFHLQLAAFSLLLSEPFCQLSLVKNYSMGESCSSAQQSGTSQSAELMPDSDKTVHLREELSDLIEFPTSELLKTDLTARDRVDVFIAWSLLLSHLQTLPASSSIKGDVLQYIQEKVSPCILDCIFQHIPVKAAAPNGKKKDTELAPEAEAAAKASKNAIATCSLLPYLESLWPIGTLQMASLAGSLYGMMIRLLPSFVRTWFTTLRDRSLSYSIESFTKQWSAFEIVATYKKEETGIDLVIRLPSCYPLRHVDVECTRSLGISEVKCRKWLLSLTSFVRSQNGAIAEAIRTWKSNFDKEFEGVEECPICYSILHTSNHNLPRLACKTCKHKFHGACLYKWFSTSNKSTCPLCQTPF

SEQ ID NO: 169850 - protein, 1030 aa, Zea Mays
MGKGSLFSLWRLEENSVFPSILAALFVIEWECSMSLALDEEKCLESNIEDTEVGVSMCSSSKGCLEEEMHLKVNLAESIHVFCQSLSPSFWDNLHSCTLNRLATILPQCVRNLESFFDVLLSEGEHWPLWLMPSLQNGHLSVKVQLDPDITDEIELKHERFVAFVDRLILKLGFSEVVLGIPGNIQSATSQSIDITSPVSSLSRVWVAGEVLCTWTWKGGCALKTFLPLLVQYMKDESYLEINIVPLLLDTLLGGALMHDSGPWVLFNAWHLSDNEIDKIQDRFLRALVALLFTINTNDCLWRESDALVFFEQLLSNLFIGSSVNRKCLKILPYVMTSIIKQFSALNNGDSSYADLVRKSIQSWLDATISCLSSSSREVPVQDIEDWMQVVLSCFPLRITGGARELVAVVEREISDTERSLMLTLFQKYQIFYGSTASSLVTSGTAVSTTVELLGVKLTAVLVGYCWSNLKENDWHFVFRMVFKCIESSVLLVEEMTDGINDATINQVSSEDALEKLKLVVGTTDKLTLSLAESALVTMCQLNHLCNIQEAENSQCVQLIKSGDYAESNDKMVESVLRLFLASGVSEAITKSCSEEASSVIGSSRHAYLHFWELVASFIKNAPLQSRKSALESMELWGLTKGSVSGLYSILFSSQPIFHLQLAAFSLLLSEPFCQLSLVKNYSMGESCSSAQQSGTSQSAELMPDSDKTVHLREELSDLIEFPTSELLKTDLTARDRVDVFIAWSLLLSHLQTLPASSSIKGDVLQYIQEKHIPVKAAAPNGKKKDTELAPEAEAAAKASKNAIATCSLLPYLESLWPIGTLQMASLAGSLYGMMIRLLPSFVRTWFTTLRDRSLSYSIESFTKQWCSPPLLLDEFSQVKESVYGDENFSVSVNRSAFEIVATYKKEETGIDLVIRLPSCYPLRHVDVECTRSLGISEVKCRKWLLSLTSFVRSQNGAIAEAIRTWKSNFDKEFEGVEECPICYSILHTSNHNLPRLACKTCKHKFHGACLYKWFSTSNKSTCPLCQTPF

SEQ ID NO: 169851 - protein, 525 aa, Zea Mays
MAPRSSTFLSRVADAARPLSVSARPRLSPSCPSHTAAAPAFSPPAFHTHLASVASHLPSLLAALSRARAARLPLLPVTRALAASALLRHGRLPDALAHFSLLPDSDPTAPLPVPLCNSLLSALASSTGSLGHARKVFDRMLAGAVELNTVGFGVFVNAAGRKDDGLAEVLRLVDVVGCQGRRVNRSVVVAMLVDGMCREGRIEDAWRAMDEMRLRGWKPDFLAYRIVAEGFRVQGRVEEEGRILKQKRKLGVAPRKDEYRECVLVLVSNRLFREAKEIAEAVVLGDFPIDDDVLNILVGSVSEIDVDGAAMFCKFMMGKGRFPSTEMLAHLCESLCKSGKGDEMWEILRVLLDKGYCRNARGYHLVVSFLGKAGKVREAYDVLKEVKKKRLEPDISSYNSLMEALCRNDLLRPAKKLWDEMFTSGCSPNLQTYNILITKFTEMGESQEVQQLFDHMFQKGVAPDGATYTSFINMLCQENKYERALEVFNKSWMQDAGVASFVLSSFILALCKQASNRCWGSGDGH

SEQ ID NO: 169852 - protein, 277 aa, Zea Mays
MAAVGAKGTSQDPWSKVCASGEISSATAAKDVAGSVSQQLRHASEQLKHATAFTDHVASGALTSEFTAERQRLEGRIERLQAQHADAARDKSAAENRSRRLSERLVAAEAEKEDLMRQLAEERRDANRACAEAQAAQAKAKLARAKGSLARQRVEEMETRLGGLRDRLDKMEASTRVEVERTHSQLVDAYWELGARTAPFEAPGQDVGLCFLGWLQEELEVLSTILTGLMSFASLVTCEGGVNALSREGCGHFEVFDQSDKGFEREIFQVEDPELKR

SEQ ID NO: 169853 - protein, 195 aa, Zea Mays
MARPWFLLLFCARAPSRRTQLQLARPLPRALAPSRSFLRVLVGRSSWLVSFQLAHLRAAVSSSSVLLSARLRRVAFPFPAMVVDPCCAAPSAPSLPQHTPVVLPARRARYSLCSPVFTPARFQRRGLAKIPVELVPARAFSARIFLKSSCAQLAPTPVRSGRQSSILPVVVVVCRRVFRRRPCLVLYQEKTNLAA

SEQ ID NO: 169854 - protein, 55 aa, Zea Mays
MGLLDSLYRVVMRRNAVYVTFVVAGAFAGERVVDYGVHKIWEMNNLGEHLLTITF

SEQ ID NO: 169855 - protein, 394 aa, Zea Mays
MYTSGSTGLPKGVMITHGNMVATTAAVMTIVPKLGMNDVYLAYLPLAHVFELAGETVMLASGTAIGYGSTLTMTDTSNKIKKGTKGDVSVLNPTLIISVPAILDRIRDAVFKKVGEKGGLTKKLFDFAYKRNLASIEGSWFGSWAPERMIWDTIIYKPIRAMLGGRVRFVLCGGAPLSGDTQRFMNICLGVPVGQGYGLTETCAGAAFTEWDDTSVGRVGPPLPCCYVKLVSWEEGGYKISDYPMPRGEVVVGGHSITKGYFSNEAKTNEVYKVDERGIRWFYTGDIGQFHPDGCLEIIDRKKDIVKLQHGEYVSLGKVESALATSSYVESIMVYADPFHNYCVALVVPVRQALEKWAQNSGINCEGFEELCQNGQAVKEVQQSLSKRHKIFLS

SEQ ID NO: 169856 - protein, 127 aa, Zea Mays
MNPSGIDLCPLTINKLMCVKIGPNTYPNRIKTHQVSSIHYHLYHQPTKGHPGSHQPGRLKYSIQSGCHSTACYIEKVQDQDKGIWKMCGELPGHDCWPCRLQSKGVAELILGIASSPRMHQIIAENT

SEQ ID NO: 169857 - protein, 316 aa, Zea Mays
MVELEPSVKSEHGGGVGLVLPPGFRFHPTDEEVITSYLLHKFLNPSFAPHAIGEVDLNKCEPWDLPSKAKMGENSKEWYFFCHKDMKYPTGTRANRATKEGYWKATGKDREIFKPAAGRDRDRELVGMRKTLVFYMGRAPRGTKTNWVMHEFRLEGKSRHTCNDLRFNPKDEWVVCKVHHKGAEEASAAKKSAGGGGEEHYYSTATPNVSSVEGGDEFLVDSLLDYSSYFNCFATGGLPLPSTTANSAAAPATNDDDSSWSMLRHAPADQQAMVGSYSLHHQAMKAKTVGYSHLLYSFKTMSHQILFMEPCTLSFN

SEQ ID NO: 169858 - protein, 252 aa, Zea Mays
MGENSKEWYFFCHKDMKYPTGTRANRATKEGYWKATGKDREIFKPAAGRDRDRELVGMRKTLVFYMGRAPRGTKTNWVMHEFRLEGKSRHTCNDLRFNPKDEWVVCKVHHKGAEEASAAKKSAGGGGEEHYYSTATPNVSSVEGGDEFLVDSLLDYSSYFNCFATGGLPLPSTTANSAAAPATNDDDSSWSMLRHAPADQQAMVGSYSLHHQAMKAKTVGGVTSPSFSAGLPSSPVADYVGNDASGYHTNNY

SEQ ID NO: 169859 - protein, 510 aa, Zea Mays
MGSSSVLLFPSSSSAAPSAPHSFPHSHATAIASSHSLLPPLPCSNPPPPLSSQDHVLIHYIHQLDEQEAATMVRKRPAPDMDLPPPRRHVTGDLSDVTAAAAAGGGPGAPSSASAQLPALPTQLHQLPPAFQHHAAEVDVPPQPHPPAHSQAGGEAPASTTAWVDGIIRDIIGSSGGGAVSITQLIHNVREIIHPCNPGLASLLELRLRSLLAADPAPLPQQQRALLHGAPAAAAGLALPLPPPLPDKRRHEPAPRCQQQQQEEPHPAPQSPKVPTAEETAAASAAAAKERKEVQRRKQRDEEGLHLLTLLLQCAEAVNADNLDDAHQTLLEIAELATPFGTSTQRVAAYFAEAMSARVVSSCLGLYAPLPPGSPAAARLHGRVAAAFQVFNGISPFVKFSHFTANQAIQEAFEREERVHIIDLDIMQGLQWPGLFHILASRPGGPPRVRLTGLGASMEALEATGKRLSDFADTLGLPFEFCAVAVHWLHHSLYDVTGSDSNTLRLIQSC

SEQ ID NO: 169860 - protein, 234 aa, Zea Mays
MMVEAPDSVWASFAARKNNKSALHWRDKSFPYYDDLSKLYDGRYAEGRTRQGMDHYANKTKKASAPGGQATTVAETYQSPSPTLNGVDELGLQFSFDEEIEGNLGLSQYPSAQVHEKEVPPSSTQITSELPDSRRGKKKKNKSASPPDGFHERYLKLKKEEIDRFDAIEEKKLEDPYSINKCITVLEDLDGLQVGDLLMASDIFKIKDNMEVFLSFKNDALRLAWITSEIASLE

SEQ ID NO: 169861 - protein, 87 aa, Zea Mays
MHEFVDRISQAFFVAATMLPFGFQADEDKKDGLPTLPENEIELTLGAGADDPPTTISLRPEFQRDRLSQQSPEELSVQQASKEMMKD

SEQ ID NO: 169862 - protein, 276 aa, Zea Mays
MERTKRASMVSQVEEEEDGEHCTHKTVRKGLWSPVEDARLSSHITRYGVGTWSSVAELAGLERSGKSCRLRWMNYLQPDLSREPISRQEEDRIVSLQKLLGNRWSAIAARMPGRTDNEIKNYWNSLIKKKKKKKLKQSMDTGGGGGDYHQSLPGPEPEPEVHRTAAHEGSSAGMYTTTGTGHIDTSEVRVEHGGTTASHNNDSADHPRPSPLPQLPVFAGQVLLDPDAAVRNGEQTAAPAQASSLSLIPFPKSREMNFVEEYVQFLVSLSDDLLEI

SEQ ID NO: 169863 - protein, 65 aa, Zea Mays
MLRSLRCSTGWKRPHLKKSYISLRKNSKLKERKLLGSRKSCKHNYKLNRPHLKKTKVCCARPKRK

SEQ ID NO: 169864 - protein, 71 aa, Zea Mays
MNICELTLAVLKFLLGQGHVPQDKEHEGCRDEFVRGLGHRLPVNYGCGGSLSSYDVIIIYVVQNSYYIVKM

SEQ ID NO: 169865 - protein, 335 aa, Zea Mays
MGSRFASAALRLLVCAALLLGCCHGRFVVEKNSLKVTAPDDLKGTYECAIGNFGVPQYGGTMVGFVAYPKANRKACKSFDDFDISYKAKPGAFPTFLLVDRGAVLKALCAGFKETTEPAVCLSEDIQTNECLENNGGCWQDKAANITACKDTFRGRVCECPIVKGVKFVGDGYSHCEASGSGRCEINNGGCWKDTKNGRTYSACNDDGCKCPDGFKGDGRHKCEDIDECKERTVCQCKECKCKNTWGSYECGCSGGLLYMKEHDTCISKSGASEAGWGFLWVIFFGLVAAGVAGYAVYKYRIRRYMDSEIRAIMAQYMPLDNQGDVQSHSHHIEM

SEQ ID NO: 169866 - protein, 208 aa, Zea Mays
MGICCGKAKAAAGEPDDDEGLGFPWMHDDLFHSHLWASAGVSVHTKQGWKGANQDAMTVCQIWDVLSNKEVVKLVSSAPDPSKAARQLIDRAVRAWRRKYPTSMVDDCAVVCLYLNRRASPAPVESSSGLLPVPDDVRPAAPFTGSSFRRALTSNGQAVSEEGTTAVWRALEGVARANSVIRLPRVGRVLSWRRRSTSLDEDDGGERD

SEQ ID NO: 169867 - protein, 567 aa, Zea Mays
MGSTSGTPRRPRWRGPGRSGGSRWPAGSRSPTWLSLKWCLGLTDLGIQLLALKCRKLTSLDLSYTMITKASLPPIMKLPSLQELTLVGCIAIDDDALGSLERECSKSLQVLHMSQCQNITGVGVSSILKSVPNLLELELSYCCPVTPSMVRSFQKLAKLQTLKLEGSKFMADGLKAIGTSCASLRELSLSKSSGVTDTELSFAVSRLKNLLKLDITCCRNITDVSLAAITSSCSSLISMRMESCSRVSSGALQLIGKHCSRLEELDLTDSDLDDEGLKALARCSELSSLKIGICLKISDEGLTHIGRSCPKLREIDLYRCGGLSDDGIIQIAQSCPMLESINLSYCTEITDRSLISLSKCSKLNTLEIRGCPRVSSIGLSETAMGCRLLSKLDIKKCFGINDAGMLYLSQFSHSLRQINLSYCSVTDIGLLSLSCISGLQNMTIVHVAGITPNGLAATLMVCGGLTKVKLHEAFRSMMLPHMIKNVEARGCVFQWIDKPFKVFYGSPGCLTHSIRPLCSPTRSCLICYSKTLHTICFRKAWFYSAVFCAARSKCNAVFFSVLSVYCL

SEQ ID NO: 169868 - protein, 419 aa, Zea Mays
MVRSFQKLAKLQTLKLEGSKFMADGLKAIGTSCASLRELSLSKSSGVTDTELSFAVSRLKNLLKLDITCCRNITDVSLAAITSSCSSLISMRMESCSRVSSGALQLIGKHCSRLEELDLTDSDLDDEGLKALARCSELSSLKIGICLKISDEGLTHIGRSCPKLREIDLYRCGGLSDDGIIQIAQSCPMLESINLSYCTEITDRSLISLSKCSKLNTLEIRGCPRVSSIGLSETAMGCRLLSKLDIKKCFGINDAGMLYLSQFSHSLRQINLSYCSVTDIGLLSLSCISGLQNMTIVHVAGITPNGLAATLMVCGGLTKVKLHEAFRSMMLPHMIKNVEARGCVFQWIDKPFKVFYGSPGCLTHSIRPLCSPTRSCLICYSKTLHTICFRKAWFYSAVFCAARSKCNAVFFSVLSVYCL

SEQ ID NO: 169869 - protein, 338 aa, Zea Mays
MPWHLSARSFNFADSPSSHGAQPLCRGLSTLSPSAGALPNPHFGHFSLLRVSSSSVARTKLSARRGRFLARAAVLSQLPAACSSSGSAATSPSFLSSLRALLHCVDPHISLSSCVCAASSSRRVPSSPVELLPRAWIRPLTPSHMFFFPQLVDVVVPCAWPSEFVGHHDIPDIPVYRAMLWLLICAVPIRQSVPSPSNSYSSSRQTPSTLPHPVVVVPSPRFDASPYVLSPTCVRVDKRIPRKYREASSWSMPKCSVKGQNQNHRRLCGVLLNIERFQELWMEKKVKLHSILVSCLIEDFNRRLSSFPQTLNQVDNGELNHYFYYRFYDREIRRVVCV

SEQ ID NO: 169870 - protein, 185 aa, Zea Mays
MAATSPTPTLAKPAAAAHARAPSAGPRRVSLTSCRCHRRRSTPSRWRSLPRCSRRGGKPVVTEVIDAAAPDKGPETGSKGEEEKEAVAGRGAPGWLRLDGVAADILAIAAPAVLALAADPITALVDTAFVGHIGSAQLAAVGASTSIFNLVSKLFNVPLLNVTTSFVAEQQAKDGNSNTGGEILT

SEQ ID NO: 169871 - protein, 287 aa, Zea Mays
MAATSPTPTLAKPAAAAHARAPSAGPRRVSLTSCRCHRRRSTPSRWRSLPRCSRRGGKPVVTEVIDAAAPDKGPETGSKGEEEKEAVAGRGAPGWLRLDGVAADILAIAAPAVLALAADPITALVDTAFVGHIGSAQLAAVGASTSIFNLVSKLFNVPLLNVTTSFVAEQQAKDGNSNTGGERDEFLTPLEKARQPKKVLPAVSTSLALAAGIGLLEMVALIVGSGTLMNIIGFTNASTSRTVSYTEGTWCSTDHSGTCSSGCISWISGYEDTIVCCGCWQPIKCIT

SEQ ID NO: 169872 - protein, 282 aa, Zea Mays
MAATSPTPTLAKPAAAAHARAPSAGPRRVSLTSCRCHRRRSTPSRWRSLPRCSRRGGKPVVTEVIDAAAPDKGPETGSKGEEEKEAVAGRGAPGWLRLDGVAADILAIAAPAVLALAADPITALVDTAFVGHIGSAQLAAVGASTSIFNLVSKLFNVPLLNVTTSFVAEQQAKDGNSNTGGERDEFLTPLEKARQPKKVLPAVSTSLALAAGIGLLEMVALIVGSGTLMNIIGIPVDSPMRAPAEQFLTLRALGAPPIIVALAAQGAFRGFLDTRTPLYAVG

SEQ ID NO: 169873 - protein, 349 aa, Zea Mays
MAATSPTPTLAKPAAAAHARAPSAGPRRVSLTSCRCHRRRSTPSRWRSLPRCSRRGGKPVVTEVIDAAAPDKGPETGSKGEEEKEAVAGRGAPGWLRLDGVAADILAIAAPAVLALAADPITALVDTAFVGHIGSAQLAAVGASTSIFNLVSKLFNVPLLNVTTSFVAEQQAKDGNSNTGGERDEFLTPLEKARQPKKVLPAVSTSLALAAGIGLLEMVALIVGSGTLMNIIGIPVDSPMRAPAEQFLTLRALGAPPIIVALAAQGAFRGFLDTRTPLYAVGAGNLLNALLDVVLIFPLGLGVSGAALATVTSEYLTAIILLWKLNDEVDLLSWNIIEDGVIRYLKSAT

SEQ ID NO: 169874 - protein, 1021 aa, Zea Mays
MGGRGGGEEEGVADGGRHGRRTNVGGGGGEDSRDEGWRRWSVLVATVWIQALTGTNFDFSAYSSALKSSLGVSQEALNCLATASDLGKALGWSSGLALLHMPLHAVLMVSAAMGLAAYAVQYYCLAFAGGPAAGAGASSSVAVPYPLVFLVCLIAGCSICWFNTVCFVLCIRSFSASNRSLALSLSISFNGLSAAFYTLFANALSPFSPAVYLLLNAILPLGVSVLALPAILLCHQNDGHVQSAPRHDGRVFLGLYILAFITGIYLVVFGSFTATSSTAWVILTGAMVLLALPFIIPACSSCSYVDTDGPDPASPLNHDDPHKPLLISNNHQMESNAMMQNPKENQMQGNCCGTVMGKGRLATLGEEHSAKKLIRCVDFWLYYTAYFCGATVGLVYSNNLGQIAQSLNQQSQLTMLLAVYSSCSFFGRLLSALPDLHRKMSLARTGWLAAALVPMPMAFFLMWKQQDGSTLVAGTALIGLSSGFIFAAAVSVTSELFGPNSVGVNHNILITNIPLGSLLYGQIAAMVYDANGQKMTVVDNRTGIVDTMTVCMGVKCYSTTFFVWACITFLGLASSIVLFIRTKSAYDTAASRSSCSAQLAAVGASTSIFNLVSKLFNVPLLNVTTSFVAEQQAKDGNSNTGGERDEFLTPLEKARQPKKVLPAVSTSLALAAGIGLLEMVALIVGSGTLMNIIGIPVDSPMRAPAEQFLTLRALGAPPIIVALAAQGAFRGFLDTRTPLYAVGAGNLLNALLDVVLIFPLGLGVSGAALATVTSEYLTAIILLWKLNDEVDLLSWNIIEDGVIRYLKSGGLLIGRTIAVFLTLTLATSLAAREGPVPMAGYEICLQVWLTISLLNDALALAGQALLASEYAKGNYKQARTVLYRVLQVGGVTGFVLAASLFVGFGSLSLLFTDDPAVLDVARSGVWFVTISQPVNAIAFVADGLYYGVSDFAYAAYSTFFAGAVSSIFLLLAAPNYGLGGIWAGLTLFMSLRAVAGFWRLGSKGGPWNVILSGQIVSKTKI

SEQ ID NO: 169875 - protein, 97 aa, Zea Mays
MEIPSRRGDDRLQKTQTFSHFAQDFICKAKSILSINITIYRTKSKSKRILGTIRTAYCIKFVTFLRKRLLLLKSQKTKDQNGNPASHIISLIRQRKT

SEQ ID NO: 169876 - protein, 77 aa, Zea Mays
MDLKSGCRTLLLCMHSILCRCPHYISEIPLPSHVAGGKFLKIRLHVAGFLMLLSMNSRICSFSGFTFSYRLLIMTKH

SEQ ID NO: 169877 - protein, 532 aa, Zea Mays
MMSQMEGGCPVDYNTITDLFLQRNMIREATAFLLDVLKPNLPEHAFLQTKVLEINLVTYPNVADAILANGMFSHYDRPRIAQLCEKAGLYLRALQHYAELPDIKRAIVNTHAIEPQALVEFFGTLSREWALECMKDLLLVNLRGNLQIVVQAAKEYSEQLGVDACIKLFEQFKSYEGLYFFLGSYLSSSEDPEIHFKYIEAAARTGQIKEVERVTRESNFYDAEKTKNFLMEAKLPDARPLINVCDRFGFVPDLTHYLYTNNMLRYIEGYVQKVNPGNAPLVVGQLLDDECPEDFIKGLILSVRSLLPVEPLVDECEKRNRLRLLTQFLEHLVSEGSQDVHVHNALGKIIIDSNNNPEHFLTTNPFYDSRVVGKYCEKRDPTLAVVAYRRGQCDDELIIVTNKNSLFKLQARYVVERMDGDLWDKVLQPENEYRRQLIDQVVSTALPESKSPEQVSAAVKAFMTADLPHELIELLEKIVLQNSAFSGNFNLQNLLILTAIKADPSRVMDYVNRLDNFDGPAVGEVAVEAQLY

SEQ ID NO: 169878 - protein, 61 aa, Zea Mays
MMSQMEGGCPVDYNTITDLFLQRNMIREATAFLLDVLKPNLPEHAFLQTKSLRSPSYCSAV

SEQ ID NO: 169879 - protein, 215 aa, Zea Mays
MAAANAPIAMREALTLTSLGIAPQFVTFTHVTMESEKYICVRETSPQNSVVIIDMAMPMQPLRRPITADSALMNPNTRILALKAQIPGTTQDHLQIFNIEAKTKIKSHQMPEQVVFWKWITPKLLGLVTQTSVYHWSIEGDSEPTKMFDRTANLANNQIINYRCDPAEKWLVLIGIAPGAPEVFSYRNLLLFTSLQQSTCQMSVENEYYCCPRSC

SEQ ID NO: 169880 - protein, 445 aa, Zea Mays
MAAANAPIAMREALTLTSLGIAPQFVTFTHVTMESEKYICVRETSPQNSVVIIDMAMPMQPLRRPITADSALMNPNTRILALKAQIPGTTQDHLQIFNIEAKTKIKSHQMPEQVVFWKWITPKLLGLVTQTSVYHWSIEGDSEPTKMFDRTANLANNQIINYRCDPAEKWLVLIGIAPGAPERPQLVKGNMQLFSVDQQRSQALEAHAASFATFKVVGNENPSTLICFASKTTNAGQITSKLHVIELGAQPGKPGFSKKQADLFFPPDFQDDFPVAMQVSQKYGLIYVITKLGLLFVYDLETAAAVYRNRISPDPIFLTAESSSTGGFYAINRRGQVLHATVNDATVVPFVSGQLNNLELAVNLAKRANLPGAENLVVQRFQELFAQTKYKEAAELAAESPQGLLRTPETVAKFQSVPVQAGQTPPLLQYFGTLLTRGKLNAFES

SEQ ID NO: 169881 - protein, 338 aa, Zea Mays
MAAANAPIAMREALTFVTFTHVTMESEKYICVRETSPQNSVVIIDMAMPMQPLRRPITADSALMNPNTRILALKAQIPGTTQDHLQIFNIEAKTKIKSHQMPEQVVFWKWITPKLLGLVTQTSVYHWSIEGDSEPTKMFDRTANLANNQIINYRCDPAEKWLVLIGIAPGAPERPQLVKGNMQLFSVDQQRSQALEAHAASFATFKVVGNENPSTLICFASKTTNAGQITSKLHVIELGAQPGKPGFSKKQADLFFPPDFQDDFPVAMQVSQKYGLIYVITKLGLLFVYDLETAAAVYRNRISPDPIFLTAESSSTGGFYAINRRGQVLHATVNDATV

SEQ ID NO: 169882 - protein, 952 aa, Zea Mays
MACGNPDCLYLHDVGSQEDSFTKDEIISAYTRTRVPQMASSVSQRRTGTVLPPPGDDFSHSAVVSAKHTFKNGTLNTTSQPRLSPPNSSSGRSTLPPAASWGQRDLNARITATGATSSQSHTKPKSESQSNPFSSSSAISSTKTPSSWNDDTSTAAKMPEGQQVSEKESKTLQPYKPGISKETQALSSLESSLDIDFSTIPSAWNDDDIVVSDGMPKGSDENQVPNKNGELTHPASKSLVLSKKDIEMNITSKNPSDFLSSLAISKLDVSTSDGDHSDTNITPKSLTSNAVECQSCHAAGEKMLEDIGSKDIDMEKISSQISSVTLGGNDKIQSMAGNQQPDVMPCTSIDVPMDQNFGRDRSHLNLNELLLPSENKDSSLSCQYSSDKRLAWSLKMQNCSVTPLNDTIDSAMLTDKPYSILLEGSEKPSYPPFVEFPSTWDTSLWNDTKNNAASTIDTITSSQMQTGFSSIDNTYALLNGGQDGLGTVYTHDNVSVYTRGRGNVSGHPGMGSHQHRAMGSVRTDSIGSFDKTISVNKDESRIISDTLSEFNPWDDSYSTANNFVRMLRESENNDVQCTAPSWKSGTGSKQSRFSFARQDNQGNLLDSSLRNCGIGTEQNFSLLPQNSRRNIYQNGLAFQSLENEFSNSNFPGLLDMATTGTSMSKISAPPGFSAPTRVPPPGFSTAFPSQDSLNPTPGFPSGILSHDGSIPLSRFPSFSSGVSAQEVSKLPTRLPSPFSSRFSSQDGPDPPSRFPFSSGFTSQDGSNQLYGSTNPENLLGGTVLGVDGNHYQSQFGRHSSDMEFDDPAILAVGKGLMPGIGDSGLEMKNTRASQLQPASSDPRFQLHVQPNVQSHQNMRFTDPVQDGLNHMNDNYLASRFLAQNHGPLSPYVQIPQQPRNSQVTNGHWDGWSESRQGNNIPMSDMSRILYPSEVNKLHMLGSNDIHNRAFGM

SEQ ID NO: 169883 - protein, 925 aa, Zea Mays
MRSSQHIQGLESPRWHLVFRKDVQALCYLLQEMISLTVRWFQPSIHSRMEHFQPRLSPPNSSSGRSTLPPAASWGQRDLNARITATGATSSQSHTKPKSESQSNPFSSSSAISSTKTPSSWNDDTSTAAKMPEGQQVSEKESKTLQPYKPGISKETQALSSLESSLDIDFSTIPSAWNDDDIVVSDGMPKGSDENQVPNKNGELTHPASKSLVLSKKDIEMNITSKNPSDFLSSLAISKLDVSTSDGDHSDTNITPKSLTSNAVECQSCHAAGEKMLEDIGSKDIDMEKISSQISSVTLGGNDKIQSMAGNQQPDVMPCTSIDVPMDQNFGRDRSHLNLNELLLPSENKDSSLSCQYSSDKRLAWSLKMQNCSVTPLNDTIDSAMLTDKPYSILLEGSEKPSYPPFVEFPSTWDTSLWNDTKNNAASTIDTITSSQMQTGFSSIDNTYALLNGGQDGLGTVYTHDNVSVYTRGRGNVSGHPGMGSHQHRAMGSVRTDSIGSFDKTISVNKDESRIISDTLSEFNPWDDSYSTANNFVRMLRESENNDVQCTAPSWKSGTGSKQSRFSFARQDNQGNLLDSSLRNCGIGTEQNFSLLPQNSRRNIYQNGLAFQSLENEFSNSNFPGLLDMATTGTSMSKISAPPGFSAPTRVPPPGFSTAFPSQDSLNPTPGFPSGILSHDGSIPLSRFPSFSSGVSAQEVSKLPTRLPSPFSSRFSSQDGPDPPSRFPFSSGFTSQDGSNQLYGSTNPENLLGGTVLGVDGNHYQSQFGRHSSDMEFDDPAILAVGKGLMPGIGDSGLEMKNTRASQLQPASSDPRFQLHVQPNVQSHQNMRFTDPVQDGLNHMNDNYLASRFLAQNHGPLSPYVQIPQQPRNSQVTNGHWDGWSESRQGNNIPMSDMSRILYPSEVNKLHMLGSNDIHNRAFGM

SEQ ID NO: 169884 - protein, 1104 aa, Zea Mays
MSDDGDRTCPLCAEEMDTTDQQLKPCKCGYDICVWCWHHIIDMAEKEETVGRCPACRTCYDKDRIVKMAATCDRTVADKNVEKKHKTQKVKPKAAPTAAATSTVESKKHLASVRVIQRNLVYIIGLPAHLCNESVLECREYFGQYGKVLKVSVSRPTGPPSQQASATSNISVYITYAKEEEAIRCIQAVHNFVLEGKVLRACFGTTKYCHAWLRNMACGNPDCLYLHDVGSQEDSFTKDEIISAYTRTRVPQMASSVSQRRTGTVLPPPGDDFSHSAVVSAKHTFKNGTLNTTSQPRLSPPNSSSGRSTLPPAASWGQRDLNARITATGATSSQSHTKPKSESQSNPFSSSSAISSTKTPSSWNDDTSTAAKMPEGQQVSEKESKTLQPYKPGISKETQALSSLESSLDIDFSTIPSAWNDDDIVVSDGMPKGSDENQVPNKNECQSCHAAGEKMLEDIGSKDIDMEKISSQISSVTLGGNDKIQSMAGNQQPDVMPCTSIDVPMDQNFGRDRSHLNLNELLLPSENKDSSLSCQYSSDKRLAWSLKMQNCSVTPLNDTIDSAMLTDKPYSILLEGSEKPSYPPFVEFPSTWDTSLWNDTKNNAASTIDTITSSQMQTGFSSIDNTYALLNGGQDGLGTVYTHDNVSVYTRGRGNVSGHPGMGSHQHRAMGSVRTDSIGSFDKTISVNKDESRIISDTLSEFNPWDDSYSTANNFVRMLRESENNDVQCTAPSWKSGTGSKQSRFSFARQDNQGNLLDSSLRNCGIGTEQNFSLLPQNSRRNIYQNGLAFQSLENEFSNSNFPGLLDMATTGTSMSKISAPPGFSAPTRVPPPGFSTAFPSQDSLNPTPGFPSGILSHDGSIPLSRFPSFSSGVSAQEVSKLPTRLPSPFSSRFSSQDGPDPPSRFPFSSGFTSQDGSNQLYGSTNPENLLGGTVLGVDGNHYQSQFGRHSSDMEFDDPAILAVGKGLMPGIGDSGLEMKNTRASQLQPASSDPRFQLHVQPNVQSHQNMRFTDPVQDGLNHMNDNYLASRFLAQNHGPLSPYVQIPQQPRNSQVTNGHWDGWSESRQGNNIPMSDMSRILYPSEVNKLHMLGSNDIHNRAFGM

SEQ ID NO: 169885 - protein, 1107 aa, Zea Mays
MTTMSDDGDRTCPLCAEEMDTTDQQLKPCKCGYDICVWCWHHIIDMAEKEETVGRCPACRTCYDKDRIVKMAATCDRTVADKNVEKKHKTQKVKPKAAPTAAATSTVESKKHLASVRVIQRNLVYIIGLPAHLCNESVLECREYFGQYGKVLKVSVSRPTGPPSQQASATSNISVYITYAKEEEAIRCIQAVHNFVLEGKVLRACFGTTKYCHAWLRNMACGNPDCLYLHDVGSQEDSFTKDEIISAYTRTRVPQMASSVSQRRTGTVLPPPGDDFSHSAVVSAKHTFKNGTLNTTSQPRLSPPNSSSGRSTLPPAASWGQRDLNARITATGATSSQSHTKPKSESQSNPFSSSSAISSTKTPSSWNDDTSTAAKMPEGQQVSEKESKTLQPYKPGISKETQALSSLESSLDIDFSTIPSAWNDDDIVVSDGMPKGSDENQVPNKNECQSCHAAGEKMLEDIGSKDIDMEKISSQISSVTLGGNDKIQSMAGNQQPDVMPCTSIDVPMDQNFGRDRSHLNLNELLLPSENKDSSLSCQYSSDKRLAWSLKMQNCSVTPLNDTIDSAMLTDKPYSILLEGSEKPSYPPFVEFPSTWDTSLWNDTKNNAASTIDTITSSQMQTGFSSIDNTYALLNGGQDGLGTVYTHDNVSVYTRGRGNVSGHPGMGSHQHRAMGSVRTDSIGSFDKTISVNKDESRIISDTLSEFNPWDDSYSTANNFVRMLRESENNDVQCTAPSWKSGTGSKQSRFSFARQDNQGNLLDSSLRNCGIGTEQNFSLLPQNSRRNIYQNGLAFQSLENEFSNSNFPGLLDMATTGTSMSKISAPPGFSAPTRVPPPGFSTAFPSQDSLNPTPGFPSGILSHDGSIPLSRFPSFSSGVSAQEVSKLPTRLPSPFSSRFSSQDGPDPPSRFPFSSGFTSQDGSNQLYGSTNPENLLGGTVLGVDGNHYQSQFGRHSSDMEFDDPAILAVGKGLMPGIGDSGLEMKNTRASQLQPASSDPRFQLHVQPNVQSHQNMRFTDPVQDGLNHMNDNYLASRFLAQNHGPLSPYVQIPQQPRNSQVTNGHWDGWSESRQGNNIPMSDMSRILYPSEVNKLHMLGSNDIHNRAFGM

SEQ ID NO: 169886 - protein, 143 aa, Zea Mays
MDDYAREMMELKTLVTRTLEKKGVLAKIRAELRASVFEAIEEEDRVMENDDGGNPALLGSCNDRAKQLHASPSGRLLTALVCEYLEWAQLSHTMKVYLPECNLPKDFWKNELKDFSNKSGAEGSRSAESGPLLLDVLEEKVVY

SEQ ID NO: 169887 - protein, 108 aa, Zea Mays
MGGRRMMSSESDPSLNAEHRSMRRAPSASVGNLPPMGRPISSSQQASDRRGGSSVSNTRKDEYNWRYDTTDDISEEVLRASTALESVQLDRKSRNLPTSWRHSGDGAE

SEQ ID NO: 169888 - protein, 140 aa, Zea Mays
MDDYAREMMELKTLVTRTLEKKGVLAKIRAELRASVFEAIEEEDRVMENDDGGNPALLGSCNDRAKQLHASPSECNLPKDFWKNELKDFSNKSGAEGSRSAESGPLLLDVLEGYLKYEACTQGLLLMVCGAFMLLSSYDL

SEQ ID NO: 169889 - protein, 165 aa, Zea Mays
MKVYLPECNLPKDFWKNELKDFSNKSGAEGSRSAESGPLLLDVLEGYLKYENLSQARMGGRRMMSSESDPSLNAEHRSMRRAPSASVGNLPPMGRPISSSQQASDRRGGSSVSNTRKDEYNWRYDTTDDISEEVLRASTALESVQLDRKSRNLPTSWRHSGDGAE

SEQ ID NO: 169890 - protein, 180 aa, Zea Mays
MMMAVILLCLVAVMTGLSNCMLHLQPKDFWKNELKDFSNKSGAEGSRSAESGPLLLDVLEGYLKYENLSQARMGGRRMMSSESDPSLNAEHRSMRRAPSASVGNLPPMGRPISSSQQASDRRGGSSVSNTRKDEYNWRYDTTDDISEEVLRASTALESVQLDRKSRNLPTSWRHSGDGAE

SEQ ID NO: 169891 - protein, 142 aa, Zea Mays
MCDLLWSDPEDTVDGWGLSPRGAGFLFGGNVVSSFNHSNNIDYICRAHQLVMEGYKWMFNSKIVTVWSAPNYCYRNQEVFLLRGQHQITFCDATQRTLELTVLSSAGPHVARRAQALQLSSQEVVFRMCKLSVIFSLQVHDL

SEQ ID NO: 169892 - protein, 247 aa, Zea Mays
MKELFKVGGDCPKTNYLFLGDFVDRGFYSVETFLLLLALKVRYPDRITLIRGNHESRQITQVYGFYDECLRKYGSVNVWRYCTDIFDYLSLSALIENKIFSVHGGLSPAITTLDQIRVIDRKQEVPHDGAMCDLLWSDPEDTVDGWGLSPRGAGFLFGGNVVSSFNHSNNIDYICRAHQLVMEGYKWMFNSKIVTVWSAPNYCYRCGNIAAILELDENLNKQFRVFEAAPHESRGVPAKRPAPDYFL

SEQ ID NO: 169893 - protein, 332 aa, Zea Mays
MGASDLDRQIEQLKRCEPLTEAEVKALCLKAMEILIEESNVQRVDAPVTICGDIHGQFYDMKELFKVGGDCPKTNYLFLGDFVDRGFYSVETFLLLLALKVRYPDRITLIRGNHESRQITQVYGFYDECLRKYGSVNVWRYCTDIFDYLSLSALIENKIFSVHGGLSPAITTLDQIRVIDRKQEVPHDGAMCDLLWSDPEDTVDGWGLSPRGAGFLFGGNVVSSFNHSNNIDYICRAHQLVMEGYKWMFNSKIVTVWSAPNYCYRNQEVFLLRGQHQITFCDATQRTLELTVLSSAGPHVARRAQALQLSSQEVVFRMCKLSVIFSLQVHDL

SEQ ID NO: 169894 - protein, 256 aa, Zea Mays
MGASDLDRQIEQLKRCEPLTEAEVKALCLKAMEILIEESNVQRVDAPVTVRYPDRITLIRGNHESRQITQVYGFYDECLRKYGSVNVWRYCTDIFDYLSLSALIENKIFSVHGGLSPAITTLDQIRVIDRKQEVPHDGAMCDLLWSDPEDTVDGWGLSPRGAGFLFGGNVVSSFNHSNNIDYICRAHQLVMEGYKWMFNSKIVTVWSAPNYCYRCGNIAAILELDENLNKQFRVFEAAPHESRGVPAKRPAPDYFL

SEQ ID NO: 169895 - protein, 198 aa, Zea Mays
MGASDLDRQIEQLKRCEPLTEAEVKALCLKAMEILIEESNVQRVDAPVTICGDIHGQFYDMKELFKVGGDCPKTNYLFLGDFVDRGFYSVETFLLLLALKVRYPDRITLIRGNHESRQITQVYGFYDECLRKYGSVNVWRYCTDIFDYLSLSALIENKIFSVHGGLSPAITTLDQTASKKYLMMGLCVTFYGLIQRTL

SEQ ID NO: 169896 - protein, 313 aa, Zea Mays
MGASDLDRQIEQLKRCEPLTEAEVKALCLKAMEILIEESNVQRVDAPVTICGDIHGQFYDMKELFKVGGDCPKTNYLFLGDFVDRGFYSVETFLLLLALKVRYPDRITLIRGNHESRQITQVYGFYDECLRKYGSVNVWRYCTDIFDYLSSICFFSLSALIENKIFSVHGGLSPAITTLDQIRVIDRKQEVPHDGAMCDLLWSDPEDTVDGWGLSPRGAGFLFGGNVVSSFNHSNNIDYICRAHQLVMEGYKWMFNSKIVTVWSAPNYCYRCGNIAAILELDENLNKQFRVFEAAPHESRGVPAKRPAPDYFL

SEQ ID NO: 169897 - protein, 446 aa, Zea Mays
MQVAEEHGHTCMGKIASHVEKRNLSDDLPVRKQSEAANKWNSRSGKETTCNDRKDNLLDDVTAKKQAGPEEEKETLGKMDHHVKKATIPDSLTVKKQTEASSKALSHCGNDRKIGRYSSRKYDDWRSKRTPDHEESFPPEKQVEVAYEETKVIIPSKKITHNEQSGACRENRKNSCVEETKNVEYNYEQQTAAGMRFREGEDSDMSISPPSRPVEPFDMIAHPIGSLTKEPFDPVLNRGATHQDSYAVTKEEYLGQFKRKNDRTFTDIDDSSRMRGSSIEEVTRPYIAAPTSDPYSLRYRGDGSFYRHPSSEDLNTTGISAGYGQIGGDSYPQATGSQTHNTRMHGGTSDDNYLSARYSLGYSGSRFSQPASTVPAFGLSGASSQRGSVIDKYSYGLSGPTGPQDSGINRYAPPDDGTSTRSKSSLAEQQYPFGQSGSSGGEWPHI

SEQ ID NO: 169898 - protein, 1308 aa, Zea Mays
MVMSESDDDDDEPQLNAVESYYFVDSTNDNEPVCFSTLPFLFGDTDDLPDCKKRLVLRGTGGDPGVKVYSEVVAWSLGLEGKQPQFAVLTAEGRRWVRLVRPLNSYEEMIRTVLITAHMLHFLMRKPHEPERTLWNHLCKVFNKFDVRPSEDDFRNHISLMKQFVAKDPILAKSEGSLPHEWGLTKGKTKAQFLLSYVMPRAVLCKVVNIVLKTILRVFVEGKSGKIFTEAGADHIDVKQPFITDDEDIDEMIVEDADNESDEEEDGDLFDSICAICDDGGDILCCDGPCMRSFHAKEGSGEDSYCDTLGYTEAEVEAMKLFLCKNCEYKQHQCFICGVLEPSNGAAAKVFLCNNATCGHFYHPKCVAQQLHPNNIDEASELEKKITDGFSFTCPIHWCFHCKGLEDRTQGPLQFAVCRRCPKSYHRKCLPREISFDEIEEKGVIIRAWELSKMILIYCLNHEIDSELETPVRDHIKFPRIEKPLQFVKKGANLLPKKKKRTYSESILEQPPKDTVKMKSKVRMQESEQNKHDTREVSVKSFTQNVVDTPVKKKGKLKENKQLPYVAKDHFVSSPKSVKEQEQELVPLPLSGIRKSSFPKVDSEIEKRVISILGNEISSLTIKDVTRNCSLPSTHVYSGRPTDKMPLGKIERSVQAVEAALKKLKNGGSVNDAKAVCEPDVLRQLARWHIVDRLHWYVESGDMIVDFCCGSNDFSRLMKEKLDKVQKKCHFKNYDLIQPQHHFCFEKRDWMTVQPNELPRGSQLIMGLNPPFGVKASLANKFIDKALTFKPKLIVLIVPKETKRLDKKKIPYDLIWEDSECLAGKSFYLPGSVDLNDNTVEGWNASAPPLYLWSHPHWTKKHMQVAEEHGHTCMGKIASHVEKRNLSDDLPVRKQSEAANKWNSRSGKETTCNDRKDNLLDDVTAKKQAGPEEEKETLGKMDHHVKKATIPDSLTVKKQTEASSKALSHCGNDRKIGRYSSRKYDDWRSKRTPDHEESFPPEKQVEVAYEETKVIIPSKKITHNEQSGACRENRKNSCVEETKNVEYNYEQQTAAGMRFREGEDSDMSISPPSRPVEPFDMIAHPIGSLTKEPFDPVLNRGATHQDSYAVTKEEYLGQFKRKNDRTFTDIDDSSRMRGSSIEEVTRPYIAAPTSDPYSLRYRGDGSFYRHPSSEDLNTTGISAGYGQIGGDSYPQATGSQTHNTRMHGGTSDDNYLSARYSLGYSGSRFSQPASTVPAFGLSGASSQRGSVIDKYSYGLSGPTGPQDSGINRYAPPDDGTSTRSKSSLAEQQYPFGQSGSSGGEWPHI

SEQ ID NO: 169899 - protein, 726 aa, Zea Mays
MVMSESDDDDDEPQLNAVESYYFVDSTNDNEPVCFSTLPFLFGDTDDLPDCKKRLVLRGTGGDPGVKVYSEVVAWSLGLEGKQPQFAVLTAEGRRWVRLVRPLNSYEEMIRTVLITAHMLHFLMRKPHEPERTLWNHLCKVFNKFDVRPSEDDFRNHISLMKQFVAKDPILAKSEGSLPHEWGLTKGKTKAQFLLSYVMPRAVLCKVVNIVLKTILRVFVEGKSGKIFTEAGADHIDVKQPFITDDEDIDEMIVEDADNESDEEEDGDLFDSICAICDDGGDILCCDGPCMRSFHAKEGSGEDSYCDTLGYTEAEVEAMKLFLCKNCEYKQHQCFICGVLEPSNGAAAKVFLCNNATCGHFYHPKCVAQQLHPNNIDEASELEKKITDGFSFTCPIHWCFHCKGLEDRTQGPLQFAVCRRCPKSYHRKCLPREISFDEIEEKGVIIRAWELSKMILIYCLNHEIDSELETPVRDHIKFPRIEKPLQFVKKGANLLPKKKKRTYSESILEQPPKDTVKMKSKVRMQESEQNKHDTREVSVKSFTQNVVDTPVKKKGKLKENKQLPYVAKDHFVSSPKSVKEQEQELVPLPLSGIRKSSFPKVDSEIEKRVISILGNEISSLTIKDVTRNCSLPSTHVYSGRPTDKMPLGKIERSVQAVEAALKKLKNGGSVNDAKAVCEPDVLRQLARWHTKLRVYISPFIHGTRYSSFGRHFTKVEKLVEIVDRLH

SEQ ID NO: 169900 - protein, 1088 aa, Zea Mays
MIVEDADNESDEEEDGDLFDSICAICDDGGDILCCDGPCMRSFHAKEGSGEDSYCDTLGYTEAEVEAMKLFLCKNCEYKQHQCFICGVLEPSNGAAAKVFLCNNATCGHFYHPKCVAQQLHPNNIDEASELEKKITDGFSFTCPIHWCFHCKGLEDRTQGPLQFAVCRRCPKSYHRKCLPREISFDEIEEKGVIIRAWELSKMILIYCLNHEIDSELETPVRDHIKFPRIEKPLQFVKKGANLLPKKKKRTYSESILEQPPKDTVKMKSKVRMQESEQNKHDTREVSVKSFTQNVVDTPVKKKGKLKENKQLPYVAKDHFVSSPKSVKEQEQELVPLPLSGIRKSSFPKVDSEIEKRVISILGNEISSLTIKDVTRNCSLPSTHVYSGRPTDKMPLGKIERSVQAVEAALKKLKNGGSVNDAKAVCEPDVLRQLARWHTKLRVYISPFIHGTRYSSFGRHFTKVEKLVEIVDRLHWYVESGDMIVDFCCGSNDFSRLMKEKLDKVQKKCHFKNYDLIQPQHHFCFEKRDWMTVQPNELPRGSQLIMGLNPPFGVKASLANKFIDKALTFKPKLIVLIVPKETKRLDKKKIPYDLIWEDSECLAGKSFYLPGSVDLNDNTVEGWNASAPPLYLWSHPHWTKKHMQVAEEHGHTCMGKIASHVEKRNLSDDLPVRKQSEAANKWNSRSGKETTCNDRKDNLLDDVTAKKQAGPEEEKETLGKMDHHVKKATIPDSLTVKKQTEASSKALSHCGNDRKIGRYSSRKYDDWRSKRTPDHEESFPPEKQVEVAYEETKVIIPSKKITHNEQSGACRENRKNSCVEETKNVEYNYEQQTAAGMRFREGEDSDMSISPPSRPVEPFDMIAHPIGSLTKEPFDPVLNRGATHQDSYAVTKEEYLGQFKRKNDRTFTDIDDSSRMRGSSIEEVTRPYIAAPTSDPYSLRYRGDGSFYRHPSSEDLNTTGISAGYGQIGGDSYPQATGSQTHNTRMHGGTSDDNYLSARYSLGYSGSRFSQPASTVPAFGLSGASSQRGSVIDKYSYGLSGPTGPQDSGINRYAPPDDGTSTRSKSSLAEQQYPFGQSGSSGGEWPHI

SEQ ID NO: 169901 - protein, 893 aa, Zea Mays
MVMSESDDDDDEPQLNAVESYYFVDSTNDNEPVCFSTLPFLFGDTDDLPDCKKRLVLRGTGGDPGVKVYSEVVAWSLGLEGKQPQFAVLTAEGRRWVRLVRPLNSYEEMIRTVLITAHMLHFLMRKPHEPERTLWNHLCKVFNKFDVRPSEDDFRNHISLMKQFVAKDPILAKSEGSLPHEWGLTKGKTKAQFLLSYVMPRAVLCKVVNIVLKTILRVFVEGKSGKIFTEAGADHIDVKQPFITDDEDIDEMIVEDADNESDEEEDGDLFDSICAICDDGGDILCCDGPCMRSFHAKEGSGEDSYCDTLGYTEAEVEAMKLFLCKNCEYKQHQCFICGVLEPSNGAAAKVFLCNNATCGHFYHPKCVAQQLHPNNIDEASELEKKITDGFSFTCPIHWCFHCKGLEDRTQGPLQFAVCRRCPKSYHRKCLPREISFDEIEEKGVIIRAWELSKMILIYCLNHEIDSELETPVRDHIKFPRIEKPLQFVKKGANLLPKKKKRTYSESILEQPPKDTVKMKSKVRMQESEQNKHDTREVSVKSFTQNVVDTPVKKKGKLKENKQLPYVAKDHFVSSPKSVKEQEQELVPLPLSGIRKSSFPKVDSEIEKRVISILGNEISSLTIKDVTRNCSLPSTHVYSGRPTDKMPLGKIERSVQAVEAALKKLKNGGSVNDAKAVCEPDVLRQLARWHTKLRVYISPFIHGTRYSSFGRHFTKVEKLVEIVDRLHWYVESGDMIVDFCCGSNDFSRLMKEKLDKVQKKCHFKNYDLIQPQHHFCFEKRDWMTVQPNELPRGSQLIMGLNPPFGVKASLANKFIDKALTFKPKLIVLIVPKETKRLDKKKIPYDLIWEDSECLAGKLKGGMHPRHPSICGVILIGQRSTCKWLKSMVTLAWGR

SEQ ID NO: 169902 - protein, 778 aa, Zea Mays
MVMSESDDDDDEPQLNAVESYYFVDSTNDNEPVCFSTLPFLFGDTDDLPDCKKRLVLRGTGGDPGVKVYSEVVAWSLGLEGKQPQFAVLTAEGRRWVRLVRPLNSYEEMIRTVLITAHMLHFLMRKPHEPERTLWNHLCKVFNKFDVRPSEDDFRNHISLMKQFVAKDPILAKSEGSLPHEWGLTKGKTKAQFLLSYVMPRAVLCKVVNIVLKTILRVFVEGKSGKIFTEAGADHIDVKQPFITDDEDIDEMIVEDADNESDEEEDGDLFDSICAICDDGGDILCCDGPCMRSFHAKEGSGEDSYCDTLGYTEAEVEAMKLFLCKNCEYKQHQCFICGVLEPSNGAAAKVFLCNNATCGHFYHPKCVAQQLHPNNIDEASELEKKITDGFSFTCPIHWCFHCKGLEDRTQGPLQFAVCRRCPKSYHRKCLPREISFDEIEEKGVIIRAWELSKMILIYCLNHEIDSELETPVRDHIKFPRIEKPLQFVKKGANLLPKKKKRTYSESILEQPPKDTVKMKSKVRMQESEQNKHDTREVSVKSFTQNVVDTPVKKKGKLKENKQLPYVAKDHFVSSPKSVKEQEQELVPLPLSGIRKSSFPKVDSEIEKRVISILGNEISSLTIKDVTRNCSLPSTHVYSGRPTDKMPLGKIERSVQAVEAALKKLKNGGSVNDAKAVCEPDVLRQLARWHTKLRVYISPFIHGTRYSSFGRHFTKVEKLVEIVDRLHWYVESGDMIVDFCCGSNDFSRLMKEKLDKVQKKCHFKNYDLIQPQDLQTKTV

SEQ ID NO: 169903 - protein, 695 aa, Zea Mays
MVMSESDDDDDEPQLNAVESYYFVDSTNDNEPVCFSTLPFLFGDTDDLPDCKKRLVLRGTGGDPGVKVYSEVVAWSLGLEGKQPQFAVLTAEGRRWVRLVRPLNSYEEMIRTVLITAHMLHFLMRKPHEPERTLWNHLCKVFNKFDVRPSEDDFRNHISLMKQFVAKDPILAKSEILRVFVEGKSGKIFTEAGADHIDVKQPFITDDEDIDEMIVEDADNESDEEEDGDLFDSICAICDDGGDILCCDGPCMRSFHAKEGSGEDSYCDTLGYTEAEVEAMKLFLCKNCEYKQHQCFICGVLEPSNGAAAKVFLCNNATCGHFYHPKCVAQQLHPNNIDEASELEKKITDGFSFTCPIHWCFHCKGLEDRTQGPLQFAVCRRCPKSYHRKCLPREISFDEIEEKGVIIRAWELSKMILIYCLNHEIDSELETPVRDHIKFPRIEKPLQFVKKGANLLPKKKKRTYSESILEQPPKDTVKMKSKVRMQESEQNKHDTREVSVKSFTQNVVDTPVKKKGKLKENKQLPYVAKDHFVSSPKSVKEQEQELVPLPLSGIRKSSFPKVDSEIEKRVISILGNEISSLTIKDVTRNCSLPSTHVYSGRPTDKMPLGKIERSVQAVEAALKKLKNGGSVNDAKAVCEPDVLRQLARWHTKLRVYISPFIHGTRYSSFGRHFTKVEKLVEIVDRLHWYVESGDM

SEQ ID NO: 169904 - protein, 703 aa, Zea Mays
MVMSESDDDDDEPQLNAVESYYFVDSTNDNEPVCFSTLPFLFGDTDDLPDCKKRLVLRGTGGDPGVKVYSEVVAWSLGLEGKQPQFAVLTAEGRRWVRLVRPLNSYEEMIRTVLITAHMLHFLMRKPHEPERTLWNHLCKVFNKFDVRPSEDDFRNHISLMKQFVAKDPILAKSEILRVFVEGKSGKIFTEAGADHIDVKQPFITDDEDIDEMIVEDADNESDEEEDGDLFDSICAICDDGGDILCCDGPCMRSFHAKEGSGEDSYCDTLGYTEAEVEAMKLFLCKNCEYKQHQCFICGVLEPSNGAAAKVFLCNNATCGHFYHPKCVAQQLHPNNIDEASELEKKITDGFSFTCPIHWCFHCKGLEDRTQGPLQFAVCRRCPKSYHRKCLPREISFDEIEEKGVIIRAWELSKMILIYCLNHEIDSELETPVRDHIKFPRIEKPLQFVKKGANLLPKKKKRTYSESILEQPPKDTVKMKSKVRMQESEQNKHDTREVSVKSFTQNVVDTPVKKKGKLKENKQLPYVAKDHFVSSPKSVKEQEQELVPLPLSGIRKSSFPKVDSEIEKRVISILGNEISSLTIKDVTRNCSLPSTHVYSGRPTDKMPLGKIERSVQAVEAALKKLKNGGSVNDAKAVCEPDVLRQLARWHTKLRVYISPFIHGTRYSSFGRHFTKVEKLVEFVDKCYCAILMENIISRLENKI

SEQ ID NO: 169905 - protein, 192 aa, Zea Mays
MLQIFYESQEFFLLKELEKMGPKKGVISQSVKDVVQSLVDDDLVLKDKIGTSVYFWSLPSCAGNQLRNTYNKLESDLSNSRKRYMDLVEHRDNLKRGREDSEEREAALEELKTVELHHKKLKEELAAYADSDPAAVEAMKDATDIAHSAANRWTDNIFTLQQWCSTTFPEAKEQLEHMYREVGITEDFEYLQ

SEQ ID NO: 169906 - protein, 220 aa, Zea Mays
MDGTGDLFKDAAFRSKCSCRLSKKRGLSLEEKREQMLQIFYESQEFFLLKELEKMGPKKGVISQSVKDVVQSLVDDDLVLKDKIGTSVYFWSLPSCAGNQLRNTYNKLESDLSNSRKRYMDLVEHRDNLKRGREDSEEREAALEELKTVELHHKKLKEELAAYADSDPAAVEAMKDATDIAHSAANRQHFHFATMVFNHIPRSKRTTGTYVQGGWDHRRF

SEQ ID NO: 169907 - protein, 250 aa, Zea Mays
MSKKRGLSLEEKREQMLQIFYESQEFFLLKELEKMGPKKGVISQSVKDVVQSLVDDDLVLKDKIGTSVYFWSLPSCAGNQLRNTYNKLESDLSNSRKRYMDLVEHRDNLKRGREDSEEREAALEELKTVELHHKKLKEELAAYADSDPAAVEAMSMRWPLYTTLRMLLILLIQQLTGGQTTFSLCNNGVQPHSQKQKNNWNICTGRLGSQKILSICSDVQQPITASKMCHGMLDRSQMQVYHVGAVSYLQ

SEQ ID NO: 169908 - protein, 180 aa, Zea Mays
MLKELEKMGPKKGVISQSVKDVVQSLVDDDLVLKDKIGTSVYFWSLPSCAGNQLRNTYNKLESDLSNSRKRYMDLVEHRDNLKRGREDSEEREAALEELKTVELHHKKLKEELAAYADSDPAAVEAMKDATDIAHSAANRWTDNIFTLQQWCSTTFPEAKEQLEHMYREVGITEDFEYLQ

SEQ ID NO: 169909 - protein, 199 aa, Zea Mays
MSKKRGLSLEEKREQMLQIFYESQEFFLLKELEKMGPKKGVISQSVKDVVQSLVDDDLVLKDKIGTSVYFWSLPSCAGNQLRNTYNKLESDLSNSRKRYMDLVEHRDNLKRGREDSEEREAALEELKTVELHHKKLKEELAAYADSDPAAVEAMKDATDIAHSAANRWTDNIFTLQQWCSTTFPEAKEQLEHMYREYAA

SEQ ID NO: 169910 - protein, 209 aa, Zea Mays
MSKKRGLSLEEKREQMLQIFYESQEFFLLKELEKMGPKKGVISQSVKDVVQSLVDDDLVLKDKIGTSVYFWSLPSCAGNQLRNTYNKLESDLSNSRKRYMDLVEHRDNLKRGREDSEEREAALEELKTVELHHKKLKRMLLILLIQQLTGGQTTFSLCNNGVQPHSQKQKNNWNICTGSMLPDFQLIKYVSLCNVIYPQVSRTLVPLCL

SEQ ID NO: 169911 - protein, 56 aa, Zea Mays
MYIPSRLYIKYICEKMTYIRTTIPTLVKIMYLFLYTRYVALLDIINISFFTGNTKE

SEQ ID NO: 169912 - protein, 136 aa, Zea Mays
MALPPPDNICSLFQLENGCAGVFVFAVNSRSPKILWRVDGTKGTIQVERGVDSGKHGYQVLFSGENGQCQKTFYPFCGVNEELKTFVHDMLEAGKDGDHKAAPRGSYVEGARDVAVLEAMLESSAKQGAPVQVKRF

SEQ ID NO: 169913 - protein, 293 aa, Zea Mays
MAGDGNGRAELPRIAVIGAGIFARTQYIPRLREIAHLVVLKSIWSRTQESAKAAAELARDFAPDIECKWGDAGLEEIMGDSSIMGVAIVLAGQVQVELSLKMLKAGKHVIQEKPASGSTTEAETALSIYHSFQNLFPHKPIWAVGENYRFEPAFIESSKLINDIGDMMHIQVIIEGSMNSSNPYFNSTWRRNFVGGFILDMGVHFIAGLRMLVGSEITSVSSISRHVDMALPPPDNICSLFQLENGCAGVFVFAVNSRSPKILWRVDGTKGTIQVERGVDSGKHGYQVCMIAL

SEQ ID NO: 169914 - protein, 216 aa, Zea Mays
MAGDGNGRAELPRIAVIGAGIFARTQYIPRLREIAHLVVLKSIWSRTQESAKAAAELARDFAPDIECKWGDAGLEEIMGDSSIMGVAIVLAGQVQVELSLKMLKAGKHVIQEKPASGSTTEAETALSIYHSFQNLFPHKPIWAVGENYRFEPAFIESSKLINDIGDMMHIQVIIEGSMNSSNPYFNSTWRRNFVGGFILDMGVHFIAGLRMMRIFL

SEQ ID NO: 169915 - protein, 163 aa, Zea Mays
MLKAGKHVIQEKPASGSTTEAETALSIYHSFQNLFPHKPIWAVGENYRFEPAFIESSKLINDIGDMMHIQVIIEGSMNSSNPYFNSTWRRNFVGGFILDMGVHFIAGLRMVTSSCYISKSPFFSQKTQEIWASLRRIEGVRTQQHLHHTPKHNALTQHTLQQP

SEQ ID NO: 169916 - protein, 270 aa, Zea Mays
MAGDGNGRAELPRIAVIGAGIFARTQYIPRLREIAHLVVLKSIWSRTQESAKAAAELARDFAPDIECKWGDAGLEEIMGDSSIMGVAIVLAGQVQVELSLKMLKAGKHVIQEKPASGSTTEAETALSIYHSFQNLFPHKPIWAVGENYRFEPAFIESSKLINDIGDMMHIQVIIEGSMNSSNPYFNSTWRRNFVGGFILDMGVHFIAGLRMKSQAYLLSPVMWIWLCRHQITYVPSSNWKMDALVSLCLPSIQDHQRYYGGSMEQKEQFR

SEQ ID NO: 169917 - protein, 76 aa, Zea Mays
MTIFFPVARSHGAPPPLVFHGNPNHLLLPMAAPPVGFRTIAAAADMESSQCRAHSMLNEMSQRVTPRSVQPWPAMS

SEQ ID NO: 169918 - protein, 112 aa, Zea Mays
MNSISTGDEMQQLSELSVYMVLTSRMSRLPGAAMKTFCNSFFRQSSHHHGCVSASISEWNTYTYEIKLCNGCCSDPFQNRFSSRRVICRSFRILGDILDLISLEGFVVLAWF

SEQ ID NO: 169919 - protein, 182 aa, Zea Mays
MRQFVKYSRFKQFALRALASTLNSEEMSDLRDQFNAIDVDKNGTISLEELKQALAKDVPWRLKGPRVLEIIEAIDSNTDGLVDFEEFVAATLHVHQLVEHDTEKWKSLSQAAFDKFDVDRDGYITPDELRMHTGMKGSIDPLLEEADIDKDGKISLDEFRRLLKTASMSARNVQTPRGVRKS

SEQ ID NO: 169920 - protein, 405 aa, Zea Mays
MGLCSSSTAARAASDPGAAAAGDAAAAKKGRGIVACGKRTDFGYDKDFEVRYSLGKLLGHGQFGYTFAAVDRASTERVAVKRIDKNKMVLPVAVEDVKREVKILKALQGHENVVHFYNAFEDDNYVYIVMELCEGGELLDRILAKKDSRYSEKDAAVVVRQMLKVAAECHLHGLVHRDMKPENFLFKSKKEDSPLKATDFGLSDFIKPGRQFRDIVGSAYYVAPEVLKRRSGPESDVWSIGVITYILLCGRRPFWDKTEDGIFKEVLKKKPDFRRKPWSNITSSAKDFVQKLLVKDPRARLTAAQALSHDWVREGGKASEIPLDISVLHNMRQFVKYSRFKQFALRALASTLNSEEMSDLRDQFNAIDVDKNGTISLEELKQALAKDVPWRLKGPRVLEIIEAMG

SEQ ID NO: 169921 - protein, 197 aa, Zea Mays
MAMRSRPRRSAGHLYHLRLPRLLFLLPFALLLILLARLPALLRRANAHGRQCMPAATDRPIPFPHPVPDPRLSLAIVTLADEDAGGPGARRSFRGVLAASARNKRAYAAAHGYSLVALPASAVDPSRPPSWSKVLALRAHLRHHHWLFWNDADTLVTNPEIPLERILFSVIGHNNFVESPDLVLTEDFGGVNAGMGD

SEQ ID NO: 169922 - protein, 257 aa, Zea Mays
MAGVRLVGVRPSPGRLERWVGSLPDAGSRGGRPTLPIRGVRSYFIRSIPPLGRVERGVRKARTSRPAMGGDLYALDFDGVLCDSCGESSLSAIKAAKVRWPSLFEQVDAAMEEWIVEQMYTLRPVVETGYENLLLVRLLVEIQIHSVRKSSSRFAEALLKELAGIDFPSERIYGLGTGPKVKVLQQLQQMLQHQGLKLHFIEDRLATLKNVIKEPALDNWNLYLVKWGYNTQKEREETEAIPRIQLIDLPDFSRQLK

SEQ ID NO: 169923 - protein, 195 aa, Zea Mays
MAGVRLVGVRPSPGRLERWVGSLPDAGSRGGRPTLPIRGVRSYFIRSIPPLGRVERGVRKARTSRPAMGGDLYALDFDGVLCDSCGESSLSAIKAAKVRWPSLFEQVDAAMEEWIVEQMYTLRPVVETGYENLLLVRLLVEIQIHSVRKSSVADGLSIQEILENWSKLKPTLMDEWQEDRESLVDLFGRVLSWNS

SEQ ID NO: 169924 - protein, 266 aa, Zea Mays
MVKNKGFLPATPSEIPIQRKQIRDIIFSLLPACKDPDIDTGVSFSADAIIANPAAYGHVHVAEALNIPIHIIFTMPWTPTCEFPHPFSHVKQPAGYRLSYQIVDSFVWLGIRDMINDLRKRKLKLRPVTYLSGTHAYSNDIPHAYIWSPYLVPKPKDWGPKIDVVGFCFLDLASDYEPPETLLRWLGSGDSPIYIGFGSLVSFYLLFRTNLMCLLFFLHVSHDYALKCFIYTWLNAVFILCILCWSVHSLFSIMWNKWKIELVGLL

SEQ ID NO: 169925 - protein, 190 aa, Zea Mays
MVKNKGFLPATPSEIPIQRKQIRDIIFSLLPACKDPDIDTGVSFSADAIIANPAAYGHVHVAEALNIPIHIIFTMPWTPTCEFPHPFSHVKQPAGYRLSYQIVDSFVWLGIRDMINDLRKRKLKLRPVTYLSGTHAYSNDIPHAYIWSPYLVPKPKGRCLMPGITPIKVNKKILKMPWYFFLLHHQDNCA

SEQ ID NO: 169926 - protein, 462 aa, Zea Mays
MKETSSSHVGGPGAEDVCSSSVSNNCFPQDEGTSSSEMINTECSETSSEVSGSERTRPEHSKKASSVLGKKISIRKKLKMFSRMATLKDDGTVVVDIPTTIEAASLDLHSEDHQDVAFGGEPLDSSDLQDRPPMQIAMLIVGTRGDVQPFIAIGKRLQDYGHRVRLATHANFKDFVMTTGLEFYPLGGDPKILAGYMVKNKGFLPATPSEIPIQRKQIRDIIFSLLPACKDPDIDTGVSFSADAIIANPAAYGHVHVAEALNIPIHIIFTMPWTPTCEFPHPFSHVKQPAGYRLSYQIVDSFVWLGIRDMINDLRKRKLKLRPVTYLSGTHAYSNDIPHAYIWSPYLVPKPKDWGPKIDVVGFCFLDLASDYEPPETLLRWLGSGDSPIYIGFGSLVSFYLLFRTNLMCLLFFLHVSHDYALKCFIYTWLNAVFILCILCWSVHSLFSIMWNKWKIELVGLL

SEQ ID NO: 169927 - protein, 354 aa, Zea Mays
MFSRMATLKDDGTVVVDIPTTIEAASLDLHSEDHQDVAFGGEPLDSSDLQDRPPMQIAMLIVGTRGDVQPFIAIGKRLQDYGHRVRLATHANFKDFVMTTGLEFYPLGGDPKILAGYMVKNKGFLPATPSEIPIQRKQIRDIIFSLLPACKDPDIDTGVSFSADAIIANPAAYGHVHVAEALNIPIHIIFTMPWTPTCEFPHPFSHVKQPAGYRLSYQIVDSFVWLGIRDMINDLRKRKLKLRPVTYLSGTHAYSNDIPHAYIWSPYLVPKPKDWGPKIDVVGFCFLDLASDYEPPETLLRWLGSGDSPIYIGFGSLPIPEPDKLTRIIVQALEISGQRGIINKGWGGLGNCKL

SEQ ID NO: 169928 - protein, 63 aa, Zea Mays
MVSLTRGTDAPGRVLTASPSSARARATTRATMAGHNLFSSARLGLQRIKGVLVTTTSSLLASP

SEQ ID NO: 169929 - protein, 203 aa, Zea Mays
MLDRSIREIERERQGLQAQEKKLITEIKKTAKEGQMGAVKVMAKDLIRTRHQITKFYQLKSQLQGVSLRVQTLKSTQAMGDAMKGVTKAMSQMNRQLNLPGLQRIMQEFERQNERMEMVSEVMGDAIDDALEGDEEEEETEELVNQVLDEIGIDINQELVGAPSATVAQPASVGRVAQAESAGNADSGIDADLQARLDNLRRM

SEQ ID NO: 169930 - protein, 253 aa, Zea Mays
MRMLVYEYVNNGNLEQWLHGAMRQHGVLTWEARMKIILGIAKALAYLHEAIEPKVVHRDIKSSNILVDEEFNGKLSDFGLAKLLGAGKSHITTRVMGTFGYVAPEYANTGLLNERSDVYSFGVLLLESVTGRDPVDYGRPANEVHLVEWLKMMVGTRRAEEVVDPDMELKPATRALKRALLVALRCVDPDSEKRPTMGQVVRMLEAEDVPSREDRRSRRGHSGNADSESKASSSEFEISSDRRELGPSARFQS

SEQ ID NO: 169931 - protein, 511 aa, Zea Mays
MSAGGVLRAELSSRTPPFGLRLWIVIGICIWALILFILGFMCFWSLHRRKPGKPCDKVPLSQIPDVSKEIAVDEAREQAVVHSLRVQESHTLSVQEKKHCEKDSGKMLAHLVRSKSSDADNLSQCSSAFQCERAGSSYSGDEGSSGNARRQYSQTVSASPLVGLPEFSHLGWGHWFTLRDLEHATNRFSKENVIGEGGYGVVYRGRLINGTDVAIKKLLNNMGQAEKEFRVEVEAIGHVRHKNLVRLLGYCVEGIHRMLVYEYVNNGNLEQWLHGAMRQHGVLTWEARMKIILGIAKALAYLHEAIEPKVVHRDIKSSNILVDEEFNGKLSDFGLAKLLGAGKSHITTRVMGTFGYVAPEYANTGLLNERSDVYSFGVLLLESVTGRDPVDYGRPANETVQVHLVEWLKMMVGTRRAEEVVDPDMELKPATRALKRALLVALRCVDPDSEKRPTMGQVVRMLEAEDVPSREDRRSRRGHSGNADSESKASSSEFEISSDRRELGPSARFQS

SEQ ID NO: 169932 - protein, 243 aa, Zea Mays
MSGLYNQGFSPARTLSPQIRSNPDADSQYLAELLAEHQKLGPFMQVLPICSRLLNQEIMRVSSMVHDHGFSDLDRRRFRSPSPMSSPIVRPNLHGNGFGPWNGMHQERLGFPPPGTSMDWQGAPPSPGSYIVKKIMRLEVPVDSYPNFNFVGRILGPRGNSLKRVESSTGCRVFIRGKGSVKDTEKEDKLKGKPGYEHLNEPLHILIEAELPANIVDTRLRQAQEVMEELLKPVEEILATWRI

SEQ ID NO: 169933 - protein, 68 aa, Zea Mays
MSGLYNQGFSPARTLSPQIRSNPDADSQYLAELLAEHQKLGPFMQVLPICSRLLNQVQLCGTHSRAKG

SEQ ID NO: 169934 - protein, 187 aa, Zea Mays
MVPISSPLTPPLGDSEETDKKGAVVKRLKVQAIKKDIKQSPKKVNLVAKLVRGMRVEDALLQLQVTVKRAAKTVYQVIHSARANASHNHGLDPDKLIVEEAFVGKGLFLKRVSYHARGRSGIMVRPRCRLTVVVREATAEEEAKIAKLRVSNYKKLTRKEQQLMPHRLIEVSPRWIRKRKAEAGATA

SEQ ID NO: 169935 - protein, 685 aa, Zea Mays
MLNVILSGISAVDYAPIFSFHGLIPELAASLMAICEVFGCLSPSVSWTLRTGEEISAHTVFSNAFILLLRLWKFNHPPLEYCIMGDGAPVGSQLTPEYLLLLRNSQVLSSSSLSKQRNGQRQSQVSTSHPSSGNPIFMDSFPKLKLWYQQHQACLASTLSGLAHGTPVRNNVDSLLNQMFRKANKGGTSIGSLSGSSSISNSSSPGGDDSHLWPQLPAWEILEAVPFVVDAALTACSHGRLFPRELATGLKDLADFLPASLATIVSYFSAEVTRGVWKPASMNGSDWPSPSVNLSMVDEHIKKIVAATGVDVPKLVTGGSSSGTLPLPLAAFVSLTITYKLDKASECFLNLAGPALENLAASCPWPSMAIVAALWTQKVKRWSDFLIFSASRTVFHHNNDAVVQLLRSCFAATLGMSSTSVCSCGGVASLLGHGYCPGGFSPVAPGILYLRIFRCIKDCSILAEDILSLLMLSVKDIAETTVPRQRPDKLKKTKYGMRHGQVSLSAAMTQVKVAASLGATLVWLSGGTALVQSLIQEMLPSWFLSAQNLDQGGASGGVVYKLGGHALAYFAVYSGMLAWGIDQTPVSRRRERVMRSHLGFLASALAGKIFLGCDLSLWRAYVSGFLGLVVECTPCWVQEVDLRVLKRLSSGLRHWGEDELAVALLRRAGPEAMGTAAEMILGREL

SEQ ID NO: 169936 - protein, 796 aa, Zea Mays
MNHANSTSHTLPSQLAGWSSFMKGAPLTQPLVNMLVSTPASSLAEVDKLFEVAVDGSDDDSISAATVLCGATLLRGWNFQEHTVRLVVKLLSPSDPIDNSGRESQLIKLGPMLNVILSGISAVDYAPIFSFHGLIPELAASLMAICEVFGCLSPSVSWTLRTGEEISAHTVFSNAFILLLRLWKFNHPPLEYCIMGDGAPVGSQLTPEYLLLLRNSQVLSSSSLSKQRNGQRQSQVSTSHPSSGNPIFMDSFPKLKLWYQQHQACLASTLSGLAHGTPVRNNVDSLLNQMFRKANKGGTSIGSLSGSSSISNSSSPGGDDSHLWPQLPAWEILEAVPFVVDAALTACSHGRLFPRELATGLKDLADFLPASLATIVSYFSAEVTRGVWKPASMNGSDWPSPSVNLSMVDEHIKKIVAATGVDVPKLVTGGSSSGTLPLPLAAFVSLTITYKLDKASECFLNLAGPALENLAASCPWPSMAIVAALWTQKVKRWSDFLIFSASRTVFHHNNDAVVQLLRSCFAATLGMSSTSVCSCGGVASLLGHGYCPGGFSPVAPGILYLRIFRCIKDCSILAEDILSLLMLSVKDIAETTVPRQRPDKLKKTKYGMRHGQVSLSAAMTQVKVAASLGATLVWLSGGTALVQSLIQEMLPSWFLSAQNLDQGGASGGVVYKLGGHALAYFAVYSGMLAWGIDQTPVSRRRERVMRSHLGFLASALAGKIFLGCDLSLWRAYVSGFLGLVVECTPCWVQEVDLRVLKRLSSGLRHWGEDELAVALLRRAGPEAMGTAAEMILGREL

SEQ ID NO: 169937 - protein, 150 aa, Zea Mays
MDIWNTSPALAVPAVQGEANPGLALARRDSVTQLDERELKRERRKQSNRESARRSRLRKQQECEELARKVADLTTENSALRAELDNLRKACQDMEAENSRLLVPSVTTTLGMSIEPPKAQQHHDDEGQLHKKSSNNSNGKGSHKPEANTR

SEQ ID NO: 169938 - protein, 367 aa, Zea Mays
MASSSDEQPKPPEPPAAAVVAAPPQTHAEWAASLQAYYAAAGHPYAWPAQHLMAAAAAGAPFGTPVPFPVYHPGAAAAYYAHASMAAGVPYPTSEAVATVAAATAPEGKGKGKGGGASPEKGSSGAPSGEDDSRSDSGSDESSETRDDDTDHKGSSAPKKRKSGNTSAEGEPSQAAVVRYATVESPYPAKGRSASKLPVSAPGRAALPSATPNLNIGMDIWNTSPALAVPAVQGEANPGLALARRDSVTQLDERELKRERRKQSNRESARRSRLRKQQECEELARKVADLTTENSALRAELDNLRKACQDMEAENSRLLVPSVTTTLGMSIEPPKAQQHHDDEGQLHKKSSNNSNGKGSHKPEANTR

SEQ ID NO: 169939 - protein, 368 aa, Zea Mays
MASSSDEQPKPPEPPAAAVVAAPPQTHAEWAASLQAYYAAAGHPYAWPAQHLMAAAAAGAPFGTPVPFPVYHPGAAAAYYAHASMAAGVPYPTSEAVATVAAATAPEGKGKGKGGGASPEKGSSGAPSGEDDSRSSDSGSDESSETRDDDTDHKGSSAPKKRKSGNTSAEGEPSQAAVVRYATVESPYPAKGRSASKLPVSAPGRAALPSATPNLNIGMDIWNTSPALAVPAVQGEANPGLALARRDSVTQLDERELKRERRKQSNRESARRSRLRKQQECEELARKVADLTTENSALRAELDNLRKACQDMEAENSRLLVPSVTTTLGMSIEPPKAQQHHDDEGQLHKKSSNNSNGKGSHKPEANTR

SEQ ID NO: 169940 - protein, 74 aa, Zea Mays
MSRQRREMMTLTIRVHLRPRKGNLVTRRLKVNRLKLLLCAMLRLSRHIPQREGLPQSFQCLHLAGQRFLVPPRI

SEQ ID NO: 169941 - protein, 456 aa, Zea Mays
MATRRHILLLAAAFVSLLALEAVEGLEEGPRGRRLLVLLDDLAVRSSHSAFFGSLQARGFDLEFRLADDPKLSLHRYGQYLYDGLVLFAPSTPRFGGSVDQNAVLEFIDAGLDMILAADSSASDLIRGIATECGVDFDEDPEAMVIDHINYAAMDVEGDHTLIVGDDLIQSDVILGSKKIEAPVLFRGIGHTANPSNSLVLKVLSASPSAYSANPKTKLSLPPSLTGSAISLVSVMQARNNARVLLSGSLDLFSNRFLKSGVQKAGSKTRYERAGNEQFVTETSKWVFHERGHLKAVNVKHHKVGETNEPGMYRINDDLEYSVEIYEWSGTSWKPYVADDVQLQFFMMSPYVLKTMSNDNKGLYSTSFKVPDVYGVFQFKVEYQRLGYTGLSFTKQIPVRPYRHNEYERFITSAYPYYTASFSTDSRERTSFWRLLMRPRSVAKCYPVQFYGIIYL

SEQ ID NO: 169942 - protein, 64 aa, Zea Mays
MDANRRQGGIQQLLAAEQEAQQIVNAARAAKSARLRQAKEEAEREIAEYRAQMEAEFQRKVAEW

SEQ ID NO: 169943 - protein, 111 aa, Zea Mays
MSDLGYLRYFLGIEVSSTPKGFVSFRENTFRGFLIWLLLLINALLRLSWSSTFVFVALIANILWFLLAIVTMLVVWSTFVLLALISRILCIFRVSLYLLPLSPMPTVMRFG

SEQ ID NO: 169944 - protein, 66 aa, Zea Mays
MLLLTWYRGEQKKLNMPLLLWCGVFCTLLIPKWNSYDLGLERVCEDVLFQVLEFRSQIGLTSMLIP

SEQ ID NO: 169945 - protein, 501 aa, Zea Mays
MEGSSYASRSYSELAAAASGGGRTLRVIPLRHPLGSLSTSSTSPWWRAVVGRARGMGPLDWAEAALPCVAWTRNYRWKQDLQADLASGITVGVMLVPQAMSYAKLAGLHPIYGLYTGFVPLFIYAIFGSSRQLAVGPVALVSLLVSNVLGGIVNSSSKLYTELAILLAFMVGILECLMGLLRLGWLIRFISHSVISGFTTASAIVIGLSQIKYFLGYNVTRSSKIIPLIESIIAGADEFSWPPFVMGSIFLAILLIMKNTGKSNKRLHFLRVSGPLTAVVLGTIFVKIFHPPAISVVGEIPQGLPRFSIPQGFEHLMSLVPTAVLITGVAILESVGIAKALAAKNGYELDSNKELFGLGIANICGSFFSAYPATGSFSRSAVNHESGAKTGLSGIIMGIIIGGALLFMTPLFTDIPQCALAAIVISAVTGLVDYEEAIFLWAIDKKDFFLWAITFITTLVFGIEIGVLVGVAFSLAFVIHESANPHIGIHCSTLRLIRIMG

SEQ ID NO: 169946 - protein, 82 aa, Zea Mays
MDLSDEADLEDYVCRPDKISATDVELVSWHIPRFLCICCFLSIVLLGYLCPVLAKAVKTMRKAEKVLLIAKPHCFQVIIAEL

SEQ ID NO: 169947 - protein, 149 aa, Zea Mays
MCASPSARISPDPLYSLHHADPDPTPATTRIHCALHGHERERSCADLNQALHGRSAWFPLLHPMIRMPPHHGRWSGPSNPDARALRRVDLLDHAGARPQVRRRDHEVAASTCLSCSPLHTPPRGRSCGYSALAAEINGGILAVGRPRQH

SEQ ID NO: 169948 - protein, 142 aa, Zea Mays
MCASPSARISPDPLYSLHHADPDPTPATTRIHCALHGHERERSCADLNQALHGRSAWFPLLHPMIRMPPHHGRWSGPSNPDARALRRVDLLDHAGARPQVRRRDHEVAASTCLSCSPLHTPPRALAAEINGGILAVGRPRQH

SEQ ID NO: 169949 - protein, 150 aa, Zea Mays
MKQEAATSIVVTQEDVLHHYKEPPPRREDDPPALAASLSLPSSLSEDDGDAMPQPSSYAVLPRREGELVSAEELLLVPPLNFAMVDHGVYRSGFPDASNLPFLETLRLRSVLCLCPEPYPEANLEFLRAHGIKLFQFGIDGSKGGIILLF

SEQ ID NO: 169950 - protein, 118 aa, Zea Mays
MEWASEHCSSHYRAPELWECPSHADIDERTDIWSLGCTLYAMMYGKSPFDYELDESSGESLHSVIKNVQIKWPEEAGSTYPDSLRQFITWMLQPHPAVRPHIDDIIIHVDKLVMKYSN

SEQ ID NO: 169951 - protein, 325 aa, Zea Mays
MGLGDAGPAGSSVFLVKEVVAAATASDGTAGSEPGASGIAGKKGIDPSHISADGTYALKKVLVQSDQHLELVQQEIRVSSQFSHPNLLPLLEHAIVAVKGVQDGSQNYEAYLLFPVHLEGTLHDITKTMLEKKEFFPTITVLQIFRQLCSGLKHMHSFDPPYAHNGVKPDNVLITQRKQSHLAILMDFESAGPARKTIRSQAEALQLQEWASEHCSSHYRAPELWECPSHADIDERTDIWSLGCTLYAMMYGKSPFDYELDESSGESLHSVIKNVQIKWPEEAGSTYPDSLRQFITWMLQPHPAVRPHIDDIIIHVDKLVMKYSN

SEQ ID NO: 169952 - protein, 440 aa, Zea Mays
MTPAAPASAADALAQILQDLLPSVLLAAASVRALHSRWRALQASLLALQSSLVSAPASAPSHPLFADLVAALLPALRSLHALSVRCQDPGLPGGRLRLQSDLDMVPASAAPHADKSLFVRDAFARLQIGSLDLKLKALVSLLDLLGDDPTAEAAQIVATEGDVAALLRLLDASSHSALRDRAVTAVAHLATACAASRRVVFDEGGLGPLLRVLDSGSPPATRERSAAAIVAITGDAGSAWALSAYGGLPILINACRPGSGSPALQAFAVAAIKNVSSVDDVRSTLVEESGLPVLVDLLASGTAETQKSAALCLWALASMGDHKTQNQIVQAGALSPLLQALHIASDQDLHDSVLRAIHALTSAPAATRILCSSPLFFARLTDLICSSGSFLLQQMAADMIADLAPTVSDDTKRCMAPCIGTLIKLMEVAKPATIQESAGD

SEQ ID NO: 169953 - protein, 187 aa, Zea Mays
MEADPAPTSVMEEEVLLRFPPALQPNPLLCSWQEYPSRAHVCKDERVRDYFSEILWLHDHDFTDDELAFRQGYAMERQNQVSNLNKGRRVLVVIELSGDLYEDAWNRSYLASKWSLCSGSKLIGTSRSDKIVKFGTTRALTLNSLSHAAYWYFFKVLTFGSTPKACPSGQPECNFNICHLLFVEGQF

SEQ ID NO: 169954 - protein, 130 aa, Zea Mays
MERQNQVSNLNKGRRVLVVIELSGDLYEDAWNRSYLASKWSLCSGSKLIGTSRSDKIVKFGTTRALTLNSLSHAAYWYFFKYHRSSQEEVPEIRIQDVLYGSIKRHGKFEVLAWRSQIPPYYSYVHACEI

SEQ ID NO: 169955 - protein, 246 aa, Zea Mays
MDRPSGTSYQRFPRVRIRELKDDYAKFELRDTDASMANALRRVMIAEVPTVAIDLVEIEVNSSVLNDEFIAHRLGLIPLTSAAAMQMRFSRDCDACDGDGSCEYCSVEFHLSVHATDSDQTLEVTSNDLRSMDPKVCPVDQARAYQHALGGTDPFGANASNENRGILIVKLRRGQELRLRAIARKGIGKDHAKWSPAATVTFMYEPDIRINEELMETLTVEERISLIESSPTKVFELDSANQVLYL

SEQ ID NO: 169956 - protein, 253 aa, Zea Mays
MDRPSGTSYQRFPRVRIRELKDDYAKFELRDTDASMANALRRVMIAEVPTVAIDLVEIEVNSSVLNDEFIAHRLGLIPLTSAAAMQMRFSRDCDACDGDGSCEYCSVEFHLSVHATDSDQTLEVTSNDLRSMDPKVCPVDQARAYQHALGGTDPFGANASNENRGILIVKLRRGQELRLRAIARKGIGKDHAKWSPAATVTFMYEPDIRINEELMETLTVEERISLIESSPTKVFELDSANQRSMTNAYMMDV

SEQ ID NO: 169957 - protein, 1177 aa, Zea Mays
MAAAEDAEGDRVIEVVSAGALYHRGGDWERKYWSCSRGKDRYPYPVGYHAVRHFTGISYAMEIQQGPRGPIFLVTSTEGDTAIGQTPDIAWKNFQKKTGAKVKNWQRRKSFPQRIDGAELFGFKNASIQRLLRELIVDSTGAVELNEPCEVTSEAGAHLVCKDASDVSEAEDPSVCLGMESGTPKRSIEPSQVENTLAVHYPDMLTAVDKCNVSTHKNTNEGDTVGRALLQDVSDSRCTLPLLEEVPKNAQSTSLDDNLGESSLVSSQQVGLSSGSYLNSEKSDIELAEKEVAKSMMSILLPQAIPLLMKSYKRKKFKHKNRENSTVSVKTVSAYNPSDSCCRGVTVPTIVGEGTNGNSSEMCDHGGSHHDKVKNGFANEDCRNDDLVVKLDEMNDYVADSFEDDAQILGDNTTKSMGNHHHYSEYVLSRGPNEKSKLLNGKSEVFEYQASVHNGKRAPDVVYNHENGQYMLSDSLVACLEDEFGGEDSSHPANYNQFNGDVKQFEQQFKELTAVIKNGSSVPVDVSYHKNTDNGSINVCAQAFARNGPGVSRNEECLANILPAPVHSNAHNDAVTSGKHDVSSTLNLPPACEAKSTLLVMRDGQHHTEVPAIDQKENRFHSVSYKCTKSDDNTSFHSENVEFVDKHVAFESPDNGMYSSDGSQRAITTEGWPAGDGVKADEENLLGKVEECQIRYKNGNKNTILSVYGEGNVCEHIPTKGENDVFHHQPSHALSTTNCTHGLVSEDRTQARPDHHLELVGCYLHPMPVLSVMLNTKNHNSLYIYVLCGLLESCQRFLYVYSINPKDQKDVSPCFVGYTPLVLPTLDHSSTGNFLFGRSGLHFTPDGQFLVLLSSIKIPSCRMQNIDCLCPVCNLCQCEDNSLKIVSVNSGYASLVTNLMPYGTVSCILIFEPNYIVAIEDSRNLHIWEMVDGWSEISEQYMIPSLGNMGPILELTRMPKNTSLIIGHDGEGGFCLWDISKRTLLATFAAPGNTVFQILPVGLCSLQEDIIHAPVDDIDKNLQVITVGDLYRKNVRVNFVTPPRQDIAVWVLISCASVAEYQHDLQAKENSARWRFALLAKKRVFIGNVLDTRITALDACGNYGYAGTHGGLLYLWELSSGRKVTGTQCFNSGRVSCVSVDSKSGAVAVTDGGCHVLLYTQDKVQAADDGADGRIPV

SEQ ID NO: 169958 - protein, 1123 aa, Zea Mays
MAAAEDAEGDRVIEVVSAGALYHRGGDWERKYWSCSRVTSTEGDTAIGQTPDIAWKNFQKKTGAKLFGFKNASIQRLLRELIVDSTGAVELNEPCEVTSEAGAHLVCKDASDVSEAEDPSVCLGMESGTPKRSIEPSQVENTLAVHYPDMLTAVDKCNVSTHKNTNEGDTVGRALLQDVSDSRCTLPLLEEVPKNAQSTSLDDNLGESSLVSSQQVGLSSGSYLNSEKSDIELAEKEVAKSMMSILLPQAIPLLMKSYKRKKFKHKNRENSTVSVKTVSAYNPSDSCCRGVTVPTIVGEGTNGNSSEMCDHGGSHHDKVKNGFANEDCRNDDLVVKLDEMNDYVADSFEDDAQILGDNTTKSMGNHHHYSEYVLSRGPNEKSKLLNGKSEVFEYQASVHNGKRAPDVVYNHENGQYMLSDSLVACLEDEFGGEDSSHPANYNQFNGDVKQFEQQFKELTAVIKNGSSVPVDVSYHKNTDNGSINVCAQAFARNGPGVSRNEECLANILPAPVHSNAHNDAVTSGKHDVSSTLNLPPACEAKSTLLVMRDGQHHTEVPAIDQKENRFHSVSYKCTKSDDNTSFHSENVEFVDKHVAFESPDNGMYSSDGSQRAITTEGWPAGDGVKADEENLLGKVEECQIRYKNGNKNTILSVYGEGNVCEHIPTKGENDVFHHQPSHALSTTNCTHGLVSEDRTQARPDHHLELVGCYLHPMPVLSVMLNTKNHNSLYIYVLCGLLESCQRFLYVYSINPKDQKDVSPCFVGYTPLVLPTLDHSSTGNFLFGRSGLHFTPDGQFLVLLSSIKIPSCRMQNIDCLCPVCNLCQCEDNSLKIVSVNSGYASLVTNLMPYGTVSCILIFEPNYIVAIEDSRNLHIWEMVDGWSEISEQYMIPSLGNMGPILELTRMPKNTSLIIGHDGEGGFCLWDISKRTLLATFAAPGNTVFQILPVGLCSLQEDIIHAPVDDIDKNLQVITVGDLYRKNVRVNFVTPPRQDIAVWVLISCASVAEYQHDLQAKENSARWRFALLAKKRVFIGNVLDTRITALDACGNYGYAGTHGGLLYLWELSSGRKVTGTQCFNSGRVSCVSVDSKSGAVAVTDGGCHVLLYTQDKVQAADDGADGRIPV

SEQ ID NO: 169959 - protein, 1117 aa, Zea Mays
MAAAEDAEGDRVIEVVSAGALYHRGGDWERKYWSCSRGKDRYPYPVGYHAVRHFTGISYAMEIQQGPRGPIFLVTSTEGDTAIGQTPDIAWKNFQKKTGAKLFGFKNASIQRLLRELIVDSTGAVELNEPCEVTSEAGAHLVCKDASDVSEAEDPSVCLGMESGTPKRSIEPSQVENTLAVHYPDMLTAVDKCNVSTHKNTNEGDTVGRALLQDVSDSRCTLPLLEEVPKNAQSTSLDDNLGESSLVSSQQVGLSSGSYLNSEKSDIELAEKEVAKSMMSILLPQAIPLLMKSYKRKKFKHKNRENSTVSVKTVSAYNPSDSCCRGVTVPTIVGEGTNGNSSEMCDHGGSHHDKVKNGFANEDCRNDDLVVKLDEMNDYVADSFEDDAQILGDNTTKSMGNHHHYSEYVLSRGPNEKSKLLNGKSEVFEYQASVHNGKRAPDVVYNHENGQYMLSDSLVACLEDEFGGEDSSHPANYNQFNGDVKQFEQQFKELTAVIKNGSSVPVDVSYHKNTDNGSINVCAQAFARNGPGVSRNEECLANILPAPVHSNAHNDAVTSGKHDVSSTLNLPPACEAKSTLLVMRDGQHHTEVPAIDQKENRFHSVSYKCTKSDDNTSFHSENVEFVDKHVAFESPDNGMYSSDGSQRAITTEGWPAGDGVKADEENLLGKVEECQIRYKNGNKNTILSVYGEGNVCEHIPTKGENDVFHHQPSHALSTTNCTHGLVSEDRTQARPDHHLELVGCYLHPMPVLSVMLNTKNHNSLYIYVLCGLLESCQRFLYVYSINPKDQKDVSPCFVGYTPLVLPTLDHSSTGNFLFGRSGLHFTPDGQFLVLLSSIKIPSCRMQNIDCLCPVCNLCQCEDNSLKIVSVNSGYASLVTNLMPYGTVSCILIFEPNYIVAIEDSRNLHIWEMVDGWRDISKRTLLATFAAPGNTVFQILPVGLCSLQEDIIHAPVDDIDKNLQVITVGDLYRKNVRVNFVTPPRQDIAVWVLISCASVAEYQHDLQAKENSARWRFALLAKKRVFIGNVLDTRITALDACGNYGYAGTHGGLLYLWELSSGRKVTGTQCFNSGRVSCVSVDSKSGAVAVTDGGCHVLLYTQDKVQAADDGADGRIPV

SEQ ID NO: 169960 - protein, 837 aa, Zea Mays
MAAAEDAEGDRVIEVVSAGALYHRGGDWERKYWSCSRGKDRYPYPVGYHAVRHFTGISYAMEIQQGPRGPIFLVTSTEGDTAIGQTPDIAWKNFQKKTGAKVKNWQRRKSFPQRIDGAELFGFKNASIQRLLRELIVDSTGAVELNEPCEVTSEAGAHLVCKDASDVSEAEDPSVCLGMESGTPKRSIEPSQVENTLAVHYPDMLTAVDKCNVSTHKNTNEGDTVGRALLQDVSDSRCTLPLLEEVPKNAQSTSLDDNLGESSLVSSQQVGLSSGSYLNSEKSDIELAEKEVAKSMMSILLPQAIPLLMKSYKRKKFKHKNRENSTVSVKTVSAYNPSDSCCRGVTVPTIVGEGTNGNSSEMCDHGGSHHDKVKNGFANEDCRNDDLVVKLDEMNDYVADSFEDDAQILGDNTTKSMGNHHHYSEYVLSRGPNEKSKLLNGKSEVFEYQASVHNGKRAPDVVYNHENGQYMLSDSLVACLEDEFGGEDSSHPANYNQFNGDVKQFEQQFKELTAVIKNGSSVPVDVSYHKNTDNGSINVCAQAFARNGPGVSRNEECLANILPAPVHSNAHNDAVTSGKHDVSSTLNLPPACEAKSTLLVMRDGQHHTEVPAIDQKENRFHSVSYKCTKSDDNTSFHSENVEFVDKHVAFESPDNGMYSSDGSQRAITTEGWPAGDGVKADEENLLGKVEECQIRYKNGNKNTILSVYGEGNVCEHIPTKGENDVFHHQPSHALSTTNCTHGLVSEDRTQARPDHHLELVGCYLHPMPVLSVMLNTKNHNSLYIYVLCGLLESCQRFLYVYSINPKDQKDVSPCFVGYTPLVLPTLDHSSTGNDAKH

SEQ ID NO: 169961 - protein, 863 aa, Zea Mays
MAAAEDAEGDRVIEVVSAGALYHRGGDWERKYWSCSRGKDRYPYPVGYHAVRHFTGISYAMEIQQGPRGPIFLVTSTEGDTAIGQTPDIAWKNFQKKTGAKVKNWQRRKSFPQRIDGAELFGFKNASIQRLLRELIVDSTGAVELNEPCEVTSEAGAHLVCKDASDVSEAEDPSVCLGMESGTPKRSIEPSQVENTLAVHYPDMLTAVDKCNVSTHKNTNEGDTVGRALLQDVSDSRCTLPLLEEVPKNAQSTSLDDNLGESSLVSSQQVGLSSGSYLNSEKSDIELAEKEVAKSMMSILLPQAIPLLMKSYKRKKFKHKNRENSTVSVKTVSAYNPSDSCCRGVTVPTIVGEGTNGNSSEMCDHGGSHHDKVKNGFANEDCRNDDLVVKLDEMNDYVADSFEDDAQILGDNTTKSMGNHHHYSEYVLSRGPNEKSKLLNGKSEVFEYQASVHNGKRAPDVVYNHENGQYMLSDSLVACLEDEFGGEDSSHPANYNQFNGDVKQFEQQFKELTAVIKNGSSVPVDVSYHKNTDNGSINVCAQAFARNGPGVSRNEECLANILPAPVHSNAHNDAVTSGKHDVSSTLNLPPACEAKSTLLVMRDGQHHTEVPAIDQKENRFHSVSYKCTKSDDNTSFHSENVEFVDKHVAFESPDNGMYSSDGSQRAITTEGWPAGDGVKADEENLLGKVEECQIRYKNGNKNTILSVYGEGNVCEHIPTKGENDVFHHQPSHALSTTNCTHGLVSEDRTQARPDHHLELVGCYLHPMPVLSVMLNTKNHNSLYIYVLCGLLESCQRFLYVYSINPKDQKDVSPCFVGYTPLVLPTLDHSSTGNFLFGRSGLHFTPDGQFLVLLSSIKIPSCRL

SEQ ID NO: 169962 - protein, 979 aa, Zea Mays
MAAAEDAEGDRVIEVVSAGALYHRGGDWERKYWSCSRGKDRYPYPVGYHAVRHFTGISYAMEIQQGPRGPIFLVTSTEGDTAIGQTPDIAWKNFQKKTGAKVKNWQRRKSFPQRIDGAELFGFKNASIQRLLRELIVDSTGAVELNEPCEVTSEAGAHLVCKDASDVSEAEDPSVCLGMESGTPKRSIEPSQVENTLAVHYPDMLTAVDKCNVSTHKNTNEGDTVGRALLQDVSDSRCTLPLLEEVPKNAQSTSLDDNLGESSLVSSQQVGLSSGSYLNSEKSDIELAEKEVAKSMMSILLPQAIPLLMKSYKRKKFKHKNRENSTVSVKTVSAYNPSDSCCRGVTVPTIVGEGTNGNSSEMCDHGGSHHDKVKNGFANEDCRNDDLVVKLDEMNDYVADSFEDDAQILGDNTTKSMGNHHHYSEYVLSRGPNEKSKLLNGKSEVFEYQASVHNGKRAPDVVYNHENGQYMLSDSLVACLEDEFGGEDSSHPANYNQFNGDVKQFEQQFKELTAVIKNGSSVPVDVSYHKNTDNGSINVCAQAFARNGPGVSRNEECLANILPAPVHSNAHNDAVTSGKHDVSSTLNLPPACEAKSTLLVMRDGQHHTEVPAIDQKENRFHSVSYKCTKSDDNTSFHSENVEFVDKHVAFESPDNGMYSSDGSQRAITTEGWPAGDGVKADEENLLGKVEECQIRYKNGNKNTILSVYGEGNVCEHIPTKGENDVFHHQPSHALSTTNCTHGLVSEDRTQARPDHHLELVGCYLHPMPVLSVMLNTKNHNSLYIYVLCGLLESCQRFLYVYSINPKDQKDVSPCFVGYTPLVLPTLDHSSTGNFLFGRSGLHFTPDGQFLVLLSSIKIPSCRMQNIDCLCPVCNLCQCEDNSLKIVSVNSGYASLVTNLMPYGTVSCILIFEPNYIVAIEDSRNLHIWEMVDGWSEISEQYMIPSLGNMGPILELTRMPKNTSLIIGHDGEGGFCLWYV

SEQ ID NO: 169963 - protein, 326 aa, Zea Mays
MPATAGRVRMPANNRVHSSAALQTHGIWQSAIGYDPYAPENNKQQPGRPSSSVSAAAAAAAANDANAAASAAAASGSGSSDGNAYTSFQGLLALARITGSNSDETRGACKKCGRVGHLTFQCRNFLSVKDLDLDDAQAAAQAAAQAKFDEIKKKAAAGGDADEASDDLEEEEEDSDSSDSDVDPELEKIIAQRERARNGGRRHRQEEKSLSHRYRSSSSKRKSKHTRSWRSDDTEDEEEEGRRGRDRKKRSSRSKKHERSDEASSDDSDSDRQRHRKSRKNRSDEASSDDSDSDRHRRRKGRKDRKRRRRETPMSPQAEPSPKGCI

SEQ ID NO: 169964 - protein, 230 aa, Zea Mays
MIDLPGLTKVAVEGQSESIVQDIENMVRSYVDKPNCIILAISPANQDIATSDAIKLSKEVDPTGERTFGVLTKLDLMDKGTNALDVLEGRAYRLQNPWVGIVNRSQADINRKVDMISAREKEREYFETSPDYAHLSSRMGSGYLAKLLSQHLESVIKAHIPSITATINKTIDELESELDIIGRAVAADPGAQLYTILDLCRAFDRVFKEHLDGGLAPSSLFRILYLFRVL

SEQ ID NO: 169965 - protein, 225 aa, Zea Mays
MAPEQGYRRLIEKGINYFRGPAEATVDAVHVVLKDLVRKSIGETEQLRRFPTLQAAIATAANEALERFREDGRSTALRLVDMEAAYVTVEFFRKLPQDPPADAPASKAGGKPSAEPAAAPPPDRYGDGHFRSIASNVSQYIRMVGDELLQKIPKAAVHCQVREAKRSLLNHFYVQMGKKEAGEFGHMLDEDPAMMERRQQCFKRLELYKSARDEVDSVAWGGSSR

SEQ ID NO: 169966 - protein, 559 aa, Zea Mays
MNASRKSSHLSSKDSAETARDIITTSGQIQPLKIPDAVAALAQAAAKANGETEKYLPGWPLFSPPKVQLDKCTKCSREFCSAINFRRHTRVHRRSLKIDRLTVDDASKILSLTGVVIEGVTGSSILTALSSWMCKPGYASLPVAYARAGSELLDLIQAKPSMHLPVSSDELFSLLDEASEKTFLCTNTAACIQKFLFDGEVEKIATELKNVVSCASYMLEQKLLEAWCADKTAEALRCQKLLEDEEEAAQKRQAELMERKRMKKLRQKEQRLKNLKDEDATVQSPEIMDDATCSTAIQSVNSIYDPDCFEQEESQYLQFPALITLETDNDFNVDLPVEDISCDLGPEMDKGVVLRQQVVSRHHLGRTEKLAESSILSGSVVTSKHAALARPSNYKDPNVCSAPSRNKTCELKLRSEIEEQCQKHELDVDERGIGPSKNSRVLIGSIIVAIKDCSEHLLDLGSKNDPVPPNVKTKKHASVKVVQQVTHEGNRNEGVPDSDNRSSLSVTTDEISYSTCCDADLAVDEHLQCTTFSSEEATAFLSQRWKEAIAADHVKLVVS

SEQ ID NO: 169967 - protein, 556 aa, Zea Mays
MNASRKSSHLSSKDSAETARDIITTSGQIQPLKIPDAVAALAQAAAKANGETEKYLPGWPLFSPPKVQLDKCTKCSREFCSAINFRRHTRVHRRSLKIDRDFPKNRDLLAAFWNKGVTGSSILTALSSWMCKPGYASLPVAYARAGSELLDLIQAKPSMHLPVSSDELFSLLDEASEKTFLCTNTAACIQKFLFDGEVEKIATELKNVVSCASYMLEQKLLEAWCADKTAEALRCQKLLEDEEEAAQKRQAELMERKRMKKLRQKEQRLKNLKDEDATVQSPEIMDDATCSTAIQSVNSIYDPDCFEQEESQYLQFPALITLETDNDFNVDLPVEDISCDLGPEMDKGVVLRQQVVSRHHLGRTEKLAESSILSGSVVTSKHAALARPSNYKDPNVCSAPSRNKTCELKLRSEIEEQCQKHELDVDERGIGPSKNSRVLIGSIIVAIKDCSEHLLDLGSKNDPVPPNVKTKKHASVKVVQQVTHEGNRNEGVPDSDNRSSLSVTTDEISYSTCCDADLAVDEHLQCTTFSSEEATAFLSQRWKEAIAADHVKLVVS

SEQ ID NO: 169968 - protein, 565 aa, Zea Mays
MNASRKSSHLSSKDSAETARDIITTSGQIQPLKIPDAVAALAQAAAKANDLPGWPLFSPPKVQLDKCTKCSREFCSAINFRRHTRVHRRSLKIDRDFPKNRDLLAAFWNKLTVDDASKILSLTGVVIEGVTGSSILTALSSWMCKPGYASLPVAYARAGSELLDLIQAKPSMHLPVSSDELFSLLDEASEKTFLCTNTAACIQKFLFDGEVEKIATELKNVVSCASYMLEQKLLEAWCADKTAEALRCQKLLEDEEEAAQKRQAELMERKRMKKLRQKEQRLKNLKDEDATVQSPEIMDDATCSTAIQSVNSIYDPDCFEQEESQYLQFPALITLETDNDFNVDLPVEDISCDLGPEMDKGVVLRQQVVSRHHLGRTEKLAESSILSGSVVTSKHAALARPSNYKDPNVCSAPSRNKTCELKLRSEIEEQCQKHELDVDERGIGPSKNSRVLIGSIIVAIKDCSEHLLDLGSKNDPVPPNVKTKKHASVKVVQQVTHEGNRNEGVPDSDNRSSLSVTTDEISYSTCCDADLAVDEHLQCTTFSSEEATAFLSQSKHLAAIIFELP

SEQ ID NO: 169969 - protein, 427 aa, Zea Mays
MCKPGYASLPVAYARAGSELLDLIQAKPSMHLPVSSDELFSLLDEASEKTFLCTNTAACIQKFLFDGEVEKIATELKNVVSCASYMLEQKLLEAWCADKTAEALRCQKLLEDEEEAAQKRQAELMERKRMKKLRQKEQRLKNLKDEDATVQSPEIMDDATCSTAIQSVNSIYDPDCFEQEESQYLQFPALITLETDNDFNVDLPVEDISCDLGPEMDKGVVLRQQVVSRHHLGRTEKLAESSILSGSVVTSKHAALARPSNYKDPNVCSAPSRNKTCELKLRSEIEEQCQKHELDVDERGIGPSKNSRVLIGSIIVAIKDCSEHLLDLGSKNDPVPPNVKTKKHASVKVVQQVTHEGNRNEGVPDSDNRSSLSVTTDEISYSTCCDADLAVDEHLQCTTFSSEEATAFLSQRWKEAIAADHVKLVVS

SEQ ID NO: 169970 - protein, 307 aa, Zea Mays
MDEEEVHIAVGKNSRKEKANILWAAANFPRATIVLVHVHWPSKWMPFMGGKVLYKFADEKEKEMHRGREMKVMVNMLSQYKKMCGTRKVSAHYLTHDDTVAGVVNLIKKLKIKRIVIGSRNMSRQVVVRQCCQVWLVLNGKHISTSNDHLEYSENIGYGGGSSGILASIHELGEESDGYVTPRSDLVDETMDEESAEMNDSDQLVTEDETLTEQGTEESVTSEDMENFFQENADQSDEIQNFRNIADKAEKIMVQAEKLMKLALRCCSLERRRRPAITSDAEWRSLDILRAMVNPASKSWKWNSHAS

SEQ ID NO: 169971 - protein, 260 aa, Zea Mays
MDEEEVHIAVGKNSRKEKANILWAAANFPRATIVLVHVHWPSKWMPFMGGKVLYKFADEKEKEMHRGREMKVMVNMLSQYKKMCGTRKVSAHYLTHDDTVAGVVNLIKKLKIKRIVIGSRNMSRQVVVRQCCQVWLVLNGKHISTSNDHLEYSENIGYGGGSSGILASIHELGEESDGYVTPRSDLVDETMDEESAEMNDSDQLVTEDETLTEQGTEESVTSEDMENFFQENADQSDEIQNFRNIADKAEKIMVQSDTNE

SEQ ID NO: 169972 - protein, 255 aa, Zea Mays
MDEEEVHIAVGKNSRKEKANILWAAANFPRATIVLVHVHWPSKWMPFMGGKVLYKFADEKEKEMHRGREMKVMVNMLSQYKKMCGTRKVSAHYLTHDDTVAGVVNLIKKLKIKRIVIGSRNMSRQVVVRQCCQVWLVLNGKHISTSNDHLEYSENIGYGGGSSGILASIHELGEESDGYVTPRSDLVDETMDEESAEMNDSDQLVTEDETLTEQGTEESVTSEDMENFFQENADQSDEIQNFRNIADKAEKIMLE

SEQ ID NO: 169973 - protein, 119 aa, Zea Mays
MQIFVKTLTGKTITLEVESSDTIDNVKAKIQDKEGIPPDQQRLIFAGKQLEDGRTLADYNIQKESTLHLVLRLRGGIIEPSLQALARKYNQDKMICRAMHGCTPGLLTAARRSVATATS

SEQ ID NO: 169974 - protein, 130 aa, Zea Mays
MQIFVKTLTGKTITLEVESSDTIDNVKAKIQDKEGIPPDQQRLIFAGKQLEDGRTLADYNIQKESTLHLVLRLRGGIIEPSLQALARKYNQDKMICRAMHGCTPGLLTAARRSVATATRFVYKQDGASQL

SEQ ID NO: 169975 - protein, 121 aa, Zea Mays
MQIFVKTLTGKTITLEVESSDTIDNVKAKIQDKEGIPPDQQRLIFAGKQLEDGRTLADYNIQKESTLHLVLRLRGGIIEPSLQALARKYNQDKMICRKAVNCRKKKCGHSNQLRAKKKIKN

SEQ ID NO: 169976 - protein, 447 aa, Zea Mays
MEPAAEDAAAAAPDSWETADIDGPMSRLILSARRVSSSPDFADDQDPPQPPPTLQPQGAPSAPSDAREDVVAQVDQFLREALEKPRERLSVLRMEQEILKFIHDPSRTEYEFNGLPTSYLRLAAHRLAQHYFLQSIAIPDNSLPDGTGSRIILRKTTFDCRLPAVRLADIPVNLPQEDISVAKVAIKQRPQKNLHGMNSSSAHSSRDNLQKSVEERKEEYNKARARIFNNSNSSTATDERSAEEVTLPSTLHRSTSLELNSSNRIGQGAEITLERSLTTTSASSRSNRSKIDKEPAVNRNKQNNRVAIFRDRESERKDPDYDRSYDRYMQRFDPGFGFSGGPYTIQPLYAPAVNYNTEFPQLGSAHRSPVAVEQQPRPIAQHMPASWSVAQASNAIGYGPDGVMGPYSPGAPVRSSVFMHASQQYAIPSRPGVPFAHPQESMGPFAQ

SEQ ID NO: 169977 - protein, 464 aa, Zea Mays
MEPAAEDAAAAAPDSWETADIDGPMSRLILSARRVSSSPDFADDQDPPQPPPTLQPQGAPSAPSDAREDVVAQVDQFLREALEKPRERLSVLRMEQEILKFIHDPSRTEYEFNGLPTSYLRLAAHRLAQHYFLQSIAIPDNSLPDGTGSRIILRKTTFDCRLPAVRLADIPVNLPQEDISVAKVAIKQRPQKNLHGMNSSSAHSSRDNLQKSVEERKEEYNKARARIFNNSNSSTATDERSAEEVTLPSTLHRSTSLELNSSNRIGQGAEITLERSLTTTSASSRSNRSKIDKEPAVNRNKQNNRVAIFRDRESERKDPDYDRSYDRYMQRFDPGFGFSGGPYTIQPLYAPAVNYNTEFPQLGSAHRSPVAVEQQPRPIAQHMPASWSVAQASNAIGYGPDGVMGPYSPGAPVRSSVFMHASQQYAIPSRPGVPFAHPQESMGPFAQIEMLEEHILPSLNGLCC

SEQ ID NO: 169978 - protein, 453 aa, Zea Mays
MEPAAEDAAAAAPDSWETADIDGPMSRLILSARRVSSSPDFADDQDPPQPPPTLQPQGAPSAPSDAREDVVAQVDQFLREALEKPRERLSVLRMEQEILKFIHDPSRTEYEFNGLPTSYLRLAAHRLAQHYFLQSIAIPDNSLPDGTGSRIILRKTTFDCRLPAVRLADIPVNLPQEDISVAKVAIKQRPQKNLHGMNSSSAHSSRDNLQKSVEERKEEYNKARARIFNNSNSSTATDERSAEEVTLPSTLHRSTSLELNSSNRIGQGAEITLERSLTTTSASSRSNRSKIDKEPAVNRNKQNNRVAIFRDRESERKDPDYDRSYDRYMQRFDPGFGFSGGPYTIQPLYAPAVNYNTEFPQLGSAHRSPVAVEQQPRPIAQHMPASWSVAQASNAIGYGPDGVMGPYSPGAPVRSSVFMHASQQYAIPSRPGVPFAHPQESMGPFAQIFLLVQ

SEQ ID NO: 169979 - protein, 63 aa, Zea Mays
MHVTVSYNNYCLTLSLLLHPFVLDCHRPSYENFFFPIPSNPCGMRITGFLVNLQVNFCAVETY

SEQ ID NO: 169980 - protein, 433 aa, Zea Mays
MSFLFACTQRFLQTVFGYAAREFAKQGVKPGELAIISKEAVAPYERPALSKGYLFPTNAARLPGFYVCVGSGGEKLLPEWYSEKGIELILSTEIVKADLSTKTLTSAAGANFTYEILLIATGSSVIKLTDFGTQGADSNNILYLREIDDADKLVAAIQAKKGGKAVVVGGGYIGLELSAALKINDFDVTMVFPEPWCMPRLFTADIAAFYEAYYTNKGVKILKGTLAVGFDADANGDVTAVKLKDGTVLEADIVVVGVGGRPLTTLFKGQVAEEKGGIKTDASFETSVPGVYAIGDVATFPLKMYNELRRVEHVDHSRKSAEQAVKAIKGKESGEPVPEYDYLPYFYSRSFDLAWQFYGDNVGETILFGDSDPTSSKPKFGSYWIKDGKVLGAFLEGGSPDENKVIAKVAKTQPPVANLEELKKDGLQFASKI

SEQ ID NO: 169981 - protein, 392 aa, Zea Mays
MASEKHFKYVILGGGVAAGYAAREFAKQGVKPGELAIISKEAVAPYERPALSKGYLFPTNAARLPGFYVCVGSGGEKLLPEWYSEKGIELILSTEIVKADLSTKTLTSAAGANFTYEILLIATGSSVIKLTDFGTQGADSNNILYLREIDDADKLVAAIQAKKGGKAVVVGGGYIGLELSAALKINDFDVTMVFPEPWCIKLKDGTVLEADIVVVGVGGRPLTTLFKGQVAEEKGGIKTDASFETSVPGVYAIGDVATFPLKMYNELRRVEHVDHSRKSAEQAVKAIKGKESGEPVPEYDYLPYFYSRSFDLAWQFYGDNVGETILFGDSDPTSSKPKFGSYWIKDGKVLGAFLEGGSPDENKVIAKVAKTQPPVANLEELKKDGLQFASKI

SEQ ID NO: 169982 - protein, 174 aa, Zea Mays
MDLPPGAGRRTTYSLLPQFPDDAAAPAPAPANILQRQSSGSSYGAGSSISTSSDYPFHLQPPASAAGVAPPGSAAAPPGAAGSPCKSWAQQAEETYQLQLALALRLCADAACAADPGFLDPGDSGSGRGSGNGRAFPLAQPAPSAESLSHRFWHNTRWILLDSWDGPLCMVTMH

SEQ ID NO: 169983 - protein, 191 aa, Zea Mays
MGAGVLLGDAAGLGAHLAVRRRRTRLYLRNWASKPLRPSVWLGVAACVSQNRDRRGHVTRFSASASSGSDEPGELSEDEAQREWEAELNRRLKEAEEMEELERTAEQLQSQAAAEAPEESEEEKRERVRRELQKVAKEQAERRETAKQMFELGQKAYGKGMYGRSIEFLEAALTIIRPSSLLGGEVCWNME

SEQ ID NO: 169984 - protein, 359 aa, Zea Mays
MKIDKGYISPYFITNQDKSIVEFENTRVLLTDQRVNDVQEILPLLEKTTQLSVPLLIIAEDVSHEVYSTLVLNKLNGLLNVAVVKCPGLGDEKKAILQDIAIMTGADFFASDLGWGLHGITSDQLGMAQKITITSESTTIIAHPSMRPEIEARIMQLKKDLEETTSSYLKERFSARIAKLSRGVGVIKVGAATEAELEDRKLRVEDAKNATFAAISEGITPGGGVTYVHLSKHIPSIMDLVDDTEEKMGVNIVGKALLVPAMTIARNAGADGPAVVEKLLASEWRVGYNAMTDEFEDLVAAGVVDPCRVARCVLQNSASIAGLILMTQAMMFDKIKKKKSPIPEIPGIPPLQISQKAKA

SEQ ID NO: 169985 - protein, 738 aa, Zea Mays
MARKHGWQLPAHTLQIVAITVFFLLVVAFYAFFVPFLGKQVVEYIAIGVYTPVALAVFILYIRCTSINPADPGIMSKFEDGLINIPTNGSGIEGMNLPQKVNNATGTNSPMSTCRSSLDGHSNQRGSSIGEANMNLGSQLPKKRSSCWLLGGLLCATFVKEDCRKTDDSEQQANGEEALFCTLCNAEWLNNCVGRKNYFTFLALMAISLIWLAIEFGVGIAVIVLCFVDKNASRNIQDKLGNGLTRAPFAVIVGIFTLLSLVACIPLGELLFFHIILIRKGITTYDYVVAMRAMSEAAPEDEEGENIIYSPSNSATTGFSVGSSLGIHHKGAWCTPPRIFIDQDEVIPHLEPGMVPSTVDPDGAGYPERANRAKKAVKISARSLAKLDKNEVMKAAAKARASSSVLRPIDARHGHEADVISSGSASVRSSMSVDYSGTKESNSEMKLSPLHNSYPQSLASQDEYDTGTPTASSLSSLVNIHKLASHSQFSAAPRPAPPERPVPAMVRPPVPTTQITNPGIPRPAVPTTQTTNPMFQSATSYVRENRRASVVWDQEAGRYVSVPAQTRTGTGADLPARNPRFLANPSGEPSSHVRGVAPGNTSSSAMPSGQPSERLTYSGQSIFFGGPMLNTPSLGAQRNEAGARARPEGSRDPNAQQRDIRGEKARTGSLPVFAPGTILQRQKGQADKTSRALLVCFTPSLLPTAPVPVPHHWHSGEGIPVPPPALAFCLPAPTRPCG

SEQ ID NO: 169986 - protein, 1179 aa, Zea Mays
MNLGSQLPKKRSSCWLLGGLLCATFVKEDCRKTDDSEQQANGEEALFCTLCNAEVRKFSKHCRSCDKCVDGFDHHCRWLNNCVGRKNYFTFLALMAISLIWLAIEFGVGIAVIVLCFVDKNASRNIQDKLGNGLTRAPFAVIVGIFTLLSLVACIPLGELLFFHIILIRKGITTYDYVVAMRAMSEAAPEDEEGENIIYSPSNSATTGFSVGSSLGIHHKGAWCTPPRIFIDQDEVIPHLEPGMVPSTVDPDGAGYPERANRAKKAVKISARSLAKLDKNEVMKAAAKARASSSVLRPIDARHGHEADVISSGSASVRSSMSVDYSGTKESNSEMKLSPLHNSYPQSLASQDEYDTGTPTASSLSSLVNIHKLASHSQFSAAPRPAPPERPVPAMVRPPVPTTQITNPGIPRPAVPTTQTTNPMFQSATSYVRENRRASVVWDQEAGRYVSVPAQTRTGTGADLPARNPRFLANPSGEPSSHVRGVAPGNTSSSAMPSGQPSERLTYSGQSIFFGGPMLNTPSLGAQRNEAGARARPEGSRDPNAQQRDIRGEKARTGSLPVFAPGTILQRQKGQADKTSRALLVCFTPSLLPTAPVPVPHHWHSAAFSSSSQKLLPRSAGVGRRLVVRADVKVISTGEACRRGLAAGIDKLADAVSVTLGPKGRNVVIDQDDVPKVINDGVTIAKAIELPNALEHAGATLLQEIASKTNSAVGDGTTTAIVLAREIINLGLLAVATGANPVALRRGIDKAVHELIKILKSKCIPVSTKEDIKAVASISSGNDEYVGNLIADALEKIGPDGIIKIESSSSIYTTVEVQEGMKIDKGYISPYFITNQDKSIVEFENTRVLLTDQRVNDVQEILPLLEKTTQLSVPLLIIAEDVSHEVYSTLVLNKLNGLLNVAVVKCPGLGDEKKAILQDIAIMTGADFFASDLGWGLHGITSDQLGMAQKITITSESTTIIAHPSMRPEIEARIMQLKKDLEETTSSYLKERFSARIAKLSRGVGVIKVGAATEAELEDRKLRVEDAKNATFAAISEGITPGGGVTYVHLSKHIPSIMDLVDDTEEKMGVNIVGKALLVPAMTIARNAGADGPAVVEKLLASEWRVGYNAMTDEFEDLVAAGVVDPCRVARCVLQNSASIAGLILMTQAMMFDKIKKKKSPIPEIPGIPPLQISQKAKA

SEQ ID NO: 169987 - protein, 659 aa, Zea Mays
MARKHGWQLPAHTLQIVAITVFFLLVVAFYAFFVPFLGKQVVEYIAIGVYTPVALAVFILYIRCTSINPADPGIMSKFEDGLINIPTNGSGIEGMNLPQKVNNATGTNSPMSTCRSSLDGHSNQRGSSIGEANMNLGSQLPKKRSSCWLLGGLLCATFVKEDCRKTDDSEQQANGEEALFCTLCNAEWLNNCVGRKNYFTFLALMAISLIWLAIEFGVGIAVIVLCFVDKNASRNIQDKLGNGLTRAPFAVIVGITTYDYVVAMRAMSEAAPEDEEGENIIYSPSNSATTGFSVGSSLGIHHKGAWCTPPRIFIDQDEVIPHLEPGMVPSTVDPDGAGYPERANRAKKAVKISARSLAKLDKNEVMKAAAKARASSSVLRPIDARHGHEADVISSGSASVRSSMSVDYSGTKESNSEMKLSPLHNSYPQSLASQDEYDTGTPTASSLSSLVNIHKLASHSQFSAAPRPAPPERPVPAMVRPPVPTTQITNPGIPRPAVPTTQTTNPMFQSATSYVRENRRASVVWDQEAGRYVSVPAQTRTGTGADLPARNPRFLANPSGEPSSHVRGVAPGNTSSSAMPSGQPSERLTYSGQSIFFGGPMLNTPSLGAQRNEAGARARPEGSRDPNAQQRDIRGEKARTGSLPVFAPGTVQRNPPFDK

SEQ ID NO: 169988 - protein, 131 aa, Zea Mays
MFSFIWWILGFYWVSAGGQALSHDAPQLYWLTIVFLAFDVFFVVFCIALACVIGIAVCCCLPCIIGILYAVTDQEEGASEDDVNNLSKFKFRTMSDADKLAAGIAAPVGGVMTECGVLYLPMPVRRWRGTA

SEQ ID NO: 169989 - protein, 116 aa, Zea Mays
MDEVFLLLERDKTTVLGKPWYLKLSFDCTNQTPFELQYYSIIKYHSIVSKLQKYYNSKQGLSGDDEPRAWIEKSLFIVVLYYMICFCFLQAYILRCLYAIILPHALNASPRCALQP

SEQ ID NO: 169990 - protein, 308 aa, Zea Mays
MTSNYPIRSLARSAYNRNDFHTSKILWESALSLNSLIPDGWFAYGTAAWKDKDLDKAVDAFSRAVQIDPENGEAWNNIACLHMIRGKSQAAVQAFREAVKFKRNSWEIWENYSKVALDTGNIRLTLEALKTVLNLSSNKQFSVGILDKVMTMLEEQSPDFVDTHEASDDANKDTRQSNQLLDITGDILQQIVRSGGSNAAIWGLYARWHKTKGNLIACSEALLKQVRSLQSGLLHDQMKFAKYAQASLKLCKVYMEISSSTGSRRELLTAEMHLKSTLKQTMDFSDTEEYKALDNCLEEIKNLIAATA

SEQ ID NO: 169991 - protein, 535 aa, Zea Mays
MLPPRSLPGAALPTLLLASVVRMPSTPFFHAARTSAMCLLFCLAERTPLLPTVAVQRHSRRLQRDDDARWRCGGRTCAVEGGVSSGDGGREDGVDAMERGGGGLGSIDACPRAREVEDISKEFPAAPQRVKMVFAVHMPTLPALRKEYGELLISCGIVGEALEIFKDLELWDNLIYCYRLLGKVADAVSLINARLSVTPNDPRLWCSLGDVTNNDDHYKKALEVSNNKSARAMRSLARSAYNRNDFHTSKILWESALSLNSLIPDGWFAYGTAAWKDKDLDKAVDAFSRAVQIDPENGEAWNNIACLHMIRGKSQAAVQAFREAVKFKRNSWEIWENYSKVALDTGNIRLTLEALKTVLNLSSNKQFSVGILDKVMTMLEEQSPDFVDTHEASDDANKDTRQSNQLLDITGDILQQIVRSGGSNAAIWGLYARWHKTKGNLIACSEALLKQVRSLQGSGLLHDQMKFAKYAQASLKLCKVYMEISSSTGSRRELLTAEMHLKSTLKQTMDFSDTEEYKALDNCLEEIKNLIAATA

SEQ ID NO: 169992 - protein, 915 aa, Zea Mays
MTCATRSPGFLREAELRLLRCTLPSLPSSPPPPASPPPAHPLGPAAASAIAAVEAGDYEAALATAAPHFFPAFAPSRPPGSAAQFYADLGAAARAFLLVDGDGAAAGEGFDCRCAVVLSAAVAALLAFTQQNVTGQMDVVEGTGNCVDLASIITTDMTIKSDLPFHVNLNLLDFLGRCYSNLGDTWDAWASDNLASFGSHVHGKFSLLQFIVFARLLFTSVQSLDLSDCWSVSWWLFRISMLQQNILDELSSSLFDQVQVYKNKMLDHFGELEKVSTYWDCLLSDGEGSYFVSAAFLEAGIVEYKYGRVDASRLHLNSAQEACGLHLSLTGILGFRTIYQVDAKSQMVLVAKTNKSGPDEGQVTEPTVAQNDNAALKNARSFVPVEDDEFCDILRMPRLVQDGSNSASEDATNPSAKISLSAIQQAAVLAQCLYVSRRSRVDEMSGWEMAPYIESIDSQDESYFVVRSLCDILRVRWESTRSRTKQRALLMMENLVEDISKEFPAAPQRVKMVFAVHMPTLPALRKEYGELLISCGIVGEALEIFKDLELWDNLIYCYRLLGKVADAVSLINARLSVTPNDPRLWCSLGDVTNNDDHYKKALEVSNNKSARAMRSLARSAYNRNDFHTSKILWESALSLNSLIPDGWFAYGTAAWKDKDLDKAVDAFSRAVQIDPENGEAWNNIACLHMIRGKSQAAVQAFREAVKFKRNSWEIWENYSKVALDTGNIRLTLEALKTVLNLSSNKQFSVGILDKVMTMLEEQSPDFVDTHEASDDANKDTRQSNQLLDITGDILQQIVRSGGSNAAIWGLYARWHKTKGNLIACSEALLKQVRSLQGSGLLHDQMKFAKYAQASLKLCKVYMEISSSTGSRRELLTAEMHLKSTLKQTMDFSDTEEYKALDNCLEEIKNLIAATA

SEQ ID NO: 169993 - protein, 313 aa, Zea Mays
MDAQRALLDELMGTARNLTEEEKKGHKELKWDDPDVCGPYMVRFCPHDLFVNTKSNIGPCSRIHDPKLKESFEKSPRHDTYMQRFEAELAQQCEKLVKKLLEQIEELGEAGKVDEAEALMRRVDILNAEKTALANEADNKVAMLEKKMELCETCGSFLVADDALERTQSHVTGKQHIGYGMVRDFLAEYKAAKEKTKEEERLAREQKAEEHRKQRGKEYDSGGRDRDTRRERSGERDFDRDRQYERSRGRDRVYDYRDRGSEHRSNRYRNGRDSERGGHRYRSGGMTNDRGRMRSRSRSPTRHGYGRSRSPDH

SEQ ID NO: 169994 - protein, 51 aa, Zea Mays
MYIVFSAYKSLEIEAGRTKLLSSHMTTISCTFEKHSHLLKSRRHFIQIHCP

SEQ ID NO: 169995 - protein, 59 aa, Zea Mays
MSFVNNRYGQWRMWKRFIEEWTLLGHVNKIGELSLQFQGARSQLKMVNWSFLLQGARPH

SEQ ID NO: 169996 - protein, 93 aa, Zea Mays
MRSPELLRWPKRGGGGDDSVQLGPNGERCGPGGVCDGTQGDGAVGEEKRRRRCSVLGVAGEAPRWMWPQAGMPCGPAMVRGYARVFLLCGGMA

SEQ ID NO: 169997 - protein, 520 aa, Zea Mays
MGVGALFPFSRGHTETGSIDHEPWSFGKECEEVCRLALLRRYRLLPHIYTLFYHSHTKGIPVATPVFFADTQDPELRKVETSFLLGPLLVCASTLPNKGAHEYAHKLPKGIWLSFDFADSHPDLPVLYLQGGAILPVGLPIKHVSEASLEDDLSLIIALNENGKAEGVLFEDAGDGYAFTQGDYLLTYYIAELHSSVVTVKILKSEGSWKRPKRNLKINILLGGGAMISTDGVDGEVIHLTMPSESVVSSLVATSEFEHKKRMEMIQPIPDIEEPSGQEGAELSKIPVDLKSGDWFLKIVPWIGGRIISMAHIPSDSQWLHSRIEINGYEEYSGAEYRSAGCTEEYKVIRRHLEQSGEEESICMEGDIGGGLVLQRQISILKDNPKIVQIDSSIQARSVGAGSGGFSRLVCLRVHPTFTLLHPTEVVVAFTAINGSKQEISPEAGEITFEGDLKPNGEWMLVDKCVGLSLVNRFNPREVSKCFVHWGTGDVNMELWSEERPVSNETPLRICHQYEVQQTT

SEQ ID NO: 169998 - protein, 550 aa, Zea Mays
MLGGLSGQPLSGPDIGGFAGNATPKLFGRWMGVGALFPFSRGHTETGSIDHEPWSFGKECEEVCRLALLRRYRLLPHIYTLFYHSHTKGIPVATPVFFADTQDPELRKVETSFLLGPLLVCASTLPNKGAHEYAHKLPKGIWLSFDFADSHPDLPVLYLQGGAILPVGLPIKHVSEASLEDDLSLIIALNENGKAEGVLFEDAGDGYAFTQGDYLLTYYIAELHSSVVTVKILKSEGSWKRPKRNLKINILLGGGAMISTDGVDGEVIHLTMPSESVVSSLVATSEFEHKKRMEMIQPIPDIEEPSGQEGAELSKIPVDLKSGDWFLKIVPWIGGRIISMAHIPSDSQWLHSRIEINGYEEYSGAEYRSAGCTEEYKVIRRHLEQSGEEESICMEGDIGGGLVLQRQISILKDNPKIVQIDSSIQARSVGAGSGGFSRLVCLRVHPTFTLLHPTEVVVAFTAINGSKQEISPEAGEITFEGDLKPNGEWMLVDKCVGLSLVNRFNPREVSKCFVHWGTGDVNMELWSEERPVSNETPLRICHQYEVQQTT

SEQ ID NO: 169999 - protein, 734 aa, Zea Mays
MVDDLHSIGCKAIWMLDPGIKKEEGYFVYDSGSKSDVWIQKADGSPFVGEVWPGDCVFPDYTSEKTRAWWASLVKDFISIGVDGIWNDMNEPAVFKTTTKTMPESNIHRGDADIGGVQNHSYYHNVYGMLMARSTYKGMEMGNAAKRPFVLTRAGFIGSQRYAATWTGDNLSNWEHLHMSLPMVLQLGLSGQPLSGPDIGGFAGNATPKLFGRWMGVGALFPFSRGHTETGSIDHEPWSFGKECEEVCRLALLRRYRLLPHIYTLFYHSHTKGIPVATPVFFADTQDPELRKVETSFLLGPLLVCASTLPNKGAHEYAHKLPKGIWLSFDFADSHPDLPVLYLQGGAILPVGLPIKHVSEASLEDDLSLIIALNENGKAEGVLFEDAGDGYAFTQGDYLLTYYIAELHSSVVTVKILKSEGSWKRPKRNLKINILLGGGAMISTDGVDGEVIHLTMPSESVVSSLVATSEFEHKKRMEMIQPIPDIEEPSGQEGAELSKIPVDLKSGDWFLKIVPWIGGRIISMAHIPSDSQWLHSRIEINGYEEYSGAEYRSAGCTEEYKVIRRHLEQSGEEESICMEGDIGGGLVLQRQISILKDNPKIVQIDSSIQARSVGAGSGGFSRLVCLRVHPTFTLLHPTEVVVAFTAINGSKQEISPEAGEITFEGDLKPNGEWMLVDKCVGLSLVNRFNPREVSKCFVHWGTGDVNMELWSEERPVSNETPLRICHQYEVQQTT

SEQ ID NO: 170000 - protein, 758 aa, Zea Mays
MDIDYMDGFRCFTFDSIRFPDPISMVDDLHSIGCKAIWMLDPGIKKEEGYFVYDSGSKSDVWIQKADGSPFVGEVWPGDCVFPDYTSEKTRAWWASLVKDFISIGVDGIWNDMNEPAVFKTTTKTMPESNIHRGDADIGGVQNHSYYHNVYGMLMARSTYKGMEMGNAAKRPFVLTRAGFIGSQRYAATWTGDNLSNWEHLHMSLPMVLQLGLSGQPLSGPDIGGFAGNATPKLFGRWMGVGALFPFSRGHTETGSIDHEPWSFGKECEEVCRLALLRRYRLLPHIYTLFYHSHTKGIPVATPVFFADTQDPELRKVETSFLLGPLLVCASTLPNKGAHEYAHKLPKGIWLSFDFADSHPDLPVLYLQGGAILPVGLPIKHVSEASLEDDLSLIIALNENGKAEGVLFEDAGDGYAFTQGDYLLTYYIAELHSSVVTVKILKSEGSWKRPKRNLKINILLGGGAMISTDGVDGEVIHLTMPSESVVSSLVATSEFEHKKRMEMIQPIPDIEEPSGQEGAELSKIPVDLKSGDWFLKIVPWIGGRIISMAHIPSDSQWLHSRIEINGYEEYSGAEYRSAGCTEEYKVIRRHLEQSGEEESICMEGDIGGGLVLQRQISILKDNPKIVQIDSSIQARSVGAGSGGFSRLVCLRVHPTFTLLHPTEVVVAFTAINGSKQEISPEAGEITFEGDLKPNGEWMLVDKCVGLSLVNRFNPREVSKCFVHWGTGDVNMELWSEERPVSNETPLRICHQYEVQQTT

SEQ ID NO: 170001 - protein, 810 aa, Zea Mays
MTSLSHAIGTVSMPPKWSLGYHQCRWSYDSSEKVLKVVRTFREKDIPCDVVWMDIDYMDGFRCFTFDSIRFPDPISMVDDLHSIGCKAIWMLDPGIKKEEGYFVYDSGSKSDVWIQKADGSPFVGEVWPGDCVFPDYTSEKTRAWWASLVKDFISIGVDGIWNDMNEPAVFKTTTKTMPESNIHRGDADIGGVQNHSYYHNVYGMLMARSTYKGMEMGNAAKRPFVLTRAGFIGSQRYAATWTGDNLSNWEHLHMSLPMVLQLGLSGQPLSGPDIGGFAGNATPKLFGRWMGVGALFPFSRGHTETGSIDHEPWSFGKECEEVCRLALLRRYRLLPHIYTLFYHSHTKGIPVATPVFFADTQDPELRKVETSFLLGPLLVCASTLPNKGAHEYAHKLPKGIWLSFDFADSHPDLPVLYLQGGAILPVGLPIKHVSEASLEDDLSLIIALNENGKAEGVLFEDAGDGYAFTQGDYLLTYYIAELHSSVVTVKILKSEGSWKRPKRNLKINILLGGGAMISTDGVDGEVIHLTMPSESVVSSLVATSEFEHKKRMEMIQPIPDIEEPSGQEGAELSKIPVDLKSGDWFLKIVPWIGGRIISMAHIPSDSQWLHSRIEINGYEEYSGAEYRSAGCTEEYKVIRRHLEQSGEEESICMEGDIGGGLVLQRQISILKDNPKIVQIDSSIQARSVGAGSGGFSRLVCLRVHPTFTLLHPTEVVVAFTAINGSKQEISPEAGEITFEGDLKPNGEWMLVDKCVGLSLVNRFNPREVSKCFVHWGTGDVNMELWSEERPVSNETPLRICHQYEVQQTT

SEQ ID NO: 170002 - protein, 599 aa, Zea Mays
MAAATAADMVWVRVLEDGVFRFDASEAARAAAGPSLSFADPRRREAPHDGADMPAVVPVCEVAAGGSQKVVIKLPPGTSFYGTGEASGPLERTGKRVFTWNTDAWGFGPGTTSLYQSHPWVLAVLPDGKALGVLADTTRRCEIDLRQESTIKFSALSAYPVITFGPFNTPADVMTSLSHAIGTVSMPPKWSLGYHQCRWSYDSSEKVLKIRFPDPISMVDDLHSIGCKAIWMLDPGIKKEEGYFVYDSGSKSDVWIQKADGSPFVGEVWPGDCVFPDYTSEKTRAWWASLVKDFISIGVDGIWNDMNEPAVFKTTTKTMPESNIHRGDADIGGVQNHSYYHNVYGMLMARSTYKGMEMGNAAKRPFVLTRAGFIGSQRYAATWTGDNLSNWEHLHMSLPMVLQLGLSGQPLSGPDIGGFAGNATPKLFGRWMGVGALFPFSRGHTETGSIDHEPWSFGKECEEVCRLALLRRYRLLPHIYTLFYHSHTKGIPVATPVFFADTQDPELRKVETSFLLGPLLVCASTLPNKGAHEYAHKLPKGIWLSFDFADSHPDLPVLYLQGGAILPVGLPIKHVSEASLEDDLSLIIALNENVLQTWG

SEQ ID NO: 170003 - protein, 597 aa, Zea Mays
MAAATAADMVWVRVLEDGVFRFDASEAARAAAGPSLSFADPRRREAPHDGADMPAVVPVCEVAAGGSQKVVIKLPPGTSFYGTGEASGPLERTGKRVFTWNTDAWGFGPGTTSLYQSHPWVLAVLPDGKALGVLADTTRRCEIDLRQESTIKFSALSAYPVITFGPFNTPADVMTSLSHAIGTVSMPPKWSLGYHQCRWSYDSSEKVLKIRFPDPISMVDDLHSIGCKAIWMLDPGIKKEEGYFVYDSGSKSDVWIQKADGSPFVGEVWPGDCVFPDYTSEKTRAWWASLVKDFISIGVDGIWNDMNEPAVFKTTTKTMPESNIHRGDADIGGVQNHSYYHNVYGMLMARSTYKGMEMGNAAKRPFVLTRAGFIGSQRYAATWTGDNLSNWEHLHMSLPMVLQLGLSGQPLSGPDIGGFAGNATPKLFGRWMGVGALFPFSRGHTETGSIDHEPWSFGKECEEVCRLALLRRYRLLPHIYTLFYHSHTKGIPVATPVFFADTQDPELRKVETSFLLGPLLVCASTLPNKGAHEYAHKLPKGIWLSFDFADSHPDLPVLYLQGGAILPVGLPIKHVKLKVFSLKMQEMDMHSHRETIF

SEQ ID NO: 170004 - protein, 1053 aa, Zea Mays
MGWSPRPPPITRSTASLRLVPHFSHFRFSFHRAQESRGGGGSRRRTLRCCGGTAPAAAAGAAEGRMAAATAADMVWVRVLEDGVFRFDASEAARAAAGPSLSFADPRRREAPHDGADMPAVVPVCEVAAGGSQKVVIKLPPGTSFYGTGEASGPLERTGKRMYFYQVFTWNTDAWGFGPGTTSLYQSHPWVLAVLPDGKALGVLADTTRRCEIDLRQESTIKFSALSAYPVITFGPFNTPADVMTSLSHAIGTVSMPPKWSLGYHQCRWSYDSSEKVLKVVRTFREKDIPCDVVWMDIDYMDGFRCFTFDSIRFPDPISMVDDLHSIGCKAIWMLDPGIKKEEGYFVYDSGSKSDVWIQKADGSPFVGEVWPGDCVFPDYTSEKTRAWWASLVKDFISIGVDGIWNDMNEPAVFKTTTKTMPESNIHRGDADIGGVQNHSYYHNVYGMLMARSTYKGMEMGNAAKRPFVLTRAGFIGSQRYAATWTGDNLSNWEHLHMSLPMVLQLGLSGQPLSGPDIGGFAGNATPKLFGRWMGVGALFPFSRGHTETGSIDHEPWSFGKECEEVCRLALLRRYRLLPHIYTLFYHSHTKGIPVATPVFFADTQDPELRKVETSFLLGPLLVCASTLPNKGAHEYAHKLPKGIWLSFDFADSHPDLPVLYLQGGAILPVGLPIKHVSEASLEDDLSLIIALNENGKAEGVLFEDAGDGYAFTQGDYLLTYYIAELHSSVVTVKILKSEGSWKRPKRNLKINILLGGGAMISTDGVDGEVIHLTMPSESVVSSLVATSEFEHKKRMEMIQPIPDIEEPSGQEGAELSKIPVDLKSGDWFLKIVPWIGGRIISMAHIPSDSQWLHSRIEINGYEEYSGAEYRSAGCTEEYKVIRRHLEQSGEEESICMEGDIGGGLVLQRQISILKDNPKIVQIDSSIQARSVGAGSGGFSRLVCLRVHPTFTLLHPTEVVVAFTAINGSKQEISPEAGEITFEGDLKPNGEWMLVDKCVGLSLVNRFNPREVSKCFVHWGTGDVNMELWSEERPVSNETPLRICHQYEVQQTT

SEQ ID NO: 170005 - protein, 1016 aa, Zea Mays
MGWSPRPPPITRSTASLRLVPHFSHFRFSFHRAQESRGGGGSRRRTLRCCGGTAPAAAAGAAEGRMAAATAADMVWVRVLEDGVFRFDASEAARAAAGPSLSFADPRRREAPHDGADMPAVVPVCEVAAGGSQKVVIKLPPGTSFYGTGEASGPLERTGKRVFTWNTDAWGFGPGTTSLYQSHPWVLAVLPDGKALGVLADTTRRCEIDLRQESTIKFSALSAYPVITFGPFNTPADVMTSLSHAIGTVSMPPKWSLGYHQCRWSYDSSEKVLKVVRTFREKDIPCDVVWMDIDYMDGFRCFTFDSIRFPDPISMVDDLHSIGCKAIWMLDPGIKKEEGYFVYDSGSKSDVWIQKADGSPFVGEVWPGDCVFPDYTSEKTRAWWASLVKDFISIGVDGIWNDMNEPAVFKTTTKTMPESNIHRGDADIGGVQNHSYYHNVYGMLMARSTYKGMEMGNAAKRPFVLTRAGFIGSQRYAATWTGDNLSNWEHLHMSLPMVLQLGLSGQPLSGPDIGGFAGNATPKLFGRWMGVGALFPFSRGHTETGSIDHEPWSFGKECEEVCRLALLRRYRLLPHIYTLFYHSHTKGIPVATPVFFADTQDPELRKVETSFLLGPLLVCASTLPNKGAHEYAHKLPKGIWLSFDFADSHPDLPVLYLQGKAEGVLFEDAGDGYAFTQGDYLLTYYIAELHSSVVTVKILKSEGSWKRPKRNLKINILLGGGAMISTDGVDGEVIHLTMPSESVVSSLVATSEFEHKKRMEMIQPIPDIEEPSGQEGAELSKIPVDLKSGDWFLKIVPWIGGRIISMAHIPSDSQWLHSRIEINGYEEYSGAEYRSAGCTEEYKVIRRHLEQSGEEESICMEGDIGGGLVLQRQISILKDNPKIVQIDSSIQARSVGAGSGGFSRLVCLRVHPTFTLLHPTEVVVAFTAINGSKQEISPEAGEITFEGDLKPNGEWMLVDKCVGLSLVNRFNPREVSKCFVHWGTGDVNMELWSEERPVSNETPLRICHQYEVQQTT

SEQ ID NO: 170006 - protein, 696 aa, Zea Mays
MGWSPRPPPITRSTASLRLVPHFSHFRFSFHRAQESRGGGGSRRRTLRCCGGTAPAAAAGAAEGRMAAATAADMVWVRVLEDGVFRFDASEAARAAAGPSLSFADPRRREAPHDGADMPAVVPVCEVAAGGSQKVVIKLPPGTSFYGTGEASGPLERTGKRVFTWNTDAWGFGPGTTSLYQSHPWVLAVLPDGKALGVLADTTRRCEIDLRQESTIKFSALSAYPVITFGPFNTPADVMTSLSHAIGTVSMPPKWSLGYHQCRWSYDSSEKVLKVVRTFREKDIPCDVVWMDIDYMDGFRCFTFDSIRFPDPISMVDDLHSIGCKAIWMLDPGIKKEEGYFVYDSGSKSDVWIQKADGSPFVGEVWPGDCVFPDYTSEKTRAWWASLVKDFISIGVDGIWNDMNEPAVFKTTTKTMPESNIHRGDADIGGVQNHSYYHNVYGMLMARSTYKGMEMGNAAKRPFVLTRAGFIGSQRYAATWTGDNLSNWEHLHMSLPMVLQLGLSGQPLSGPDIGGFAGNATPKLFGRWMGVGALFPFSRGHTETGSIDHEPWSFGKECEEVCRLALLRRYRLLPHIYTLFYHSHTKGIPVATPVFFADTQDPELRKVETSFLLGPLLVCASTLPNKGAHEYAHKLPKGIWLSFDFADSHPDLPVLYLQGGAILPVGLPIKHVSEASLEDDLSLIIALNENVLQTWG

SEQ ID NO: 170007 - protein, 183 aa, Zea Mays
MISTDGVDGEVIHLTMPSESVVSSLVATSEFEHKKRMEMIQPIPDIEEPSGQEGAELSKIPVDLKSGDWFLKIVPWIGGRIISMAHIPSDSQWLHSRIEINGYEEYSGAEYRSAGCTEEYKVIRRHLEQSGEEESICMEGDIGGGLVLQRQISILKDNPKIVQIDSSIQARSVGAGSGGFSRN

SEQ ID NO: 170008 - protein, 254 aa, Zea Mays
MFVYFIQGKAEGVLFEDAGDGYAFTQGDYLLTYYIAELHSSVVTVKILKSEGSWKRPKRNLKINILLGGGAMISTDGVDGEVIHLTMPSESVVSSLVATSEFEHKKRMEMIQPIPDIEEPSGQEGAELSKIPVDLKSGDWFLKIVPWIGGRIISMAHIPSDSQWLHSRIEINGYEEYSGAEYRSAGCTEEYKVIRRHLEQSGEEESICMEGDIGGGLVLQRQISILKDNPKIVQIDSSIQARSVGAGSGGFSRN

SEQ ID NO: 170009 - protein, 524 aa, Zea Mays
MGWSPRPPPITRSTASLRLVPHFSHFRFSFHRAQESRGGGGSRRRTLRCCGGTAPAAAAGAAEGRMAAATAADMVWVRVLEDGVFRFDASEAARAAAGPSLSFADPRRREAPHDGADMPAVVPVCEVAAGGSQKVVIKLPPGTSFYGTGEASGPLERTGKRVFTWNTDAWGFGPGTTSLYQSHPWVLAVLPDGKALGVLADTTRRCEIDLRQESTIKFSALSAYPVITFGPFNTPADVMTSLSHAIGTVSMPPKWSLGYHQCRWSYDSSEKVLKVVRTFREKDIPCDVVWMDIDYMDGFRCFTFDSIRFPDPISMVDDLHSIGCKAIWMLDPGIKKEEGYFVYDSGSKSDVWIQKADGSPFVGEYASHSLHSGEVWPGDCVFPDYTSEKTRAWWASLVKDFISIGVDGIWNDMNEPAVFKTTTKTMPESNIHRGDADIGGVQNHSYYHNVYGMLMARSTYKGMEMGNAAKRPFVLTRAGFIGSQRYAATWTGDNLSNWEHLHMSLPMVLQLVIETFVLISKVVP

SEQ ID NO: 170010 - protein, 133 aa, Zea Mays
MEPMTEPPPALPFAAVVPKISPRRISTRPTAQGPHSSLLVLFVVHLSARRRFPVCIELVPCRAPAAAPSCTPTLASCCHARLRYSPSIWLLADVPLELAPSSCRASPSLYALSRPLLASSIVTAKLSSFRRPY

SEQ ID NO: 170011 - protein, 298 aa, Zea Mays
MRLGISTGSSAPPRHLCPCTTCPSMRGWRMGDVTNSRPYFCLGDLWEAFKEWSFYGAGVPLVLSGGESVIQYYVPYLSAIQLYADPSKFQSKISEGSSETDVNRLRSSTVETLCRLEGGFQRDGDEMHSPSTRPIFEYLETDPPFGREPLTDKVSVLASKFPDLKTFSSCDLLPTSWMSVAWYPIYRIPTGPTLKDLDACFLTFHYLSTPTKDTDPSTPACPRFGGLNCNMDAAGKLTLPVFGLASYKLNSSIWSSNRPEEHQLVASLMQTADDWLRHRQVYHPDFRFFLTHYNTALR

SEQ ID NO: 170012 - protein, 357 aa, Zea Mays
MAGPSGASSSSRGAGVVVDRFYSPPHVRRQQQEEQLQRLKGLAQGQRPSSPAAGTLTPRAAKQKTPPAEMPVPVKESERRADASSKPVSAPAYTAKAAATADGVTTPPPSPAGLDEAGNLDRFLSSTTPSVPVHYLPKTSMRGWRMGDVTNSRPYFCLGDLWEAFKEWSFYGAGVPLVLSGGESVIQYYVPYLSAIQLYADPSKFQSKISEGSSETDVNRLRSSTVETLCRLEGGFQRDGDEMHSPSTRPIFEYLETDPPFGREPLTDKVSVLASKFPDLKTFSSCDLLPTSWMSVAWYPIYRIPTGPTLKDLDACFLTFHYLSTPTKDTDPSTPACPRFGGLNCNMDAAGLRSISS

SEQ ID NO: 170013 - protein, 203 aa, Zea Mays
MSTTTHVQEDPLSAFFSAAANVGGNSAVAVARQPIQPFGATPVAAHAATSITTTQSPGLHYLLPSQASSVSGRPADAHGGTGSIGRSTSLVYPSLFSPLTSSQTKMVHTNSAVPTAPPQHPRIAQQPQSAPLLQPFPLPTASSPPYGTPLLQPFPPPNPSPSLASAPVLSPALTRDKVRDALLRLVENDEFVDLVYREIMNRQ

SEQ ID NO: 170014 - protein, 239 aa, Zea Mays
MLSQRWHQSRKFLLSKELEAAPSLVDGPLEAQTSNIMSTTTHVQEDPLSAFFSAAANVGGNSAVAVARQPIQPFGATPVAAHAATSITTTQSPGLHYLLPSQASSVSGRPADAHGGTGSIGRSTSLVYPSLFSPLTSSQTKMVHTNSAVPTAPPQHPRIAQQPQSAPLLQPFPLPTASSPPYGTPLLQPFPPPNPSPSLASAPVLSPALTRDKVRDALLRLVENDEFVDLVYREIMNRQ

SEQ ID NO: 170015 - protein, 81 aa, Zea Mays
MRRHRQFQMAVACQTERAEAAAPTGSWTTRATTTGARGWTHDGRSRCEGSLIPCQATHAMPTHMETSLLDRATLFLDRLVL

SEQ ID NO: 170016 - protein, 305 aa, Zea Mays
MFSKGIKSCLTYIEAVPWNENEEEKLKNLFARFTFDEAMSQDILARLRPHNWKSSDDLTIQLIQSVTGSTSTVARKDMQSLVNGLLSKSSVYQKDSSGLNKESLYQICYSCLESLVDLFEEAREPTDYTGQILVVRGSKPLIERVSRQTENLSWLLDILVNNDIAEEFVELWAKQDRLIRMHEQASAMVRYELSRISAAVFIALGKGKVQCRGNVRSLVFRGWFSTMLLDFGWLQRCPKGLDLRSLEENLGRGILTLPLRQQQCLFEEWFQFYSTKGAECPNLIRAFQVWWRRSFVRSSVEPQRQ

SEQ ID NO: 170017 - protein, 601 aa, Zea Mays
MEQELLQILRGLKSPRHLLQTHAQLLARGLSASPRLLPVLVSAAFSVSPSSPRQAAAAAILGAAGSGASTVAHNTLIERLAGIGGGGGGGGRGCSAADALAAYAAMRAAGVYPNGFTFTFLLRACESLRRLFLCRCVHGQIVRCGFGSDVVVQNALLNVYYKCSDPGDVGIARQVFDEMANRDVVSWNSIVGVYMSNGDAAGAMELFEAMPERNVVSWNTIVAAFTRAGDMVSARAVFDRMPIRDAISWNLMISGYATSGNVESAWSLFDIMDRKDVVSWTAMVSAYAKIGELDSARVLFDQMPDKNLVSWNAMITGYNHNLRYDDALCTFQQMMLEGRFMPDEATLVSVVSACAQLGSVEYCNWISSYISKSNTHITVALGNALVDMFAKCGDVGRAHLVFNKMKTRCTITWTTMISGFAYNGQFREALLVYNDMCREGVTLDDTVFVAALGACAHGGLLQEGWSIFNQMVEYCRIVPRMEHYGCIVDLLGRAELSEYVSTKIVEMEPFNSSYQVLVSNCSALEGRWDSVMDARRTMRDCGVEKTPGSSLIQVGNEVHEFLAKDTRHKKRKEVYKTLDGLIALIRHTDHTPLDKLLQPLE

SEQ ID NO: 170018 - protein, 533 aa, Zea Mays
MQDGLMHTHDEEARKYFRHSGVHCVLSPRYASNKLSIFKQQVVGTLFTHHQKCVIVDTQATGNNRKITAFIGGLDLCDGRYDTPEHRLFKDLDTIFKDDFHNPTFPVNKNGPRQPWHDLHCKIEGPAAYDILTNFEQRWRKSAKWKVSVRRAVSWHHDTLVKIDRMSWIVSPSSDELNAHVCEEKDPENWHVQVFRSIDSGSVKGFPKLVQEAESQNLVCAKNLQIDKSIHNAYVKAIRSAQHFVYIENQYFIGSSYYWSAHRSAGAENLIPIELAIKIARKIKAKERFAAYIVIPMWPEGNPTTAAMQEILYWQGHTMSMMYKIVADALRKEGLHERHPQEYLNFYCLGKREVSNEVPTTGNSNENSAVRLSQKFKRFMIYVHSKGMIVDDEYVLIGSANINQRSMDGSRDTEIAMGAYQPHYSWAGSGRPPRGQVYGYRMSLWAEHLGTVQECFRRPESEECVQQVNQMADDNWASYVSPQMADMKGHLMKYPVRVEQDGRVGPLHGQESFPDVGGKVLGTHSSLPNALTT

SEQ ID NO: 170019 - protein, 677 aa, Zea Mays
MGKHSAESGVSMLLHGDLDIQIIEAKCLPNMDLMTERMRKCFTGYGACSNDCGKSEPPHPDMRKIITSDPYVSVCLSGATVAQTRVIANSENPKWDEHFYVQVAHSVSRVEFHVKDNDVFGAELIGVASIPVEHIMPGDLVGGWFPISGQYSNPMKPSPELHLSIQYKPIDTNPLYKDGVGADGHQSVGVPNAYFPLRKGGKVTLYQDAHVPDNFQPHIEMDDGRTYEQNKCWEDICHAIIEAHHLIYIVGWSLYHPVKLVRESTKPVPNGNPVTIGEILKRKVQEGVRVIVLLWDDKTSHDKFLLKTDGLMHTHDEEARKYFRHSGVHCVLSPRYASNKLSIFKQQVVGTLFTHHQKCVIVDTQATGNNRKITAFIGGLDLCDGRYDTPEHRLFKDLDTIFKDDFHNPTFPVNKNGPRQPWHDLHCKIEGPAAYDILTNFEQRWRKSAKWKVSVRRAVSWHHDTLVKIDRMSWIVSPSSDELNAHVCEEKDPENWHVQVFRSIDSGSVKGFPKLVQEAESQNLVCAKNLQIDKSIHNAYVKAIRSAQHFVYIENQYFIGSSYYWSAHRSAGAENLIPIELAIKIARKIKAKERFAAYIVIPMWPEGNPTTAAMQEILYWQGHTMSMMYKIVADALRKEGLHERHPQEYLNFYCLGKREVSNEVPTTGNSNENSAVG

SEQ ID NO: 170020 - protein, 735 aa, Zea Mays
MGKHSAESGVSMLLHGDLDIQIIEAKCLPNMDLMTERMRKCFTGYGACSNDCGKSEPPHPDMRKIITSDPYVSVCLSGATVAQTRVIANSENPKWDEHFYVQVAHSVSRVEFHVKDNDVFGAELIGVASIPVEHIMPGDLVGGWFPISGQYSNPMKPSPELHLSIQYKPIDTNPLYKDGVGADGHQSVGVPNAYFPLRKGGGMQDGLMHTHDEEARKYFRHSGVHCVLSPRYASNKLSIFKQQVVGTLFTHHQKCVIVDTQATGNNRKITAFIGGLDLCDGRYDTPEHRLFKDLDTIFKDDFHNPTFPVNKNGPRQPWHDLHCKIEGPAAYDILTNFEQRWRKSAKWKVSVRRAVSWHHDTLVKIDRMSWIVSPSSDELNAHVCEEKDPENWHVQVFRSIDSGSVKGFPKLVQEAESQNLVCAKNLQIDKSIHNAYVKAIRSAQHFVYIENQYFIGSSYYWSAHRSAGAENLIPIELAIKIARKIKAKERFAAYIVIPMWPEGNPTTAAMQEILYWQGHTMSMMYKIVADALRKEGLHERHPQEYLNFYCLGKREVSNEVPTTGNSNENSAVRLSQKFKRFMIYVHSKGMIVDDEYVLIGSANINQRSMDGSRDTEIAMGAYQPHYSWAGSGRPPRGQVYGYRMSLWAEHLGTVQECFRRPESEECVQQVNQMADDNWASYVSPQMADMKGHLMKYPVRVEQDGRVGPLHGQESFPDVGGKVLGTHSSLPNALTT

SEQ ID NO: 170021 - protein, 371 aa, Zea Mays
MQDGLMHTHDEEARKYFRHSGVHCVLSPRYASNKLSIFKQQVVGTLFTHHQKCVIVDTQATGNNRKITAFIGGLDLCDGRYDTPEHRLFKDLDTIFKDDFHNPTFPVNKNGPRQPWHDLHCKIEGPAAYDILTNFEQRWRKSAKWKVSVRRAVSWHHDTLVKIDRMSWIVSPSSDELNAHVCEEKDPENWHVQVFRSIDSGSVKGFPKLVQEAESQNLVCAKNLQIDKSIHNAYVKAIRSAQHFVYIENQYFIGSSYYWSAHRSAGAENLIPIELAIKIARKIKAKERFAAYIVIPMWPEGNPTTAAMQEILYWQGHTMSMMYKIVADALRKEGLHERHPQEYLNFYCLGKREVSNEVPTTGNSNENSAVG

SEQ ID NO: 170022 - protein, 368 aa, Zea Mays
MSWIVSPSSDELNAHVCEEKDPENWHVQVFRSIDSGSVKGFPKLVQEAESQNLVCAKNLQIDKSIHNAYVKAIRSAQHFVYIENQYFIGSSYYWSAHRSAGAENLIPIELAIKIARKIKAKERFAAYIVIPMWPEGNPTTAAMQEILYWQGHTMSMMYKIVADALRKEGLHERHPQEYLNFYCLGKREVSNEVPTTGNSNENSAVRLSQKFKRFMIYVHSKGMIVDDEYVLIGSANINQRSMDGSRDTEIAMGAYQPHYSWAGSGRPPRGQVYGYRMSLWAEHLGTVQECFRRPESEECVQQVNQMADDNWASYVSPQMADMKGHLMKYPVRVEQDGRVGPLHGQESFPDVGGKVLGTHSSLPNALTT

SEQ ID NO: 170023 - protein, 134 aa, Zea Mays
MDGQGTKHRILMVSDFFFPNFGGVESHIYYLSQCLLKLGHKVVVMTHAYGNRSGVRYVTNGLKVYYVPWRPFLMQNTLPTLFLTFPIVRTIIIREKISVVHGHQAFSTLCHEALMHARTMGQYVSHIQAKRTLS

SEQ ID NO: 170024 - protein, 234 aa, Zea Mays
MDGQGTKHRILMVSDFFFPNFGGVESHIYYLSQCLLKLGHKVVVMTHAYGNRSGVRYVTNGLKVYYVPWRPFLMQNTLPTLFLTFPIFTLADIDQAICVSHTSKENTVLRSGISPEKVFMVPNAVDTAMFTPSPKRLNCDEIVIVVVSRLVYRKGADLLVEVIPEVCRLFPKVRFIVGGDGPKRVRLEEMREKFSLQDRVEMLGAVPHAQVRSVLISGHIFLNRGILHSHSRSS

SEQ ID NO: 170025 - protein, 184 aa, Zea Mays
MEAIPDAEYTSYTILDVSNYIDQAICVSHTSKENTVLRSGISPEKVFMVPNAVDTAMFTPSPKRLNCDEIVIVVVSRLVYRKGADLLVEVIPEVCRLFPKVRFIVGGDGPKRVRLEEMREKFSLQDRVEMLGAVPHAQVRSVLISGHIFLNSSLTEAFCIAILEAASCGLLTVSTRVGGVPEMT

SEQ ID NO: 170026 - protein, 351 aa, Zea Mays
MDVEYDVIVLGTGLKECILSGLLSVDRLKVLHMDRNDYYGGDSTSLNLNQLWKRFKGEETPPAHIGASRDYNVDMVPKFMMANGTLVRVLIHTGVTKYMSFKAVDGSYVFNKGKLYAESVARFQGGSPYIYPLYGLGELPQGFARLSAVYGGTYMLSKPECKVEFDDEGKVCGVTSEGETAKCKKVVCDPSYLPDKVKKIGKVFRAIAIMSHPIPNTAESHSVQIILPQKQLGRRSDMYVFCCSYSHNVASKGKFIAFVSAQAETDNPEKELKPGIDLLGKVDELFIDIYDRYEPTNDSSADNCFISTSYDATTHFESTVMDVLSLYTKITGKTVDLSVDLSAASAAEDDM

SEQ ID NO: 170027 - protein, 1572 aa, Zea Mays
MHECLQQARAPMFDVPSAIEVMLTGGYQRLPRCIEEIGSQHKLSPDEEKRALRKLDASVRYRVLVTPRPKEVSNVSVTDGIAVFRVDGEFKILLTLGYRGNVDLWRILHMELLVGEKKGPIKLDESRRFALGDDIERRMAASENPFAVLYAILHEFCISLAMDTIIKQANVLRQGRWKDAIRSELISDSATVQTGNTPLMQLVQDAEFDSSGFKIPGLKVNYWLDEKSTSTAEPDSSPFIKIEAGLDMQIKCQHSSFILDPFTDKEASLSLDLSCIDVEQLILRAVSCNRHTRLLNIQRQLCKNVQIFQSPKDVVLTRDVAAAKDPMMNAEKGFSDCFGNEVLQVRACGQAYVSLGINIRSGRFLLQSPENILPRAALMDCEEALNKGSTSATEVFSSLRTRSILHLLAATGSFFGLKVYQQSQGTLKIPKTLLHGSDLMVMGFPHCANAYYLLMQLDKDFRPVFHLLETQCDANGNTNASGDVKEAIRYNKINIGQMQILKNEMNENPFDVKLQALQSLVDSADMMESDLPVQNAIEPLPLLPACSPSFSSIVDEVFEYERGSTAAQNRCLPVDIQGINARVVSPMHDGCLSYTQANNNMNVHPNVSLNSYFPSNFRHLQGANKSLQLVPSRLGKLITAGSDGASRKHYLSDFLSSIPSLRGLQPSEPRKRRKKTESVQSLLPLQAHSSNLQSRGSLTYGDVLAERNNCVPATIYASVLLHVIRHCSLCIKHAQLTAQMDSLAIPYVEEVGLRRPSSNLWLRLPFAQDDSWNHICLRLGKAGSMSWDVRINDPHFRELWELNGGSTKTQWGVGIRIANSSEMDSHISFDSSGVVLTYNTVEADSVQKLVSDLRRLSNARSFALGMRRLIGVKFQDKLDDNQLTMEVKSQSVNKGNSDAADKLSEQMRKTFRIEAVGLMSLWFSYGTMPMVHIVVEWEIAKAGCTMHVSPDQLWPHTKFLEDFVNGGEVASFLDCIRLTAGPLLALGGAIRPARMPVAVSSGYSSMPKQPNIPTQGPLVNGSSSTIHHAPGPSNAASAHLGSHNLHAAAMLSAVGRGGPGLVPSSLLPFDVSVVLRGPYWIRIIYRKKFSVDMRCFAGDQVWLQPATPPKGGPSVGGSLPCPQFRPFIMEHVAQGLNALEPNFMNATQASGHLNNNAGVPQTAPSANRLNATPGVSMVRPTSGVANHVAASLSRAGNAMLASSALASGISGTSVRLTAGAGLPVHMKGELNTAFIGLGDDGGYGGGWVPLAALKKVLRGILKYLGVLWLFAQLPELLKEILGSILKDNEGALLNLDQEQPALRFYVGGYVFAVSVHRVQLLLQVLSVKRFHHQQQQQQAQSNAQEELAAVEINEICDYFSRRVASEPYDASRVASFITLLTLPILVLREFLKLITWKKGLSPVHGDIATAQRARIELCLENHSGSASSDNTENSSLAKSNIHHDRAHSSVEFALTFVLDHALIPHMNVAGGAAWLPYCVSVKLRYSFGDNNHIAFLAMNGSHGGRACWLQFEEWERCKQKVSRAVETVNGSGVAGEVGQGRLRMVAEMIQKQLQLCLQQLRDDPLSAGSTAS

SEQ ID NO: 170028 - protein, 1606 aa, Zea Mays
MHECLQQARAPMFDVPSAIEVMLTGGYQRLPRCIEEIGSQHKLSPDEEKRALRKLDASVRYRVLVTPRPKEVSNVSVTDGIAVFRVDGEFKILLTLGYRGNVDLWRILHMELLVGEKKGPIKLDESRRFALGDDIERRMAASENPFAVLYAILHEFCISLAMDTIIKQANVLRQGRWKDAIRSELISDSATVQTGNTPLMQLVQDAEFDSSGFKIPGLKVNYWLDEKSTSTAEPDSSPFIKIEAGLDMQIKCQHSSFILDPFTDKEASLSLDLSCIDVEQLILRAVSCNRHTRLLNIQRQLCKNVQIFQSPKDVVLTRDVAAAKDPMMNAEKGFSDCFGNEVLQVRACGQAYVSLGINIRSGRFLLQSPENILPRAALMDCEEALNKGSTSATEVFSSLRTRSILHLLAATGSFFGLKVYQQSQGTLKIPKTLLHGSDLMVMGFPHCANAYYLLMQLDKDFRPVFHLLETQCDANGNTNASGDVKEAIRYNKINIGQMQILKNEMNENPFDVKLQALQSLVDSADMMESDLPVQNAIEPLPLLPACSPSFSSIVDEVFEYERGSTAAQNRCLPVDIQGINARVVSPMHDGCLSYTQANNNMNVHPNVSLNSYFPSNFRHLQGANKSLQLVPSSNDNSNQIPAQSSHSGNLGNATPGHLIGSSTTTGGLGKLITAGSDGASRKHYLSDFLSSIPSLRGLQPSEPRKRRKKTESVQSLLPLQAHSSNLQSRGSLTYGDVLAERNNCVPATIYASVLLHVIRHCSLCIKHAQLTAQMDSLAIPYVEEVGLRRPSSNLWLRLPFAQDDSWNHICLRLGKAGSMSWDVRINDPHFRELWELNGGSTKTQWGVGIRIANSSEMDSHISFDSSGVVLTYNTVEADSVQKLVSDLRRLSNARSFALGMRRLIGVKFQDKLDDNQLTMEVKSQSVNKGNSDAADKLSEQMRKTFRIEAVGLMSLWFSYGTMPMVHIVVEWEIAKAGCTMHVSPDQLWPHTKFLEDFVNGGEVASFLDCIRLTAGPLLALGGAIRPARMPVAVSSGYSSMPKQPNIPTQGPLVNGSSSTIHHAPGPSNAASAHLGSHNLHAAAMLSAVGRGGPGLVPSSLLPFDVSVVLRGPYWIRIIYRKKFSVDMRCFAGDQVWLQPATPPKGGPSVGGSLPCPQFRPFIMEHVAQGLNALEPNFMNATQASGHLNNNAGVPQTAPSANRLNATPGVSMVRPTSGVANHVAASLSRAGNAMLASSALASGISGTSVRLTAGAGLPVHMKGELNTAFIGLGDDGGYGGGWVPLAALKKVLRGILKYLGVLWLFAQLPELLKEILGSILKDNEGALLNLDQEQPALRFYVGGYVFAVSVHRVQLLLQVLSVKRFHHQQQQQQAQSNAQEELAAVEINEICDYFSRRVASEPYDASRVASFITLLTLPILVLREFLKLITWKKGLSPVHGDIATAQRARIELCLENHSGSASSDNTENSSLAKSNIHHDRAHSSVEFALTFVLDHALIPHMNVAGGAAWLPYCVSVKLRYSFGDNNHIAFLAMNGSHGGRACWLQFEEWERCKQKVSRAVETVNGSGVAGEVGQGRLRMVAEMIQKQLQLCLQQLRDDPLSAGSTAS

SEQ ID NO: 170029 - protein, 1721 aa, Zea Mays
MAGELGQQTVELGAVVRRAAEESYLALRELVEKSQAEAEGKGIGAGANGSWQRSDTEKKIDLLKFITRTRQRMLRLHVLAKWCQQVPLVHYCQQLGSTLHSHETCFTQTADSLFYMHECLQQARAPMFDVPSAIEVMLTGGYQRLPRCIEEIGSQHKLSPDEEKRALRKLDASVRYRVLVTPRPKEVSNVSVTDGIAVFRVDGEFKILLTLGYRGNVDLWRILHMELLVGEKKGPIKLDESRRFALGDDIERRMAASENPFAVLYAILHEFCISLAMDTIIKQANVLRQGRWKDAIRSELISDSATVQTGNTPLMQLVQDAEFDSSGFKIPGLKVNYWLDEKSTSTAEPDSSPFIKIEAGLDMQIKCQHSSFILDPFTDKEASLSLDLSCIDVEQLILRAVSCNRHTRLLNIQRQLCKNVQIFQSPKDVVLTRDVAAAKDPMMNAEKGFSDCFGNEVLQVRACGQAYVSLGINIRSGRFLLQSPENILPRAALMDCEEALNKGSTSATEVFSSLRTRSILHLLAATGSFFGLKVYQQSQGTLKIPKTLLHGSDLMVMGFPHCANAYYLLMQLDKDFRPVFHLLETQCDANGNTNASGDVKEAIRYNKINIGQMQILKNEMNENPFDVKLQALQSLVDSADMMESDLPVQNAIEPLPLLPACSPSFSSIVDEVFEYERGSTAAQNRCLPVDIQGINARVVSPMHDGCLSYTQANNNMNVHPNVSLNSYFPSNFRHLQGANKSLQLVPSSNDNSNQIPAQSSHSGNLGNATPGHLIGSSTTTGGLGKLITAGSDGASRKHYLSDFLSSIPSLRGLQPSEPRKRRKKTESVQSLLPLQAHSSNLQSRGSLTYGDVLAERNNCVPATIYASVLLHVIRHCSLCIKHAQLTAQMDSLAIPYVEEVGLRRPSSNLWLRLPFAQDDSWNHICLRLGKAGSMSWDVRINDPHFRELWELNGGSTKTQWGVGIRIANSSEMDSHISFDSSGVVLTYNTVEADSVQKLVSDLRRLSNARSFALGMRRLIGVKFQDKLDDNQLTMEVKSQSVNKGNSDAADKLSEQMRKTFRIEAVGLMSLWFSYGTMPMVHIVVEWEIAKAGCTMHVSPDQLWPHTKFLEDFVNGGEVASFLDCIRLTAGPLLALGGAIRPARMPVAVSSGYSSMPKQPNIPTQGPLVNGSSSTIHHAPGPSNAASAHLGSHNLHAAAMLSAVGRGGPGLVPSSLLPFDVSVVLRGPYWIRIIYRKKFSVDMRCFAGDQVWLQPATPPKGGPSVGGSLPCPQFRPFIMEHVAQGLNALEPNFMNATQASGHLNNNAGVPQTAPSANRLNATPGVSMVRPTSGVANHVAASLSRAGNAMLASSALASGISGTSVRLTAGAGLPVHMKGELNTAFIGLGDDGGYGGGWVPLAALKKVLRGILKYLGVLWLFAQLPELLKEILGSILKDNEGALLNLDQEQPALRFYVGGYVFAVSVHRVQLLLQVLSVKRFHHQQQQQQAQSNAQEELAAVEINEICDYFSRRVASEPYDASRVASFITLLTLPILVLREFLKLITWKKGLSPVHGDIATAQRARIELCLENHSGSASSDNTENSSLAKSNIHHDRAHSSVEFALTFVLDHALIPHMNVAGGAAWLPYCVSVKLRYSFGDNNHIAFLAMNGSHGGRACWLQFEEWERCKQKVSRAVETVNGSGVAGEVGQGRLRMVAEMIQKQLQLCLQQLRDDPLSAGSTAS

SEQ ID NO: 170030 - protein, 1373 aa, Zea Mays
MQLVQDAEFDSSGFKIPGLKVNYWLDEKSTSTAEPDSSPFIKIEAGLDMQIKCQHSSFILDPFTDKEASLSLDLSCIDVEQLILRAVSCNRHTRLLNIQRQLCKNVQIFQSPKDVVLTRDVAAAKDPMMNAEKGFSDCFGNEVLQVRACGQAYVSLGINIRSGRFLLQSPENILPRAALMDCEEALNKGSTSATEVFSSLRTRSILHLLAATGSFFGLKVYQQSQGTLKIPKTLLHGSDLMVMGFPHCANAYYLLMQLDKDFRPVFHLLETQCDANGNTNASGDVKEAIRYNKINIGQMQILKNEMNENPFDVKLQALQSLVDSADMMESDLPVQNAIEPLPLLPACSPSFSSIVDEVFEYERGSTAAQNRCLPVDIQGINARVVSPMHDGCLSYTQANNNMNVHPNVSLNSYFPSNFRHLQGANKSLQLVPSRLGKLITAGSDGASRKHYLSDFLSSIPSLRGLQPSEPRKRRKKTESVQSLLPLQAHSSNLQSRGSLTYGDVLAERNNCVPATIYASVLLHVIRHCSLCIKHAQLTAQMDSLAIPYVEEVGLRRPSSNLWLRLPFAQDDSWNHICLRLGKAGSMSWDVRINDPHFRELWELNGGSTKTQWGVGIRIANSSEMDSHISFDSSGVVLTYNTVEADSVQKLVSDLRRLSNARSFALGMRRLIGVKFQDKLDDNQLTMEVKSQSVNKGNSDAADKLSEQMRKTFRIEAVGLMSLWFSYGTMPMVHIVVEWEIAKAGCTMHVSPDQLWPHTKFLEDFVNGGEVASFLDCIRLTAGPLLALGGAIRPARMPVAVSSGYSSMPKQPNIPTQGPLVNGSSSTIHHAPGPSNAASAHLGSHNLHAAAMLSAVGRGGPGLVPSSLLPFDVSVVLRGPYWIRIIYRKKFSVDMRCFAGDQVWLQPATPPKGGPSVGGSLPCPQFRPFIMEHVAQGLNALEPNFMNATQASGHLNNNAGVPQTAPSANRLNATPGVSMVRPTSGVANHVAASLSRAGNAMLASSALASGISGTSVRLTAGAGLPVHMKGELNTAFIGLGDDGGYGGGWVPLAALKKVLRGILKYLGVLWLFAQLPELLKEILGSILKDNEGALLNLDQEQPALRFYVGGYVFAVSVHRVQLLLQVLSVKRFHHQQQQQQAQSNAQEELAAVEINEICDYFSRRVASEPYDASRVASFITLLTLPILVLREFLKLITWKKGLSPVHGDIATAQRARIELCLENHSGSASSDNTENSSLAKSNIHHDRAHSSVEFALTFVLDHALIPHMNVAGGAAWLPYCVSVKLRYSFGDNNHIAFLAMNGSHGGRACWLQFEEWERCKQKVSRAVETVNGSGVAGEVGQGRLRMVAEMIQKQLQLCLQQLRDDPLSAGSTAS

SEQ ID NO: 170031 - protein, 1041 aa, Zea Mays
MQMNRCLPVDIQGINARVVSPMHDGCLSYTQANNNMNVHPNVSLNSYFPSNFRHLQGANKSLQLVPSSNDNSNQIPAQSSHSGNLGNATPGHLIGSSTTTGGLGKLITAGSDGASRKHYLSDFLSSIPSLRGLQPSEPRKRRKKTESVQSLLPLQAHSSNLQSRGSLTYGDVLAERNNCVPATIYASVLLHVIRHCSLCIKHAQLTAQMDSLAIPYVEEVGLRRPSSNLWLRLPFAQDDSWNHICLRLGKAGSMSWDVRINDPHFRELWELNGGSTKTQWGVGIRIANSSEMDSHISFDSSGVVLTYNTVEADSVQKLVSDLRRLSNARSFALGMRRLIGVKFQDKLDDNQLTMEVKSQSVNKGNSDAADKLSEQMRKTFRIEAVGLMSLWFSYGTMPMVHIVVEWEIAKAGCTMHVSPDQLWPHTKFLEDFVNGGEVASFLDCIRLTAGPLLALGGAIRPARMPVAVSSGYSSMPKQPNIPTQGPLVNGSSSTIHHAPGPSNAASAHLGSHNLHAAAMLSAVGRGGPGLVPSSLLPFDVSVVLRGPYWIRIIYRKKFSVDMRCFAGDQVWLQPATPPKGGPSVGGSLPCPQFRPFIMEHVAQGLNALEPNFMNATQASGHLNNNAGVPQTAPSANRLNATPGVSMVRPTSGVANHVAASLSRAGNAMLASSALASGISGTSVRLTAGAGLPVHMKGELNTAFIGLGDDGGYGGGWVPLAALKKVLRGILKYLGVLWLFAQLPELLKEILGSILKDNEGALLNLDQEQPALRFYVGGYVFAVSVHRVQLLLQVLSVKRFHHQQQQQQAQSNAQEELAAVEINEICDYFSRRVASEPYDASRVASFITLLTLPILVLREFLKLITWKKGLSPVHGDIATAQRARIELCLENHSGSASSDNTENSSLAKSNIHHDRAHSSVEFALTFVLDHALIPHMNVAGGAAWLPYCVSVKLRYSFGDNNHIAFLAMNGSHGGRACWLQFEEWERCKQKVSRAVETVNGSGVAGEVGQGRLRMVAEMIQKQLQLCLQQLRDDPLSAGSTAS

SEQ ID NO: 170032 - protein, 223 aa, Zea Mays
MQRRENSIQSFEKLRLVRHNLEQAKALMDALIKREETKREAMECQVNLQRVQMKYKHEAQLVEDRTTLSGFQQTNSRFESSDDDYANSDDTTTEQPYIRPAVFHPRFPANKLSVIPPLRIKRERELKRRTQQNGWAFKRDPEEPVFLFTRPLDPEKLIAAGIKPPPDPPIENGATSPPFRCRGRIGRGGRIIFDRWNPLLQTPIDQETSYYVPYGHKPPSPEG

SEQ ID NO: 170033 - protein, 465 aa, Zea Mays
MSRLSFRPRPLDIHKKLPILKSVREFEDEEPGVAPLSSARAGVLLRHSGTELPASGANKTTEGEGSQAPSKKNAQEIPTPQFDAVDTYERDYTRTFAQPTSYIRGRGARAEIGEFVEYDLDNEDEEWLEEFNNERKNINPEKLEVLLFKLEVLDHKARERAGAITPTFIGPVPVLLQLDAAIEYLSVRYAIFQAVYNYWKTKRERWQKPILRRLQPPPPVNDTNPYNVFRPREKAHRLHTRRMQRRENSIQSFEKLRLVRHNLEQAKALMDALIKREETKREAMECQVNLQRVQMKYKHEAQLVEDRTTLSGFQQTNSRFESSDDDYANSDDTTTEQPYIRPAVFHPRFPANKLSVIPPLRIKRERELKRRTQQNGWAFKRDPEEPVFLFTRPLDPEKLIAAGIKPPPDPPIENGATSPPFRCRGRIGRGGRIIFDRWNPLLQTPIDQETSYYVPYGHKPPSPEG

SEQ ID NO: 170034 - protein, 294 aa, Zea Mays
MSRLSFRPRPLDIHKKLPILKSVREFEDEEPGVAPLSSARAGVLLRHSGTELPASGANKTTEGEGSQAPSKKNAQEIPTPQFDAVDTYERDYTRTFAQPTSYIRGRGARAEIGEFVEYDLDNEDEEWLEEFNNERKNINPEKLEVLLFKLEVLDHKARERAGAITPTFIGPVPVLLQLDAAIEYLSVRYAIFQAVYNYWKTKRERWQKPILRRLQPPPPVNDTNPYNVFRPREKAHRLHTRRMQRRENSIQSFEKLRLVLHDLCFFTAYDASLKNFISGATQLGASKSTNGCFD

SEQ ID NO: 170035 - protein, 408 aa, Zea Mays
MSRLSFRPRPLDIHKKLPILKSVREFEDEEPGVAPLSSARAGVLLRHSGTELPASGANKTTEGEGSQAPSKKNAQEIPTPQFDAVDTYERDYTRTFAQPTSYIRGRGARAEIGEFVEYDLDNEDEEWLEEFNNERKNINPEKLEVLLFKLEVLDHKARERAGAITPTFIGPVPVLLQLDAAIEALQYLSVRYAIFQAVYNYWKTKRERWQKPILRRLQPPPPVNDTNPYNVFRPREKAHRLHTRRMQRRENSIQSFEKLRLVRHNLEQAKALMDALIKREETKREAMECQVNLQRVQMKYKHEAQLVEDRTTLSGFQQTNSRFESSDDDYANSDDTTTEQPYIRPAVFHPRFPANKLSVIPPLRIKRERELKRRTQQNGWAFKRDPEEPVFLFTRPLDPEKLIAADTN

SEQ ID NO: 170036 - protein, 455 aa, Zea Mays
MSRLSFRPRPLDIHKKLPILKSVREFEDEEPGVAPLSSARAGVLLRHSGTELPASGANKTTEGEGSQAPSKKNAQEIPTPQFDAVDTYERDYTRTFAQPTSYIRGRGARAEIGEFVEYDLDNEDEEWLEEFNNERKNINPEKLEVLLFKLEVLDHKARERAGAITPTFIGPVPVLLQLDAAIEALQYLSVRYAIFQAVYNYWKTKPPPPVNDTNPYNVFRPREKAHRLHTRRMQRRENSIQSFEKLRLVRHNLEQAKALMDALIKREETKREAMECQVNLQRVQMKYKHEAQLVEDRTTLSGFQQTNSRFESSDDDYANSDDTTTEQPYIRPAVFHPRFPANKLSVIPPLRIKRERELKRRTQQNGWAFKRDPEEPVFLFTRPLDPEKLIAAGIKPPPDPPIENGATSPPFRCRGRIGRGGRIIFDRWNPLLQTPIDQETSYYVPYGHKPPSPEG

SEQ ID NO: 170037 - protein, 297 aa, Zea Mays
MSRLSFRPRPLDIHKKLPILKSVREFEDEEPGVAPLSSARAGVLLRHSGTELPASGANKTTEGEGSQAPSKKNAQEIPTPQFDAVDTYERDYTRTFAQPTSYIRGRGARAEIGEFVEYDLDNEDEEWLEEFNNERKNINPEKLEVLLFKLEVLDHKARERAGAITPTFIGPVPVLLQLDAAIEALQYLSVRYAIFQAVYNYWKTKRERWQKPILRRLQPPPPVNDTNPYNVFRPREKAHRLHTRRMQRRENSIQSFEKLRLVLHDLCFFTAYDASLKNFISGATQLGASKSTNGCFD

SEQ ID NO: 170038 - protein, 247 aa, Zea Mays
MAYDGIYRFYIQVQSLSTKYDERCKIVGDVASNLTMDEATFRDSQEHRLEIYYTIIRPQKIVYIFREVQQCTLLSKTECSEECSYALSHQDTTLDRTLKNDGSAKKGTIIVWEIFALKHKARHLVQSRLLQSPVAVVAVASATTAYAVITTTDEKPRDIVVTDDFDIKRTQPTSNSKKIVAETDVLTGQNVATFEFSSGRVVQFSSGCSYASFSPKQRVMERDPKLEGNIKNDRAVLWGTNEHDMDK

SEQ ID NO: 170039 - protein, 169 aa, Zea Mays
MDEATFRDSQEHRLEIYYTIIRPQKIVYIFREVQQCTLLSKTECSEECSYALSHQDTTLDRTLKNDGSAKKGTIIVWEIFALKHKARHLVQSRLLQSPVAVVAVASATTAYAVITTTDEKPRDIVVTDDFDIKRTQPTSNSKKIVAETDVLTGQNGKLATRLAEVLDEN

SEQ ID NO: 170040 - protein, 91 aa, Zea Mays
MGVLSPRGHDASSSHAVLSICFADVSRFTTAKCPTSAASGSDGCCGSRVARSSGVAAPPVRPTVASCAGLRSARILQRATRRPASAPRLRI

SEQ ID NO: 170041 - protein, 555 aa, Zea Mays
MKDNIPIVIRNMFNLSAPGTMICKQPANENGDLDACVKSFATVDNLALVNVEGTGMAGVPGTASAIFSAVKDVGANVIMISQASSEHSVCFAVPEKEVAVVSAELHDRFREALAAGRLSKVEVINGCSILAAVGLRMASTPGVSAILFDALAKANINVRAIAQGCSEYNITVVLKQQDCVRALRAAHSRFFLSKTTLAVGIIGPGLIGGALLNQLKNQTAVLKENMNIDLRVIGITGSSTMLLSDTGIDLTQWKQLLQKEAEPADIGSFVHHLSDNHVFPNKVLVDCTADTSVASHYYDWLKKGIHVITPNKKANSGPLDQYLKLRTMQRASYTHYFYEATVGAGLPIISTLRGLLETGDKILRIEGIFSGTLSYIFNNFEGTRAFSDVVAEAREAGYTEPDPRDDLSGTDVARKVVVLARESGLRLELSDIPVKSLVPETLASCSSADEFMQKLPSFDEDWARQRSDAEAAGEVLRYVGALDAVNRSGQVELRRYRRDHPFAQLSGSDNIIAFTTSRYKEQPLIVRGPGAGAEVTAGGVFCDILRLASYLGAPS

SEQ ID NO: 170042 - protein, 736 aa, Zea Mays
MQGLAVSCQLPPAAAAARWRPRASSSNREAVLQCWKYELSQDHYLGGPLRIGQSQGSLHRHRSTNFLRPAAAAISVEQDEVNTYLPKGDMWSVHKFGGTCMGTPKRIQCVANIVLGDSSERKLIIVSAMSKVTDMMYNLVQKAQSRDDSYAIALAEVFEKHMTAAKDLLDGEDLARFLSQLHSDVSNLRAMLRAIYIAGHATESFSDFVVGHGELWSAQMLSYAIKKSGAPCSWMDTREVLVVTPSGCNQVDPDYLECEKRLQKWFSRQPAEIIVATGFIASTAGNIPTTLKRDGSDFSAAIVGSLVRARQVTIWTDVDGVFSADPRKVSEAVILSTLSYQEAWEMSYFGANVLHPRTIIPVMKDNIPIVIRNMFNLSAPGTMICKQPANENGDLDACVKSFATVDNLALVNVEGTGMAGVPGTASAIFSAVKDVGANVIMISQASSEHSVCFAVPEKEVAVVSAELHDRFREALAAGRLSKVEVINGCSILAAVGLRMASTPGVSAILFDALAKANINVRAIAQGCSEYNITVVLKQQDCVRALRAAHSRFFLSKTTLAVGIIGPGLIGGALLNQLKNQTAVLKENMNIDLRVIGITGSSTMLLSDTGIDLTQWKQLLQKEAEPADIGSFVHHLSDNHVFPNKVLVDCTADTSVASHYYDWLKKGIHVITPNKKANSGPLDQYLKLRTMQRASYTHYFYEATVGAGLPIISTLRGLLETGDKILRIEGIFRNKGV

SEQ ID NO: 170043 - protein, 819 aa, Zea Mays
MQGLAVSCQLPPAAAAARWRPRASSSNREAVLQCWKYELSQDHYLGGPLRIGQSQGSLHRHRSTNFLRPAAAAISVEQDEVNTYLPKGDMWSVHKFGGTCMGTPKRIQCVANIVLGDSSERKLIIVSAMSKVTDMMYNLVQKAQSRDDSYAIALAEVFEKHMTAAKDLLDGEDLARFLSQLHSDVSNLRAMLRAIYIAGHATESFSDFVVGHGELWSAQMLSYAIKKSGAPCSWMDTREVLVVTPSGCNQVDPDYLECEKRLQKWFSRQPAEIIVATGFIASTAGNIPTTLKRDGSDFSAAIVGSLVRARQVTIWTDVDGVFSADPRKVSEAVILSTLSYQEAWEMSYFGANVLHPRTIIPVMKDNIPIVIRNMFNLSAPGTMICKQPANENGDLDACVKSFATVDNLALVNVEGTGMAGVPGTASAIFSAVKDVGANVIMISQASSEHSVCFAVPEKEVAVVSAELHDRFREALAAGRLSKTAVLKENMNIDLRVIGITGSSTMLLSDTGIDLTQWKQLLQKEAEPADIGSFVHHLSDNHVFPNKVLVDCTADTSVASHYYDWLKKGIHVITPNKKANSGPLDQYLKLRTMQRASYTHYFYEATVGAGLPIISTLRGLLETGDKILRIEGIFSGTLSYIFNNFEGTRAFSDVVAEAREAGYTEPDPRDDLSGTDVARKVVVLARESGLRLELSDIPVKSLVPETLASCSSADEFMQKLPSFDEDWARQRSDAEAAGEVLRYVGALDAVNRSGQVELRRYRRDHPFAQLSGSDNIIAFTTSRYKEQPLIVRGPGAGAEVTAGGVFCDILRLASYLGAPS

SEQ ID NO: 170044 - protein, 916 aa, Zea Mays
MQGLAVSCQLPPAAAAARWRPRASSSNREAVLQCWKYELSQDHYLGGPLRIGQSQGSLHRHRSTNFLRPAAAISVEQDEVNTYLPKGDMWSVHKFGGTCMGTPKRIQCVANIVLGDSSERKLIIVSAMSKVTDMMYNLVQKAQSRDDSYAIALAEVFEKHMTAAKDLLDGEDLARFLSQLHSDVSNLRAMLRAIYIAGHATESFSDFVVGHGELWSAQMLSYAIKKSGAPCSWMDTREVLVVTPSGCNQVDPDYLECEKRLQKWFSRQPAEIIVATGFIASTAGNIPTTLKRDGSDFSAAIVGSLVRARQVTIWTDVDGVFSADPRKVSEAVILSTLSYQEAWEMSYFGANVLHPRTIIPVMKDNIPIVIRNMFNLSAPGTMICKQPANENGDLDACVKSFATVDNLALVNVEGTGMAGVPGTASAIFSAVKDVGANVIMISQASSEHSVCFAVPEKEVAVVSAELHDRFREALAAGRLSKVEVINGCSILAAVGLRMASTPGVSAILFDALAKANINVRAIAQGCSEYNITVVLKQQDCVRALRAAHSRFFLSKTTLAVGIIGPGLIGGALLNQLKNQTAVLKENMNIDLRVIGITGSSTMLLSDTGIDLTQWKQLLQKEAEPADIGSFVHHLSDNHVFPNKVLVDCTADTSVASHYYDWLKKGIHVITPNKKANSGPLDQYLKLRTMQRASYTHYFYEATVGAGLPIISTLRGLLETGDKILRIEGIFSGTLSYIFNNFEGTRAFSDVVAEAREAGYTEPDPRDDLSGTDVARKVVVLARESGLRLELSDIPVKSLVPETLASCSSADEFMQKLPSFDEDWARQRSDAEAAGEVLRYVGALDAVNRSGQVELRRYRRDHPFAQLSGSDNIIAFTTSRYKEQPLIVRGPGAGAEVTAGGVFCDILRLASYLGAPS

SEQ ID NO: 170045 - protein, 837 aa, Zea Mays
MQGLAVSCQLPPAAAAARWRPRASSSNREAVLQCWKYELSQDHYLGGPLRIGQSQGSLHRHRSTNFLRPAAAAISVEQDEVNTYLPKGDMWSVHKFGGTCMGTPKRIQCVANIVLGDSSERKLIIVSAMSKVTDMMYNLVQKAQSRDDSYAIALAEVFEKHMTAAKDLLDGEDLARFLSQLHSDVSNLRAMLRAIYIAGHATESFSDFVVGHGELWSAQMLSYAIKKSGAPCSWMDTREVLVVTPSGCNQVDPDYLECEKRLQKWFSRQPAEIIVATGFIASTAGNIPTTLKRDGSDFSAAIVGSLVRARQVTIWTDVDGVFSADPRKVSEAVILSTLSYQEAWEMSYFGANVLHPRTIIPVMKDNIPIVIRNMFNLSAPGTMICKQPANENGDLDACVKSFATVDNLALVNVEGTGMAGVPGTASAIFSAVKDVGANVIMISQASSEHSVCFAVPEKEVAVVSAELHDRFREALAAGRLSKVEVINGCSILAAVGLRMASTPGVSAILFDALAKANINVRAIAQGCSEYNITVVLKQQDCVRALRAAHSRFFLSKTTLAVGIIGPGLIGGALLNQLKNQTAVLKENMNIDLRVIGITGSSTMLLSDTGIDLTQWKQLLQKEAEPADIGSFVHHLSDNHVFPNKVLVDCTADTSVASHYYDWLKKGIHVITPNKKANSGPLDQYLKLRTMQRASYTHYFYEATVGAGLPIISTLRGLLETGDKILRIEGIFSGTLSYIFNNFEGTRAFSDVVAEAREAGYTEPDPRDDLSGTDVARKVVVLARESGLRLELSDIPVKSLVPETLASCSSADEFMQKLPSFDEDWARQRSDAEAAGER

SEQ ID NO: 170046 - protein, 527 aa, Zea Mays
MQGLAVSCQLPPAAAAARWRPRASSSNREAVLQCWKYELSQDHYLGGPLRIGQSQGSLHRHRSTNFLRPAAAAISVEQDEVNTYLPKGDMWSVHKFGGTCMGTPKRIQCVANIVLGDSSERKLIIVSAMSKVTDMMYNLVQKAQSRDDSYAIALAEVFEKHMTAAKDLLDGEDLARFLSQLHSDVSNLRAMLRAIYIAGHATESFSDFVVGHGELWSAQMLSYAIKKSGAPCSWMDTREVLVVTPSGCNQVDPDYLECEKRLQKWFSRQPAEIIVATGFIASTAGNIPTTLKRDGSDFSAAIVGSLVRARQVTIWTDVDGVFSADPRKVSEAVILSTLSYQEAWEMSYFGANVLHPRTIIPVMKDNIPIVIRNMFNLSAPGTMICKQPANENGDLDACVKSFATVDNLALVNVEGTGMAGVPGTASAIFSAVKDVGANVIMISQASSEHSVCFAVPEKEVAVVSAELHDRFREALAAGRLSKVEVINGCSILAAVGLRMASTPGVSAILFDALAKLKVAVNTILLLY

SEQ ID NO: 170047 - protein, 648 aa, Zea Mays
MQGLAVSCQLPPAAAAARWRPRASSSNREAVLQCWKYELSQDHYLGGPLRIGQSQGSLHRHRSTNFLRPAAAISVEQDEVNTYLPKGDMWSVHKFGGTCMGTPKRIQCVANIVLGDSSERKLIIVSAMSKVTDMMYNLVQKAQSRDDSYAIALAEVFEKHMTAAKDLLDGEDLARFLSQLHSDVSNLRAMLRAIYIAGHATESFSDFVVGHGELWSAQMLSYAIKKSGAPCSWMDTREVLVVTPSGCNQVDPDYLECEKRLQKWFSRQPAEIIVATGFIASTAGNIPTTLKRDGSDFSAAIVGSLVRARQVTIWTDVDGVFSADPRKVSEAVILSTLSYQEAWEMSYFGANVLHPRTIIPVMKDNIPIVIRNMFNLSAPGTMICKQPANENGDLDACVKSFATVDNLALVNVEGTGMAGVPGTASAIFSAVKDVGANVIMISQASSEHSVCFAVPEKEVAVVSAELHDRFREALAAGRLSKVEVINGCSILAAVGLRMASTPGVSAILFDALAKANINVRAIAQGCSEYNITVVLKQQDCVRALRAAHSRFFLSKTTLAVGIIGPGLIGGALLNQLKNQIRHHRRLRRNGQHQVYCRVHLLGAGNTNNASDDGRARMVGDRDNIDERRAVHDHERDNLGAREAAGSTE

SEQ ID NO: 170048 - protein, 627 aa, Zea Mays
MQGLAVSCQLPPAAAAARWRPRASSSNRIGQSQGSLHRHRSTNFLRPAAAAISVEQDEVNTYLPKGDMWSVHKFGGTCMGTPKRIQCVANIVLGDSSERKLIIVSAMSKVTDMMYNLVQKAQSRDDSYAIALAEVFEKHMTAAKDLLDGEDLARFLSQLHSDVSNLRAMLRAIYIAGHATESFSDFVVGHGELWSAQMLSYAIKKSGAPCSWMDTREVLVVTPSGCNQVDPDYLECEKRLQKWFSRQPAEIIVATGFIASTAGNIPTTLKRDGSDFSAAIVGSLVRARQVTIWTDVDGVFSADPRKVSEAVILSTLSYQEAWEMSYFGANVLHPRTIIPVMKDNIPIVIRNMFNLSAPGTMICKQPANENGDLDACVKSFATVDNLALVNVEGTGMAGVPGTASAIFSAVKDVGANVIMISQASSEHSVCFAVPEKEVAVVSAELHDRFREALAAGRLSKVEVINGCSILAAVGLRMASTPGVSAILFDALAKANINVRAIAQGCSEYNITVVLKQQDCVRALRAAHSRFFLSKTTLAVGIIGPGLIGGALLNQLKNQIRHHRRLRRNGQHQVYCRVHLLGAGNTNNASDDGRARMVGDRDNIDERRAVHDHERDNLGAREAAGSTE

SEQ ID NO: 170049 - protein, 337 aa, Zea Mays
MQGLAVSCQLPPAAAAARWRPRASSSNREAVLQCWKYELSQDHYLGGPLRIGQSQGSLHRHRSTNFLRPAAAAISVEQDEVNTYLPKGDMWSVHKFGGTCMGTPKRIQCVANIVLGDSSERKLIIVSAMSKVTDMMYNLVQKAQSRDDSYAIALAEVFEKHMTAAKDLLDGEDLARFLSQLHSDVSNLRAMLRAIYIAGHATESFSDFVVGHGELWSAQMLSYAIKKSGAPCSWMDTREVLVVTPSGCNQVDPDYLECEKRLQKWFSRQPAEIIVATGFIASTAGNIPTTLKRDGSDFSAAIVGSLVRARQVTIWTDVDGVFSADPRKDQIQIKELH

SEQ ID NO: 170050 - protein, 255 aa, Zea Mays
MWITGIHKRPKISGAQLFAILPLAIVHTMGNLFTNMSLGKVAVSFTHTIKAMEPFFSVLLSAIFLGELPTPWVVLSLLPIVGGVALASLTEASFNWAGFWSAMASNVTFQSRNVLSKKLMVKKEESLDNINLFSIITVMSFFLLAPVTLLTEGVKVSPAVLQSAGLNLKQVYTRSLIAAFCFHAYQQVSYMILARVSPVTHSVGNCVKRVVVIVTSVLFFRTPVSPINSLGTGIALAGVFLYSQLKRLKPKPKTA

SEQ ID NO: 170051 - protein, 381 aa, Zea Mays
MQSAAAIGLLRPCAARPLAAYTSPRRGAGACSGGTQPLITPRGIRLSARPGLVPASPLEEKENRRCRASMHAAASAGEEAGGGLAKTLQLGALFGLWYLFNIYFNIYNKQVLKVLPYPINITTVQFAVGSAIALFMWITGIHKRPKISGAQLFAILPLAIVHTMGNLFTNMSLGKVAVSFTHTIKAMEPFFSVLLSAIFLGELPTPWVVLSLLPIVGGVALASLTEASFNWAGFWSAMASNVTFQSRNVLSKKLMVKKEESLDNINLFSIITVMSFFLLAPVTLLTEGVKGLNLKQVYTRSLIAAFCFHAYQQVSYMILARVSPVTHSVGNCVKRVVVIVTSVLFFRTPVSPINSLGTGIALAGVFLYSQLKRLKPKPKTA

SEQ ID NO: 170052 - protein, 488 aa, Zea Mays
MATAMGAMAATCMASIPAAATFPGDLGVGRRRAVVPGWRAGGRRLRATPPARRPFLFSPKGVSDSRSSQTCLDPDASTSVLGIILGGGAGTRLYPLTKKRAKPAVPLGANYRLIDIPVSNCLNSNVSKIYVLTQFNSASLNRHLSRAYGNNIAGYKNEGFVEVLAAQQSPENPNWFQGTADAVRQYMWLFEEHNIMEFLILAGDHLYRMDYQKFIQAHRETDADITVAALPMDEQRATAFGLMKIDDEGRIVEFAEKPKGEKLRSMMVDTTILGLDPERAKELPYIATNDFGSEVIPGATEIGLRVQAYLYDGYWEDIGTIEAFYNANLGITKKPVPDFSFYDRSAPIYTQPRYLPPSKVLDADVTDSVIGEGCVIKHCTINHSVVGLRSCISEGAVIEDSLLMGADYYETENDKNVLSETGGIPIGIGKNSHIRKAIIDKNARIGENVKIINFDNVQEAVRETEGYFIKSGIVTVIKDALIPSGTII

SEQ ID NO: 170053 - protein, 293 aa, Zea Mays
MLIFEMKGKNNNKTQEKRDSPSSSRRAHQKKTASAAADFQHLLRRLPPPQPLPQRSVPTNKESVESKPRPVSLLARGARASWTRSRCCRRTSSTRCRSTRRCPTSPHRPPPPAHPRPPSTRTASSSAHTRRRRRPLRLRRRARTAPTTATAPSTASTTLTCPPAPRPCPRRRRTRRTLPPAAARPPSSNSSLAPAPTSTAPAPPRPWRRSAPWRSRPPRRPGTRLRRRPSAPPSCCTPSSSCSPTSPSASPSTPPRPPTSPPRRGPRTPSPTRSTSASSRSAPSGAPPHHRAQ

SEQ ID NO: 170054 - protein, 455 aa, Zea Mays
MDTEPLLPTHLLHPLPEHSEVSHFSSPPSPACPSPASFYKDRIIFGAHPPPPPPPPPPPPRSHRAHHRHSSVDGLHDLDLPSGSSSMPSPPSDPEDPSAGGGAPSLLEFIAGARTNLHRSRTAPAMAPLSAVALAAAAAAGDQTPAPPKRPSIVLHAFLFLLAYLALGVTFYAAAPANFTSSAGPTHPVADALYFCIVTLCTIGYGDITPATPAAKLFSISFVLVGFGFVDILLSGMVSYVLDLQEHLLITALNNPTSARKHRHNYIFDIKKGRMRIRMKVALALGVVAVCVGVGAAVLRKVESLGWLDAVYLAVMSVTTVGYGDQAFQTLAGRLFASAWLLVSTLAVARAFLYLAEMRIDKRHRAMANWVLSRDMTVSEFLAADIDNNGYVTKSEFVVYKLKEMGKISEKDIMMICDQFQRLDTGSCGKIRLSDLLESHHLVPEARDKKKGKKS

SEQ ID NO: 170055 - protein, 57 aa, Zea Mays
MSTNPDEPKSRARTDFLLNNELEVQKFWDENTVFQADPGNDSPSPGEKFFGNFPYPY

SEQ ID NO: 170056 - protein, 178 aa, Zea Mays
MKRLLDTDFYLCEVSSNMVIDATNKGNRSRFINHSCEPNTAMQKWTVDGETRVGIFALRDIKIGEELTYDYKFVQFGAAQVCHCGSSNCRKMLGTTKYSGSSQNHHAKKKKRKTSCENCIQQFLRLWHPHKKMYVGCWIIDFDQETKMHTLKFNDLHTEKFNLKEEEWHFLEVDFDED

SEQ ID NO: 170057 - protein, 232 aa, Zea Mays
MLFSCCSSQCECDDTCTNKSFQHRPLKKTKLIKTEKCGHGLVAEDEIKKGEFVIEYVGEVIDDRTCENRLWTMKRLLDTDFYLCEVSSNMVIDATNKGNRSRFINHSCEPNTAMQKWTVDGETRVGIFALRDIKIGEELTYDYKKMLGTTKYSGSSQNHHAKKKKRKTSCENCIQQFLRLWHPHKKMYVGCWIIDFDQETKMHTLKFNDLHTEKFNLKEEEWHFLEVDFDED

SEQ ID NO: 170058 - protein, 250 aa, Zea Mays
MLFSCCSSQCECDDTCTNKSFQHRPLKKTKLIKTEKCGHGLVAEDEIKKGEFVIEYVGEVIDDRTCENRLWTMKRLLDTDFYLCEVSSNMVIDATNKGNRSRFINHSCEPNTAMQKWTVDGETRVGIFALRDIKIGEELTYDYKFVQFGAAQVCHCGSSNCRKMLGTTKYSGSSQNHHAKKKKRKTSCENCIQQFLRLWHPHKKMYVGCWIIDFDQETKMHTLKFNDLHTEKFNLKEEEWHFLEVDFDED

SEQ ID NO: 170059 - protein, 161 aa, Zea Mays
MVIDATNKGNRSRFINHSCEPNTAMQKWTVDGETRVGIFALRDIKIGEELTYDYKFVQFGAAQVCHCGSSNCRKMLGTTKYSGSSQNHHAKKKKRKTSCENCIQQFLRLWHPHKKMYVGCWIIDFDQETKMHTLKFNDLHTEKFNLKEEEWHFLEVDFDED

SEQ ID NO: 170060 - protein, 596 aa, Zea Mays
MAAADRQLVVAVEGTAALGPYWSTIVAEYVEKIVRSFCASELPGQKLVGTPPELALVVFHTHGPYSAFDVQRSGWTKDVDAFLSWLSGILFSGGGFSEASTCEGLAEALKILQGNPNTTQGHQNHEAQKHCILVAASNPYPLPTPVYCLPTQSTDHKENIETSKEPSIADAETVAKSFAQCSVSLSVISPKQLPTLKAIYNAGKRNLRAADPSVDHAKNPHFLVLLSENFMEARTALSRPLHGNLAPNQTITKMDTAPAVTMPGPTSNGNSSVNAMAGRQPIVGGISTTSVKVEPTTMPPIVSAPAFSHVTPISNVASQGISALQTSSPSLISQEANMGNDNVQEHKPIINPVQQPIRPGGHGSLLNNLSQVRLMNSTSLGGGATSMGLPNMGATPIQVHMSNMISSGMTSTPSVISSMSGPGQPISTQQMVQSTALGSFGSNTPTVTGNSTIAVSSSLTNNQSSMGMGQSVQSVAQGGLVSGSQLGQGGIVANQNVMSTLGPTAISSTPAMMPTPGMVPQTGVNSLGVNNNSAMNMPITQQHANAQQPPPKYVKIWEGTLSGQRQGQPVIICKLEHYLAEIMVPEFLRYDDTSML

SEQ ID NO: 170061 - protein, 71 aa, Zea Mays
MELASRLGALTEILWCISSSTGTAAPPTNPAMVNGGVTTTWSWSDASGDILGASAWNHQQQQPIDAYRCYY

SEQ ID NO: 170062 - protein, 292 aa, Zea Mays
MTPSGADHHQHAANASAFRAAQLSSVAAAHHGSSSTGKNPVESVSVEFEAKSARDGAWYDVAAFLSHRLFESGDPEVRVRFSGFGAEEDEWINVRKCVRQRSLPCEATECVAVLPGDLILCFQEGKDQALYYDAHVLDAQRRRHDVRGCRCRFLVRYDHDSSEEIVPLRKVCRRPETDYRLQILHAARAAATNADVHTPPKEVKVELASTDKSPAEQKPHKQHKMMDVNTDEVTMVSTLEQDETPGKTVAPVPSATAETRNSSSDTVMKGAEASSVVEDDDEVQAVDKMKEG

SEQ ID NO: 170063 - protein, 184 aa, Zea Mays
MGRPPSAGAPAFRFLPSEVAEMEARLLQLNNGIPTRAVLQTLADKFSASPERAGKVAIQPKQNRRYSHRAKTPRAASSPPAKMTPSGADHHQHAANASAFRAAQLSSVAAAHHGSSSTGKNPVESVSVEFEAKSARDGAWKVKIRLSIMMLMSLMLKGEGMTLEVAVVDFLFATTMILLRKLFH

SEQ ID NO: 170064 - protein, 332 aa, Zea Mays
MGRPPSAGAPAFRFLPSEVAEMEARLLQLNNGIPTRAVLQTLADKFSASPERAGKVAIQPKQVWNWFQNRRYSHRAKTPRAASSPPAKMTPSGADHHQHAANASAFRAAQLSSVAAAHHGSSSTGKNPVESVSVEFEAKSARDGAWYDVAAFLSHRLFESGDPEGKDQALYYDAHVLDAQRRRHDVRGCRCRFLVRYDHDSSEEIVPLRKVCRRPETDYRLQILHAARAAATNADVHTPPKEVKVELASTDKSPAEQKPHKQHKMMDVNTDEVTMVSTLEQDETPGKTVAPVPSATAETRNSSSDTVMKGAEASSVVEDDDEVQAVDKMKEG

SEQ ID NO: 170065 - protein, 321 aa, Zea Mays
MVPVVALVGLGLFERGFPVVGKCVEIGLPMLILFVALSQYLKHVHIRHVPVFERFSLLMCITLVWVYAHILTASGAYKHTALVTQINCRTDRANLISSSQWISIPYPLQWGAPTFSADHAFGMMAAVMVSLIETTGAFKAAARLASATPPPAYVLSRGIGWQGIGTLLDGLFGTGTGSTVSVENVGLLGSTRVGSRRVIQISAGFMIFFSILGKFGALFASIPFTIFAAIYCVMFGIVAAVGLSFMQFTNMNSMRNLFIIGVSLFLGLSIPEYFSRYSTSSQQGPAHTKAGWVRIFLYVLQNSNSNLNLAPSEKKKTSSMI

SEQ ID NO: 170066 - protein, 430 aa, Zea Mays
MGGSYAYVVPILSIVRDPSFARIADGHTRFLQTMRAVQGSLIVSSSIQIILGYSQLWAICSRFFSPLGMVPVVALVGLGLFERGFPVVGKCVEIGLPMLILFVALSQYLKHVHIRHVPVFERFSLLMCITLVWVYAHILTASGAYKHTALVTQINCRTDRANLISSSQWISIPYPLQWGAPTFSADHAFGMMAAVMVSLIETTGAFKAAARLASATPPPAYVLSRGIGWQGIGTLLDGLFGTGTGSTVSVENVGLLGSTRVGSRRVIQISAGFMIFFSILGKFGALFASIPFTIFAAIYCVMFGIVAAVGLSFMQFTNMNSMRNLFIIGVSLFLGLSIPEYFSRYSTSSQQGPAHTKAGWFNDYINTSFSSPPAVALIVAVLLDNTLDVRDAARDRGMPWWARFRTFRGDSRNEEFYTLPFNLNRFFPPT

SEQ ID NO: 170067 - protein, 55 aa, Zea Mays
MFICIHMHNAFHSGTLINHVIRKTIQVDPKRGIIRRIKLMDQPEDGQWSEYQNKG

SEQ ID NO: 170068 - protein, 117 aa, Zea Mays
MRSFLERLSRRLRGAAARCGCRTNVAHYVHVPLYSHTTMPSIRLDVGLDYDQNEIRPSQVQGPCQKAIRWYLNGPRRLSKKNLCVISGYRAAPREIYSLATACQVAGNVHGLIKKYE

SEQ ID NO: 170069 - protein, 79 aa, Zea Mays
MIWFVCRFDRRKQKKITDFRQHHLEFIEEWDLAEENVHENDELHNNSDYRRYQAWYQGATHCKLRQQWTSDDYADIDSS

SEQ ID NO: 170070 - protein, 178 aa, Zea Mays
MRLHIAEEVCQMKCSVGHVPGLAVVLVGDRRDSESYVRYKTKGCEEVGIKSLLAKLPGNCSEDEVMDSVSRFNEDPSVHGILVQLPLPEFMDEEKILSIISLNKDVDGFHPLNVGNLALRSRNPLFVPCAAKACIELLLQSGIELMGKHVSVIGRSKVVGLPTSLLLQVKMSKSESHL

SEQ ID NO: 170071 - protein, 371 aa, Zea Mays
MGGAAAAVLAVAAARRKSGPFVSLFSRAARRLHDAVETAAAEEDMAGTRSPRRRRRSSSSLLLGPEFPDTWDPSSRDTTPQSPPRCAQEDMRLHIAEEVCQMKCSVGHVPGLAVVLVGDRRDSESYVRYKTKGCEEVGIKSLLAKLPGNCSEDEVMDSVSRFNEDPSVHGILVQLPLPEFMDEEKILSIISLNKDVDGFHPLNVGNLALRSRNPLFVPCAAKACIELLLQSGIELMGKHVSVIGRSKVVGLPTSLLLQRHHATVSVIHAFTTNPEAITRESDIVISAAGVANLVRGSWLKQGAVVIDVGTNPIEDPTSDYGYRLTGDVCFEEAVNVASAITPVPGGVGPVTIAMLLGNTLDSAKRVYGLSD

SEQ ID NO: 170072 - protein, 290 aa, Zea Mays
MGGAAAAVLAVAAARRKSGPFVSLFSRAARRLHDAVETAAAEEDMAGTRSPRRRRRSSSSLLLGPEFPDTWDPSSRDTTPQSPPRCAQADYDRTASIIDGKSIAEDMRLHIAEEVCQMKCSVGHVPGLAVVLVGDRRDSESYVRYKTKGCEEVGIKSLLAKLPGNCSEDEVMDSVSRFNEDPSVHGILVQLPLPEFMDEEKILSIISLNKDVDGFHPLNVGNLALRSRNPLFVPCAAKACIELLLQSGIELMGKHVSVIGRSKVVGLPTSLLLQCYPCLHNKSRGYYPRI

SEQ ID NO: 170073 - protein, 197 aa, Zea Mays
MGGAAAAVLAVAAARRKSGPFVSLFSRAARRLHDAVETAAAEEDMAGTRSPRRRRRSSSSLLLGPEFPDTWDPSSRDTTPQSPPRCAQADYDRTASIIDGKSIAEDMRLHIAEEVCQMKCSVGHVPGLAVVLVGDRRDSESYVRYKTKGCEEVGIKSLLAKLPGNCSEDEVMDSVSRFNEDPSVHGILVQLPLPVYG

SEQ ID NO: 170074 - protein, 63 aa, Zea Mays
MKTKQMLVYIPHQVQRFGSKHHKKNEAGTTETIGNNPRISSVLHNYCRISTLQVSWSSATILG

SEQ ID NO: 170075 - protein, 126 aa, Zea Mays
MCLALRLLLQPSWVRLAHRILSAFRSFWSGTRFIQMAGANGWFRRRKRGNGAPPRAIFHTSRPLRRRTTTSTLLSYASLGSPWSMSMTKTFTSRQLQNKSRTLNRQADVLARSQPFPRRLELRGCY

SEQ ID NO: 170076 - protein, 83 aa, Zea Mays
MAQLRQMREEFWDTAPHYGGQKEIWDALRVASESEVSHAQAVVESAGIIVSNADLTLCYDERGAKYELPKYVLSEPTNLIRDS

SEQ ID NO: 170077 - protein, 272 aa, Zea Mays
MIGAEFTRTLLISARVSYSASPLTGLLCSAIICVSQYVMWILWLLSAAMAPFSGLAIFWMIQFLYWVLIQILLVLRRLRSYLMNLMQGGAQGIFVQLLQETLSSRRPLELSRISVKLNGIQLPTYALNDILVSHPCPASVSRFSFRKRNNTGENSRLINCRSSGLRVSTAAGSTAAMLSAGGFTMPLSSRELQYMIREPISPMDADKAMLHDVLKQEQHMHVVWYNQEGAVYVDGSHVVHSIQHGDSLEISSGAPTLKVVLPEHLLKMGPEW

SEQ ID NO: 170078 - protein, 329 aa, Zea Mays
MARRRVLLFLKPFDVYPPRPYVGAAASSPTSAPSSLPQPRAANPKVLSYLDDRCRVHKDTIDLCQSVLQRKSLDWIAVQRNHLCQPIRDVDLVVAVGGDGTLLRASHFLDDSVPILGVNSDPTCTKEVEELSDEFDARRSTGYLCAATAGNFEQILDVTLDGSRRPLELSRISVKLNGIQLPTYALNDILVSHPCPASVSRFSFRNNTGENSRLINCRSSGLRVSTAAGSTAAMLSAGGFTMPLSSRELQYMIREPISPMDADKAMLHDVLKQEQHMHVVWYNQEGAVYVDGSHVVHSIQHGDSLEISSGAPTLKVVLPEHLLKMGPEW

SEQ ID NO: 170079 - protein, 644 aa, Zea Mays
MQGLRTCVMSLAGRSHDGTSDGCHWADGFPLNLHLYQTLVEACFDNDEGTVVDEIDEVMELLKKTWVILGINELLHNLCFTWALFNHFVMSGQVDIELLSAAENQLAEVAKDAKTTKDPNYCKVLSSTLSSIMGWTEKRLLAYHETFNTSNIESMQGIVSIGVSAARVLVEDISHEYRRRRKEETDVARSRVETYIRSSLRTAFAQRMEEADSKRSSRNPTPVLSILAKDISDLATKEKKLYSPILKTWHPLASGVAVATLHSCYGNELKQFVAGLTELTPDTVEVLKSADKLEKDLVNIAVEDSVDSDDGGKSLIREMPPYEAENAIANLVKVWIKERVDRLKGWVDRNLKQETWNPGANRDNFAPSSVEMLRVIGETLDAFFQLPIPMHPALLPDLTVGLDRSLQLYVAKAKSGCGARNSFMPQLPPLTRCEVGSKLLFKKKEKPQNLQVRVSQNGASNGNDPLGLPQLCVRLNTLQYIRGEFENLEKKIKTSLRNVESAQADITDGLNIKFELCQAACQEGIQQICETTAYKIIEDDFRALRDLYLADGDGLPEELVDKASSQVKNVLPLFRADSESLIERFKRMMVESNRPASKNRLPLPPTTGHWSPNEPNTVLRVLCYRNDETATKFLKKTYNLPKKI

SEQ ID NO: 170080 - protein, 736 aa, Zea Mays
MMFSEFVEGLAGVQNLWCCPWNSCSNSRHQIFSDPQEYEAWRSRNLKLLEAGLLVHPLVPLNKSDSSVQRLRQIIRGAYDRPLETGKNSESMQGLRTCVMSLAGRSHDGTSDGCHWADGFPLNLHLYQTLVEACFDNDEGTVVDEIDEVMELLKKTWVILGINELLHNLCFTWALFNHFVMSGQVDIELLSAAENQLAEVAKDAKTTKDPNYCKVLSSTLSSIMGWTEKRLLAYHETFNTSNIESMQGIVSIGVSAARVLVEDISHEYRRRRKEETDVARSRVETYIRSSLRTAFAQRMEEADSKRSSRNPTPVLSILAKDISDLATKEKKLYSPILKTWHPLASGVAVATLHSCYGNELKQFVAGLTELTPDTVEVLKSADKLEKDLVNIAVEDSVDSDDGGKSLIREMPPYEAENAIANLVKVWIKERVDRLKGWVDRNLKQETWNPGANRDNFAPSSVEMLRVIGETLDAFFQLPIPMHPALLPDLTVGLDRSLQLYVAKAKSGCGARNSFMPQLPPLTRCEVGSKLLFKKKEKPQNLQVRVSQNGASNGNDPLGLPQLCVRLNTLQYIRGEFENLEKKIKTSLRNVESAQADITDGLNIKFELCQAACQEGIQQICETTAYKVMFYDLGHVLWDTLYVGDTASNRVEVLLRELDPVLETVSSMVHNKVRNRAITALMKATFDGFLLVLLAGGPLRTFTRQDSQIIEDDFRALRDLYLADGDGLPEELVDKSH

SEQ ID NO: 170081 - protein, 85 aa, Zea Mays
MVKGRTGQRVRLYVRGTILGYKRSKSNQYETTSLIQIEGVNTKEDVAWYAGKRMAYIYKAKTKSSETRYRCIWGKVRVFMYPSSI

SEQ ID NO: 170082 - protein, 58 aa, Zea Mays
MRNEVIPPNLKNGLMMHHLIYLILDEVIPRCLIYLILDEVIPQTKHPLNVFTEASSDG

SEQ ID NO: 170083 - protein, 265 aa, Zea Mays
MPMAKPSVAVAEASGVPAQASCSCPCPGTTLFPYPPPRGASGIAAAAVRRKCLQAEVGGGACWGVESMRASSPTHARAAAALAGAGADEEEERAAWMARHPSALGKFERIVAASEGRRIVMFLDYDGTLSPIVDDPDAAFMSETMRMAVRSVAKHFPTAIVSGRCRDKVFGFVKLAELYYAGSHGMDIKGPAKASSSRHEKAKAKGVLFQPATASEFLPMIEAVHERLVETTRSIPGAKVENNRFCVSVHFRCVDEKVRPPARNN

SEQ ID NO: 170084 - protein, 73 aa, Zea Mays
MNLSGMQTLETHQFSHSHKQNNQVEINLQGVTRGGSNTTSVLRSTKSWFLAGLMSALILYLVLDNGRRHFGGL

SEQ ID NO: 170085 - protein, 71 aa, Zea Mays
MLKPEGLLGADRLRLPPNLANLAPESSNSSSWCSSTAAAAVPRGQSSSSLQPLGEEQVVQEESYNEEYELI

SEQ ID NO: 170086 - protein, 545 aa, Zea Mays
MQSAARLFAAAAPGSPRSLLFLRGLCSASPAGQPDPRPYPAPDPDPDPDPRLVGALCRVLSDFRGPRHDLRAALSGFAPRLTPAAAAAVLRRCRNLPVPSLRFFLFAAAMPGFTHLPDSLLILAGSLAGARLFPLLRSLLSDLPRSALSRDLFPLLFRAYARAGLPEDAIRAFSSMERFCFLPTVADLHSLLFTLSHNGLVEHAEAFFRESPFQFDLSAKTYTILISGWAVVASPVKAQKLFDEMIERGVQPDVPAYNALIDALCRGGDVALAQEQLKDMQRSRGLAPDAATYGPFLRSACASKDARAALRVLDRMRARSLTPNVFTYNAVIRLLCELGEVDEAYNILNEMATYGEKPDVWSYNTLLNTHCKLKEVNKALRLISRMDDSSCLPNRHSYNMILKMLLAIGRVDRAIEVWDGMEKHGFYPGAATYAVMIHGLSCKKGRAEEACSYFLRMVDEGIPPYQATCQVLRDRLLRLGLRDDLEMLTDRMRRSTSCTIQDLASIMCSKRAEETRNLKCDHEFSCLDLAESQWMEKWKIGDTSS

SEQ ID NO: 170087 - protein, 50 aa, Zea Mays
MFFWYTLSIPKYRCGLIWHNLKAFKYCFFAPQKDKHVFGFDHILHKEVSK

SEQ ID NO: 170088 - protein, 67 aa, Zea Mays
MPSFAVVFGILGRRLNSIYGIPKGQVTFYGHLVWCLAQLWRPDNCFLQTLVLQIFRCDSPSRITGPF

SEQ ID NO: 170089 - protein, 204 aa, Zea Mays
MSESFCEDRRRQEDGAADLQAGRRRARVPGGDRHPEQARPPQPGHAHRLLRRRQAPVRGVRVHAQGQPPGHPQRHWGGEDGLAAAPADRAGSGAGAGLPALQHGRRRPRRPQGLQVQQHPPHRPLRGKGSRSPHPPSRSGHGHISLLYCYPHLNAFRRPAGRIGSEPLPRSRTSGSPSCCSRTRTCTPPPGCWARSATSTPNTR

SEQ ID NO: 170090 - protein, 80 aa, Zea Mays
MSLPIHRRWPLVSRERGRRRSGGRACRRALFGAVRGAGFCDRGDAGRRAEGARQAGGHHRSDPRRGRRCNRPPQRRCIWT

SEQ ID NO: 170091 - protein, 871 aa, Zea Mays
MSGLAGIMVLKSHTNLLDMCCEDVFDFQQPLRSPRHVVNSPGIISDPDWESSNDGNSVGSMPFCFKRKIIVANFLPVICAKNEATGEWSFAMDDNQLLVQLKDGFPIGNEVIYVGSLNVQVDPIEQDRVSQKLFKEHRCVPTFLPAELQHQFYHIFCKQHLWPLFHYMLPVCHDKDELFDRSLFQAYVRANKIFADKIVEAVNSDDDCVWVHDYHLMLIPTLLRKKLHRIKVGFFLHSPFPSSEIYRTLPVRDEILKSLLNADLIGFQTFDYARHFLSCCSRLLGLNYESKRGHIGIEYFGRTVSLKILAAGVHVGRLEATLRLPATIKKVQEIESRYSGKLVILGVDDMDIFKGISLKLLGLELLLERTPKLRGKVVLVQIVNPARSIGKDIEEAKYEAESVAQRINDKYGSANYKPVVLIDYSIPFYEKIAFYAASDCCIVNAVRDGMNLIPYEYTVCRQGNEELDKLRGLNKSSSHTSTLIVSEFVGCSPSLSGAFRVNPWSMEDVADALYSVTDLTRYEKNLRHEKHYRYVRSHDVAYWARSFDQDLDKACIEQYSQRCWTTGFGLNFRVIALSPGFRRLSLEHLASSYKKANRRMIFLDYDGTLVPQTSHDKSPSAELISTLNSLCSDMKNTVFIVSGRGRDSLSEWFASCENLGIAAEHGYFIRWNKAAEWETSFSGIYSEWKLIADPIMHVYMETTDGSFIEPKESALVWHYQNTDHDFGSCQAKELVSHLERVLSNEPVVVRRGHQIVEVKPQGVSKGISVDKIIRTLVSKGEVPDLLMCIGNDRSDEDMFESINRATSLSELPAAPEVFACSVGPKASKANYYVDGCDEVIRLLKGVTAVSLQKDTAGHSHAAFEDTLEVVS

SEQ ID NO: 170092 - protein, 180 aa, Zea Mays
MARRGTEAFPNLGAHCDKPDCNQLDFLPFDCDGCGKVFCAAHRTYGDHGCAKAADQGRTVVVCPDCGDAIERLVPGQGEREILEAHVRSRRCDPGKKRKPRCPARRCREQLTFSNTQDCKGCGRKVCLKHRFPADHDCAASAPGAAAAARRASGECGRGARKEGSGGWALPASIRSLKIF

SEQ ID NO: 170093 - protein, 353 aa, Zea Mays
MPASSVSGGSGPGGVSPDAIIEWLQDEMGYPSAPPAPDQLRKICRGNMIPVWSFLLRRVRSERTVATARRNILVHGVAARRAREGGAMGAGAGDAAAREAEARERDLAAEEAERLRGIVRRQRKELRARIAEVAREEAERKRVLGERSNARHKQVMLQAYEQQCDEAHKIFAEYQRRLHQFVNQARDVRRSSIGVAGATGALVDMQLQSDRDDLYPSTIKSNRLPEDLLETAGERSIRKACETLAADMIETIRSSFPAFEGCGINSSCQLDAEKLGIDLVGEIPTYVKLVALDSLKNPFMLLQSIITYTSRMKTLIHRETDKIDIRADAELLRCMEMGRLDHNCQLEEHMISY

SEQ ID NO: 170094 - protein, 368 aa, Zea Mays
MAGNKKLPTGNTTQNVTNSRHLELDVWAKEREVAGLKASLSTLTSEVQRLYKLCAEWKEAEDSLKKKWKKIEEFDARRSELEFIYSALQRANMDSSAFWEQQPLSARGYASTTIIPACHAVVDMSTNSRDLIERELAAFSQSLDNSLCRLPATPQALLEAVGSNGVTGSEALAAAEKHAALLTARAGARDPSAVPSICRISAALQYNFGTEGTDSGLASVLNSLEFCLKPCGSEASILEDLSKSINLVHTRRNLVENDRVLLNRAHRAQQEYERVANYCLKLAGEQEKVVSERWLPELRNAVQEARRCFDDCQRVRGLVDEWYEQPAATIVDWVTIDGQSVGAWINLVKQLHMEISRRTLAMSSVGDD

SEQ ID NO: 170095 - protein, 459 aa, Zea Mays
MLQAYEQQCDEAHKIFAEYQRRLHQFVNQARDVRRSSIGVAGATGALVDMQLQSDRDDLYPSTIKSNRLPEDLLETAGERSIRKACETLAADMIETIRSSFPAFEGCGINSSCQLDAEKLGIDLVGEIPTYVKLVALDSLKNPFMLLQSIITYTSRMKTLIHRETDKIDIRADAELLRYKYENEQVIDAASTDASSPLPYQVYGNGKTGSQLSTRGTYDQLLERQKEHVQQFLATEDALNKAAEAKALSQKLLQRLYGTADMAGNKKLPTGNTTQNVTNSRHLELDVWAKEREVAGLKASLSTLTSEVQRLYKLCAEWKEAEDSLKKKWKKIEEFDARRSELEFIYSALQRANMDSSAFWEQQPLSARGYASTTIIPACHAVVDMSTNSRDLIERELAAFSQSLDNSLCRLPATPQVSSVICLNRLLPNNICLLCSHTSTRLYLLYLNELDKHEPLKIC

SEQ ID NO: 170096 - protein, 782 aa, Zea Mays
MPASSVSGGSGPGGVSPDAIIEWLQDEMGYPSAPPAPDQLRKICRGNMIPVWSFLLRRVRSERTVATARRNILVHGVAARRAREGGAMGAGAGDAAAREAEARERDLAAEEAERLRGIVRRQRKELRARIAEVAREEAERKRVLGERSNARHKQVMLQAYEQQCDEAHKIFAEYQRRLHQFVNQARDVRRSSIGVAGATGALVDMQLQSDRDDLYPSTIKSNRLPEDLLETAGERSIRKACETLAADMIETIRSSFPAFEGCGINSSCQLDAEKLGIDLVGEIPTYVKLVALDSLKNPFMLLQSIITYTSRMKTLIHRETDKIDIRADAELLRYKYENEQVIDAASTDASSPLPYQVYGNGKTGSQLSTRGTYDQLLERQKEHVQQFLATEDALNKAAEAKALSQKLLQRLYGTADMAGNKKLPTGNTTQNVTNSRHLELDVWAKEREVAGLKASLSTLTSEVQRLYKLCAEWKEAEDSLKKKWKKIEEFDARRSELEFIYSALQRANMDSSAFWEQQPLSARGYASTTIIPACHAVVDMSTNSRDLIERELAAFSQSLDNSLCRLPATPQALLEAVGSNGVTGSEALAAAEKHAALLTARAGARDPSAVPSICRISAALQYNFEGTDSGLASVLNSLEFCLKPCGSEASILEDLSKSINLVHTRRNLVENDRVLLNRAHRAQQEYERVANYCLKLAGEQEKVVSERWLPELRNAVQEARRCFDDCQRVRGLVDEWYEQPAATIVDWVTIDGQSVGAWINLVKQLHMEISRRTLAMSSVGDD

SEQ ID NO: 170097 - protein, 366 aa, Zea Mays
MAGNKKLPTGNTTQNVTNSRHLELDVWAKEREVAGLKASLSTLTSEVQRLYKLCAEWKEAEDSLKKKWKKIEEFDARRSELEFIYSALQRANMDSSAFWEQQPLSARGYASTTIIPACHAVVDMSTNSRDLIERELAAFSQSLDNSLCRLPATPQALLEAVGSNGVTGSEALAAAEKHAALLTARAGARDPSAVPSICRISAALQYNFEGTDSGLASVLNSLEFCLKPCGSEASILEDLSKSINLVHTRRNLVENDRVLLNRAHRAQQEYERVANYCLKLAGEQEKVVSERWLPELRNAVQEARRCFDDCQRVRGLVDEWYEQPAATIVDWVTIDGQSVGAWINLVKQLHMEISRRTLAMSSVGDD

SEQ ID NO: 170098 - protein, 623 aa, Zea Mays
MPASSVSGGSGPGGVSPDAIIEWLQDEMGYPSAPPAPDQLRKICRGNMIPVWSFLLRRVRSERTVATARRNILVHGVAARRAREGGAMGAGAGDAAAREAEARERDLAAEEAERLRGIVRRQRKELRARIAEVAREEAERKRVLGERSNARHKQVMLQAYEQQCDEAHKIFAEYQRRLHQFVNQARDVRRSSIGVAGATGALVDMQLQSDRDDLYPSTIKSNRLPEDLLETAGERSIRKACETLAADMIETIRSSFPAFEGCGINSSCQLDAEKLGIDLVGEIPTYVKLVALDSLKNPFMLLQSIITYTSRMKTLIHRETDKIDIRADAELLRYKYENEQVIDAASTDASSPLPYQVYGNGKTGSQLSTRGTYDQLLERQKEHVQQFLATEDALNKAAEAKALSQKLLQRLYGTADMAGNKKLPTGNTTQNVTNSRHLELDVWAKEREVAGLKASLSTLTSEVQRLYKLCAEWKEAEDSLKKKWKKIEEFDARRSELEFIYSALQRANMDSSAFWEQQPLSARGYASTTIIPACHAVVDMSTNSRDLIERELAAFSQSLDNSLCRLPATPQPTKGVKSNSCFGVWTKICSYSSTKLKVAPRLRLLLPAVKTGNFKKISTCHWL

SEQ ID NO: 170099 - protein, 371 aa, Zea Mays
MAGNKKLPTGNTTQNVTNSRHLELDVWAKEREVAGLKASLSTLTSEVQRLYKLCAEWKEAEDSLKKKWKKIEEFDARRSELEFIYSALQRANMDSSAFWEQQPLSARGYASTTIIPACHAVVDMSTNSRDLIERELAAFSQSLDNSLCRLPATPQALLEAVGSNGVTGSEALAAAEKHAALLTARAGARDPSAVPSICRISAALQYNFVSPGTEGTDSGLASVLNSLEFCLKPCGSEASILEDLSKSINLVHTRRNLVENDRVLLNRAHRAQQEYERVANYCLKLAGEQEKVVSERWLPELRNAVQEARRCFDDCQRVRGLVDEWYEQPAATIVDWVTIDGQSVGAWINLVKQLHMEISRRTLAMSSVGDD

SEQ ID NO: 170100 - protein, 405 aa, Zea Mays
MPTDSAPPNAASLSEDDRLLVAHCATLSFPSSSPTAAAATTHSASSFQVHHASHPYPCAAFVFPPSWSAADWMGGDGGHPPFGDAEVDPALFPSLRAVGSGIPARTNAAFLGNFRRLLDGSTLQSEVSRAVAEEKRVVFTGHSSGGSIATLAAIWFLEKCTRRGSVNQAHPFCVTFGAPLIGDNIFNHAVKREGWSQCILHFLLPLDIVPRIPLTPLASFREETQAVLDRLSSQTPNNSPAGRSLVIPEYYETLLRSTLSIASYEACSFMGCTSSILGTLTSFIDLSPYRPCGTYHFLTSSEQLIVLANSDAVLQLLFYCLQLDPQQQLLDAAARSLSAHWQYEPIKYCIQDIVCVDYLGTISSAVPGRQAGRVALGSIELGSYTAPFCSCSMGEAKTEKPNKNR

SEQ ID NO: 170101 - protein, 350 aa, Zea Mays
MGCTSSILGTLTSFIDLSPYRPCGTYHFLTSSEQLIVLANSDAVLQLLFYCLQLDPQQQLLDAAARSLSAHWQYEPIKYCIQDIVCVDYLGTISSAVPGRQAGRVALGSIELSREAILHLSAAAQWEKQRQRNQTKIDESCQKIQEALRSLNEYKRSRELDGVSYYDSFKLQREVHDFNANVKRLELAGLWDEIVEMLRRRELPDGFEAREEWVSLGTLFRRLVEPLDIANYYRHSKNEDTGSYLSKGRPRRYKYTQKWHEQLQRVPVGSSLESCFWAVVEELQAEMADGRAFEDLRERLVKLENDAHGWYNSGSLGKDVFLGSSSFVAWWRTLPEQHRAASSIAKLVSL

SEQ ID NO: 170102 - protein, 83 aa, Zea Mays
MCRSFPHPWRPHAISPPPTTVVSAADQQQGRWLGTPTADTGSSPVGRPFPANPCNARLLLALLMLDIMPRTSIALHTTNVSSK

SEQ ID NO: 170103 - protein, 91 aa, Zea Mays
MRLCARYLAREKKRGKALDAVANFHLQNGAMIERINWMADQSEKGIQQSGGIMVNYLYRLENIEEYALSYSSTGLIHSSPSLSEYLEPKDL

SEQ ID NO: 170104 - protein, 195 aa, Zea Mays
MLRRDMPSVQNFATLSPIPGLMQWLLAKLASQIKLSEAESREGNSLGACSTFKESILLPDEERMIHDAIEQADGKQGIELLQDILKSRQWVKSDKLSAALKSPLMRLCARYLAREKKRGKALDAVANFHLQNGAMIERINWMADQSEKGIQQSGGIMVNYLYRLENIEEYALSYSSTGLIHSSPSLSEYLEPKDL

SEQ ID NO: 170105 - protein, 466 aa, Zea Mays
MTRHNISKSLAVVLRARMQPNPISSPPPPTPPPPPTDPDPAAPLVASVSHWLHVSASAASPPPAALDSFSDGYRSLDLVGRREVLRSLAVDYDVPRARVRDLMKQYMSVTSAEPSGVDDVEAEEGKEGAASALYRMERGLRDALRPRYAGFLEAMNAQPGGLKLLAVLRADLLALLGEENVSALRALDSYLKEKLVTWLSPAALTLHQITWDDPASLLEKIVAYEAVHPIRNLIDLKRRLGIGRRCFGYFHPAIPGEPLIFIEVALLKDMEASIQEVLWDDPPTPESEASCALFYSISSTQPGLSGINLGKFLLKRVIDMLRRDMPSVQNFATLSPIPGLMQWLLAKLASQIKLSEAESREGNSLGACSTFKESILLPDEERMIHDAIEQADGKQGIELLQDILKSRQWVKSDKLSAALKSPLMRLCARYLAREKKRGKALDAVANFHLQNGAVSYYHKFSLKWCC

SEQ ID NO: 170106 - protein, 514 aa, Zea Mays
MTRHNISKSLAVVLRARMQPNPISSPPPPTPPPPPTDPDPAAPLVASVSHWLHVSASAASPPPAALDSFSDGYRSLDLVGRREVLRSLAVDYDVPRARVRDLMKQYMSVTSAEPSGVDDVEAEEGKEGAASALYRMERGLRDALRPRYAGFLEAMNAQPGGLKLLAVLRADLLALLGEENVSALRALDSYLKEKLVTWLSPAALTLHQITWDDPASLLEKIVAYEAVHPIRNLIDLKRRLGIGRRCFGYFHPAIPGEPLIFIEVALLKDMEASIQEVLWDDPPTPESEASCALFYSISSTQPGLSGINLGKFLLKRVIDMLRRDMPSVQNFATLSPIPGLMQWLLAKLASQIKLSEAESREGNSLGACSTFKESILLPDEERMIHDAIEQADGKQGIELLQDILKSRQWVKSDKLSAALKSPLMRLCARYLAREKKRGKALDAVANFHLQNGAMIERINWMADQSEKGIQQSGGIMVNYLYRLENIEEYALSYSSTGLIHSSPSLSEYLEPKDL

SEQ ID NO: 170107 - protein, 515 aa, Zea Mays
MTRHNISKSLAVVLRARMQPNPISSPPPPTPPPPPTDPDPAAPLVASVSHWLHVSASAASPPPAALDSFSDGYRSLDLVGRREVLRSLAVDYDVPRARVRDLMKQYMSVTSAEPSGVDDVEAEEGKEGAASALYRMERGLRDALRPRYAGFLEAMNAQPGGLKLLAVLRADLLALLGEENVSALRALDSYLKEKLVTWLSPAALTLHQITWDDPASLLEKIVAYEAVHPIRNLIDLKRRLGIGRRCFGYFHPAIPGEPLIFIEVALLKDMEASIQEVLWDDPPTPESEASCALFYSISSTQPGLSGINLGKFLLKRVIDMLRRDMPSVQNFATLSPIPGLMQWLLAKLASQIKLSEAESREGNSLGACSTFKESILLPDEERMIHDAIEQADGKQGIELLQDILKSRQWVKSDKLSAALKSPLMRLCARYLAREKKRGKALDAVANFHLQNGAMIERINWMADQSEKGIQQSGGIMVNYLYRLENIEEYALSYSSTGLIHSSPSLSEYLEQPKDL

SEQ ID NO: 170108 - protein, 147 aa, Zea Mays
MVLLVAFTSEQADGKQGIELLQDILKSRQWVKSDKLSAALKSPLMRLCARYLAREKKRGKALDAVANFHLQNGAMIERINWMADQSEKGIQQSGGIMVNYLYRLENIEEYALSYSSTGLIHSSPSLSEYLEVSNIGLCLILIYIYFD

SEQ ID NO: 170109 - protein, 64 aa, Zea Mays
MFLYQLNSRTHLLVYLKQENMFEKYDKKCVHGCTKLFLKSSEKYFVREIVYANHYEMVAPNSSY

SEQ ID NO: 170110 - protein, 141 aa, Zea Mays
MLTMNYLHIIQQSSMQKSTRKGSSSRESEFVPHKHTCLVDEEDEVDLDELYATTSNDKKVSELELYMSKDLVKVNDNEATFDILSWWKGQVTNLPILSTLVRDVLSMQVSIVASESAFSSGGLIVDAFRSRLKPEIIEALV

SEQ ID NO: 170111 - protein, 379 aa, Zea Mays
MERDFLAAIGKEQQHPRKEKAAAVPAMDWSFASKPCAAPALMSFRSAAREEPSFPQFSALDGTKNTAPRMLTHQRSFGPDSTQYAALHRAQNGARVVPVSSPFSQSNPMFRVQSSPSLPNSTAFKQPPFAISNAVASSTVGSYGGTRDAVRPRTAQLTIFYAGSVNVFNNVSAEKAQELMFLASRGSSAPVACKPEAPPTLAPAKVTAPEVLLPAKQMLFQKPQHLSPPPSSVPGILQSAALPRSASSSSNLDSPAPKSSVPLAVPPVSQAPPATLIATTTAAAIMPRAVPQARKASLARFLEKRKERVTTAAPYPSAKSPLESSDTFGSGSASANANDKSSCTDIALSSNHEESLCLGGQPRSIISFSEESPSTKLQI

SEQ ID NO: 170112 - protein, 93 aa, Zea Mays
MLRRVEPYVAHWSTRYICRCNSLFLTNSSLYYADCGSTVFCSGQALKNIAPTLFMKACQALTNNRWMHFCSPYTHEEEIKEFISLRQGINSTQ

SEQ ID NO: 170113 - protein, 99 aa, Zea Mays
MALQSNLLSLQLITRNYASFRQRLPVFVELYDWWKRLRNRCCKESKKIFDGLLISFWWNIWLERNNRIFHRLQRSAIQVMQLVKDQIRNVIFTTATSAW

SEQ ID NO: 170114 - protein, 147 aa, Zea Mays
MCVCATRTMRSRRSQQRRWPCPRTRLTMSSVSMPWSRSGGLKHIMRQTMLGASSLVPSIWTTPGPNGHRDDLNRHAHGLHKPDADANTSVPMQDKCSRRRAPTSKVWLHFEEVTTMQNGKEVRISAICIHCKNSMSAKSSSGTGHLI

SEQ ID NO: 170115 - protein, 228 aa, Zea Mays
MGHPSLYLGSGSRQLRDGVGIQARRLEAQLDDQMIAYRKLVSMKSDGSEDNIESDIERSLKQLQQVNSQMQTWVSSGGSEVLSHTLTRHMEILQDLTQEFYRLRSSLRAKQQHTSLLDLRDFDRAKFDVEEPSDSADQVLLREQAAIGRSTGQMDNVISQAQATLGSLMTQRSTFGGITTKISNVSSQLPTINHVLSSIRRKKSMDTIILSLVASVCTFLIFIYWLSK

SEQ ID NO: 170116 - protein, 540 aa, Zea Mays
MRYDDRYTPLLERAGLDVVSFQVRRGLPTINIAAITALVDRWRPETHTFHLPCGEMTVTLRDSQKQLGLSIRGRPVTGQAAPGGWRQRVEAFLGREVPTDTPGSHTSGVSLAWLRQSFGECPAAADDQTVSYYCRAWVLHLFGSVLFPDATGDSASWMFLPCLTDWDMAGGYSWASAVLSFLYRQLCEACRRTAKNASLGGCVYLLQLWMWSHLPVGRPIEFAPRPWFDVVGLRLRPTAAYRWDQVQAPFARHQRAYVEYSNELDALTPSMVSWQPYDEPPLPHIQLSSACTTDEDIYLLRCPLICFYAVEYHLPHRVARQFGLRQEFPVEPFSTSVELHKFDRQKQKKITDFEAHHQVYIDEWDQMHDLLYQSDQSHTNYNFREYISWYVGVTRCKLKGQWTSADYAELESSDDEDTSYDLVTRHGTHVEAAPILDRVGNSMMQSVVDIEHFSKTTSDDRTLAFLSRLSRRLRCAAARCGCRISAVVNIQHTLQHHGDTSLGLGAITVAQGSSRTTRDAFASHKEDEDDIKIPLDKIGP

SEQ ID NO: 170117 - protein, 583 aa, Zea Mays
MASRTTQFHLLDPHYDEHHRGRLIAEGQVLPVLRSRTHDRFLDMRYDDRYTPLLERAGLDVVSFQVRRGLPTINIAAITALVDRWRPETHTFHLPCGEMTVTLRDSQKQLGLSIRGRPVTGQAAPGGWRQRVEAFLGREVPTDTPGSHTSGVSLAWLRQSFGECPAAADDQTVSYYCRAWVLHLFGSVLFPDATGDSASWMFLPCLTDWDMAGGYSWASAVLSFLYRQLCEACRRTAKNASLGGCVYLLQLWMWSHLPVGRPIEFAPRPWFDVVGLRLRPTAAYRWDQVQAPFARHQRAYVEYSNELDALTPSMVSWQPYDEPPLPHIQLSSACTTDEDIYLLRCPLICFYAVEYHLPHRVARQFGLRQEFPVEPFSTSVELHKFDRQKQKKITDFEAHHQVYIDEWDQMHDLLYQSDQSHTNYNFREYISWYVGVTRCKLKGQWTSADYAELESSDDEDTSYDLVTRHGTHVEAAPILDRVGNSMMQSVVDIEHFSKTTSDDRTLAFLSRLSRRLRCAAARCGCRISAVVNIQHTLQHHGDTSLGLGAITVAQGSSRTTRDAFASHKEDEDDIKIPLDKIGP

SEQ ID NO: 170118 - protein, 473 aa, Zea Mays
MRYDDRYTPLLERAGLDVVSFQVRRGLPTINIAAITALVDRWRPETHTFHLPCGEMTVTLRDSQKQLGLSIRGRPVTGQAAPGGWRQRVEAFLGREVPTDTPGGYSWASAVLSFLYRQLCEACRRTAKNASLGGCVYLLQLWMWSHLPVGRPIEFAPRPWFDVVGLRLRPTAAYRWDQVQAPFARHQRAYVEYSNELDALTPSMVSWQPYDEPPLPHIQLSSACTTDEDIYLLRCPLICFYAVEYHLPHRVARQFGLRQEFPVEPFSTSVELHKFDRQKQKKITDFEAHHQVYIDEWDQMHDLLYQSDQSHTNYNFREYISWYVGVTRCKLKGQWTSADYAELESSDDEDTSYDLVTRHGTHVEAAPILDRVGNSMMQSVVDIEHFSKTTSDDRTLAFLSRLSRRLRCAAARCGCRISAVVNIQHTLQHHGDTSLGLGAITVAQGSSRTTRDAFASHKEDEDDIKIPLDKIGP

SEQ ID NO: 170119 - protein, 512 aa, Zea Mays
MRYDDRYTPLLERAGLDVVSFQVRRGLPTINIAAITALVDRWRPETHTFHLPCGEMTVTLRDSQKQLGLSIRGRPVTGQAAPGGWRQRVEAFLGREVPTDTPGSHTSGVSLAWLRQSFGECPAAADDQTVSYYCRAWVLHLFGSVLFPDATGDSASWMFLPCLTDWDMAGGYSWASAVLSFLYRQLCEACRRTAKNASLGGCVYLLQLWMWSHLPVGRPIEFAPRPWFDVVGLRLRPTAAYRWDQVQAPFARHQRAYVEYSNELDALTPSMVSWQPYDEPPLPHIQLSSACTTDEDIYLLRCPLICFYAVEYHLPHRVARQFGLRQEFPVEPFSTSVELHKFDRQKQKKITDFEAHHQVYIDEWDQMHDLLYQSDQSHTNYNFREYISWYVGVTRCKLKGQWTSADYAELESSDDEDTSYDLVTRHGTHVEAAPILDRVGNSMMQSVVDIEHFSKTTSDDRTLAFLSHHGDTSLGLGAITVAQGSSRTTRDAFASHKEDEDDIKIPLDKIGP

SEQ ID NO: 170120 - protein, 371 aa, Zea Mays
MTRRWASAVLSFLYRQLCEACRRTAKNASLGGCVYLLQLWMWSHLPVGRPIEFAPRPWFDVVGLRLRPTAAYRWDQVQAPFARHQRAYVEYSNELDALTPSMVSWQPYDEPPLPHIQLSSACTTDEDIYLLRCPLICFYAVEYHLPHRVARQFGLRQEFPVEPFSTSVELHKFDRQKQKKITDFEAHHQVYIDEWDQMHDLLYQSDQSHTNYNFREYISWYVGVTRCKLKGQWTSADYAELESSDDEDTSYDLVTRHGTHVEAAPILDRVGNSMMQSVVDIEHFSKTTSDDRTLAFLSRLSRRLRCAAARCGCRISAVVNIQHTLQHHGDTSLGLGAITVAQGSSRTTRDAFASHKEDEDDIKIPLDKIGP

SEQ ID NO: 170121 - protein, 547 aa, Zea Mays
MEPPRKNKSSGMQVKEEVKLEDGNDLLVKRRRTELPGSIVQLQQKIEVFDMENKVPDGLSVEDSTGKDPMDVLTRYAAQNSGQGNSCSNEPAISRLTKICKAIGWKEPSYDFEEQGPPHNRMTTQFHLLDPHYDEHHRGRLIAEGQVLPVLRSRTHDRFLDMRYDDRYTPLLERAGLDVVSFQVRRGLPTINIAAITALVDRWRPETHTFHLPCGEMTVTLRDSQKQLGLSIRGRPVTGQAAPGGWRQRVEAFLGREVPTDTPGSHTSGVSLAWLRQSFGECPAAADDQTVSYYCRAWVLHLFGSVLFPDATGDSASWMFLPCLTDWDMAGGYSWASAVLSFLYRQLCEACRRTAKNASLGGCVYLLQLWMWSHLPVGRPIEFAPRPWFDVVGLRLRPTAAYRWDQVQAPFARHQRAYVEYSNELDALTPSMVSWQPYDEPPLPHIQLSSACTTDEDIYLLRCPLICFYAVEYHLPHRVARQFGLRQEFPVEPFSTSVELHKRRSLTLRRTTKCTLTNGTKCMTSSTRAISPTPTTTFASTSLGMSV

SEQ ID NO: 170122 - protein, 127 aa, Zea Mays
MGRPPCCDKVGVKKGPWTPEEDLMLVSYVQEHGPGNWRAVPTNTGLMRCSKSCRLRWTNYLRPGIKRGNFTDQEEKLIIHLQALLGNRWAAIASYLPERTDNDDGMGHGEDGLMTDVVPLGDPSEFF

SEQ ID NO: 170123 - protein, 287 aa, Zea Mays
MKNILMIPTISDVSTVEEWRVVAKDIVGRKGELGYRVTIVDWPGLGYSDRPSLNYNADVMESFLVELMNSPNSPVANADDELIIVGGGHAATIAVRAAGKDLIKPSAVAAVAPTWAGPLPIVFGRGSDMETRYGLLRGTLRAPALGWMMYNVLVSNEKSIQSQYKSHVYANPDNVTPAIIESRYELTKRKGARFVPAAFLTGLLDPVQSREEFLQLFAKLDGDVPVLVVSTVNAPKRSKAEMEALRGSKGVTKFVEVAGALLPQEEYPLAVAEELYSFLQESFAARR

SEQ ID NO: 170124 - protein, 344 aa, Zea Mays
MIYLDKKVILPILSCLSAVTCAITLSMCFQTGKWEWKFENKPVNIYYEEHEQEVAENMKNILMIPTISDVSTVEEWRVVAKDIVGRKGELGYRVTIVDWPGLGYSDRPSLNYNADVMESFLVELMNSPNSPVANADDELIIVGGGHAATIAVRAAGKDLIKPSAVAAVAPTWAGPLPIVFGRGSDMETRYGLLRGTLRAPALGWMMYNVLVSNEKSIQSQYKSHVYANPDNVTPAIIESRYELTKRKGARFVPAAFLTGLLDPVQSREEFLQLFAKLDGDVPVLVVSTVNAPKRSKAEMEALRGSKGVTKFVEVAGALLPQEEYPLAVAEELYSFLQESFAARR

SEQ ID NO: 170125 - protein, 135 aa, Zea Mays
MKNILMIPTISDVSTVEEWRVVAKDIVGRKGELGYRVTIVDWPGLGYSDRPSLNYNADVMESFLVELMNSPNSPVANADDELIIVGGGHAATIAVRAAGKDLIKPSAVAAVAPTWAGPLPIVFGRGSDMETRQWH

SEQ ID NO: 170126 - protein, 256 aa, Zea Mays
MKEHLMLNIDDLSILEPNEVIGTVKNKSSGETIAHPPSMAHAILAVGESMVSEAEPLLQVVECRICQEEDSIKNLESPCACTGSLKYAHRTCVQRWCNEKGDVTCEICHEPYEHGYTAPPRGHPDETTIDISGGWTITGTAFDLRDPRILAVAQNHIMEAEYDDYSATNASTAAFCRSAALVLMALLLLRHALTLTDEDDDDTSAMFSYLAAPQTETAALAAAEVAFILQSGQGRGVHFTIAPDSPATPQHEPPQP

SEQ ID NO: 170127 - protein, 535 aa, Zea Mays
MVVTLSPHNVVAARCAAEYLEMTEEMEKGNLIFKIEVFMNSSILRSWKDSIIVLQRTKALSPWSEELKVVGRCIDAIASKTSVDPANVTWSYSHNNSKKGGACAEIVESAGKPSIAPKDWWVEDLCELDVDLYRRVMVAIKSKGRMSPELIGEALKAYAVRWLPDSYDALVAEGHMRRNQCLVETLIWLLPSDKSSGCSCRFLLKLLKVAILVGGGEHVKEELIRRISFQLHKATVKDLLLPATSPPNDGTYDVRLVHDLVQRFVARTALSHNGGFIEKSDEKMIELNFEQESTLAVGELVDGYLSEVASDQAPSLPMFVELATAVPEAARPVHDTLYYAVDAYLKQHPDINKSEKKKICSLVDVKKLSTDASMHATQNDRLPLRLVVQVLFFQQLRAGSGKELALVDNGEHACTRPTQDQCEPCERRIPKHPESLDKQVTSLSARESRQHHRTSDSEHRGGGRNSFKDQLGGLLPQSRSRRIFDKLWSSKGQGEHGGKGSETSGSSQSPPLSAKPAEVKPSPLPAVRNRRYSVS

SEQ ID NO: 170128 - protein, 89 aa, Zea Mays
MMMDGSMQGDVDNYTNTSVAQYSQAKPVGTPALIARPNHKTSKKVVKACALYKSEDEQHKAFQFMHCWKKLRTQPKWLAKFDKLVAAKT

SEQ ID NO: 170129 - protein, 164 aa, Zea Mays
MFRCKKSWFYAAVPGQRRLLSKISTHRHGQHIYQWEWIFSNMMMDGSMQGDVDNYTNTSVAQYSQAKPVGTPALIARPNHKTSKKVSDQKDEVLVSAWLNVSLDPVVGKYKKGGRYWSHIYEYFNEHKPCQSQCTINSLMHRWETIQKCKNNFCGCLARIELRH

SEQ ID NO: 170130 - protein, 84 aa, Zea Mays
MRVFVSSILVLKVYLFWDKDCTISADGAKKESVSIAPSLSSIPRLHSSPASRSLSPASSSMRLVLVRRGRELGPHAGGRCLILL

SEQ ID NO: 170131 - protein, 63 aa, Zea Mays
MSSMSLIMSSLRCCILRASIQSTSHPVNYNTQTFGKYISSHVVLIIKHQNLLSQMTRGPFSLQ

SEQ ID NO: 170132 - protein, 140 aa, Zea Mays
MVGGIYSPNHQTSRLVRLSVRWRTGQSGAHRTCPVRHPRHQKSLGSTVGDLSSGPAWMSGGTPDMHCRLSGAPAWACLTSARATRAFNASQVAVGAEVVVAPRSHRTVRCTPDSPVNYSGAAEMNTRGWRVPEAALPWST

SEQ ID NO: 170133 - protein, 153 aa, Zea Mays
MPYLVPSEVVELLLHCHHPIRILECFLYPVWLNRGNKRVMLTKMCNTRSSGYPLVNVAEDGVDGVISLYCLMDSWVWRPWLFIILLVFIICISPLIIAVILRWLIMLFFLFINLSLVLNLGWWRCLRGGGWLILCMWRHFGFLRTHIPNGHVP

SEQ ID NO: 170134 - protein, 102 aa, Zea Mays
MAHSRSSLPLLGRAVRRWKTRHTPCSRVAAPCFSRARLACPSSLGLLSMAVSPRSLPARRSCSRSAFHSRRPLLQPRAQVPGRRAPSTGLCSKLLPSPPMAS

SEQ ID NO: 170135 - protein, 473 aa, Zea Mays
MVTMRCDITTCSSSHVSLLVSGSAQTCFDDQLLESHIKNEIIEKSQLVRALSNSEDKLPSSEPLTSMSTACGASTFEVWMSLPKWAAQVLKHLAPDISYRSLVALGIGCINGTPVASFERRDADRLLFFCTSQCKDLANENGPYFHLPRWSASLTKDRTKLGSESKQNLLGANGVLEDKKHMMEGPSSFSAVKAKLKPATMRPIPHSQKQQMHPFMCLPETSFHETSIVKPSLTVAPTVKHNSVSYAPTTHRKSTSGPSHTPSVIQLNPLPMKKHGCDRLSIQVCSEEDFLKDVMQFLIQRGHNRLVPHGGLAEFPDAVLNAKRLDLYNLYKEVVSRGGFYVGNGINWKGQVFSKMRNHTATNRMTGVGNTLKRHYETYLLEYELAHDDVDGECCLLCHSSAPGDWVNCGLCGEWAHFGCDRRQGLGTFKDYAKTDGLEYICPHCSLANYKKPPLPPKVANGFSNTAYVPRSV

SEQ ID NO: 170136 - protein, 203 aa, Zea Mays
MILEAVATYDLWIWHAFFGMSGTNNDVNVLHRSPVFDPMTSGRMPPVNYTINDHAYNFGYYLADGIYPNWPTFVKAIRHPYEEKNVYFTQMQESCRKDIERAFGVIQARWAVLRGPTYGWDHNRLTEIITACIIMHNMIVKDEGEFAGNTDFGDNSSGIEPSQLIQEGRSEWVINHFDLRRQERSSTLQNELVEHLWARRGSM

SEQ ID NO: 170137 - protein, 69 aa, Zea Mays
MHNMIVKDEGEFAGNTDFGDNSSGIEPSQLIQEGRSEWVINHFDLRRQERSSTLQNELVEHLWARRGSM

SEQ ID NO: 170138 - protein, 55 aa, Zea Mays
MLMAWTAVTSLVSKEPASTHSPSFFSSLIFYTSLSLSLSLSLSLSAISTDLLYLS

SEQ ID NO: 170139 - protein, 63 aa, Zea Mays
MPRKEAKVYTLRNIYYLGLRPSRKEALPMDPPGPQETRPRGGLCRPVGADVAHTKSRHDPLSG

SEQ ID NO: 170140 - protein, 967 aa, Zea Mays
MPANGKLSAKPSPSPMVAPASRPKFTAVTFLGDCDDDDDFQPPRPRPLKPCIGAAALRFRKKLKAPSSGKENSSAAGGAVTVVGVASTAVKDAETLAAGSRVSGDVPKTKRRKTGESCGLSRYGSDSTKLSCKPKIELDRYGYGKGCCSFLPSAIDSTVLALGAVCDFGVRRCDEAQIAVSRHCTSVLEAGHATEELTPTGSGCDPPKTEKKPGSSEAVEGHHDSRLIEPRLVESDANLEFVTGILGSLTDKQDTKKANGVVFGCGVGFQNGNYHLDSLQPELLTSNSKYDSRVCVSNEIQEPGLGACNLISQERKVAAGHSACATPENVTAENKSSAPEACKGQCHSDSSASKLPESHMIHDFEVDGCDNFEIGTQLSELINLCMKDSIEGQSNFGAAPMEQNTLDSKRLSSDYEAKCPLCGSDISDLSEELRQLHTNNCLDEPAKGKHGVVVRAVSLVPSVVGLKQSLRICGRKESSPNHKKEPSVGQNVETGRVVEWLRNLGLSKYEEVFIREEVDWETLQWLTEEDLLGIGISSLGPRKKIIHALGELLKKHDDPSEMEAVLNSGNTKKTKLPMNGNKLITEYFQCSSFDQRQRRVCKANKPSNLNEKKISSAKVPTRRTAGKGKIKDTPLWCCIPGTPFRVDAFRYLRGDCSHWFLTHFHVDHYQGLTRSFCHGKIYCSSITASLVHHKIGIPWDRLHVLTLNEKLNIAGVNLICFDANHCPGSIIILFEPPNGKAVLHTGDFRFSSKMANNPVLQSSCVHTLILDTTYCNPRYDFPSQEIVIQFVIEAIQAEAFNPKTLFLIGSYTIGKERLFMEVARLLQKKVYVGAAKLQILKHLELPQEIMHWFTANEAESHIHVVPMWTLASFKRMKYLSNQYAGRYDLIVAFCPTGWAFGKGRKKTPGKRWQQGSIIRYEVPYSEHSSFTELQQFVKFISPEHIIPSVNNDGPESANAMLAQLLNE

SEQ ID NO: 170141 - protein, 805 aa, Zea Mays
MPANGKLSAKPSPSPMVAPASRPKFTAVTFLGDCDDDDDFQPPRPRPLKPCIGAAALRFRKKLKAPSSGKENSSAAGGAVTVVGVASTAVKDAETLAAGSRVSGDVPKTKRRKTGESCGLSRYGSDSTKLSCKPKIELDRYGYGKGCCSFLPSAIDSTVLALGAVCDFGVRRCDEAQIAVSRHCTSVLEAGHATEELTPTGSGCDPPKTEKKPGSSEAVEGHHDSRLIEPRLVESDANLEFVTGILGSLTDKQDTKKANGVVFGCGVGFQNGNYHLDSLQPELLTSNSKYDSRVCVSNEIQEPGLGACNLISQERKVAAGHSACATPENVTAENKSSAPEACKGQCHSDSSASKLPESHMIHDFEVDGCDNFEIGTQLSELINLCMKDSIEGQSNFGAAPMEQNTLDSKRLSSDYEAKCPLCGSDISDLSEELRQLHTNNCLDEPAKESSPNHKKEPSVGQNVETGRVVEWLRNLGLSKYEEVFIREEVDWETLQWLTEEDLLGIGISSLGPRKKIIHALGELLKKHDDPSEMEAVLNSGNTKKTKLPMNDYQGLTRSFCHGKIYCSSITASLVHHKIGIPWDRLHVLTLNEKLNIAGVNLICFDANHCPGSIIILFEPPNGKAVLHTGDFRFSSKMANNPVLQSSCVHTLILDTTYCNPRYDFPSQEIVIQFVIEAIQAEAFNPKTLFLIGSYTIGKERLFMEVARLLQKKVYVGAAKLQILKHLELPQEIMHWFTANEAESHIHVVPMWTLASFKRMKYLSNQYAGRYDLIVAFCPTGWAFGKGRKKTPGKRWQQGSIISIRP

SEQ ID NO: 170142 - protein, 739 aa, Zea Mays
MPANGKLSAKPSPSPMVAPASRPKFTAVTFLGDCDDDDDFQPPRPRPLKPCIGAAALRFRKKLKAPSSGKENSSAAGGAVTVVGVASTAVKDAETLAAGSRVSGDVPKTKRRKTGESCGLSRYGSDSTKLSCKPKIELDRYGYGKGCCSFLPSAIDSTVLALGAVCDFGVRRCDEAQIAVSRHCTSVLEAGHATEELTPTGSGCDPPKTEKKPGSSEAVEGHHDSRLIEPRLVESDANLEFVTGILGSLTDKQDTKKANGVVFGCGVGFQNGNYHLDSLQPELLTSNSKYDSRVCVSNEIQEPGLGACNLISQERKVAAGHSACATPENVTAENKSSAPEACKGQCHSDSSASKLPESHMIHDFEVDGCDNFEIGTQLSELINLCMKDSIEGQSNFGAAPMEQNTLDSKRLSSDYEAKCPLCGSDISDLSEELRQLHTNNCLDEPAKESSPNHKKEPSVGQNVETGRVVEWLRNLGLSKYEEVFIREEVDWETLQWLTEEDLLGIGISSLGPRKKIIHALGELLKKHDDPSEMEAVLNSGNTKKTKLPMNGNKLITEYFQCSSFDQRQRRVCKANKPSNLNEKKISSAKVPTRRTAGKGKIKDTPLWCCIPGTPFRVDAFRYLRGDCSHWFLTHFHVDHYQGLTRSFCHGKIYCSSITASLVHHKIGIPWDRLHVLTLNEKLNIAGVNLICFDANHCPGSIIILFEPPNGCFAHWRFPFFFQDGQQSCFAVFLCPHSNT

SEQ ID NO: 170143 - protein, 1064 aa, Zea Mays
MPANGKLSAKPSPSPMVAPASRPKFTAVTFLGDCDDDDDFQPPRPRPLKPCIGAAALRFRKKLKAPSSGKENSSAAGGAVTVVGVASTAVKDAETLAAGSRVSGDVPKTKRRKTGESCGLSRYGSDSTKLSCKPKIELDRYGYGKGCCSFLPSAIDSTVLALGAVCDFGVRRCDEAQIAVSRHCTSVLEAGHATEELTPTGSGCDPPKTEKKPGSSEAVEGHHDSRLIEPRLVESDANLEFVTGILGSLTDKQDTKKANGVVFGCGVGFQNGNYHLDSLQPELLTSNSKYDSRVCVSNEIQEPGLGACNLISQERKVAAGHSACATPENVTAENKSSAPEACKGQCHSDSSASKLPESHMIHDFEVDGCDNFEIGTQLSELINLCMKDSIEGQSNFGAAPMEQNTLDSKRLSSDYEAKCPLCGSDISDLSEELRQLHTNNCLDEPAKGKHGVVVRAVSLVPSVVGLKQSLRICGRKESSPNHKKEPSVGQNVETGRVVEWLRNLGLSKYEEVFIREEVDWETLQWLTEEDLLGIGISSLGPRKKIIHALGELLKKHDDPSEMEAVLNSGNTKKTKLPMNGNKLITEYFQCSSFDQRQRRVCKANKPSNLNEKKISSAKVPTRRTAGKGKIKDTPLWCCIPGTPFRVDAFRYLRDYQGLTRSFCHGKIYCSSITASLVHHKIGIPWDRLHVLTLNEKLNIAGVNLICFDANHCPGSIIILFEPPNGKAVLHTGDFRFSSKMANNPVLQSSCVHTLILDTTYCNPRYDFPSQEIVIQFVIEAIQAEAFNPKTLFLIGSYTIGKERLFMEVARLLQKKVYVGAAKLQILKHLELPQEIMHWFTANEAESHIHVVPMWTLASFKRMKYLSNQYAYTSIKPLGDRVLVKIKTSEAKSDGGILLPVSVQTRPQGGEIVAVGEGRSFGSNRIEISVPVGAQVVYSKYAGTELKFNDADHLILKEDDIIGILDSDDVKDMKPLNDRILIKVAEAEERTAGGLLLTQATKEKPSVGSVVAVGPGPLGEDGSRNPLSITPGSNVMYSKYAGSEFKGEDGEYIVLRASDVMAVLS

SEQ ID NO: 170144 - protein, 285 aa, Zea Mays
MIGGSAYGGQKAICCTSDLAKLGACTEGSVIYRPSQVNPGWPKLFVASFDGSDLIATLPSRTIPITKTGIYNMYFIHCDPSLASLEIEGKTIWKNPTGYLPGRMAPLKNFFGLMSFAFVVLGIYWFYQYMKSWREVLPLQNCITLVITLGMFEMALWYFEYAEFNETGVRPKGITFWAVTFGTVKRTAAEVIVLIVSMGYGVVTPTLGGLTSKVVMLGGTFFLATEILELVENLGAVNDLSGKARLFLVYPVAILDAAFVIWIFISLAKTIGKLQVGKTSSLYPY

SEQ ID NO: 170145 - protein, 412 aa, Zea Mays
MIGGSAYGGQKAICCTSDLAKLGACTEGSVIYRPSQVNPGWPKLFVASFDGSDLIATLPSRTIPITKTGIYNMYFIHCDPSLASLEIEGKTIWKNPTGYLPGRMAPLKNFFGLMSFAFVVLGIYWFYQYMKSWREVLPLQNCITLVITLGMFEMALWYFEYAEFNETGVRPKGITFWAVTFGTVKRTAAEVIVLIVSMGYGVVTPTLGGLTSKVVMLGGTFFLATEILELVENLGAVNDLSGKARLFLVYPVAILDAAFVIWIFISLAKTIGKLQARRLMAKLDIYRKFATALIISVLVSVGWIGYEIYSKSTDVFNERWQHAWIIPAFWHVLSFLLLCVICYLWAPSQNSMRFSYDASEFFDRKDNISLIRPAPSASKNGWNLSSTPEPKATKDVNTVADFEGDDEENKRE

SEQ ID NO: 170146 - protein, 281 aa, Zea Mays
MIGGSAYGGQKAICCTSDLAKLGACTEGSVIYRPSQVNPGWPKLFVASFDGSDLIATLPSRTIPITKTGIYNMYFIHCDPSLASLEIEGKTIWKNPTGYLPGRMAPLKNFFGLMSFAFVVLGIYWFYQYMKSWREVLPLQNCITLVITLGMFEMALWYFEYAEFNETGVRPKGITFWAVTFGTVKRTAAEVIVLIVSMGYGVVTPTLGGLTSKVVMLGGTFFLATEILELVENLGAVNDLSGKARLFLVYPVAILDAAFVIWIFISLAKTIGKLQKVDGQT

SEQ ID NO: 170147 - protein, 396 aa, Zea Mays
MAGRFLLVVAVALLLRPGDASVHEYRGLSFANKGNAFILHAGSEGLYAASHANTTAEDAAAVAEALIRFDKITFRRSEDTNNSVKETSSAKVQVLIFEIEDREMIGGSAYGGQKAICCTSDLAKLGACTEGSVIYRPSQVNPGWPKLFVASFDGSDLIATLPSRTIPITKTGIYNMYFIHCDPSLASLEIEGKTIWKNPTGYLPGRMAPLKNFFGLMSFAFVVLGIYWFYQYMKSWREVLPLQNCITLVITLGMFEMALWYFEYAEFNETGVRPKGITFWAVTFGTVKRTAAEVIVLIVSMGYGVVTPTLGGLTSKVVMLGGTFFLATEILELVENLGAVNDLSGKARLFLVYPVAILDAAFVIWIFISLAKTIGKLQALIYVIQTLSFPNLWHEW

SEQ ID NO: 170148 - protein, 515 aa, Zea Mays
MAGRFLLVVAVALLLRPGDASVHEYRGLSFANKGNAFILHAGSEGLYAASHANTTAEDAAAVAEALIRFDKITFRRSEDTNNSVKETSSAKVQVLIFEIEDREMIGGSAYGGQKAICCTSDLAKLGACTEGSVIYRPSQVNPGWPKLFVASFDGSDLIATLPSRTIPITKTGIYNMYFIHCDPSLASLEIEGKTIWKNPTGYLPGRMAPLKNFFGLMSFAFVVLGIYWFYQYMKSWREVLPLQNCITLVITLGMFEMALWYFEYAEFNETGVRPKGITFWAVTFGTVKRTAAEVIVLIVSMGYGVVTPTLGGLTSKVVMLGGTFFLATEILELVENLGAVNDLSGKARLFLVYPVAILDAAFVIWIFISLAKTIGKLQARRLMAKLDIYRKFATALIISVLVSVGWIGYEIGFSAVFEAGDQECYFKLHLSTFKNLSILYCLDSFVCTLLVYAYVSLFQKSLISLQFLSCRFTPNQQMYLMNDGSMPGLFLPSGMSCLSYFFVSFATCGHLHKTQ

SEQ ID NO: 170149 - protein, 309 aa, Zea Mays
MTKIVASVLEKNNLPGAIFTSFCGGTEIGQAIALDIRIPLVSFTGSTRAGLMVQQQVSARFGKCLLELSGNNAIIVMDDADIQLAVRSVLFAAVGTAGQRCTTCRRLILHENIYQTFLDQLVEVYKQVRIGDPLEKGTLLGPLHTPASKENFLKGIQTIKSQGGKILFGGSAIESEGNFVQPTIVEITPSAPVVKEELFGPVLYVMKFQSLKEAIEINNSVPQGLSSSIFTKRPDIIFKWLGPHGSDCGIVNVNIPTNGAEIGGAFGGEKATGGGREAGSDSWKQYMRRATCTINYGSELPLAQGINFG

SEQ ID NO: 170150 - protein, 272 aa, Zea Mays
MKRMKARFGRFLERVLDVHNERRLREGGNFVAKDMLDVLLQLADDTSLEVQLSRDNVKAITQDLIIAGTDSNANTLEWAVSELLKNPKILAKAMEELNHVIGPDRLVTESDLPRLPYIEAVLKETMRVHPAAPMLAPHVAREDTSVDGYDVLAGTVLFINVWAIGRDPGLWDAPEEFRPERFVESKIDVRGHDFQLLPFGSGRRMCPGINLALKVMALSLANLLHGFEWRLPDGVTAEELSMDEAFKLAVPRKFPLMVVAEPRLPARLYTGA

SEQ ID NO: 170151 - protein, 543 aa, Zea Mays
MHIGTSCICILPLAVRPLCWVEHMSLDNETGLDKPGIRVRSVTGLVAADYFVPGYFVWAVLIANLARIGYEEKTMYMAAYDWRLSFQNTEVRDQTLSRIKSNIELMVATNGGNRVVVIPHSMGVLYFLHFMKWVEAPPPMGGGGGPNWCEKHIKAVMNIGGPFLGVPKAVAGLFSSEAKDVAVARAIAPDVLDSDFLGLQTLRHLMRMTRTWDSTMSMLPKGGDTIWGNLDWSPEDGLECKAKKHKTNDTEVSKDSNGENIEVQPEPINYGRLVSFGKDVAEAPSSEIEQIEFRDAVKGNDIVHSNASCREIWTEYHELGWGGIKAVADYKVYTASSVIDLLHFVAPRMMQRGNVHFSYGIADNLDDPKYQHYKYWSNPLETKLPNAPDMEIISMYGVGIPTERAYVYKLAPQAECYIPFRIDASADGGEENKCLKGGVYLADGDETVPVLSAGYMCAKGWRGKTRFNPAGSKTYVREYSHSPPSTLLEGRGTQSGAHVDIMGNFALIEDIIRIAAGATGEEIGGDQVYSDIFKWSEKIKLKL

SEQ ID NO: 170152 - protein, 195 aa, Zea Mays
MRAPRVYNSRRTSAGSGSTRRASLSWAPGSSPPSRPRSTPPLSSRRASKSPLRRPRRLSQQRSRPPPSRRRLPSCARRGPSPSTAASPPPSPAPSLRARCTWARSRPRAPPSAQPRSASAPRSPLRRRQRAQWRASPPPSPRRSCGRPSTSSASASWFRATPVLPPATMAALTPSARPWLLTDYAACTVGSACPS

SEQ ID NO: 170153 - protein, 184 aa, Zea Mays
MGSFWFEGSESLATFHILGAIGIVFSAPYVCSSALFSGNGSGGRYISNGKLLSRRPRGIDSKKRLWTNVLLALNVLAYVAQVASQGKLLMWGAKINSLIDRGQFWRLATSSLLHANLTHLAFNCFSLNSIGPMVEMLSGPRRYLAVYFSSALAGSLMSYRFSASPAVGASGAIFGLVCLFCRYI

SEQ ID NO: 170154 - protein, 134 aa, Zea Mays
MVEMLSGPRRYLAVYFSSALAGSLMSYRFSASPAVGASGAIFGLVGAYAVYMWRHRRFFGNSRESLEHIGRVVVLNMGMGLLSRGIDNWGHLGGLLGGVAMAWFLGPAWQYQYVAKDGRAVFKDRAPVLRLIKG

SEQ ID NO: 170155 - protein, 171 aa, Zea Mays
MASWLLLPFSSFPWPPPPPPGSSSGRGGDGGGDGGDWRPTVVAAFAGVQVGRALRRRFAGLLRSPEVRHLDALPKMGSFWFEGSESLATFHILGAIGIVFSAPYVCSSALFSGNGSGGRYISNGKLLSRRPRGIDSKKRLWTNVLLALNVLAYVAQVASQGKLLMWGAKSD

SEQ ID NO: 170156 - protein, 160 aa, Zea Mays
MPFPRSKGRRKLKRSPRFLWSTHARRRRWCPWLRGCCSPSPPSRGLPRPHQAPPPAAAAMAAETAAIGGRPSSQPSQACKSAALSAAASPASSAHRSALFSGNGSGGRYISNGKLLSRRPRGIDSKKRLWTNVLLALNVLAYVAQVASQGKLLMWGAKSD

SEQ ID NO: 170157 - protein, 266 aa, Zea Mays
MGSFWFEGSESLATFHILGAIGIVFSAPYVCSSALFSGNGSGGRYISNGKLLSRRPRGIDSKKRLWTNVLLALNVLAYVAQVASQGKLLMWGAKINSLIDRGQFWRLATSSLLHANLTHLAFNCFSLNSIGPMVEMLSGPRRYLAVYFSSALAGSLMSYRFSASPAVGASGAIFGLVGAYAVYMWRHRRFFGNSRESLEHIGRVVVLNMGMGLLSRGIDNWGHLGGLLGGVAMAWFLGPAWQYQYVAKDGRAVFKDRAPVLRLIKG

SEQ ID NO: 170158 - protein, 75 aa, Zea Mays
MNHGMKTTIQYPQSHSFERSEEITASILISARKQMRLQKLSSLFQSGQRLRCSLFPFVWYTNYFYIISLVFFQAR

SEQ ID NO: 170159 - protein, 76 aa, Zea Mays
MQSLCHRHLRHTTSTNLPKLIGIDTQQAVSSTLPRSPLPEENGERAKQVVRHRGSSKPTNRSHGLVSRKSIFFQAR

SEQ ID NO: 170160 - protein, 110 aa, Zea Mays
MSKYKVEGFPTILVFGADKESPFPYQGARVASAIESFALEQLEANSGPVEVSELTGPDVMEEKCASAAICFVSFLPDILDSKAEGRNKYLELLLSVAEKYKKSPYRQVSA

SEQ ID NO: 170161 - protein, 344 aa, Zea Mays
MEKGVQLMEGRQAWPLHTMGMPVASTTTTSTCFDDYSCSSSGWEQSAPFGCFGLLAADVHDLFPLFAAMEPAPPPPPSAHGVAVAIPGELDDLLLNFWDAGCHDGDVGEPPLKAQQEEEEAAFNSSCACASATHEQGYRTPTDSFTIHCDDDDQALSSIFSAGPAPAAERAAFQQQAPATEAEPLPSSSSSSCRGDPRAAGAGTGLPLPGRGAARGPARAPPLPRTCGPSLKRAATREGVGRERRRQAAEGRGRGGGASVRAAEARRPGRRRDAGGHQRARPDAAGAAGAAPRGRVRVRAARVRGPAGHLGQGRRRLHAPAHPRARLHNHHKDARLVSHGDVGM

SEQ ID NO: 170162 - protein, 250 aa, Zea Mays
MTSSRSNFWDAGCHDGDVGEPPLKAQQEEEEAAFNSSCACASATHEQGYRTPTDSFTIHCDDDDQALSSIFSAGPAPAAERAAFQQQAPATEAEPLPSSSSSSCRGDPRAAGAGTGLPLPGRGAARGPARAPPLPRTCGPSLKRAATREESEQASAESGGGKRRKGAGVVVVRPFALLKPDGLDGGATLADINARVLMRPARPVRHPVGEFACAPRVSADQPGISGKAVAGFTRLHTPGRGSITIIRTRG

SEQ ID NO: 170163 - protein, 138 aa, Zea Mays
MPAPAAGEGDAGAGAAGAAELVEATRSQEGHMERVVAGRCMCNKGRTALSARSSASSLCSRRFSPVSVSQQRFRCSQSTSVCFSFVLALRFWNHTSTWRARRLSCLASASFCFCMRATDGTHQRKDSGVRTETGRGTK

SEQ ID NO: 170164 - protein, 529 aa, Zea Mays
MALFFILACTLIFVAIASYAQYARWQKGKGRLGGHEKASSSSSKLPPGSMGWPYLGDTLQLYSQDPNVFFASKQKRYGEIFKTHLLGCPCVMLASPEAARFVLVTQAHLFKPTYPRSKERMIGPSALFFHQGDYHLRLRKLVQGALGPDALRALVPEVESAVRSTLAAWDGQVRSTFDAMKTVSKHAWAWPMVSVMMSTQYISDDAENIIACRLDLLLRLFQLSFDVGILAIFGGGGLDERRKAELRKNYSIVEKGYNSFPNSIPGTLYYKAMQARRRLHGVLIDVMRERRERGAPGTDLLGCLMRSQGDDDGARRPLLTDDQVADNIIGVLFAAQDTTASALTWAVKYLHDHPKLLEAVRAEQAAVREATGGGRRPLTWAHTRSMALTHRVILESLRMASIISFTFREAVADVEYKGFLIPKGWKVMPLFRNIHHSPDYFQDPHKFDPSRFQVAPRPNTFLPFGSGVHACPGNELAKLEMLVLIHHLVTAYRCVRLSSHTDSLLSLWTRTYDTLAGATPPSATTTQLP

SEQ ID NO: 170165 - protein, 504 aa, Zea Mays
MALFFILACTLIFVAIASYAQYARWQKGKGRLGGHEKASSSSSKLPPGSMGWPYLGDTLQLYSQDPNVFFASKQKRYGEIFKTHLLGCPCVMLASPEAARFVLVTQAHLFKPTYPRSKERMIGPSALFFHQGDYHLRLRKLVQGALGPDALRALVPEVESAVRSTLAAWDGQVRSTFDAMKTLSFDVGILAIFGGGGLDERRKAELRKNYSIVEKGYNSFPNSIPGTLYYKAMQARRRLHGVLIDVMRERRERGAPGTDLLGCLMRSQGDDDGARRPLLTDDQVADNIIGVLFAAQDTTASALTWAVKYLHDHPKLLEAVRAEQAAVREATGGGRRPLTWAHTRSMALTHRVILESLRMASIISFTFREAVADVEYKGFLIPKGWKVMPLFRNIHHSPDYFQDPHKFDPSRFQVAPRPNTFLPFGSGVHACPGNELAKLEMLVLIHHLVTAYRWETVGSSDEVEYRPFPVPKQGLPVRLWRESSAAVDRNGRHETDDDVEDIIV

SEQ ID NO: 170166 - protein, 489 aa, Zea Mays
MALFFILACTLIFVAIASYAQYARWQKGKGRLGGHEKASSSSSKLPPGSMGWPYLGDTLQLYSQDPNVFFASKQKRYGEIFKTHLLGCPCVMLASPEAARFVLVTQAHLFKPTYPRSKERMIGPSALFFHQGDYHLRLRKLVQGALGPDALRALVPEVESAVRSTLAAWDGQVRSTFDAMKTLSFDVGILAIFGGGGLDERRKAELRKNYSIVEKGYNSFPNSIPGTLYYKAMQARRRLHGVLIDVMRERRERGAPGTDLLGCLMRSQGDDDGARRPLLTDDQVADNIIGVLFAAQDTTASALTWAVKYLHDHPKLLEAVRAEQAAVREATGGGRRPLTWAHTRSMALTHRVILESLRMASIISFTFREAVADVEYKGFLIPKGWKVMPLFRNIHHSPDYFQDPHKFDPSRFQVAPRPNTFLPFGSGVHACPGNELAKLEMLVLIHHLVTAYRCVRLSSHTDSLLSLWTRTYDTLAGATPPSATTTQLP

SEQ ID NO: 170167 - protein, 60 aa, Zea Mays
MPCLHFILKCYCLWFLVSRVTNLNEIAHHFLHCIQMHMELIIQVNCIQMNKEALLRTNLR

SEQ ID NO: 170168 - protein, 54 aa, Zea Mays
MCLLNLFLSCTHYVFDKLNLACFKETVFSYSHTTFSCVVYSYTPFILMHERRCP

SEQ ID NO: 170169 - protein, 106 aa, Zea Mays
MAYVHHAGIVDVDPEGQLLLMGEPRQVNRRQPPQQGLESPTNERRVAVAVEGRGVDHVEPLVGADVPGAQLQDAVGVLRVRVRLRRRRALAGAGDRRGQRLLVLVS

SEQ ID NO: 170170 - protein, 278 aa, Zea Mays
MASGVLHRSASRCLRPAAAPTPDSGRGHGAVMIGDSGTRGVALRLGGSSRRELLSVTMASRDHTGLTRQLLDFQHDTIDEVGAEHGPFMDLKARFMDFKQRNYVENFSNYQNLAEQQTPKFMVIACADSRVCPTAVLGFQPGEAFTVRNVANLVPPYEHEGSETSAALEFAINTLEVENVLVVGHSRCGGIQALMSMKDDSTSGSFIKNWVSIGKSARLSTRAAAGNLSFDMQCKHCEKESINSSLLNLLTYPWIEKRVNEGLEGGSKYAIKNRSTWS

SEQ ID NO: 170171 - protein, 297 aa, Zea Mays
MPRTALLRLAAASTTRASSASAAARRLCPSSESDDGGERHAAARKDELLPPPRTPRPDERRLSRRGEHRRELLSVTMASRDHTGLTRQLLDFQHDTIDEVGAEHGPFMDLKARFMDFKQRNYVENFSNYQNLAEQQTPKFMVIACADSRVCPTAVLGFQPGEAFTVRNVANLVPPYEHEGSETSAALEFAINTLEVENVLVVGHSRCGGIQALMSMKDDSTSGSFIKNWVSIGKSARLSTRAAAGNLSFDMQCKHCEKESINSSLLNLLTYPWIEKRVNEGLEGGSKYAIKNRSTWS

SEQ ID NO: 170172 - protein, 268 aa, Zea Mays
MDFDDHDDSDEEMAPMPMPMPMPVSSSYDAPPLAAGFGGGGVEPLSVRAKAPAGGLGGGGGGGGRRARSARSAAPRAAATATSTARSPPRARSSPPPRWPPTAAPRRTTTTSPRTAAPRPGTSTSSRCRWPRPCPWGTRRGRWRCRPRPTAGATTATATTTFPGWPGRCRRRWGRWAACPSAAPPGLPARAGPARSGSAPSSARSRRTGCWRSRSAWGGASRSTTRPPCSSSATRSASSATCSRCGCTTTSTPSARSRSALAPSPDLT

SEQ ID NO: 170173 - protein, 473 aa, Zea Mays
MIYIRNLIWNLSTYSTETPAQAQAQGTTHVAGTTTTRTLRNPLLVVNFVLMVVGSAGGPLFLRAYFLHGGARKWLSALLQTAGFPLLLVPLCVSFSRRRRRRDDGAPAKAPFFLMTPRLLAASAAIGLMTGLDDLLYAYGLAYLPVSTSSILISTQLAFTAAFALLLVRQRFTAFSVNAVALLSAGAAMLGMNAGGDRPAGVSPAQYGAGFAMTLGAAALYGLLLPAMELSQAQARAGTAAAVTYTLVIEMQLVIGLTATVFSAVGMLANHDLHKPGPPVFPARREDARPFDFKGVWQAMEECQRLGLARAIGVSNFRTKHLDKMMPFATITPAVNQVEVNPVCQQLKLRGYCAEKGIHVQAFSPLGGQSWAAERNAVLESEVLAEIAKARGKTVAQVSLRWVFEQGVSFVVKTYKKERLKENLEIFDWELTDEDRVKISRIPQKKLSGFSFMFKPEGEFTSVDVSEINPIEE

SEQ ID NO: 170174 - protein, 64 aa, Zea Mays
MTVLIPVTEVLAVVFFHEPFNGTKGVALALSLWGFVSYFYGEVQTSKAHHHLPDKPTNVERLDP

SEQ ID NO: 170175 - protein, 137 aa, Zea Mays
MGFPMTTAIVPPPRWLYPRLSEAIPREARQYELGEARYYMVLAWAAVLWQCFFLGAVGVIFCVHTLLAGILIAVFIPVTEVAAVIFLHEKFSSEKGVALALSLWGLASYSYGEWSQAKAKKEKKSEEDDGEVAQAVP

SEQ ID NO: 170176 - protein, 60 aa, Zea Mays
MSADRHEMLSRREKATNFKPDYDIDIHMKVLAMSGQESSILTGYKLKECCEQRFHWLDSQ

SEQ ID NO: 170177 - protein, 279 aa, Zea Mays
MGHTSSGNEVPLKYSSGKAFPLGVSQVDDGLNFAIFSQHASSVTLCLKLPERGTQDDADIIEFALDRQKNKTGDIWHVSVEGLPASCVLYGYRVSGPQGWQQVEKEKPSQLFGTYDFDSSPFDWGDNYKLPNLPETDLVIYEMNVRAFTADESSKLGPAIRGSYLGVIDKIPHLLELGVNAVELLPVFEFDELEFKRFPNPRDHMVNTWGYSTINFFAPMSRYASAGGGPVAASKEFKQMVKAFHNAGIEVYYILDLNNSAQLLNFSGCGKTMVLSFSF

SEQ ID NO: 170178 - protein, 503 aa, Zea Mays
MGHTSSGNEVPLKYSSGKAFPLGVSQVDDGLNFAIFSQHASSVTLCLKLPERGTQDDADIIEFALDRQKNKTGDIWHVSVEGLPASCVLYGYRVSGPQGWQQGHRFDDSAFDSVSWPFLIGVLRKMGFGQIWCDVVCGLLATSSTRILLNGVHGEIISHQRGLRQGDPLSPMLFILVMDVLNLLIQKASDEGLLQQLSAGTLHHKLSLYADDAVVFLRPVASDINLVLEILRLFGEASGLKTNVLKSSVFPIRCTEDDLMRVQASLPCPISDFPCQYLGLPLSLGKLSKAQLQALVDKAASVLPGWKADLMTKAGRAVYVQFVLTAKMIYAAMALDLPNWTTKAIDKIRRGFLWKGRKQANGGHCLVVWGKVTRPKVLGGLGITDLWLLSVALRARWPWLQRTDHSKPWSVLPVQACGAMEALINVAVVSQLGDGHDILFWKDRWLNGRCIGEVAPEVLEHVPTCVASKRLVKDALTNLNWVADIRGALSVRALAQVLDLCDL

SEQ ID NO: 170179 - protein, 1162 aa, Zea Mays
MGTEVAAVVDLRALTQSDLVALAAASPYAVDSRRGRRRRRDSEFLSPPKIDRAVFNESAGSRKQTFSRRRVATNISHKLTPTTTGASSLSTPAAPTEEDPDNRLIVFYLQRLFARDDPSYPAPPTIPPRPQTLAAPAITAPAPPAPSLPPPSAAAADPDRVVLNPKGLVVDLVRLADLVDPYGEELRQRTAGLGSESELLGFMNALEGQWGSRRRRRKFVNAGMFGDHLPCGWKLLLGLKRKERVAWINCRRYVSPKGHQFATCKEVSSYLLSLLGYQEAKPTASQINNAGVHDLHVNSVGLHQQTISIEEKQIAVPVNSVALFNSSGDSHQQKLQKDEAPIEVNAKECRKCNLTFHDQSAYMQHQLSFHQRKAKRRRVSKSGELGTNIDGNYEKTQQKTSGEVSGNFGHSAANVRYEGLSPAELLDGRPSLMAVPCGSQEITILPQQGKEPCVLPQQGKEPSVLPQPGKEPSVLPQQGKEPSMLPQQGKEPSVLPQQGKEPSVLPQQGKEPSELPQQGKESSGDISVNQKDPLKEMNGFPEQEKGLVAGELVSAHHKDPLMDITDAFEMIKKHPAREPSSGHHLDTVDNSDDHKTHDEACDNVVTSLSIDAERKLGVCNSMNVHENISLKDPELSNADYSQKFNRSDETCDVHKEVSSTVNDPDERKCTDDSTRCTNMSCDLLHGKIVSSPEEHDFSNQLESNPLSVSRNEPDLNSIGTEVDGGNITCNAENPRSFKSEKSAELKIMDCEMTSFKDSEIKNDVRVRDVNLNSCLDSISSPISGGNNETSDTPDDAIRSSIIAQCFGTTSNDDTACKDGNFANQNDTCKGENFVNQKNVTMYQSNLTMEPIPRAQINVDCFTSSCSMTPEIKDYGNRGEDRAKEALVNSQNMTSNETGFDAEAYNSDIFNGTITESSLAQLSNVISMKNAFANCYSLSDLNTLTGGTATDDIDMHNIRSSFVSSTSRTEPNEHCTLDFDIKGSMLEALEKSDSDLDNQYNDAGPSCDSLPATGTSGTIDDFMSMQTNFGSFTSLVRAVEDVPLSRIIQDQMYPSFEQQLRMASAGAPPYGTIGRHDPIPVPEPTLMLGYAPQLGNCPPPFQLGWGPSYSKMVGMLQSVCVWCNSPFQHFGTVAEQQADSLGYICPSCKGKFSGHLGINGPSI

SEQ ID NO: 170180 - protein, 1143 aa, Zea Mays
MGTEVAAVVDLRALTQSDLVALAAASPYAVDSRRGRRRRRDSEFLSPPKIDRAVFNESAAAPTEEDPDNRLIVFYLQRLFARDDPSYPAPPTIPPRPQTLAAPAITAPAPPAPSLPPPSAAAADPDRVVLNPKGLVVDLVRLADLVDPYGEELRQRTAGLGSESELLGFMNALEGQWGSRRRRRKFVNAGMFGDHLPCGWKLLLGLKRKERVAWINCRRYVSPKGHQFATCKEVSSYLLSLLGYQEAKPTASQINNAGVHDLHVNSVGLHQQTISIEEKQIAVPVNSVALFNSSGDSHQQKLQKDEAPIEVNAKECRKCNLTFHDQSAYMQHQLSFHQRKAKRRRVSKSGELGTNIDGNYEKTQQKTSGEVSGNFGHSAANVRYEGLSPAELLDGRPSLMAVPCGSQEITILPQQGKEPCVLPQQGKEPSVLPQPGKEPSVLPQQGKEPSMLPQQGKEPSVLPQQGKEPSVLPQQGKEPSELPQQGKESSGDISVNQKDPLKEMNGFPEQEKGLVAGELVSAHHKDPLMDITDAFEMIKKHPAREPSSGHHLDTVDNSDDHKTHDEACDNVVTSLSIDAERKLGVCNSMNVHENISLKDPELSNADYSQKFNRSDETCDVHKEVSSTVNDPDERKCTDDSTRCTNMSCDLLHGKIVSSPEEHDFSNQLESNPLSVSRNEPDLNSIGTEVDGGNITCNAENPRSFKSEKSAELKIMDCEMTSFKDSEIKNDVRVRDVNLNSCLDSISSPISGGNNETSDTPDDAIRSSIIAQCFGTTSNDDTACKDGNFANQNDTCKGENFVNQKNVTMYQSNLTMEPIPRAQINVDCFTSSCSMTPEIKDYGNRGEDRAKEALVNSQNMTSNETGFDAEAYNSDIFNGTITESSLAQLSNVISMKNAFANCYSLSDLNTLTGGTATDDIDMHNIRSSFVSSTSRTEPNEHCTLDFDIKGSMLEALEKSDSDLDNQYNDAGPSCDSLPATGTSGTIDDFMSMQTNFGSFTSLVRAVEDVPLSRIIQDQRCDLQLGFGGPKQQMYPSFEQQLRMASAGAPPYGTIGRHDPIPVPEPTLMLGYAPQLGNCPPPFQLGWGPSYSKMVGMLQSVCVWCNSPFQHFGTVAEQQADSLGYICPSCKGKFSGHLGINGPSI

SEQ ID NO: 170181 - protein, 320 aa, Zea Mays
MGIQGNKAATHEHDFLSLYAAAAAAAAAKDAPLLLHDSKTPPPSQGNFLLKTHDFLQPFDQKPGAPPEPSPLPAPAAEIRHRQQVAVAKQRALPLPLPGGVGTFSISPAPVSVALPSAVVKSEPPPFVLWGQPAATLQPGARGHQQQWALPFAGSLQVSPPPQQAQPDRKGRGGGGVMDSGSRSSGGAGFDDEDGLTTRREVSSSLQDLAVRVDWKGGSCSDGGTNQGPNTPRSKHSATEQRRRSKINDRFQILRELLPHNDQKRDKATFLLEVIEYIRFLQEKAQKYEATFPEWNQENPTMLPVKAKSQEIPRLTLHIS

SEQ ID NO: 170182 - protein, 334 aa, Zea Mays
MGIQGNKAATHEHDFLSLYAAAAAAAAAKDAPLLLHDSKTPPPSQGNFLLKTHDFLQPFDQKPGAPPEPSPLPAPAAEIRHRQQVAVAKQRALPLPLPGGVGTFSISPAPVSVALPSAVVKSEPPPFVLWGQPAATLQPGARGHQQQWALPFAGSLQVSPPPQQAQPDRKGRGGGGVMDSGSRSSGGAGFDDEDGLTTRREVSSSLQADLAVRVDWKGGSCSDGGTNQGPNTPRSKHSATEQRRRSKINDRFQILRELLPHNDQKRDKATFLLEVIEYIRFLQEKAQKYEATFPEWNQENPTMLPQICIFDHSGKMHRVKAKSQEIPRLTLHIS

SEQ ID NO: 170183 - protein, 163 aa, Zea Mays
MLRSALRRGGASARQVALAGEASPRDLLRMRVAERERARRRRRDPGRDEFFVPTPESLAWLDSVSLPMVLTAAAVALFTKLLMMEHEATDQERRERKIKNSHPDQGTVRMLSREEWEEVQEVRPRTPFESKLARPHARIRTGEPVRLVSRCFLWRMSRIGLLM

SEQ ID NO: 170184 - protein, 121 aa, Zea Mays
MASGLRALEHCCLPLRIVFTLHNMARALAYGGAAAAAGFVSPWLAVLGVAMLSVWTITLAILLCGDSSDNPRPPRYNPAVSAAIAAGGGGGCGGGGGGGGGGCGGGGGGGGGCGGGGGGGC

SEQ ID NO: 170185 - protein, 238 aa, Zea Mays
MVEARTFPLATSTSFYPPATSRHKFSLPTRTSHGDSKTFRRRMASAGAGEGKETAAGSSLHSKTLLKSQPLYQYILESTVFPREPDCLRELRVATATHPMAGMAASPDEVQLLQLLIEILGAKNAIEVGVFTGYSLLATALALPDDGKIVAIDVTRESYDQIGSPVIEKAGVAHKIDFRVGLALPVLDQMVAEEGNKGKFDFAFVDADKRSKSLWKSGKKLTKIPQLTKVKSNGAAHL

SEQ ID NO: 170186 - protein, 326 aa, Zea Mays
MDSGANSIGESVGESPSLALAPEPQTRPAEPVTKGRGLRRWRRIPREQHQEGSPGSPGADTGVGASAGEDLAAQLHKRRYGPAADEPKGKQDPAAAEEVESSVASVESSFVPLEASPPPAPTRLDPNLGHLIATAGFSVGAGGADSDNSDDRTSKLSTAASAPRHDFSSVGFGRERDRARSRAPGAAHGKGIRAARVRGATMRVASSPAEAGNSRSSVESNLRSSNAAHARRSSAGVTSNGVHKILFPDGHQSDDEPPSGDMRYGTGRFYKENGSIEGRLGNCDSDSNHHTFDEASVGKLRMEGLIQVWICMVSRWALLQSAQESA

SEQ ID NO: 170187 - protein, 298 aa, Zea Mays
MRFLHMLSKAHFKMVSQICSVLNQTPMVVWRSAGLREQAQPSPTTGTLPFLMATNDKSTISPAAKITEDSTFDNDVFSFQPHLGSEQTGFSTAEKDYGAYERKQSLSNIHQQESSLQSSFTAVKDNTSATIVKAKPSSSSMFSDSHYSADQQQADETNIKVQGKGVEARSAAFAPVSAHSDASLLESQEALDVSSTLSNEEDERATHGTVSIECDGDEADAVSKRRKLELDALEATATATTSTTNTIDMGPAASRAVREPRVVVQTTSEVDILDDGYRWRKYGQKVVKGNPNPRSHFH

SEQ ID NO: 170188 - protein, 324 aa, Zea Mays
MRAARAGFSVPKIDTSRVGSSTVIRSPVSIPPGLSPTTLLESPVFLYNKMAQPSPTTGTLPFLMATNDKSTISPAAKITEDSTFDNDVFSFQPHLGSEQTGFSTAEKDYGAYERKQSLSNIHQQESSLQSSFTAVKDNTSATIVKAKPSSSSMFSDSHYSADQQQADETNIKVQGKGVEARSAAFAPVSAHSDASLLESQEALDVSSTLSNEEDERATHGTVSIECDGDEADAVSKRRKLELDALEATATATTSTTNTIDMGPAASRAVREPRVVVQTTSEVDILDDGYRWRKYGQKVVKGNPNPSAQACGKSITRSEISHHNV

SEQ ID NO: 170189 - protein, 156 aa, Zea Mays
MAFAAVLRARLLPVPTPLSSSSPPPFFAPSAYVRVPRLTAAAARTVRYRRRGGRPHRAAAAITASLDLTEDNVRVALDEAKSELGQLFDTSVGITGQVDLAELDGPFVKLRLKGKFWHTRATVVARIGNYLKNRIPEILEVEIEDEKQLDDSPAAF

SEQ ID NO: 170190 - protein, 150 aa, Zea Mays
MAFAAVLRARLLPVPTPLSSSSPPPFFAPSAYVRVPRLTAAAARTVRYRRRGGRPHRAAAAITASLDLTEDNVRVALDEAKSELGQLFDTSVGITGQVDLAELDGPFVKLRLKGKFWHTRATVVARIGNYLKNRIPEMGRVLFNQGVTWG

SEQ ID NO: 170191 - protein, 694 aa, Zea Mays
MSAALACLRRTSKRRRDAPDHALPPSSKQPLMAHAGAGAGAAESSSSASASASGGDGASAAAAAASASSPPASPREVHFFVRATDSRTIAMHAGCDDTVGAVLDHLGACGYGRDLRLLYAGRQLAPEATLAELHLPPDSTLHLLARLRSTQHPHAWQLASHIAGTAAAAAAAAESEPSRIPAAAFSLDELVREFILRAHRANLGLRPDRASTDEDRFAADHAAEYVDIFLQAGAALALVRLYLSNSPFRSHAESAIKCFVATDPYSLPMDLLVVTAPVLLEFCRLLSLAAGKKELLYRSCRRTLASVLSTRPRLPPSMNSPTRLIEQVLPFARETVDVVLDGLASMPMIISPSDLDEFSNFLKVMCQQARHWISGEGPMPSNLYSRESEHGDTWIWRFHNMSMDMLKRLDECLKTLEMDLSLSSESVGVMESQTTWAARSHILVMLTELDFISAIYEDVGHNLQLVLLAHRAPLNALVRCSKRNERLHWLVKHKNLLCFEARRNLVFMMLPEGKDDFGELHEMLIDRSHLLDESFNYIAQAKQTELRGGLFMEFKNEEATGPGVLREWFCLVCQALFSSKQVLFSPCPEDKRRFYLNETSAVDPLHLKYFTFAGRIIGLALMHKVQVGVVIDRTLFLHLAGRSITLEDISVADPVKYASCKKILEMDAAEIDNLYLTFSRGAHELANPFHGWIC

SEQ ID NO: 170192 - protein, 612 aa, Zea Mays
MSAALACLRRTSKRRRDAPDHALPPSSKQPLMAHAGAGAGAAESSSSASASASGGDGASAAAAAASASSPPASPREVHFFVRATDSRTIAMHAGCDDTVGAVLDHLGACGYGRDLRLLYAGRQLAPEATLAELHLPPDSTLHLLARLRSTQHPHAWQLASHIAGTAAAAAAAAESEPSRIPAAAFSLDELVREFILRAHRANLGLRPDRASTDEDRFAADHAAEYVDIFLQAGAALALVRLYLSNSPFRSHAESAIKCFVATDPYSLPMDLLVVTAPVLLEFCRLLSLAAGKKELLYRSCRRTLASVLSTRPRLPPSMNSPTRLIEQVLPFARETVDVVLDGLASMPMIISPSDLDEFSNFLKVMCQQARHWISGEGPMPSNLYSRESEHGDTWIWRFHNMSMDMLKRLDECLKTLEMDLSLSSESVGVMESQTTWAARSHILVMLTELDFISAIYEDVGHNLQLVLLAHRAPLNALVRCSKRNERLHWLVKHKNLLCFEARRNLVFMMLPEGKDDFGELHEMLIDRSHLLDESFNYIAQAKQTELRGGLFMEFKNEEATGPGVLREWFCLVCQALFSSKQVLFSPCPEDKRRFYLNETICILQHLLWIHCT

SEQ ID NO: 170193 - protein, 703 aa, Zea Mays
MSAALACLRRTSKRRRDAPDHALPPSSKQPLMAHAGAGAGAAESSSSASASASGGDGASAAAAAASASSPPASPREVHFFVRATDSRTIAMHAGCDDTVGAVLDHLGACGYGRDLRLLYAGRQLAPEATLAELHLPPDSTLHLLARLRSTQHPHAWQLASHIAGTAAAAAAAAESEPSRIPAAAFSLDELVREFILRAHRANLGLRPDRASTDEDRFAADHAAEYVDIFLQAGAALALVRLYLSNSPFRSHAESAIKCFVATDPYSLPMDLLVVTAPVLLEFCRLLSLAAGKKELLYRSCRRTLASVLSTRPRLPPSMNSPTRLIEQVLPFARETVDVVLDGLASMPMIISPSDLDEFSNFLKVMCQQARHWISGEGPMPSNLYSRESEHGDTWIWRFHNMSMDMLKRLDECLKTLEMDLSLSSESVGVMESQTTWAARSHILVMLTELDFISAIYEDVGHNLQLVLLAHRAPLNALVRCSKRNERLHWLVKHKNLLCFEARRNLVFMMLPEGKDDFGELHEMLIDRSHLLDESFNYIAQAKQTELRGGLFMEFKNEEATGPGVLREWFCLVCQALFSSKQVLFSPCPEDKRRFYLNESCGAHVNRETEAAPLLLDFGEVFTIRRVLWTELQTFYLQDIRFARPAPIIADLLLPALPPSLHILENDGKPAAEDHRRACELQLRYMVVAAVMDSEPVYSVHTVG

SEQ ID NO: 170194 - protein, 783 aa, Zea Mays
MSAALACLRRTSKRRRDAPDHALPPSSKQPLMAHAGAGAGAAESSSSASASASGGDGASAAAAAASASSPPASPREVHFFVRATDSRTIAMHAGCDDTVGAVLDHLGACGYGRDLRLLYAGRQLAPEATLAELHLPPDSTLHLLARLRSTQHPHAWQLASHIAGTAAAAAAAAESEPSRIPAAAFSLDELVREFILRAHRANLGLRPDRASTDEDRFAADHAAEYVDIFLQAGAALALVRLYLSNSPFRSHAESAIKCFVATDPYSLPMDLLVVTAPVLLEFCRLLSLAAGKKELLYRSCRRTLASVLSTRPRLPPSMNSPTRLIEQVLPFARETVDVVLDGLASMPMIISPSDLDEFSNFLKVMCQQARHWISGEGPMPSNLYSRESEHGDTWIWRFHNMSMDMLKRLDECLKTLEMDLSLSSESVGVMESQTTWAARSHILVMLTELDFISAIYEDVGHNLQLVLLAHRAPLNALVRCSKRNERLHWLVKHKNLLCFEARRNLVFMMLPEGKDDFGELHEMLIDRSHLLDESFNYIAQAKQTELRGGLFMEFKNEEATGPGVLREWFCLVCQALFSSKQVLFSPCPEDKRRFYLNERGQDISVNIGNREHYIDLLIKNIFVDSISSQLTHFTDGFADILVNPKRREEFFECLDLEDFDRLLGGSSNAINLQDWKSHTQYNGYKEKDRQITLFWKAVERMSIERQRQLLFFWTSVKYLPSDGFCGLSSKLFIYKTSDSPDRLPSSQTCFYRLCLPPYTSLKMMENQLQKITEEHVSCSFGTW

SEQ ID NO: 170195 - protein, 827 aa, Zea Mays
MSAALACLRRTSKRRRDAPDHALPPSSKQPLMAHAGAGAGAAESSSSASASASGGDGASAAAAAASASSPPASPREVHFFVRATDSRTIAMHAGCDDTVGAVLDHLGACGYGRDLRLLYAGRQLAPEATLAELHLPPDSTLHLLARLRSTQHPHAWQLASHIAGTAAAAAAAAESEPSRIPAAAFSLDELVREFILRAHRANLGLRPDRASTDEDRFAADHAAEYVDIFLQAGAALALVRLYLSNSPFRSHAESAIKCFVATDPYSLPMDLLVVTAPVLLEFCRLLSLAAGKKELLYRSCRRTLASVLSTRPRLPPSMNSPTRLIEQVLPFARETVDVVLDGLASMPMIISPSDLDEFSNFLKVMCQQARHWISGEGPMPSNLYSRESEHGDTWIWRFHNMSMDMLKRLDECLKTLEMDLSLSSESVGVMESQTTWAARSHILVMLTELDFISAIYEDVGHNLQLVLLAHRAPLNALVRCSKRNERLHWLVKHKNLLCFEARRNLVFMMLPEGKDDFGELHEMLIDRSHLLDESFNYIAQAKQTELRGGLFMEFKNEEATGPGVLREWFCLVCQALFSSKQVLFSPCPEDKRRFYLNETSAVDPLHLKYFTFAGRIIGLALMHKVQVGVVIDRTLFLHLAGRSITLEDISVADPVKYASCKKILEMDAAEIDNLYLTFSRGAHELVNPKRREEFFECLDLEDFDRLLGGSSNAINLQDWKSHTQYNGYKEKDRQITLFWKAVERMSIERQRQLLFFWTSVKYLPSDGFCGLSSKLFIYKTSDSPDRLPSSQTCFYRLCLPPYTSLKMMENQLQKITEEHVSCSFGTW

SEQ ID NO: 170196 - protein, 740 aa, Zea Mays
MSAALACLRRTSKRRRDAPDHALPPSSKQPLMAHAGAGAGAAESSSSASASASGGDGASAAAAAASASSPPASPREVHFFVRATDSRTIAMHAGCDDTVGAVLDHLGACGYGRDLRLLYAGRQLAPEATLAELHLPPDSTLHLLARLRSTQHPHAWQLASHIAGTAAAAAAAAESEPSRIPAAAFSLDELVREFILRAHRANLGLRPDRASTDEDRFAADHAAEYVDIFLQAGAALALVRLYLSNSPFRSHAESAIKCFVATDPYSLPMDLLVVTAPVLLEFCRLLSLAAGKKELLYRSCRRTLASVLSTRPRLPPSMNSPTRLIEQVLPFARETVDVVLDGLASMPMIISPSDLDEFSNFLKVMCQQARHWISGEGPMPSNLYSRESEHGDTWIWRFHNMSMDMLKRLDECLKTLEMDLSLSSESVGVMESQTTWAARSHILVMLTELDFISAIYEDVGHNLQLVLLAHRAPLNALVRCSKRNERLHWLVKHKNLLCFEARRNLVFMMLPEGKDDFGELHEMLIDRSHLLDESFNYIAQAKQTELRGGLFMEFKNEEATGPGVLREWFCLVCQALFSSKQVLFSPCPEDKRRFYLNEINPKRREEFFECLDLEDFDRLLGGSSNAINLQDWKSHTQYNGYKEKDRQITLFWKAVERMSIERQRQLLFFWTSVKYLPSDGFCGLSSKLFIYKTSDSPDRLPSSQTCFYRLCLPPYTSLKMMENQLQKITEEHVSCSFGTW

SEQ ID NO: 170197 - protein, 429 aa, Zea Mays
MRMTIWASWTRRCSCTWITAEAMAARRSKSKGRHSTSSPCMWSRRRSLVLPPAPVGYKQPRSPDHHHHQHAAMEELLAESRRQQEHQPFAAAAEPAAAPGMIKGVKPLAKKDHRRGTSTTERDPKTLRRLAQNREAARKSRLRKKAYIQQLESSRIRLAQLEQELHTTRAHQGVFFPNGGILAGQSVVGKGVPIGGIDSLSSEAAMFDVEYGRWQEEHYRLMYELRAALQQHLPEGELQMYVESCLAHHDEMLGIKEGAIKGDVFHLISGVWRSPAERCFLWLGGFRPSEVIKMLLSHVDPLTEQQIVAVYGLQQSALETEETLSQGMEALYQSLSDTILSDALSCPSNVAIYMGQMAAAMNKLSTLKGFVRQAENLRQQTLHRLHQILTARQMARSLLAMSDYFHRLRTLSSLWVTRPRAPQEQQGHS

SEQ ID NO: 170198 - protein, 334 aa, Zea Mays
MQLQRSVDRPVHPSMVSGGSIKEQQHEMNISFAMVNHHHHHQQPPSSSSSSSMHAAAASFMSGKEASSGAYAYDHLGELDQALFMYLDHGRSHGGTPQQEQRQTLNIFPMHVEPSPKGEISLVLPPAPVGYKQPRSPDHHHHQHAAMEELLAESRRQQEHQPFAAAAEPAAAPGMIKGVKPLAKKDHRRGTSTTERDPKAYIQQLESSRIRLAQLEQELHTTRAHQGVFFPNGGILAGQSVVGKGVPIGGIDSLSSDAAEPRGSPDGAADRGRVRATAVGARDGGDAEPGHGGAIPVVVRHHPVRRAQLSLQRRHLHGPDGRRHEQALHAQGLR

SEQ ID NO: 170199 - protein, 457 aa, Zea Mays
MQLQRSVDRPVHPSMVSGGSIKEQQHEMNISFAMVNHHHHHQQPPSSSSSSSMHAAAASFMSGKEASSGAYAYDHLGELDQALFMYLDHGRSHGGTPQQEQRQTLNIFPMHVEPSPKGEISLVLPPAPVGYKQPRSPDHHHHQHAAMEELLAESRRQQEHQPFAAAAEPAAAPGMIKGVKPLAKKDHRRGTSTTERDPKTLRRLAQNREAARKSRLRKKAYIQQLESSRIRLAQLEQELHTTRAHQGVFFPNGGILAGQSVVGKGVPIGGIDSLSSEAAMFDVEYGRWQEEHYRLMYELRAALQQHLPEGELQMYVESCLAHHDEMLGIKEGAIKGDVFHLISGVWRSPAERCFLWLGGFRPSEVIKMLLSHVDPLTEQQIVAVYGLQQSALETEETLSQGMEALYQSLSDTILSDALSCPSNVAIYMGQMAAAMNKLSTLKGFVRQGRTQSKMRVG

SEQ ID NO: 170200 - protein, 82 aa, Zea Mays
MQSYARLPYLQNLNAKSLTRSFVARLRVDDVSAKIMSFSQHGTRAVCILSANGAISNVTLRQSATSGGTVTYEVHWYSDSEE

SEQ ID NO: 170201 - protein, 430 aa, Zea Mays
MMEVSPSPEQGVMAGREPFGLPKTPATPPSSGGTQGLRMAYTTDGTAIFTPVSSVPPATATYQPVGGSAASASSLAGVGGNGGAPVHSGGAGEPGTKKKRGRPRKYGPDGSMSLALVPASMAGEPAPAALGASGPFSPNGPKAPNTAPSASPDGAKKRGRPKGSTNKKHVAALGPAGAGFTPHLIFVKAGEDVSAKIMSFSQHGTRAVCILSANGAISNVTLRQSATSGGTVTYEVRILNATSYEYRVHFDTDSQLEYFTARYTGTAIQKSDLTDVYCLYRESSLSLGRFEILSLSGSFLLSENGGQRSRTGGLSVSLAGPDGRVLGGCVAGLLTAASPVQIVVGSFDAGGKKQPKQQQQQQLAPSPAPLNLAPTGVAAGPSSPPSRGTLSLSESSSGAPPSPPHAGASGGHGQQQQQPQPGGFSGLFWK

SEQ ID NO: 170202 - protein, 294 aa, Zea Mays
MTRVPKVQEVVSQIFNKPPSKGVNPDEAVAMGAAIQGGILRGDVKELLLLDVTPLSLGIETLGGIFTRLINRNTTIPTKKSQVFSTAADNQTQVGVKVLQGEREMATDNKLLGEFQLEGIPPAPRGMPQIEVTFDIDANGIVKVSARDKATGKEQEITIKSSGGLSEVEIEKMVKEAELHSQKDQERKSLIDLKNSADTTIYSIEKSVSEYKDKVPAEVTKEIESAVSDLRAAMAEDDLDKIKQKLEAANKAVSKIGEHMQQGGGSGSAGGSGSSSGGDQTPEAEYQDAKEAKM

SEQ ID NO: 170203 - protein, 290 aa, Zea Mays
MEGASESLLLFKADMLDRDALAAAVSGCEGVFHVASPVPADKVLDPEAEVLSPAVKGTLNVLQACSANNVRKVIVVSSTAAVHFNPSWPQGIIQDESCWSDKFFCTKSEEWYIAAKTIAEETALEYGEKNGLLVVTVCPCVVLGPLLQPLINTTSEVFVYIIKGGPRAMKNITWNIVDVRDVADALLLVYEKVESSGRYICAPNRISTYDIANLFRKFYPNYNYVKCSDEDHESEMPPVTSEKLKSLGWKPRKLEETLLDSIEHYEKAGFLQDVEGCPCRLPYLFHFASN

SEQ ID NO: 170204 - protein, 244 aa, Zea Mays
MEEVLSPAVKGTLNVLQACSANNVRKVIVVSSTAAVHFNPSWPQGIIQDESCWSDKFFCTKSEEWYIAAKTIAEETALEYGEKNGLLVVTVCPCVVLGPLLQPLINTTSEVFVYIIKGGPRAMKNITWNIVDVRDVADALLLVYEKVESSGRYICAPNRISTYDIANLFRKFYPNYNYVKCSDEDHESEMPPVTSEKLKSLGWKPRKLEETLLDSIEHYEKAGFLQDVEGCPCRLPYLFHFASN

SEQ ID NO: 170205 - protein, 250 aa, Zea Mays
MVVFNSEAGDKEQDELGENRLQKSIITRGISPSIGAFTVQCAKCFKWRLIPTKEKYEEIRERIIEEPFVCKRAREWRPDVTCNDPEDISQDGSRLWAIDKPNIAQPPRGWERQIRIRGEGGTKFADVYYTSPTGRKLRSLVEVDRFLQENPEYGAQGVTLAQFSFQIPRPLRQDYVKKKPKLINPSDEAMKPIAWAVATKHEGDASEEASLTDEAPTSEVMLARKRKAGSSLSIEPNHLSDELEPKLEDA

SEQ ID NO: 170206 - protein, 262 aa, Zea Mays
MVVFNSEAGDKEQDELGENRLQKSIITRGISPSIGAFTVQCAKCFKWRLIPTKEKYEEIRERIIEEPFVCKRAREWRPDVTCNDPEDISQDGSRLWAIDKPNIAQPPRGWERQIRIRGEGGTKFADVYYTSPTGRKLRSLVEVDRFLQENPEYGAQGVTLAQFSFQIPRPLRQDYVKKKPKLINPSDEASMIASKSFQPEEVKPIAWAVATKHEGDASEEASLTDEAPTSEVMLARKRKAGSSLSIEPNHLSDELEPKLEDA

SEQ ID NO: 170207 - protein, 168 aa, Zea Mays
METSKSPQSSKNSHIVVPSDSNGPRFDNDGFSSEAASNQMVVFNSEAGDKEQDELGENRLQKSIITRGISPSIGAFTVQCAKCFKWRLIPTKEKYEEIRERIIEEPFVCKRAREWRPDVTCNDPEDISQDGSRLWAIDKPNIAQPPRGWERQIRIRGEGGTKFADVES

SEQ ID NO: 170208 - protein, 365 aa, Zea Mays
MSSVDTAGVEDLMDAVEEVKPCWTKPSPKNQPSNGFVTFSLTMGPEYHISQITDAVVIARYLGATLVLPDIRGNELGNKRKFQDIYNVDKFVRSLDGVVEVIEDIPDEVSAKKPAVIRVPNRVTESFITGTIQPIFQKNKYLRLAVIFSSVSLRPKETNNKDMDATACLAMFGGLELKHEYSEVARKMLDRLQELSKKSDGKVLAIDLRTDLLEKKSCKTTRGARRKGCYSPDEVLAFLRSVGFSANTTIYLTETSWYKGLDVLKEEFPNTWYKGDIMPAENKAEFLKSSNADLARALDLEICSQSDVFVPAVAGLFYGHVTGKRIASGRTQIVVPSQSSTSTHASDFISTYISNKNHLAYACYC

SEQ ID NO: 170209 - protein, 203 aa, Zea Mays
MDATACLAMFGGLELKHEYSEVARKMLDRLQELSKKSDGKVLAIDLRTDLLEKKSCKTTRGARRKGCYSPDEVLAFLRSVGFSANTTIYLTETSWYKGLDVLKEEFPNTWYKGDIMPAENKAEFLKSSNADLARALDLEICSQSDVFVPAVAGLFYGHVTGKRIASGRTQIVVPSQSSTSTHASDFISTYISNKNHLAYACYC

SEQ ID NO: 170210 - protein, 182 aa, Zea Mays
MIDSSGRSSKPEERKEKIEGEDRKKKKPRTRKNSPRNRPSLEESRWQRQITAGSIAASRYPDPLLGGQRPEDGGEVARDGDEHPHGRGRRLPLGGQPRGRRLARRRRAHGGRPQPAPLRRRRRRLAILFLRGLRAVHRRRRRRRRGRGRGRGRGRGRGGRRHRGRQRCSLDGRQPGEILVDG

SEQ ID NO: 170211 - protein, 94 aa, Zea Mays
MFNQVLKKKEEEERKTGIQPVKKIGKAESPNLQSFVKQQFSGTPPDQQKVNTLGPEDRPKDTTHTEDATTDNERYTEPTGTGATFKPGTWQPPT

SEQ ID NO: 170212 - protein, 116 aa, Zea Mays
MSKRLLSRLLGMFQSRTQVGVDKAGNRYFTRVEEVDGTMKERRWVEFKGADQDSTTVPVEWICWLNGQRKKAPTPEELAELEARRERVKQNIQRMYAVFPTCVLMYDFINKPHCVQ

SEQ ID NO: 170213 - protein, 73 aa, Zea Mays
MSKRLLSRLLGMFQSRTQVGVDKAGNRYFTRVEEVDGTMKERRWVEFKGADQDSTTVPGYLPPFLLIFPMRML

SEQ ID NO: 170214 - protein, 194 aa, Zea Mays
MSGRGGGRRLTATALQRGREKISQRMKFLQDLVPGCNKVVGKALMLDEIINYVQSLQQQVEFLSMKLATVNPELDFSNLSTLLHKDMYQQPCGGPSASSVFPLESAGAAFPFCEQADLFHSFGSGGSGSGSGMEDQCSLSLLLDTALPHAASPQFAFQKQQRDLWEDGLQHALPTPTTGSEQRQEEDGLLVPDL

SEQ ID NO: 170215 - protein, 247 aa, Zea Mays
METDDKRHGGKEAAALSGGHLCHVCGYQYPNPHPSAKLRRSHRKHCGKARPAAAEAEALEEVEEGAVGVGVRVVGEREDRPGHRNRIAAGRTLLGREGGRQREETGTGEANGEGEASRGFAGQVDSSVEDKVVAAEHYSPTCTGAQIIATELSANYLINCGSSENGFLEDTGAQIDASELSENGLFDCTNNSIEIVNEGSGTELLIACTSGSQNVLGRPAEQEDSFDEYQDASPFLRQSDSEDGAAP

SEQ ID NO: 170216 - protein, 363 aa, Zea Mays
MIGWGDVYKVVAAMAPLYFALGLGYGSVRWWKLFSPDQCDAVNRLVAYFAVPFFAFDFAARIDPFALSYRVLAADALSKLAVALALAAWATAAASASARRGGGGKGKDRALSWCITGFSLATLNNTLVVGVPLLDAMYGKWARDLIVQISVVQIIVYFPALLLALEARRAGKLAVVAEEAAGDADESGGGGSGGGTTAAQSLWPLVTAVWKKVARNPNVYAGILGVSWACVTNRWHIETPSIIEGSVLVMSKTGVGLSMFSMGLFMALQEKVIVCGAWPTVLGMALRFVAGPAATAAGAVALGLRGDVLRLAVMQAALPQSITTFVFAREYGLHPEGYLRDAGVVARAHRLLHCSRLDTVLVN

SEQ ID NO: 170217 - protein, 487 aa, Zea Mays
MPDKAVDDVMEAAVGAHFSGLRLEALRLSTSAPSSPSSSPAAAAHTHSNGAVYANGTTELPSPAAARQPFVIGVSGGTASGKTTVCDMIIQQLHDHRVVLVNQDSFYRGLTAEESAHAQDYNFDHPDAFDTEQLLECMGQLKCAQPVNVPIYDFKKHRRCSESFRKVNASDVIILEGILVFHDQRVRNLMDMKIFVDTDADIRLARRIRRDTVERGRDISSVLDQYGRFVKPAFDDFVLPSKKYADVIIPRGGDNHVAVDLIVQHIRTKLGQHDLCKIYPNVHVVQSTFQIRGMHTLIRDRDITTPDFVFYSDRLIRLVVEHGLGHLPFTEKQVITPTGSVYMGVDFCKKLCGVSIVRSGESMENALRACCKGIKIGKILIHRVGDNGQQLVYHKLPMDIAERHVLLLDPVLGTVAQAIDLLIRKGVPEDRIIFLNLISAPEGIQCICKRFPSLKIVTSEIDYGLNEEFRVIPGLGEYGDRYFGTDN

SEQ ID NO: 170218 - protein, 173 aa, Zea Mays
MPDKAVDDVMEAAVGAHFSGLRLEALRLSTSAPSSPSSSPAAAAHTHSNGAVYANGTTELPSPAAARQPFVIGVSGGTASGKTTVCDMIIQQLHDHRVVLVNQDSFYRGLTAEESAHAQDYNFDHPDAFDTEQLLECMGQLKCAQPVNVPIYDFKKHRRCSESFRKSICNFIF

SEQ ID NO: 170219 - protein, 269 aa, Zea Mays
MNLHKGVVLSEGCDASVIIASRDNDAEKDAPDNVSLAGDGFDTVVRAKAEVEKKCPGVVSCADILAIAARDVVTMSSGPHWTVQLGRLDGLVSKAGNVAGKLPGPNMRVKDLAALFAKHNLTTLDMVALSGAHTVGFAHCTRFADRLYHHGVGDSDGASVDPSYNPAYARQLMDACPPGVGADIAVNMDPITPTAFDNAYYANLAGGLGLFTSDQALYSDGASQPAVRDFAKNQTRFFEAFKDAMVKLGSVGVKTGRHGEIRSDCTAFN

SEQ ID NO: 170220 - protein, 256 aa, Zea Mays
MAPKRGGRAPVPAKKKTDKVTNPLFEKRPKQFGIGGALPPKKDLHRFVKWPKVVRIQRQRRILKQRLKVPPALNQFTRTLDKNLATNLFKMLLKYRPEDKAAKKERLLKRAQAENEGKTVESKKPIVVKYGLNHVTYLIEQAQLVVIAHDVDPIELVVWLPALCRKMEVPYCIVKGKARLGSIVHKKTASVLCLTTVKNEDKLEFSKILEAIKANFNDKFDEVRKKWGGGIMGSKSQAKTKAREKLLAKEAAQRMT

SEQ ID NO: 170221 - protein, 321 aa, Zea Mays
MVIVIVFTIYDLTLLLLTSGRDPGIVPRNTHPPEPEAIDMNNDAGNGQTPQQLRLPRTKDVIVNGTIVKVKYCDTCMLYRPPRCSHCSICNNCVERFDHHCPWVGQCIGLIKDAEQSTFWKAMLKTPASIVLIIYCFICVWFVGGLSVFHFYLMSTNQTTYENFRYRYDRRDNPYNRGTVNNFMEIFCTSVAPSKNNFRARVPAEQGLQQARAPARGFMSPNMGKPIGELELGRKPISWDEPRSAADIRDLEVGLGSLLDEKEGRVAHASPDLSREALPELVEGRAGTHSRRSSWGHRSGTSASMDSLAAQMGTAESMGLH

SEQ ID NO: 170222 - protein, 421 aa, Zea Mays
MVYDLCTLHSSQAGSIVFHEFFLQGRFIFGPDVRSLFLTIFLILAPVVVFCIFVARHLINDFPDHWGVSVMVIVIVFTIYDLTLLLLTSGRDPGIVPRNTHPPEPEAIDMNNDAGNGQTPQQLRLPRTKDVIVNGTIVKVKYCDTCMLYRPPRCSHCSICNNCVERFDHHCPWVGQCIGLRNYRFFYMFVFSTTLLCLYVFGFCFVYIVKIKDAEQSTFWKAMLKTPASIVLIIYCFICVWFVGGLSVFHFYLMSTNQTTYENFRYRYDRRDNPYNRGTVNNFMEIFCTSVAPSKNNFRARVPAEQGLQQARAPARGFMSPNMGKPIGELELGRKPISWDEPRSAADIRDLEVGLGSLLDEKEGRVAHASPDLSREALPELVEGRAGTHSRRSSWGHRSGTSASMDSLAAQMGTAESMGLH

SEQ ID NO: 170223 - protein, 135 aa, Zea Mays
MSRGRDPLALSQVIGDVLDPFIKSATMRINYGDKEITNGTGLRASAVLNAPHVEIEGHDQTNLYTLVMVDPDAPSPSKPEYREYLHWIGCSPLKKGGGCFFSIHQHLKNSCYVCYWVGNRYTRGKRHMFWLRISS

SEQ ID NO: 170224 - protein, 101 aa, Zea Mays
MSRGRDPLALSQVIGDVLDPFIKSATMRINYGDKEITNGTGLRASAVLNAPHVEIEGHDQTNLYTLVMVDPDAPSPSKPEYREYLHWLVTDIPEARDICSG

SEQ ID NO: 170225 - protein, 59 aa, Zea Mays
MPKRWGPGPLPLTHHSYYLRNLSSNNMVPEMPSSDDVPPGSAPPATSTNRLRQHSKLVF

SEQ ID NO: 170226 - protein, 270 aa, Zea Mays
MLSRFLIHPSRWFSYTSPRDPAQPAWISTHRWRSPLRLRLQERKRYPYVTGTSVIALKYKDGVIMACDTGASYGSTLRYKSVERIKAVGKHSIIGASGEFSDFQEILRYLDELTLSDHMWDDGNSLGPKEIHSYLTRVMYNRRNKFDPLWNSLVLGGVKKGPKGDEKYLGMVNMIGTHFEENHVATGFANHLAIPILRAEWREDMTFEEAVKLVEKCLLVLLYRDRSSINKFQIAKITTEGSTIYPPYSLKTYWGFSHFENPAQGAVGSW

SEQ ID NO: 170227 - protein, 142 aa, Zea Mays
MAANLNGTSDPYALITCGAEKRFSSMVPGSRNPMWGEEFNFFVDSLPVKINVTIYDWDIVWKSTILGSVTVPIESEIPSGPVWHTLDSTSGQVCLHIKVIKVHESSSSSIEAPTEKGHESRSPVQHEGPPLIGQIFTHAIML

SEQ ID NO: 170228 - protein, 116 aa, Zea Mays
MAPQAAGSTPAVAALGFLLPTCWEIEVTCAAAMILVALYAAYELLNPRPFQAAAAGDADELLVRGLDGTNKGGASGRSAYVLKLELLAARNLMAANLNGTSDPYALITCGAEKRFR

SEQ ID NO: 170229 - protein, 53 aa, Zea Mays
MYIYKEPPLNSTQQMFTRCTVGYPQPCAKQQNTRDSTGWLTTTPLFTTNPCIN

SEQ ID NO: 170230 - protein, 201 aa, Zea Mays
MRKRKREEQKGGLENGIHRLRAEAERLDVLLAEGRVFSDLPALADRDSILLKDTRLENSLVCQPQQRNLHGRIFGGFLMHRAFELAFSTAYAFVGQRPCFLEVDHVDFLKPVDVGDFLRFKSCVLYTQLDNPEQPLVNVEVVAHVTRPELRKSEVSNTFHFTFTVCSDTLKNGLKIRNVVPSTEEEARRILERMEAEGLCN

SEQ ID NO: 170231 - protein, 519 aa, Zea Mays
MTTRLTATLLLSRTLVRRVTSRTPTPLGPFGLEPSAGIPISWSRRASSTASGDRGQEPPPAMDSPIKVVSHLGGGRGGGGGEGEGEGEGGAAAIDAGKSARRPLSLWPGMYHSPVTNALWEARSSIFERMMDAGNGASSAEQRPQTELLVKTPAQSRTSIVYKFATDDILREQYRDPWNEVRIGKLLEDLDALAGTIAVKHCSDEDSTTRPLLVVTASVDKMELKKPIRVDTDLKIAGAVTYVGRSSIDIQIEVTQVDKGIIGSVEDGDNQSDPIALTANFTFVARDSKTGKSAPVNRLSPETEREKQLFGESEARDKMRKRKREEQKGGLENGIHRLRAEAERLDVLLAEGRVFSDLPALADRDSILLKDTRLENSLVCQPQQRNLHGRIFGGFLMHRAFELAFSTAYAFVGQRPCFLEVDHVDFLKPVDVGDFLRFKSCVLYTQLDNPEQPLVNVEVVAHVTRPELRKSEVSNTFHFTFTVCSDTLKNGLKIRNVVPSTEEEARRILERMEAEGLCN

SEQ ID NO: 170232 - protein, 430 aa, Zea Mays
MTTRLTATLLLSRTLVRRVTSRTPTPLGPFGLEPSAGIPISWSRRASSTASGDRGQEPPPAMDSPIKVVSHLGGGRGGGGGEGEGEGEGGAAAIDAGKSARRPLSLWPGMYHSPVTNALWEARSSIFERMMDAGNGASSAEQRPQTELLVKTPAQSRTSIVYKFATDDILREQYRDPWNEVRIGKLLEDLDALAGTIAVKHCSDEDSTTRPLLVVTASVDKMELKKPIRVDTDLKIAGAVTYVGRSSIDIQIEVTQVDKGIIGSVEDGDNQSDPIALTANFTFVARDSKTGKSAPVNRLSPETEREKQLFGESEARDKMRKRKREEQKGGLENGIHRLRAEAERLDVLLAEGRVFSDLPALADRDSILLKDTRLENSLVCQPQQRNLHGRIFGGFLMHRAFELAFSTAYAFVGQRPCFLEVDHVDFLKPV

SEQ ID NO: 170233 - protein, 147 aa, Zea Mays
MRAQRPWHRHAGERAGRAAVRRAPPRRRASRSRCRTQAREHGPSRYYCRRNQTSPLRQVGAQPSQHHLYDTRASRRCCFKGVLTCDEQTRPHRDRAQAIAVAYEAHAVAAQASSHAPTPSRGKRASQATAPRARTQVKPPAPLQVNM

SEQ ID NO: 170234 - protein, 74 aa, Zea Mays
MLYISCWKEKMVAGRAIRCLRRPSPQFNSSTRLHHASLSPMGHRQATSCFSMDGRRRDTWPEMWGCIVDGASPT

SEQ ID NO: 170235 - protein, 532 aa, Zea Mays
MAKPTRPFPIIAKISSPSAWAAQWPVYIVSSLHMAVPGKEAPTTVDTMASPLLSLATAALAVAVLISTTEAWRATPTPLPVLPIPSAAQLKWQRREVIMFFHFGMNTFTDSEWGTGWEDPSLFYPARLDATQWMDAARAAGASLAILVAKHHDGFCVWPSEYTAHSVRASPWRGGRGDVVREFVDAARARGVDTGLYLSPWDRHDERYGQEVAYNEYYESQLHELLTGYGSVSEIWFDGAKGKDATNMTYHFQEWFQTVKQLQPSINIFSAVGPDVRWVGDETGEAGTTCWSTVNRSMITIGEASDEKYLNEGDPRGSDWVPPECDVSIRPGWFWHKSETAKPLRQLLEIYYNSVGRNCVLLLNVPPNSTGLVEDADMARLREFGAAVATIFGTDLAAGSEARASSVRGAGFAARNVLDGREDTYWAPTAEDGRRDVYWIELRRPPGAQARPFNVVRIQEHVALGQRVERHAVYVDGAPVAYGTTVGHKRLHRLPCPVAGGTVRVWITARRGPPLLSAVGLHYDPFVAAATM

SEQ ID NO: 170236 - protein, 226 aa, Zea Mays
MASAVVVDAGDAPEPTVRNLLDQESLKWVFVGGKGGVGKTTCSSILSVLLAGVRSSVLVISTDPAHNLSDAFQQRFTKFPTLVRGFTNLYAMEIDPKVENDDLSNEGMEGFLSELTNAIPGVDEAMSFAEMLKLVQTMDYSVVVFDTAPTGHTLRLLQFPATLEKGLEKMMELKNRFGGLLNQASRLFGLGDELNEDAMLGKLEGMKDVIEQVNRQFKDPKDWCKS

SEQ ID NO: 170237 - protein, 143 aa, Zea Mays
MASAVVVDAGDAPEPTVRNLLDQESLKWVFVGGKGGVGKTTCSSILSVLLAGVRSSVLVISTDPAHNLSDAFQQRFTKFPTLVRGFTNLYAMEIDPKVENDDLSNEGMEGFLSELTNAIPGVDEAMSFAEMLKPVDCLVLVMS

SEQ ID NO: 170238 - protein, 248 aa, Zea Mays
MRTLYQTCKLVHGDLSEYNILYFEGHLYIIDVSQSVDLDHPSALDFLKEDCLHVSDFFKKRGVPVMTVTDLFNFVIDQSISDEGVDDYLEKAQQKILENGGAVPNDDEITPTVMVQTLDYVKQCEADIVNMSIMQRSSSGYEPTADKLYDQPLLGFVRTKNTHTEKEQGQPARNLVEVEEDESESCSSSDEDDSWHEDDPKVGPEERKAARKENKKKVKEEKREARKTKIPKAEKKKRKKMAKAKCKR

SEQ ID NO: 170239 - protein, 682 aa, Zea Mays
MKRAPDLIRYSDWLALTIESSAKQFMGRGNSSTLLACVNFVDLAGSERASQTQSAGMRLKEGSHINRSLLTLGKVIRQLSKGRNGHIPYRDSKLTRILQSSLGGNARTAIICTMSPAHCHIEQSRNTLLFANCAKNVVTDAKVNVVMSDKVLVKHLQREIARLENELKFHGSAYTSNHADALREKDELIKQLEEQLKELMGQKETVQSQLDNFRRVAIDENFDDHAIRQWDQRNRSSESLPHNVSEDALSSFDTYDVVYGEQDGLGPKAFDVHPISILHQPRNHISDNIQIYQPNKEASSEVSEEHCKEVQCIETNELRRSPLFFPVDRYHVGTNIDEGKHDENITDTSDSAIKLYTCDSEPSSDTEKTNNDESLALKRCVISSRDSVLTRSRSCRASFMVIPNSWFGDSLDMRMTRPGDIFKYSQRRPKNVRSLYPENGHCSNDLTFTCNEEDEDAINNVVGITKVEEKLEECCTSQLEGNQDDVTEEILDIKHANDVDKDISVTSVDSPSRWPINFEKKQKEIIELWHECNVSIVHRTYFFLLFKGDKEDNIYLEVEHRRLSFIKSSFSVASEANAAATSSLRNLRHERDMLYRQMLRRLNLLERESLYNKWGIDLNSKQRRLQLSRRIWTQTDMEHVRESVALVAKLVEHLEKGQVIKEMFGLTFTLNPQAERRPFQLC

SEQ ID NO: 170240 - protein, 55 aa, Zea Mays
MLSRREKATNFKPDYDIDIHMKVLAMSGQESSILTGYKLKECCEQRFHWLDSQSA

SEQ ID NO: 170241 - protein, 557 aa, Zea Mays
MDVDDKAKAEISLPEHDLPTNRSPKDPDEHQADNAAKVARRKLRETRREKRAMDLVHKDDEAHVKQENAAIERSKAVDSAVLGKYSIWRKENENSDSTVRLMRDQIIMARVYSALAKSKNKSDLYQKLQTRIKESQRAVGDASADAGLHHSAPEKIIAMGQVLSKAREEVYNCMAITQKLRAMLQSADEQVRCLKKQSTFLSQLAAKTIPNSIHCLSMRLTIDYYLLLLEERKFPRSENLENPNLYHYALFSDNVLAASVVVNSTIMNAKKPEKHVFHLVTDKLNFGAMNMWFLLNPPGKATIHVENVDEFKWLNSSYCPVLRQLESAAMKEYYFKADRPTSLSAGSSNLKYRNPKYLSMLNHLRFYLPEVYPKVDKILFLDDDIVVQKDLTGLWDVNLNGKVNGAVETCGESFHRFDKYLNFSNPHIARNFDPNACGWAYGMNIFDLKEWKKKDITGIYHKWQNMNEGRVLWKLGTLPPGLLTFYKLTHPLDKSWHVLGLGYNPSVDRSEIDSAAVVHYNGNMKPWLELAMTKYRPYWTRYIKYDHPYIRGCNLRE

SEQ ID NO: 170242 - protein, 505 aa, Zea Mays
MDLVHKDDEAHVKQENAAIERSKAVDSAVLGKYSIWRKENENSDSTVRLMRDQIIMARVYSALAKSKNKSDLYQKLQTRIKESQRAVGDASADAGLHHSAPEKIIAMGQVLSKAREEVYNCMAITQKLRAMLQSADEQVRCLKKQSTFLSQLAAKTIPNSIHCLSMRLTIDYYLLLLEERKFPRSENLENPNLYHYALFSDNVLAASVVVNSTIMNAKKPEKHVFHLVTDKLNFGAMNMWFLLNPPGKATIHVENVDEFKWLNSSYCPVLRQLESAAMKEYYFKADRPTSLSAGSSNLKYRNPKYLSMLNHLRFYLPEVYPKVDKILFLDDDIVVQKDLTGLWDVNLNGKVNGAVETCGESFHRFDKYLNFSNPHIARNFDPNACGWAYGMNIFDLKEWKKKDITGIYHKWQNMNEGRVLWKLGTLPPGLLTFYKLTHPLDKSWHVLGLGYNPSVDRSEIDSAAVVHYNGNMKPWLELAMTKYRPYWTRYIKYDHPYIRGCNLRE

SEQ ID NO: 170243 - protein, 632 aa, Zea Mays
MGRGADEVVKVVDSEDGEGEEEEAEAAAAEGSSKETPMLPRMPVRVLLAEGDDSTRHVISALLRKCGYRVAAASDGVKAWDILKEKSFNIDLVLTEVELPLMSGFLLLSTIMEHDASKNIPVIMMSSHDSVSMVFKCMLKGASDFLVKPLRKNELRNLWQHVWRKQLANGGPDVQHIQEENLAERMEQKTGVTKDDNLNSDGPCKNRECSEQESDAQSSCTRSELEAESKQTNNILEYMQSTERHLSIRSHKDLELNGETKTRTAKGNNLIPTREDDLLPKKRTCLNDNNSERTSRDMELVHIMDNQQKHDTQRDVDTMRTTSRRNDEKNSIPAHQLELSLRRTDYGKLENHEKNDRRTLNHSTSSAFYLYNCRTASSLGNAGDGQLCSTSETLVDVENRNGDLAALSEDTTETNRPPIRVVPFPVPVQCFTFDGQPFWNGTPVASPFYPQSAPPIWNSKTPTWQESTPQATSLPQKSQQKEPVEMDAKPVENAEEQFVVGPPSASGKQLHVEIPKDDLRHISPVTGESGISTVLDSTRNTLSSSGCDSTSNQITAPTEPSSNVYRGVPETARAEGLRHLSQREAALNKFRLKRKDRCFEKKVRYQSRKLLAEQRPRVKGQFVRQDHSIQGS

SEQ ID NO: 170244 - protein, 305 aa, Zea Mays
MVKLIIERYTREAGVRNLERNLAALARAAAVKVAEQVKTLRLGKEIQPITTTLLDSRLADGGEVEMEVIPMGHDMSNTYENPSPMTVDEAMLEKVLGPPRFDDTEAADRVASPGVSVGLVWTSVGGEVQFVEATAMVGKGDLHLTGQLGDVIKESAQLALTWVRARAADLNLSPASDINLLESRDIHIHFPAGAVPKDGPSAGVTLVTALVSLFSNRKVRADTAMTGEMTLRGIVLPVGGVKDKVLAAHRYGIKRVILRERNMKDLSEVPSPILSGMEILLVKHIEDVLDHAFEGGCPLKSRSKL

SEQ ID NO: 170245 - protein, 262 aa, Zea Mays
MAAAPSSLASSHLSPIAAVSTPAVPHQLRIGCSRRRAGRIVAMAGSGKFFVGGNWKCVKNSLTGRIEVSAQNVWIGKGGAYTGEISAEQLVDIGCQWVILGHSERRHIIGENDEFIGKKAAYALSQNVKVIACIGELLEEREAGKTFDVCFRQMKAFADSISNWADVVIAYEPVWAIGTGKVATPEQAQEVHAAVRNWLKTNISPDVASSTRIIYGGSVNAANCAELAKKEDIDGFLVGGASLKGPDFATIINSVTAKKVAA

SEQ ID NO: 170246 - protein, 109 aa, Zea Mays
MKAFADSISNWADVVIAYEPVWAIGTGKVATPEQAQEVHAAVRNWLKTNISPDVASSTRIIYGGSVNAANCAELAKKEDIDGFLVGGASLKGPDFATIINSVTAKKVAA

SEQ ID NO: 170247 - protein, 248 aa, Zea Mays
MAAAPSSLASSHLSPIAAVSTPAVPHQLRIGCSRRRAGRIVAMAGSGKFFVGGNWKCNVWIGKGGAYTGEISAEQLVDIGCQWVILGHSERRHIIGENDEFIGKKAAYALSQNVKVIACIGELLEEREAGKTFDVCFRQMKAFADSISNWADVVIAYEPVWAIGTGKVATPEQAQEVHAAVRNWLKTNISPDVASSTRIIYGGSVNAANCAELAKKEDIDGFLVGGASLKGPDFATIINSVTAKKVAA

SEQ ID NO: 170248 - protein, 282 aa, Zea Mays
MAAAPSSLASSHLSPIAAVSTPAVPHQLRIGCSRRRAGRIVAMAGSGKFFVGGNWKCNGTKDSISKLVSELNAATLETDVDVVVAPPFIYIDQVKNSLTGRIEVSAQNVWIGKGGAYTGEISAEQLVDIGCQWVILGHSERRHIIGENDEFIGKKAAYALSQNVKVIACIGELLEEREAGKTFDVCFRQMKAFADSISNWADVVIAYEPVWAIGTGKVATPEQAQEVHAAVRNWLKTNISPDVASSTRIIYGGSVNAANCAELAKKEDIDGFLVGGASLKWC

SEQ ID NO: 170249 - protein, 93 aa, Zea Mays
MDIAPLIAAAVPKKIKVVRTVQQALTSHFWVHDIQRNLSLAEIEQYLQLWEVIDSFQLQNSNDQHVWIFSSNGLYTSKTAYRAFFIGAESFEP

SEQ ID NO: 170250 - protein, 257 aa, Zea Mays
MSRRGLTFEPRLRRKRKRNFKSCNKKELQMQKRKKRRVKSDPRLSFCDDIENGSDEDDFENQETKKNGPAKLGKDPTVETSFLPDREREAEEQAERERLKKQWSHEQELIKNEPLSITYSYWDGTGHRRAIQVRKGDTIGEFLRAVQQQLAPEFREVRTTSVENLLYVKEDLIIPHQHSFYELIINKARGKSGPLFHFDVHEDVRTIADATKEKDESHAGKVVERHWYEKNKHIFPASRWEIYDPTKKWERYTIHGD

SEQ ID NO: 170251 - protein, 177 aa, Zea Mays
MSGFGDGYVGTAQDAVKIRRLEKQREAERRKIEELKNKSADGQPGLLQFGSSTSEILETAFKKETVGLVTREQYVEKRVNIRTKIEEEEKEKLQKLQQEEEELQMQKRKKRRVKSDPRLSFCDDIENGSDEDDFENQETKKNGPAKLGKDPTVETSFLPDSDPSEKGRQRNKQNEND

SEQ ID NO: 170252 - protein, 264 aa, Zea Mays
MGRSPCCEKAHTNKGAWTKEEDERLVAHIRAHGEGCWRSLPKAAGLLRCGKSCRLRWINYLRPDLKRGNFTEEEDELIVKLHSVLGNKWSLIAGRLPGRTDNEIKNYWNTHIRRKLLSRGIDPVTHRPVTEHHASNITISFETEVGAVFRLEEEEERNKATMVVGRDRQSQSQSHSHPAGEWGQGKRPLKCPDLNLDLCISPPCQEEEEMEEAAMRVRPAVKREAGLCFGCSLGLPRTADCKCSSSSFLGLRTAMLDFRSLEMK

SEQ ID NO: 170253 - protein, 120 aa, Zea Mays
MEGVGELYMQAYMGHVGRQGKQRASWNKCHSCLCLPSRGDGDFARDFPEETTANPYPPLLPLPSFSFPPTKNSPACTTSVWLRKWKVELMHITNTTSQLQTISLPSSCLTSYFLEPVPTI

SEQ ID NO: 170254 - protein, 459 aa, Zea Mays
MWPYLNKAICRTAQDIAKPIIAENTAKYKIDSVEFESLTLGSLPPTFQGMKVYVTEEQELIMEPSLKWAANPNITVAVKAYGLKATIQIVDLQVFASPRITLKPLVPTFPCFAKILVSLMEKPHVDFGLKLLGADVMAIPGLYRFVQETIKKQVASMYLWPKTLEVPIMDPSKASKRPVGILLVKVVRAQNLRKKDLLGKSDPYVKLKMSDDKLPSKKTTVKRSNLNPEWGEDFKFVVTDPENQALEVNVFDWEQVGKHEKMGMNMIPLRELLPEGTKVTTLNLLKTMDPNDVQNEKSRGELTLELTYKPFKEEDIEKEDTQGADVIEKAPDGTPAGGGLLYVVVHEAQDLEGKHHTNPYAKIIFKGEEKKTKVIKKNRDPRWEDEFEFVCEEPPVNDKLHVEVISKAPKAGLIHGKETLGYIDISLADVISNKRINEKYHLIDSKNGQIQIELQWRTS

SEQ ID NO: 170255 - protein, 232 aa, Zea Mays
MYLWPKTLEVPIMDPSKASKRPVGILLVKVVRAQNLRKKDLLGKSDPYVKLKMSDDKLPSKKTTVKRSNLNPEWGEDFKFVVTDPENQALEVNVFDWEQVGKHEKMGMNMIPLRELLPEGTKVTTLNLLKTMDPNDVQNEKSRGELTLELTYKPFKEEDIEKEDTQGADVIEKAPDGTPAGGGLLYVVVHEAQDLEGKHHTNPYAKIIFKGEEKKTKVLCKQIMFYIFMEWP

SEQ ID NO: 170256 - protein, 281 aa, Zea Mays
MVFDKAVESRFDRRCTFVALGGGVIGDMCGFAAAAFLRGVNFIQIPTTLMAQVDSSVGGKTGINHPLGKNLIGAFYQPQCVLIDTDTLNTLPDRELASGIAEVVKYGLIRDAPFFEWQEKNMPELLAREPNALAYAIKRSCENKAEVVAQDEKESGLRATLNLGHTFGHAIETGTGYGAWLHGEAVATGIVMAADMSHRLGWIDDSIKERVFAILKQAKLPIAPPETMTVEKFKNIIAVDKKVADGLLRLILLKGPLGRCVFTGDYDRNALDETLHAFCNN

SEQ ID NO: 170257 - protein, 223 aa, Zea Mays
MMQSHLPSPARLGLTTSSPSLPPNPVPLNPTSSPSHGSLPSSAAAGTSAAPTLITSPSLLPLLPPLPRAQSLLQLISSLATNLFELSPNRAAWILSYRGSLPTFLPSASSSAPPLPTSISSTKDALSLLTTLQTQLFEAVAELQETLDLQDARARLVREARAKDASLVTFAKKLHEAHQVCPRSHWMRRRESHQKWRLRRCMSHLRRGHRGYQTPCHPCSLRS

SEQ ID NO: 170258 - protein, 488 aa, Zea Mays
MSPAAGGPAPTPAQSAPAVPQAIAPPPGPGRAAPAAPRRDPPGDPEGADPANAAARKTPWSMLVQPPAAASAAAAGETPESGGIIGGDASWPALAGSTRAGPKSGSSDSLKALSDASGPSPQEVPIAAPSVPPYPVVGANPIPTAQNPTSIPPPMAAASSQQNGGTTQTIPVRRGGSSGGNGGGGSRGYGSIGGRRAANSNGGDGSSGSGGDDNWNNGSLGTGSGCNSTNGDGSINLDDNAPGAGHAGGNGNGSSRDAPGNRHWNHNIRGGISSNGAGSGDGNNRNSSGSSNHWNNNPRISSGSSNGVGGRGGYRGRRDHERGANFPRNFPRVPVMPYQQQQQPGIYQPGPFYRPPPPAAHFMVPQHFYAPPFPYPGEQFQNMHLVRPPMQPSWVPPQDLPNLQDDIRNQIEFYFSTNNLCHDTFLRRHMNDQGWVPINLILGFNRMRAFTSLVDTNYILDAIRGSELLEVQGDNVRRRNDWMEWLLH

SEQ ID NO: 170259 - protein, 280 aa, Zea Mays
MAINSDVLAEMEIPEVYLETLPKNGKSCLGEIIYRYITAEQFSPECLLDCLDLSSEHHTLEVANRIEGAIHVWKLKGQKKSTPQAKSKISWGGKVKGLVGDKEKSHTLSERADGLLQSLRLRYPGLPQTSLDMNKIQYNKDVGQSILECYSRVLESLAFNIIARIDDVIYVDDATNRSAAAESVSIFNRGTGVPVQKRISPSPFSIQNSPYGSPFATPTFCSSTPVTGSPGRVQPPLNKNILGTQEIKVEKLFSGDLEKVWTYAGNLSARKDAGDAPERD

SEQ ID NO: 170260 - protein, 244 aa, Zea Mays
MTPSTRRSFTSCTTGMGSHTLSFDASLLLHGQQYIEIYRPIPSYASVVNRVKVAGLHDKGKATILELETTTSLKESGEILCMNRSTIYLRGAGGFSDSSRPYSYATYPANQVSRISIPNSAPSAVCDDQTKQSQALLYRLSGDYNPLHSDPDIAQLAGFTRPILHGLCTLGFAARAVIKSFCNGEPTAVKSIFGRFLLHVYPGETLSTEMWLDGQKVHYQTKAKERNRAVLSGYVLLQHIPSSL

SEQ ID NO: 170261 - protein, 72 aa, Zea Mays
MLICEECLGTIQKIERMDGHFSLLAFPFLILVGSLPHSPLRIHIFATCSLFDQKPVCSLVAHQYAISTLPLS

SEQ ID NO: 170262 - protein, 390 aa, Zea Mays
MCYNSPDTIYYRQARGIQEIAKKDFENLRQDSDASDPEPEPELELEPEPEEPKPQPRRGRPPNKNNAKQKVGKPPTERATADFSGATLATAANIGRHAQADVDLSRRAMDKAMMDMLRASFANRRNEHNWSGERKFERFEECSGYRGTWSAKMGKRPILMEDSRRSTYCETQPSNSIYELPVSSSYNGTKKLLVPVGVQLQQSYSRSLARFAAQLGPVCWEIASRRIERSLAPGTKFGRGWVGDGETPNSFQPPVLAAFSETTTPQDRTAASGEQPCPSMSSPPATEACAGNDRSHLAGSQPDATPYASTSTTQRMSSEALASQQCGSLPQISINRAERTLEMMKGSPNNLHGHPGMQQTANGFNAVPGPMMFPHVAQLVVNQMQTHTAD

SEQ ID NO: 170263 - protein, 238 aa, Zea Mays
MGKRPILMEDSRRSTYCETQPSNSIYELPVSSSYNGTKKLLVPVGVQLQQSYSRSLARFAAQLGPVCWEIASRRIERSLAPGTKFGRGWVGDGETPNSFQPPVLAAFSETTTPQDRTAASGEQPCPSMSSPPATEACAGNDRSHLAGSQPDATPYASTSTTQRMSSEALASQQCGSLPQISINRAERTLEMMKGSPNNLHGHPGMQQTANGFNAVPGPMMFPHVAQLVVNQMQTHTAD

SEQ ID NO: 170264 - protein, 376 aa, Zea Mays
MDFSTIRKKLDKGAYSNLEQFEDDVFLISTNAMCYNSPDTIYYRQARGIQEIAKKDFENLRQDSDASDPEPEPELELEPEPEEPKPQPRRGRPPNKNNAKQKVGKPPTERATADFSGATLATAANIGRHAQADVDLSRRAMDKAMMDMLRASFANRRNEHNWSGERKFERFEECSGYRGTWSAKMGKRPILMEDSRRSTYCETQPSNSIYELPVSSSYNGTKFGRGWVGDGETPNSFQPPVLAAFSETTTPQDRTAASGEQPCPSMSSPPATEACAGNDRSHLAGSQPDATPYASTSTTQRMSSEALASQQCGSLPQISINRAERTLEMMKGSPNNLHGHPGMQQTANGFNAVPGPMMFPHVAQLVVNQMQTHTAD

SEQ ID NO: 170265 - protein, 348 aa, Zea Mays
MGKQQQAPPARRSTAMSAPPPPKRRKKKGRPSLLDLQKRSLRLEQQLQQQQPKGRRSNRRSAGSADEDDDGPASGSGRREKKLRLVMGLHDGSPKQVEKTRKATDGHEEPSDSGPTTPLPNKKLLLFILDRLQKKDTYGVFSEPVDPEELPDYHDIVKHPMDFSTIRKKLDKGAYSNLEQFEDDVFLISTNAMCYNSPDTIYYRQARGIQEIAKKDFENLRQDSDASDPEPEPELELEPEPEEPKPQPRRGRPPNKNNAKQKVGKPPTERATADFSGATLATAANIGRHAQADVDLSRRAMDKAMMDMLRASFANRRNEHNWSGERKFERFEECSGVHGPQKWGRGQF

SEQ ID NO: 170266 - protein, 443 aa, Zea Mays
MGKQQQAPPARRSTAMSAPPPPKRRKKKGRPSLLDLQKRSLRLEQQLQQQQPKGRRSNRRSAGSADEDDDGPASGSGRREKKLRLVMGLHDGSPKVEKTRKATDGHEEPSDSGPTTPLPNKKLLLFILDRLQKKDTYGVFSEPVDPEELPDYHDIVKHPMDFSTIRKKLDKGAYSNLEQFEDDVFLISTNAMCYNSPDTIYYRQARGIQEIAKKDFENLRQDSDASDPEPEPELELEPEPEEPKPQPRRGRPPNKNNAKQKVGKPPTERATADFSGATLATAANIGRHAQADVDLSRRAMDKAMMDMLRASFANRRNEHNWSGERKFERFEECSGYRGTWSAKMGKRPILMEDSRRSTYCETQPSNSIYELPVSSSYNGTKKLLVPVERPIQILSYKLGFSYSSPIPAAWHDLLHNLVLCAGRLHQGELNEALLLEQSLVAGG

SEQ ID NO: 170267 - protein, 301 aa, Zea Mays
MPIYGQLPDYHDIVKHPMDFSTIRKKLDKGAYSNLEQFEDDVFLISTNAMCYNSPDTIYYRQARGIQEIAKKDFENLRQDSDASDPEPEPELELEPEPEEPKPQPRRGRPPNKNNAKQKVGKPPTERATADFSGATLATAANIGRHAQADVDLSRRAMDKAMMDMLRASFANRRNEHNWSGERKFERFEECSGYRGTWSAKMGKRPILMEDSRRSTYCETQPSNSIYELPVSSSYNGTKKLLVPVERPIQILSYKLGFSYSSPIPAAWHDLLHNLVLCAGRLHQGELNEALLLEQSLVAGG

SEQ ID NO: 170268 - protein, 582 aa, Zea Mays
MGKQQQAPPARRSTAMSAPPPPKRRKKKGRPSLLDLQKRSLRLEQQLQQQQPKGRRSNRRSAGSADEDDDGPASGSGRREKKLRLVMGLHDGSPKQVEKTRKATDGHEEPSDSGPTTPLPNKKLLLFILDRLQKKDTYGVFSEPVDPEELPDYHDIVKHPMDFSTIRKKLDKGAYSNLEQFEDDVFLISTNAMCYNSPDTIYYRQARGIQEIAKKDFENLRQDSDASDPEPEPELELEPEPEEPKPQPRRGRPPNKNNAKQKVGKPPTERATADFSGATLATAANIGRHAQADVDLSRRAMDKAMMDMLRASFANRRNEHNWSGERKFERFEECSGYRGTWSAKMGKRPILMEDSRRSTYCETQPSNSIYELPVSSSYNGTKKLLVPVGVQLQQSYSRSLARFAAQLGPVCWEIASRRIERSLAPGTKFGRGWVGDGETPNSFQPPVLAAFSETTTPQDRTAASGEQPCPSMSSPPATEACAGNDRSHLAGSQPDATPYASTSTTQRMSSEALASQQCGSLPQISINRAERTLEMMKGSPNNLHGHPGMQQTANGFNAVPGPMMFPHVAQLVVNQMQTHTAD

SEQ ID NO: 170269 - protein, 877 aa, Zea Mays
MEWSRPACIPVTAAAVVLLLLLLPRFCSPAGDKLTPGESLLPGETIVSDGGAFALGFFAPSNATPGRQYVGIWYNNIPVQTVVWVANRDAPVTVGDARSGNSSSSSSSAPSLALANGSASTDLVLSDAGGGRVVWTTNTTSSGTGSTAVLLNSGNFVLRSPNGTTLWQSFDHPTDTFIPDMKVGLRYRTHDGARIVSWRGPGDPSPGTFSYGMDPRTSLQMLMWNGTRTYWRSSAWTGYMTVSRYHATTGTVIYVAVVDSEDEIYMTFHVNDGAPPTRYVVTGAGRFQLLSWNRDASAWTTLESWPSRSCSPYGSCGAYGYCDNTLAVATCRCLDGFEPASPAEWSGGVFSRGCRRRSQQQALAPCGGEDDGDAFLDMPNMKVPDRFVLLGTNVSSGDECAAECRRNCSCVAYAYANLRRSSAKGDTARCLVWTADLVDAQMVGALWGVTAETLHLRVPAGFTGRKTRNKIVKIVLPVLASISLLSCIFLVWFCKTRADKTSSSESDKKLVPGSVQTSSDLAERNPTEDLEFASIRSFEKELPSIQLSDIVAATKNFSRECMVGRGGFGKVYKGTLLGGREVAVKRLSRDSEQGTEEFKNEATLISKLQHRNLVRLLGCCTEGAERLLVYEYLANKGLDAILFDSERRSLLDWPTRLGIIKGVARGLLYLHQDSRLTVIHRDLKASNVLLDAEMRPKIADFGMAQIFGDNQQKANTRRVVGTYGYIAPEYQTEGVFSVKSDVYSFGVLVLEIVSGVRISSTDNIKGSPGLVAYAWRLWNEGNASDLMDSSISQSESCVLDEALLCVHVGLLCVQDDPNRRPLMSSVVSILENGSVSLPTPDKPAYLAEKIWNRGLGLEGDDVHNSRNSMTMTVLKGR

SEQ ID NO: 170270 - protein, 289 aa, Zea Mays
MEWSRPACIPVTAAAVVLLLLLLPRFCSPAGDKLTPGESLLPGETIVSDGGAFALGFFAPSNATPGRQYVGIWYNNIPVQTVVWVANRDAPVTVGDARSGNSSSSSSSAPSLALANGSASTDLVLSDAGGGRVVWTTNTTSSGRKTRNKIVKIVLPVLASISLLSCIFLVWFCKTRDKTSSSESDKKLVPGSVQTSSDLAERNPTEDLEFASIRSFEKELPSIQLSDIVAATKNFSRECMVGRGGFGKVYKVTFRVSCPVLFSANLNSRTNTQLLLYYYCSEGDTVGWP

SEQ ID NO: 170271 - protein, 876 aa, Zea Mays
MEWSRPACIPVTAAAVVLLLLLLPRFCSPAGDKLTPGESLLPGETIVSDGGAFALGFFAPSNATPGRQYVGIWYNNIPVQTVVWVANRDAPVTVGDARSGNSSSSSSSAPSLALANGSASTDLVLSDAGGGRVVWTTNTTSSGTGSTAVLLNSGNFVLRSPNGTTLWQSFDHPTDTFIPDMKVGLRYRTHDGARIVSWRGPGDPSPGTFSYGMDPRTSLQMLMWNGTRTYWRSSAWTGYMTVSRYHATTGTVIYVAVVDSEDEIYMTFHVNDGAPPTRYVVTGAGRFQLLSWNRDASAWTTLESWPSRSCSPYGSCGAYGYCDNTLAVATCRCLDGFEPASPAEWSGGVFSRGCRRRSQQQALAPCGGEDDGDAFLDMPNMKVPDRFVLLGTNVSSGDECAAECRRNCSCVAYAYANLRRSSAKGDTARCLVWTADLVDAQMVGALWGVTAETLHLRVPAGFTGRKTRNKIVKIVLPVLASISLLSCIFLVWFCKTRDKTSSSESDKKLVPGSVQTSSDLAERNPTEDLEFASIRSFEKELPSIQLSDIVAATKNFSRECMVGRGGFGKVYKGTLLGGREVAVKRLSRDSEQGTEEFKNEATLISKLQHRNLVRLLGCCTEGAERLLVYEYLANKGLDAILFDSERRSLLDWPTRLGIIKGVARGLLYLHQDSRLTVIHRDLKASNVLLDAEMRPKIADFGMAQIFGDNQQKANTRRVVGTYGYIAPEYQTEGVFSVKSDVYSFGVLVLEIVSGVRISSTDNIKGSPGLVAYAWRLWNEGNASDLMDSSISQSESCVLDEALLCVHVGLLCVQDDPNRRPLMSSVVSILENGSVSLPTPDKPAYLAEKIWNRGLGLEGDDVHNSRNSMTMTVLKGR

SEQ ID NO: 170272 - protein, 586 aa, Zea Mays
MEWSRPACIPVTAAAVVLLLLLLPRFCSPAGDKLTPGESLLPGETIVSDGGAFALGFFAPSNATPGRQYVGIWYNNIPVQTVVWVANRDAPVTVGDARSGNSSSSSSSAPSLALANGSASTDLVLSDAGGGRVVWTTNTTSSGTGSTAVLLNSGNFVLRSPNGTTLWQSFDHPTDTFIPDMKVGLRYRTHDGARIVSWRGPGDPSPGTFSYGMDPRTSLQMLMWNGTRTYWRSSAWTGYMTVSRYHATTGTVIYVAVVDSEDEIYMTFHVNDGAPPTRYVVTGAGRFQLLSWNRDASAWTTLESWPSRSCSPYGSCGAYGYCDNTLAVATCRCLDGFEPASPAEWSGGVFSRGCRRRSQQQALAPCGGEDDGDAFLDMPNMKVPDRFVLLGTNVSSGDECAAECRRNCSCVAYAYANLRRSSAKGDTARCLVWTADLVDAQMVGALWGVTAETLHLRVPAGFTGRKTRNKIVKIVLPVLASISLLSCIFLVWFCKTRDKTSSSESDKKLVPGSVQTSSDLAERNPTEDLEFASIRSFEKELPSIQLSDIVAATKNFSRECMVGRGGFGKVYKRGHCWVAVKSPSRG

SEQ ID NO: 170273 - protein, 771 aa, Zea Mays
MSSTRATRNSHCFSFVMEPSIQNVCFSGRITNSCRPDDNVASIDYKLGYKQMHYPENGSYKWLDDGPSHLNDDISSVNPTCWKRQRTEGIFHEYAYSGNLVMLEDVPTEGYFAHEQETELIGPEVEIPESCFRALNKPNGMTPDFVQNKTNLKAQTSGWDGLYDKFEKLNGDCLLDNGFYHDGGSTSKGTCRVLRKSSTSKKLGTAAGCVEGLEADAINQMNFPDIHALWNSDLIDRSSFKDTLNHFSHPSLLADTPCSHPRTLHTLNRTSDKCFRSWNYENIDSNVRFSNDSSIIFEGTKNFDNFNNEIQSLNYFNDKCGSTDQLGFEEDLTTWKSKFDMRLSVNISPETAGDNGCHLNVPSLNIANDNLFTQDLLNQHNSGLNQRLRTSKCSRFRSHSAPPFYRGKLKFSRLNVPLSKPSTDSDKDICVNNPEDNAPGPVDIPCISSTQPIPETDSSEFPDLNFRGKLKFSRLNVPLSKPSTDSDKDICVNNPEDNAPGPVDIPCISSTQPIPETDSSEFPDLNFSSLIPECVDKNCFEEARVLLQLDKKFIPVISGETILLVDQVLSEGHGVSYLDSEEELSLPETGFQLFQKYAEQIQKWGWIISGGSNSSESFKKNMNILKRQVRLVTLVAVPCIFGVKLTGKDLMEFIWQLDETDGSSDMPPAVLRILNFKACRGAIMFGDPLLPSECCLIIEELKATSLCFQCAHGRPTTVPILNIASLHDELARLQMLSGRKAETWHGLGHHEPSLERAHMRLERLRKLRRGL

SEQ ID NO: 170274 - protein, 335 aa, Zea Mays
MPPLADACMDTLRRFARHVLLLLPHFPEASAAPGRVAALVANYLVHAQELFDATPQEEVYLLTARFEEMQTIKRLPKSVHSSLRSGVILSDLPRVIEELIYNSIDANASKIDIAVNIRACYVKVEDDGCGITRDELVLLGEKYNGSPAISVKTDYVISLFVFLVVRELFYNQPVRRKQMQSSEKRELHHVKKCVLQIALIHPQISLRLLDNDSEDELLYTEISSSPLPLISKTFGDDISRCLHEITASDQVWTLSGHISGPADVFCTKSRKRQKADIYPAFILNFYCPRSTYDLHFEPTKTIVEFKDWRTVLLFFEQSVTNYWKKHQLQSPKACS

SEQ ID NO: 170275 - protein, 376 aa, Zea Mays
MGAQKFGSIGTKFPMNQRVMLQSLMRIHMLLQLLWNGSITRISTGALFSEQDEVDNGAGRGRGRGDGPGKAWQQDGDWMCPNTSCGNVNFAFRGVCNRCGAARPAGAGGTGGGGGGRGRGRGNSDARGSSRAGAGAATGGGPPGLFGPNDWPCPMCGNINWAKRTKCNICNTSKPGTNEGETGSKEVQCHFGPLPIVVCIAIFLHFRGGRGGGYKELDEEELEEVKKRRKEAEEDDGEIYDEFGNLKKKFRSKALHTGSAQTLPGSGRAGWEVEHRGSSEREGRERSRDRGRDDYDEKETRSIDRGDHGRDQRRSQDREREKGRERRDHEYERSRERDRRHRWYENFAWTRLALQPSDFLCCHIQARAATKQALRK

SEQ ID NO: 170276 - protein, 267 aa, Zea Mays
MAGYMSRGPQNGSVYVCNLPPGTDENMLAEYFGTIGLLKKDKRNGRPKIWIYRDKVSNEPKGDATVTYEDPHAASAAVEWFNNKDFHGSTIQVHIAESKSKDAFDNPTNLNTIAGVSEQDEVDNGAGRGRGRGDGPGKAWQQDGDWMCPNTSCGNVNFAFRGVCNRCGAARPAGAGGTGGGGGGRGRGRGNSDARGSSRAGAGAATGGGPPGLFGPNDWPCPMCGNINWAKRTKCNICNTSKPGTNEGGVRQVQWHYLHVVGLKHII

SEQ ID NO: 170277 - protein, 121 aa, Zea Mays
MCPNTSCGNVNFAFRGVCNRCGAARPAGAGGTGGGGGGRGRGRGNSDARGSSRAGAGAATGGGPPGLFGPNDWPCPMCGNINWAKRTKCNICNTSKPGTNEGGVRQVQWHYLHVVGLKHII

SEQ ID NO: 170278 - protein, 182 aa, Zea Mays
MISSLSCGNVNFAFRGVCNRCGAARPAGAGGTGGGGGGRGRGRGNSDARGSSRAGAGAATGGGPPGLFGPNDWPCPMCGNINWAKRTKCNICNTSKPGTNEGETGSKEVQCHFGPLPIVVCIAIFLHFRGGRGGGYKELDEEELEEVKKRRKEAEEVLVKGKAGRGAGIVVGTTMMKRKPGA

SEQ ID NO: 170279 - protein, 352 aa, Zea Mays
MAGYMSRGPQNGSVYVCNLPPGTDENMLAEYFGTIGLLKKDKRNGRPKIWIYRDKVSNEPKGDATVTYEDPHAASAAVEWFNNKDFHGSTIQVHIAESKSKDAFDNPTNLNTIAGVSEQDEVDNGAGRGRGRGDGPGKAWQQDGDWMCPNTSCGNVNFAFRGVCNRCGAARPAGAGGTGGGGGGRGRGRGNSDARGSSRAGAGAATGGGPPGLFGPNDWPCPMCGNINWAKRTKCNICNTSKPGTNEGETGSKEVQCHFGPLPIVVCIAIFLHFRGGRGGGYKELDEEELEEVKKRRKEAEEDDGEIYDEFGNLKKKFRSKALHTGSAQTLPGSGRAGWEVEHRGICLTHWI

SEQ ID NO: 170280 - protein, 420 aa, Zea Mays
MAGYMSRGPQNGSVYVCNLPPGTDENMLAEYFGTIGLLKKDKRNGRPKIWIYRDKVSNEPKGDATVTYEDPHAASAAVEWFNNKDFHGSTIQVHIAESKSKDAFDNPTNLNTIAGVSEQDEVDNGAGRGRGRGDGPGKAWQQDGDWMCPNTSCGNVNFAFRGVCNRCGAARPAGAGGTGGGGGGRGRGRGNSDARGSSRAGAGAATGGGPPGLFGPNDWPCPMCGNINWAKRTKCNICNTSKPGTNEGGVRGGRGGGYKELDEEELEEVKKRRKEAEEDDGEIYDEFGNLKKKFRSKALHTGSAQTLPGSGRAGWEVEHRGSSEREGRERSRDRGRDDYDEKETRSIDRGDHGRDQRRSQDREREKGRERRDHEYERSRERDRRHRWYENFAWTRLALQPSDFLCCHIQARAATKQALRK

SEQ ID NO: 170281 - protein, 298 aa, Zea Mays
MCPNTSCGNVNFAFRGVCNRCGAARPAGAGGTGGGGGGRGRGRGNSDARGSSRAGAGAATGGGPPGLFGPNDWPCPMCGNINWAKRTKCNICNTSKPGTNEGETGSKEVQCHFGPLPIVVCIAIFLHFRGGRGGGYKELDEEELEEVKKRRKEAEEDDGEIYDEFGNLKKKFRSKALHTGSAQTLPGSGRAGWEVEHRGSSEREGRERSRDRGRDDYDEKETRSIDRGDHGRDQRRSQDREREKGRERRDHEYERSRERDRRHRWYENFAWTRLALQPSDFLCCHIQARAATKQALRK

SEQ ID NO: 170282 - protein, 300 aa, Zea Mays
MGAQKFGSIGTKFPMNQRVMLQSLMRIHMLLQLLWNGSITRISTGALFSEQDEVDNGAGRGRGRGDGPGKAWQQDGDWMCPNTSCGNVNFAFRGVCNRCGAARPAGAGGTGGGGGGRGRGRGNSDARGSSRAGAGAATGGGPPGLFGPNDWPCPMCGNINWAKRTKCNICNTSKPGTNEGETGSKEVQCHFGPLPIVVCIAIFLHFRGGRGGGYKELDEEELEEVKKRRKEAEEDDGEIYDEFGNLKKKFRSKALHTGSAQTLPGSGRAGWEVEHRVKGKAGRGAGIVVGTTMMKRKPGA

SEQ ID NO: 170283 - protein, 264 aa, Zea Mays
MCPNTSCGNVNFAFRGVCNRCGAARPAGAGGTGGGGGGRGRGRGNSDARGSSRAGAGAATGGGPPGLFGPNDWPCPMCGNINWAKRTKCNICNTSKPGTNEGETGSKEVQCHFGPLPIVVCIAIFLHFRGGRGGGYKELDEEELEEVKKRRKEAEEDDGEIYDEFGNLKKKFRSKALHTGSAQTLPGSGRAGWEVEHRGSSEREGRERSRDRGRDDYDEKETRSIDRGDHGRDQRRSQDREREKGRERRDHEYERSRERDRRHR

SEQ ID NO: 170284 - protein, 391 aa, Zea Mays
MASLFGNGGYIYSSGSEGEDEDEGTEGYRKGGYHAARPGDRFAGGRFVAQRKIGWGNFSTVWLAYDTLHSRFVALKIQKSARDYAHAALHEIELLSAVAKGDPTNSKCVLRLLDHFKHAGPNGQHVCLVTEFLGDSLLRLIRYNRNKGIGLSRVKEICRSVMVGLDYLHSELGIIHTDLKPENVLLESTINPAKDPVRSGFTPILDRPVGNQYGGTVISFSEKMLKMRARRAVAKISQRRVSLGGVGAELEKERCLDGISLKCKIVDFGNACWADQQHAGEIQTRQYRAPEVIIGSGYSYSADIWSFACIAFELATGDLLFAPMNRQGCSEDEDHLALMMETLGKMPRKIASSGTRSKDYFDRYGDLKRVRRLKFWPLDRVLVERYPRTLI

SEQ ID NO: 170285 - protein, 333 aa, Zea Mays
MASLFGNGGYIYSSGSEGEDEDEGTEGYRKGGYHAARPGDRFAGGRFVAQRKIGWGNFSTVWLAYDTLHSRFVALKIQKSARDYAHAALHEIELLSAVAKGDPTNSKCVLRLLDHFKHAGPNGQHVCLVTEFLGDSLLRLIRYNRNKGIGLSRVKEICRSVMVGLDYLHSELGIIHTDLKPENVLLESTINPAKDPVRSGFTPILDRPVGNQYGGTVISFSEKMLKMRARRAVAKISQRRVSLGGVGAELEKERCLDGISLKCKIVDFGNACWADQQHAGEIQTRQYRAPEVIIGSGYSYSADIWSFACIAFELATGDLLFAPMNRQGCSEDE

SEQ ID NO: 170286 - protein, 180 aa, Zea Mays
MLLPFLRSHPLLHHAARLSSPRTRLILRRDLLPLARSRPIRMAAHSGSGSGASSPAPAPPAAVVQKSKIKFCPACGSPTKLAIPDGDEKMRAVCSSCGGVHYENPKMVVGCLVEHDNKVLLCRRKIEPAYGLWTLPAGYLEVGESAAEGASRETLEEACADVEIISPFAQLDIPLIGQMQ

SEQ ID NO: 170287 - protein, 132 aa, Zea Mays
MLLPFLRSHPLLHHAARLSSPRTRLILRRDLLPLARSRPIRMAAHSGSGSGASSPAPAPPAAVVQKSKIKFCPACGSPTKLAIPDGDEKMRAVCSSCGGVHYENPKMVVGCLVEHDNKVLLCRRKIEPAYGL

SEQ ID NO: 170288 - protein, 195 aa, Zea Mays
MLLPFLRSHPLLHHAARLSSPRTRLILRRDLLPLARSRPIRMAAHSGSGSGASSPAPAPPAAVVQKSKIKFCPACGSPTKLAIPDGDEKMRAVCSSCGGVHYENPKMVVGCLVEHDNKVLLCRRKIEPAYGLWTLPAGYLEVGESAAEGASRETLEEACADVEIISPFAQLDIPLIGQSRWNVHFLLSMIYHSIL

SEQ ID NO: 170289 - protein, 175 aa, Zea Mays
MDDAESASRAGRRRAAAAAGMRLFSPEYYALCAGGGMLAAGATHLAITPLDVLKVNMQVNPMKYNSIFSGLNVLVKEEGPSSLWRGWGGKFFGYGVQGGCRFGLYEYFKKRYSDVLVDSNKSTIYFLSSASAQIIADVGLCPFESVKVRVQTQPMFAKGLVDGFPRVYATEGLSG

SEQ ID NO: 170290 - protein, 938 aa, Zea Mays
MSTIATPPPPSAAQEKAASRNKRKYRAETPSTELGPFGLEYPLTTDCVGFEFMSPEKVAMAAAVAAAEGVSLDLLQNSCENCKDLHPTAEDLLECQRYVNWGDPNEMQLEEILLKSLDTTFDNSVSLITTMGYSEAAARAAIMRTAAQYDWRESLAGFGEAAVEVLKTEGDMLPREGASVEDMRKIEEAVLGSMVTLVTEAQPFNTPGDVMYCLLMSDMNVANACAMDYNSFSLPAVSAQVIAQPVAGNYEPGSGSNLSVSITNPQTGVTFRGKLTPVPPGSYGAIKADSSTAQASPNVSNTEPSVSDKTQCVIPNIEPKKHHVPICDHSEDQPFVAAATQSVKNDKSSPSKRGGSKRDSFHRQKLTNYDKSSRALGSKGSLRSGKQSSSASAVLERKCRSFSDSTTSNLKGSSRVAKGFAASISGSEVSVDLSFTGTLSPSPSFDAKVVSNSNSAPAASTDLSLALSSSDSLTPSLSHDSNTEVVDSSSKINFSYDEEQKVWIPQDKKDEIVLILVQRQKELQAHTRDWTDWAQQKVMQVAHRLAKEKDELQSLRKEKEEADRLQEERHHLEESTRKKLLEMESAISRANAQLEKAEASARRREVENAQLTLQMEAAKRHAAESATNISELVKKDENSRKRSQRWQSDRALLQEDLAAQKSRLSRVQEHLQHAKELKDQVQVCARERAVEKRSWERSGGDMVEQRNNHPGWPGRPKARWKQEEAGKIEVIALVTSKKKEREQIETSMRSEENLLHLKAANDTERYKSEIRALEQRIAQMKVSLDSSKVAAPKWGADNKTYALHLSEGRKNSSAQILSNIAVPQDPSFDDIQRDRECVMCLSEEMSVVFLPCAHQVVCAKCSDLHEKQGMKECPSCRTPIQRRVRARPAVWCRRTDELVDGPNASHISALALDRWESRLEDIFAGRPYDMLDAVKGHI

SEQ ID NO: 170291 - protein, 702 aa, Zea Mays
MSTIATPPPPSAAQEKAASRNKRKYRAETPSTELGPFGLEYPLTTDCVGFEFMSPEKVAMAAAVAAAEGVSLDLLQNSCENCKDLHPTAEDLLECQRYVNWGDPNEMQLEEILLKSLDTTFDNSVSLITTMGYSEAAARAAIMRTAAQYDWRESLAGFGEAAVEVLKTEGDMLPREGASVEDMRKIEEAVLGSMVTLVTEAQPFNTPGDVMYCLLMSDMNVANACAMDYNSFSLPAVSAQVIAQPVAGNYEPGSGSNLSVSITNPQTGVTFRGKLTPVPPGSYGAIKADSSTAQASPNVSNTEPSVSDKTQCVIPNIEPKKHHVPICDHSEDQPFVAAATQSVKNDKSSPSKRGGSKRDSFHRQKLTNYDKSSRALGSKGSLRSGKQSSSASAVLERKCRSFSDSTTSNLKGSSRVAKGFAASISGSEVSVDLSFTGTLSPSPSFDAKVVSNSNSAPAASTDLSLALSSSDSLTPSLSHDSNTEVVDSSSKINFSYDEEQKVWIPQDKKDEIVLILVQRQKELQAHTRDWTDWAQQKVMQVAHRLAKEKDELQSLRKEKEEADRLQEERHHLEESTRKKLLEMESAISRANAQLEKAEASARRREVENAQLTLQMEAAKRHAAESATNISELVKKDENSRKRSQRWQSDRALLQEDLAAQKSRLSRVQEHLQHAKELKDQVQVLTVLFLPHCKMETRGSWKD

SEQ ID NO: 170292 - protein, 856 aa, Zea Mays
MSTIATPPPPSAAQEKAASRNKRKYRAETPSTELGPFGLEYPLTTDCVGFEFMSPEKVAMAAAVAAAEGVSLDLLQNSCENCKDLHPTAEDLLECQRYVNWGDPNEMQLEEILLKSLDTTFDNSVSLITTMGYSEAAARAAIMRTAAQYDWRESLAGFGEAAVEVLKTEGDMLPREGASVEDMRKIEEAVLGSMVTLVTEAQPFNTPGDVMYCLLMSDMNVANACAMDYNSFSLPAVSAQVIAQPVAGNYEPGSGSNLSVSITNPQTGVTFRGKLTPVPPGSYGAIKADSSTAQASPNVSNTEPSVSDKTQCVIPNIEPKKHHVPICDHSEDQPFVAAATQSVKNDKSSPSKRGGSKRDSFHRQKLTNYDKSSRALGSKGSLRSGKQSSSASAVLERKCRSFSDSTTSNLKGSSRVAKGFAASISGSEVSVDLSFTGTLSPSPSFDAKVVSNSNSAPAASTDLSLALSSSDSLTPSLSHDSNTEVVDSSSKINFSYDEEQKVWIPQDKKDEIVLILVQRQKELQAHTRDWTDWAQQKVMQVAHRLAKEKDELQSLRKEKEEADRLQEERHHLEESTRKKLLEMESAISRANAQLEKAEASARRREVENAQLTLQMEAAKRHAAESATNISELVKKDENSRKRSQRWQSDRALLQEDLAAQKSRLSRVQEHLQHAKELKDQVQARWKQEEAGKIEVIALVTSKKKEREQIETSMRSEENLLHLKAANDTERYKSEIRALEQRIAQMKVSLDSSKVAAPKWGADNKTYALHLSEGRKNSSAQILSNIAVPQDPSFDDIQRDRECVMCLSEEMSVVFLPCAHQVVCAKCSDLHEKQGMKECPSCRTPIQRRVRARPAGC

SEQ ID NO: 170293 - protein, 698 aa, Zea Mays
MSTIATPPPPSAAQEKAASRNKRKYRAETPSTELGPFGLEYPLTTDCVGFEFMSPEKVAMAAAVAAAEGVSLDLLQNSCENCKDLHPTAEDLLECQRYVNWGDPNEMQLEEILLKSLDTTFDNSVSLITTMGYSEAAARAAIMRTAAQYDWRESLAGFGEAAVEVLKTEGDMLPREGASVEDMRKIEEAVLGSMVTLVTEAQPFNTPGDVMYCLLMSDMNVANACAMDYNSFSLPAVSAQVIAQPVAGNYEPGSGSNLSVSITNPQTGVTFRGKLTPVPPGSYGAIKADSSTAQASPNVSNTEPSVSDKTQCVIPNIEPKKHHVPICDHSEDQPFVAAATQSVKNDKSSPSKRGGSKRDSFHRQKLTNYDKSSRALGSKGSLRSGKQSSSASAVLERKCRSFSDSTTSNLKGSSRVAKGFAASISGSEVSVDLSFTGTLSPSPSFDAKVVSNSNSAPAASTDLSLALSSSDSLTPSLSHDSNTEVVDSSSKINFSYDEEQKVWIPQDKKDEIVLILVQRQKELQAHTRDWTDWAQQKVMQVAHRLAKEKDELQSLRKEKEEADRLQEERHHLEESTRKKLLEMESAISRANAQLEKAEASARRREVENAQLTLQMEAAKRHAAESATNISELVKKDENSRKRSQRWQSDRALLQEDLAAQKSRLSRVQEHLQHAKELKDQVQMLGWKLRRHKNHLILL

SEQ ID NO: 170294 - protein, 723 aa, Zea Mays
MSTIATPPPPSAAQEKAASRNKRKYRAETPSTELGPFGLEYPLTTDCVGFEFMSPEKVAMAAAVAAAEGVSLDLLQNSCENCKDLHPTAEDLLECQRYVNWGDPNEMQLEEILLKSLDTTFDNSVSLITTMGYSEAAARAAIMRTAAQYDWRESLAGFGEAAVEVLKTEGDMLPREGASVEDMRKIEEAVLGSMVTLVTEAQPFNTPGDVMYCLLMSDMNVANACAMDYNSFSLPAVSAQVIAQPVAGNYEPGSGSNLSVSITNPQTGVTFRGKLTPVPPGSYGAIKADSSTAQASPNVSNTEPSVSDKTQCVIPNIEPKKHHVPICDHSEDQPFVAAATQSVKNDKSSPSKRGGSKRDSFHRQKLTNYDKSSRALGSKGSLRSGKQSSSASAVLERKCRSFSDSTTSNLKGSSRVAKGFAASISGSEVSVDLSFTGTLSPSPSFDAKVVSNSNSAPAASTDLSLALSSSDSLTPSLSHDSNTEVVDSSSKINFSYDEEQKVWIPQDKKDEIVLILVQRQKELQAHTRDWTDWAQQKVMQVAHRLAKEKDELQSLRKEKEEADRLQEERHHLEESTRKKLLEMESAISRANAQLEKAEASARRREVENAQLTLQMEAAKRHAAESATNISELVKKDENSRKRSQRWQSDRALLQEDLAAQKSRLSRVQEHLQHAKELKDQVQSLQNSRAGSVSSHLTNPGRGVSCKLLHVEVSGRSLELYMAF

SEQ ID NO: 170295 - protein, 702 aa, Zea Mays
MSTIATPPPPSAAQEKAASRNKRKYRAETPSTELGPFGLEYPLTTDCVGFEFMSPEKVAMAAAVAAAEGVSLDLLQNSCENCKDLHPTAEDLLECQRYVNWGDPNEMQLEEILLKSLDTTFDNSVSLITTMGYSEAAARAAIMRTAAQYDWRESLAGFGEAAVEVLKTEGDMLPREGASVEDMRKIEEAVLGSMVTLVTEAQPFNTPGDVMYCLLMSDMNVANACAMDYNSFSLPAVSAQVIAQPVAGNYEPGSGSNLSVSITNPQTGVTFRGKLTPVPPGSYGAIKADSSTAQASPNVSNTEPSVSDKTQCVIPNIEPKKHHVPICDHSEDQPFVAAATQSVKNDKSSPSKRGGSKRDSFHRQKLTNYDKSSRALGSKGSLRSGKQSSSASAVLERKCRSFSDSTTSNLKGSSRVAKGFAASISGSEVSVDLSFTGTLSPSPSFDAKVVSNSNSAPAASTDLSLALSSSDSLTPSLSHDSNTEVVDSSSKINFSYDEEQKVWIPQDKKDEIVLILVQRQKELQAHTRDWTDWAQQKVMQVAHRLAKEKDELQSLRKEKEEADRLQEERHHLEESTRKKLLEMESAISRANAQLEKAEASARRREVENAQLTLQMEAAKRHAAESATNISELVKKDENSRKRSQRWQSDRALLQEDLAAQKSRLSRVQEHLQHAKELKDQVQFMEISLLLLYLTLLGCVLNR

SEQ ID NO: 170296 - protein, 107 aa, Zea Mays
MTLNISADLSSLFTWNTKQVFVFVAAEYETRQNALNQVSLWDGIIPAKEHAKFLIHTTNKYRFIDQGSNLKGKEFNLTMHWHIMPKTGKMFADKIVMTGYQLPEQYR

SEQ ID NO: 170297 - protein, 152 aa, Zea Mays
MHSFGHRANAVATFAVTILAAMCFAASFSDNFNTLTPTASVKILNINWFQKEANGNDEVSMTLNISADLSSLFTWNTKQVFVFVAAEYETRQNALNQVSLWDGIIPAKEHAKFLIHTTNKYRFIDQVEPYWCNGHPLFWLIPISFICARIGL

SEQ ID NO: 170298 - protein, 342 aa, Zea Mays
MANLQCLPPSVEPRVSDHIDEIINMIKQAAKDGEPWWDSPWGPGRPGWHIECSAMSAHYLGHSFDIHGGGEDLIFPHHENEIAQSRAACCDSTINYWIHNGFVNVNSQKMSKSLGNFVTIRKVIEMYHPLALRMFLLGTHYRSPINYTIEQLNVTSDRLYYTYQTLLDCEEICQQQQSNTGNSLPANTLNYIQKLHEEFETSMSDDLHTSVALAAISEPLKVMNDLLHTRKGKKQDKRLESLSALEEKIRVVLSVLGLLPSSYHEALQQLRDKALRRASITEELVVQKIEERTAARKAKQYEKSDEIRKELAAIGIALMDGPDGTTWRPSLPILEEAVVAKT

SEQ ID NO: 170299 - protein, 546 aa, Zea Mays
MAAAAAAARRAAGLLPLLLSSRSGARIPLHRAVSQIPPPCSYRLLSQQAKPFSASASASASASASNGATAERTRELHLYNTKSRKKEQFRPRDPGGEVGMYLRYLDYEVRYVRNFTDIDDKIIARANQLGEDPFNLSKRFSDDFLLDMANLQCLPPSVEPRVSDHIDEIINMIKQILDNSCAYVVGGDVYFSVDSFPDYGELSGRKLDDNRAGERVSVDERKRNPADFALWKAAKDGEPWWDSPWGPGRPGWHIECSAMSAHYLGHSFDIHGGGEDLIFPHHENEIAQSRAACCDSTINYWIHNGFVNVNSQKMSKSLGNFVTIRKVIEMYHPLALRMFLLGTHYRSPINYTIEQLNVTSDRLYYTYQTLLDCEEICQQQQSNTGNSLPANTLNYIQKLHEEFETSMSDDLHTSVALAAISEPLKVMNDLLHTRKGKKQDKRLESLSALEEKIRVVLSVLGLLPSSYHEALQQLRDKALRRASITEELVVQKIEERTAARKAKQYEKSDEIRKELAAIGIALMDGPDGTTWRPSLPILEEAVVAKT

SEQ ID NO: 170300 - protein, 288 aa, Zea Mays
MSAHYLGHSFDIHGGGEDLIFPHHENEIAQSRAACCDSTINYWIHNGFVNVNSQKMSKSLGNFVTIRKVIEMYHPLALRMFLLGTHYRSPINYTIEQLNVTSDRLYYTYQTLLDCEEICQQQQSNTGNSLPANTLNYIQKLHEEFETSMSDDLHTSVALAAISEPLKVMNDLLHTRKGKKQDKRLESLSALEEKIRVVLSVLGLLPSSYHEALQQLRDKALRRASITEELVVQKIEERTAARKAKQYEKSDEIRKELAAIGIALMDGPDGTTWRPSLPILEEAVVAKT

SEQ ID NO: 170301 - protein, 82 aa, Zea Mays
MRGRTACVVGLWDSQLVEWSFRVSTPILQRQGVADLQAVEHGQGRRRPPPPRHPSPIPSTVSRVPGSRNQGSALSDLGIQLD

SEQ ID NO: 170302 - protein, 54 aa, Zea Mays
MGGHGVITDRILVLIWSIFLVILTLVIVLLYFTHVILEEAKCFFSSHRSRNHSG

SEQ ID NO: 170303 - protein, 119 aa, Zea Mays
MWSTENDEKYSCSETGYRLPLKCVQAQNATKEGNMSKQRKILDDASTSGGTKSASGGPKHYITYRSCVPLVGEENLSVLGFEIMMAGMLLVSGPFVYYRKRRTNLMQGAARIPTSDPRF

SEQ ID NO: 170304 - protein, 196 aa, Zea Mays
MGKKKKRVDKVFCYYCDREFDDEKILVQHQKAKHFKCHVCHKKLSTASGMAIHVLQVHKESVTKVPNAKPDRESTEIEIFGMQGIPAHVLAAHYGEEEDPSTKVPKVEVPQVRPVIMPNSLGMAFPPRPAYGVAPPIYNPALNPLMARPPIWPAAPAQACCQWSCKFPIFSICCTWNHSSKLSSSSRCCRNWIWNQ

SEQ ID NO: 170305 - protein, 338 aa, Zea Mays
MGKKKKRVDKVFCYYCDREFDDEKILVQHQKAKHFKCHVCHKKLSTASGMAIHVLQVHKESVTKVPNAKPDRESTEIEIFGMQGIPAHVLAAHYGEEEDPSTKVPKVEVPQVRPVIMPNSLGMAFPPRPAYGVAPPIYNPALNPLMARPPIWPAAPAQAWYPQQAAYPQQSAVSVPPIVAGLPPQQPLFPIQNVPTPMTSAAANVLQTSFPMAPPGVPSPVAPHVSQPLFPVNTSAVNGAVNSPFLASVAPGTIPASSPAAVGVAGIGYGTNNQGTRDPAVGSSPAVSNNKASGAQPATNEVYLVWDDEAMSMEERRLSLPKYQVHDETSQDSRACNS

SEQ ID NO: 170306 - protein, 119 aa, Zea Mays
MILWCYLMAVFTDPGAVPENWRHDAEDSGNPSFSSSDEQESAPRYCSRCQNGKPPRCHHCSVCNRCVLKMDHHCIWVVNCVGARNYKYFLLFLVQLKHLMRLLCSCLFYTFVSLKHVLV

SEQ ID NO: 170307 - protein, 201 aa, Zea Mays
MGPHAPRRGSSRGRCCRRDRRLPHTRILFLLQLAMILWCYLMAVFTDPGAVPENWRHDAEDSGNPSFSSSDEQESAPRYCSRCQNGKPPRCHHCSVCNRCVLKMDHHCIWVVNCVGARNYKYFLLFLVYTFIETVLDTLVLLPNFIEFFQDEHRRSSSPGDIAILFLAFVLNLAFALSLLCFIGMHASLVTRNTTSIEVIL

SEQ ID NO: 170308 - protein, 188 aa, Zea Mays
MDCCRHVNPFRACSGLRGLGYLMVALVAAIVAVSYYAVVVYAWGPMLLAGGAAAAGAAAVIAAFHILLAMILWCYLMAVFTDPGAVPENWRHDAEDSGNPSFSSSDEQESAPRYCSRCQNGKPPRCHHCSVCNRCVLKMDHHCIWVVNCVGARNYKYFLLFLVQLKHLMRLLCSCLFYTFVSLKHVLV

SEQ ID NO: 170309 - protein, 203 aa, Zea Mays
MFIWPEVLGWAPLRFFFSPLVTAAATAALQEEMKALVASVPDGAGAAFTAMQLQELEQQSRVYQYMAARVPVPTHLVFPVWKSVTGASSEGAQKYPTLLGLATLCLDFGKNPEPEPGRCRRTDGKKWRCWRNTIPNEKYCERHMHRGRKRPVQVVEEAEPDSASGSKSAPSKATEGAKKVDDKSPGSKKLAVAAAAAAAVQST

SEQ ID NO: 170310 - protein, 570 aa, Zea Mays
MKWKNVLKEMAPLRSTGRFFQRHPSAICLLIFLLVLYKYFFGWFTLIVTTSPIFLIAGIFLGIVLVYGEPNNPEKDHVYKKNDNTRSLNIHDSSKSIRGVPLPRIPSGEERAPKHKNSVKKIRKQSRGVASSSEPGSSESGGSDTDIAPMLHAFHHLRSGSNSSNSSQDGDSDSSTEDTTENQQGNDGRISREGKQHVKVVAWTADDQKNIIKIGCLEIERNQRLETLIARRRARKYADRNLAEFGSTDSLPTIEELSKFNVQIPAVFAPRKNPFDLPYNEDNFPDSAPSAVLETRYPFDLPSEQANESSSYGANSSHDEPIPVACHLQSALLRRHESFTEGAPFLSDFLQDTQPSRFRPYFMTEKMANEEMTDPVLEGETSEKSNSKASSAQDSDSTSSVADQESQKDVLEDCSNQGQQSSFSQTEEHAHIARHAREVSLSLDMEPPVLISDSSDDDISLSGEHINDWEEAQQSENFSLSQNTWQEDPNVMQHHQEIDITSNGLNQMSPHSNDLELTSSSTETTDDPFEVNDIEPPAKEVVVVDDTHVVDPVYDSIHHRYKQLLYGGVQ

SEQ ID NO: 170311 - protein, 671 aa, Zea Mays
MKWKNVLKEMAPLRSTGRFFQRHPSAICLLIFLLVLYKYFFGWFTLIVTTSPIFLIAGIFLGIVLVYGEPNNPEKDHVYKKNDNTRSLNIHDSSKSIRGVPLPRIPSGEERAPKHKNSVKKIRKQSRGVASSSEPGSSESGGSDTDIAPMLHAFHHLRSGSNSSNSSQDGDSDSSTEDTTENQQGNDGRISREGKQHVKVVAWTADDQKNIIKIGCLEIERNQRLETLIARRRARKYADRNLAEFGSTDSLPTIEELSKFNVQIPAVFAPRKNPFDLPYNEDNFPDSAPSAVLETRYPFDLPSEQANESSSYGANSSHDEPIPVACHLQSALLRRHESFTEGAPFLSDFLQDTQPSRFRPYFMTEKMANEEMTDPVLEGETSEKSNSKASSAQDSDSTSSVADQESQKDVLEDCSNQGQQSSFSQTEEHAHIARHAREVSLSLDMEPPVLISDSSDDDISLSGEHINDWEEAQQSENFSLSQNTWQEDPNVMQHHQEIDITSNGLNQMSPHSNDLELTSSSTETTDDPFEVNDIEPPAKEVVVVDDTHVVDPVYDSSPSGSERPAPTGLVIDGPVLKDATIEEGGSSSRMEVSSSEVAGPSLSSVEQSESPEKEASEIREQSMVGHVEAHGGSVSHADPSVSDISSQPSTESSTNGDSGSGVTPSFTNAVL

SEQ ID NO: 170312 - protein, 107 aa, Zea Mays
MAPTVLAGKIDPALFEVLYASQHAIFFFARVPQIWKNFTNKGTGELSFLTCFMNFAGSIVRVFTSIQEKTPLSVIMGSAIGIVMNGTLLGQIVLYQKPAPKKQKKED

SEQ ID NO: 170313 - protein, 121 aa, Zea Mays
MGTKTWMKALLYCGMAPTVLAGKIDPALFEVLYASQHAIFFFARVPQIWKNFTNKGTGELSFLTCFMNFAGSIVRVFTSIQEKTPLSVIMGSAIGIVMNGTLLGQIVLYQKPAPKKQKKED

SEQ ID NO: 170314 - protein, 204 aa, Zea Mays
MVAAMELEILGMNFGCVLAALSDAKIPDKGCLLPLISKLLGYAIVAASTTVKLPQILKILKHGSVRGLSVASFELEVVGYTIALAYCIHKGLPFSAYGELAFLLIQAIILVAIIYYYSPPMGTKTWMKALLYCGMAPTVLAGKIDPALFEVLYASQHAIFFFARVPQIWKNFTNKGTGELSFLTCFMNFAGSIEFLPASRRRLP

SEQ ID NO: 170315 - protein, 53 aa, Zea Mays
MLFSLSIVHDYKKKIMNEPGAVEELASMMTKGTPRDKKTQSWYCSTSQHTRKA

SEQ ID NO: 170316 - protein, 67 aa, Zea Mays
MVSRKFPLHLTLRRPTFVPKWVPFVCFCYASVSLTFDIFIYQQITKFNTVGMVLHAFQKKIHVCQSE

SEQ ID NO: 170317 - protein, 57 aa, Zea Mays
MRRPERSTTVGTSRCRWRLPSTTRPCFFNSSIVMGYYKNHVKVEYPACCFMLSLHVV

SEQ ID NO: 170318 - protein, 152 aa, Zea Mays
MDPVPPPSSSRRAAAAPGPCCRFDALRRACAGNAAAAARAAGWAIGALLTCIFAVVGSLVGIFIGAFMGMSTESGMFRGAGVGAVSGAVFSIEAVESCIEIWRSSHSGKYSILFVLDIISSLFSGRIVWEKVSPALQRAVQSQYRRHVKGFD

SEQ ID NO: 170319 - protein, 212 aa, Zea Mays
MSNPGAPDTVTESAELVLPLLPPQDLAAAASACRALRAAVTAVTARRAGDAARGLEPLPIPFRNYVDSKPYAYFLYTPFSLTRLAPGASAPSAQPWGAAWTRPPRPTWPRPNLDGLPSAVYGCACAAAECGGTQCACADVEADAAGSGLEAGMGSLTECGDVCACAPSCGNRRTQRGVAVRLCVVRHLHKGWGLHAAEALSCGQFVCEYAGD

SEQ ID NO: 170320 - protein, 70 aa, Zea Mays
MARIKPKQLLIQSKTKKAPSRISYSTIITWNLIVILVLLSLYATYNHWHQRRLKKSTLMNIISQRPPPPP

SEQ ID NO: 170321 - protein, 1005 aa, Zea Mays
MSNLKLGVEVTSAHDLLPKEQDTANPFVEVDFDGQKFRTAVKDRDLNPVWNEQFYFNISDPSRLPELHLEAYVYHADRASNSKSCLGKVRISGTSFVSQPDAMPLHYPLEKRTILSRARGELGLRVFLTDDPSVRVSAAPAQQEFDMLSTPTTAQEQQAAANSISNPFQETRANPVRQFQHLPREQQRPAQPQPYYAEGSYGDQQQQQRSFSAVANKAAAPQPQVQVSRMYAPGPQQPVDFQLKETSPTLGGGRVIGGRVYPGQKAGAYDLVEKMQYLFVRVVKARDLPNMDITGSLDPYVEVHLGNYKMKTKHFEKNQRPEWDEVFAFPKEVMQSTMLQVVVKDKDVLRDDYVGRVSIDLNEVPLRVPPDSPLAPEWYRLMGKDGVRDRGELMLAVWYGTQADECFPSAIHAGSTPVDSHLHSYIRGKVYPAPRMWYVRVNVIEGQDIYPMENRIPDVLVKVRLGHQLLRTRQVRSPTRNFMWNEELMFVAAEPFEDDLLISVVDRVAQDKDEVIGEAIIPLARLPRRADHKPVLPAWFDLRRPGIIDVNQLKEDKFYAKVSLRVCLEGGYHVLDESTQYCSDLRPTMKQLWKPPIGMLEVGILSANGLNPTKTRNSRGSCDAYCVAKYGSKWVRTRTIVDSLSPRFNEQYTWEVFDHGTVLTIGLFDNCHISGDDNKDGSSGHMDKPIGKVRIRLSTLDTARVYTHSYPLLFLSPSGVKKMGELHLAIRFTVTSLINVLFTYSRPLLPKMHYAQPLSIVQQEMLRHQAVLLVAQRLGRMEPPVRREVVEFMSDARSHLWSMRRSKANFFRLMQVFSGFIAAGKWFADVCQWKNPVTTVLVHVLFIMLVLYPDLILPTIFLYMFLIGLWNYRFRPRFPPHMNTRISYADVALPDELDEEFDTFPTSKSPDLIRMRYDRLRHVAGRIQTVVGDIATQGERLQSLLSWRDPRATAMFLIFCLITAIILYVTPFQVVALCLGFFGMRHPRFRHKVPSAPANFFRRLL

SEQ ID NO: 170322 - protein, 68 aa, Zea Mays
MGALATLGWVQQWSKPLDDMAARAGGIDRPGPNVDRWSCRSVGSVIPIVLEPNRTILTHMLETRLIPN

SEQ ID NO: 170323 - protein, 244 aa, Zea Mays
MVKHMLQLYLMAENSNTSRHLAEFWMIEPELAFADLNDDMACATAYLQYVVKYILENCKEDMDFFNTWIEKGIIDRLNDVVEKNFVHLSYTDAVELLLGSKKEFEFPVKWGLDLQSEHERYITEVAFGGRPVIIRDYPKEIKAFYMRENDDGKTVAAMDLLVPRVGELIGGSQREERLDYLEARLDEQNLNKESYWWYLDLRRYGSVPHAGFGLGFERLVQFATGMDNIRDTIPFPRVPGSAEF

SEQ ID NO: 170324 - protein, 549 aa, Zea Mays
MAAAAAARILRLAPRRIQVPKTSPLAALSFPLPRTAPIAAASGRRQRFCAVAQAPAPAAAATGAAGEAVGEFRKRLRVADVKGGEDEGAAWVGKELAVRGWVRTCRAQRTITFVEVNDGSCLSNMQCVLTPETEGYDQIDSVTTGASVLVEGVVASSQGGKQKVELKVSKITVIGKSDPTSFPIQKKRASREFLRTVAHLRPRTNTFGAVARVRNTLAYATHKFFQDNGFVWVSSPIITASDCEGAGEQFYVTTLLSNSADGGSLLKDIPATKDGRVDWSQDFFCKPAFLTVSGQLNGETYASALSDIYTFGPTFRAENSNTSRHLAEFWMIEPELAFADLNDDMACATAYLQYVVKYILENCKEDMDFFNTWIEKGIIDRLNDVVEKNFVHLSYTDAVELLLGSKKEFEFPVKWGLDLQSEHERYITEVAFGGRPVIIRDYPKEIKAFYMRENDDGKTVAAMDLLVPRVGELIGGSQREERLDYLEARLDEQNLNKESYWWYLDLRRYGSVPHAGFGLGFERLVQFATGMDNIRDTIPFPRVPGSAEF

SEQ ID NO: 170325 - protein, 314 aa, Zea Mays
MEAIEVSMYHHQVASRRIVNLSNSADGGSLLKDIPATKDGRVDWSQDFFCKPAFLTVSGQLNGETYASALSDIYTFGPTFRAENSNTSRHLAEFWMIEPELAFADLNDDMACATAYLQYVVKYILENCKEDMDFFNTWIEKGIIDRLNDVVEKNFVHLSYTDAVELLLGSKKEFEFPVKWGLDLQSEHERYITEVAFGGRPVIIRDYPKEIKAFYMRENDDGKTVAAMDLLVPRVGELIGGSQREERLDYLEARLDEQNLNKESYWWYLDLRRYGSVPHAGFGLGFERLVQFATGMDNIRDTIPFPRVPGSAEF

SEQ ID NO: 170326 - protein, 119 aa, Zea Mays
MAAAAAARILRLAPRRIQVPKTSPLAALSFPLPRTAPIAAASGRRQRFCAVAQAPAPAAAATGAAGEAVGEFRKRLRVADVKGGEDEGAAWVGKELAVRGWVRTCRAQRTITFVEEPGY

SEQ ID NO: 170327 - protein, 51 aa, Zea Mays
MLLYRLMYWQKTMPTFAVQTYSLYVSTTLISYFGVPYIPVNLFVKAMWLRS

SEQ ID NO: 170328 - protein, 182 aa, Zea Mays
MNCILFLSREGFRRACLRNDSQSDVLTSEAILMVAWMVIPVSILITSVGSILVLSLKRVKLSDPYAKAVLIIGFACILELLAEPLYIISQKKKYYNIRVYVEPTATLFRCLTTFILIKGHIKVNKLVLVSLSQVVYGACILFGYWSYFLMYTDTKPSDLFPLRPGFQEVDTPRRREICPCVI

SEQ ID NO: 170329 - protein, 255 aa, Zea Mays
MDDAALLSGAGVAAAAPPHAAAAGAAVMGVFKYNFAAQFLSRIIPFVFNIWFVRQLGADDGAVSAFALQLPLFMNCILFLSREGFRRACLRNDSQSDVLTSEAILMVAWMVIPVSILITSVGSILVLSLKRVKLSDPYAKAVLIIGFACILELLAEPLYIISQKKKYYNIRVYVEPTATLFRCLTTFILIKGHIKVNKLVLVSLSQVVYGACILFGYWSYFLMYTDTKPSDLFPLRPGFQEVDTPRRREICPCVI

SEQ ID NO: 170330 - protein, 81 aa, Zea Mays
MCKCCGRSRVGQIVCRNIYAEEGSEAMDVAAAPAVQALARYTRREATCLSLTGKDSMFSGNFKFTALLPATPSPSPKKPVR

SEQ ID NO: 170331 - protein, 145 aa, Zea Mays
MWLVLRRLKEEGKDGVKFGQYIYEMYNHDVELRVSKAGVNLLLTKWMKELEKIFYGNIVKYDAAISPEARQDDLVNVIWRNIYAEEGSEAMDVAAAPAVQALARYTRREATCLSLTGKDSMFSGNFKFTALLPATPSPSPKKPVR

SEQ ID NO: 170332 - protein, 180 aa, Zea Mays
MFLSKPCSLALPPDSPHRAVDPQYKGIKRFLLTLLLFYSKQSKSIRGANVVYDRITSQVDAPTIYDVFQLEKTFKTTFSLLVLHMWLVLRRLKEEGKDGVKFGQYIYEMYNHDVELRVSKAGVNLLLTKWMKELEKIFYGNIVKYDAAISPEARQDDLVNVIWRFGRGSGQTEGKKKYLC

SEQ ID NO: 170333 - protein, 266 aa, Zea Mays
MSRWRAAAYSISAAAASRNSAAEAGALSRALAKAPSPPSLPLQTLTRNFAKSAAAATATSPGPGASSPPAGPRPEIRLKSMFLSKPCSLALPPDSPHRAVDPQYKGIKRFLLTLLLFYSKQSKSIRGANVVYDRITSQVDAPTIYDVFQLEKTFKTTFSLLVLHMWLVLRRLKEEGKDGVKFGQYIYEMYNHDVELRVSKAGVNLLLTKWMKELEKIFYGNIVKYDAAISPEARQDDLVNVIWRGSKAKTRTIKGTSPFRRNCGSS

SEQ ID NO: 170334 - protein, 256 aa, Zea Mays
MSRWRAAAYSISAAAASRNSAAEAGALSRALAKAPSPPSLPLQTLTRNFAKSAAAATATSPGPGASSPPAGPRPEIRLKSMFLSKPCSLALPPDSPHRAVDPQYKGIKRFLLTLLLFYSKQSKSIRGANVVYDRITSQVDAPTIYDVFQLEKTFKTTFSLLVLHMWLVLRRLKEEGKDGVKFGQYIYEMYNHDVELRVSKAGVNLLLTKWMKELEKIFYGNIVKYDAAISPEARQDDLVNVIWRTAVNHWSFRRRI

SEQ ID NO: 170335 - protein, 244 aa, Zea Mays
MSRWRAAAYSISAAAASRNSAAEAGALSRALAKAPSPPSLPLQTLTRNFAKSAAAATATSPGPGASSPPAGPRPEIRLKSMFLSKPCSLALPPDSPHRAVDPQYKGIKRFLLTLLLFYSKQSKSIRGANVVYDRITSQVDAPTIYDVFQLEKTFKTTFSLLVLHMWLVLRRLKEEGKDGVKFGQYIYEMYNHDVELRVSKAGVNLLLTKWMKELEKIFYGNIVKYDAAISPEARQDDLVNVIWR

SEQ ID NO: 170336 - protein, 62 aa, Zea Mays
MIVCMISGTKVGHHNLLIGKQMISMQPRPAEPHVPVSLSAPLVLVWPMVPSNNDNPSLIPTN

SEQ ID NO: 170337 - protein, 61 aa, Zea Mays
MKKCGAPRPTPGANTSSSRKDNKEAPEGSWTCPECNNLNYPFRSVCNRKGCSYNKSAPTNN

SEQ ID NO: 170338 - protein, 134 aa, Zea Mays
MGYGPGPELGRYSYGFRGSPMPVSSPWSGGAIAENNDNIASRKRRGGPDGLSEGDWTCPKCDNINFSFRNTCNMKKCGAPRPTPGANTSSSRKDNKEAPEGSWTCPECNNLNYPFRSVCNRKGCSYNKSAPTNN

SEQ ID NO: 170339 - protein, 232 aa, Zea Mays
MAFAKVGAATQLENRGALSKRLRNDVSVREGDWNCPQCGNVNFSFRNVCNRGACGAPRPSPSPSPRMMPAPPAPGYDRLPLFYGGGGGAPSPISLGSGMGYGPGPELGRYSYGFRGSPMPVSSPWSGGAIAENNDNIASRKRRGGPDGLSEGDWTCPKCDNINFSFRNTCNMKKCGAPRPTPGANTSSSRKDNKEAPEGSWTCPECNNLNYPFRSVCNRKGCSYNKSAPTNN

SEQ ID NO: 170340 - protein, 220 aa, Zea Mays
MAFAKVGAATQLENRGALSKRLRNDVSVREGDWNCPQCGNVNFSFRNVCNRGACGAPRPSPSPSPRMMPAPPAPGYDRLPLFYGGGMGYGPGPELGRYSYGFRGSPMPVSSPWSGGAIAENNDNIASRKRRGGPDGLSEGDWTCPKCDNINFSFRNTCNMKKCGAPRPTPGANTSSSRKDNKEAPEGSWTCPECNNLNYPFRSVCNRKGCSYNKSAPTNN

SEQ ID NO: 170341 - protein, 167 aa, Zea Mays
MAFAKVGAATQLENRGALSKRLRNDVSVREGDWNCPQCGNVNFSFRNVCNRGACGAPRPSPSPSPRMMPAPPAPGYDRLPLFYGGGGGAPSPISLGSGSYGGPYPHLGMRYGYGPPVGAPGSYGLFSSYGQPGPMSGMGYGPGPELGRYSYGFRGSPMPPMVWWSNS

SEQ ID NO: 170342 - protein, 159 aa, Zea Mays
MLICSHHFQILPYDQLMQELDVSNVRELEDFLINECMYSGIVRGKLDQLRRCFEVQFAAGRDLTPDQLKNMIETLSDWLGTSDRLLHQIQEKIKWADTMSEVNKKHQKEFEDRVEEAKKSIKQADIDLRGHDEFLSESGGIMDFEEDRVRPKRRRQPPA

SEQ ID NO: 170343 - protein, 241 aa, Zea Mays
MAMDAERRQAELIAQFSAQAAALSSAPQLAALVLEATSHPALFAFSELLTLPALSKLTGTQYASSLDLLRLFAYGTLNDYKTLLPDQVRKLKQLSVLTLAESTKILPYDQLMQELDVSNVRELEDFLINECMYSGIVRGKLDQLRRCFEVQFAAGRDLTPDQLKNMIETLSDWLGTSDRLLHQIQEKIKWADTMSEVNKKHQKEFEDRVEEAKKSIKKLNNLSRQTLTYGGMTSFSLNLEE

SEQ ID NO: 170344 - protein, 233 aa, Zea Mays
MAMDAERRQAELIAQFSAQAAALSSAPQLAALVLEATSHPALFAFSELLTLPALSKLTGTQYASSLDLLRLFAYGTLNDYKSNSGFLPALLPDQVRKLKQLSVLTLAESTKILPYDQLMQELDVSNGIVRGKLDQLRRCFEVQFAAGRDLTPDQLKNMIETLSDWLGTSDRLLHQIQEKIKWADTMSEVNKKHQKEFEDRVEEAKKSIKKLNNLSRQTLTYGGMTSFSLNLEE

SEQ ID NO: 170345 - protein, 254 aa, Zea Mays
MAMDAERRQAELIAQFSAQAAALSSAPQLAALVLEATSHPALFAFSELLTLPALSKLTGTQYASSLDLLRLFAYGTLNDYKSNSGFLPALLPDQVRKLKQLSVLTLAESTKILPYDQLMQELDVSNVRELEDFLINECMYSGIVRGKLDQLRRCFEVQFAAGRDLTPDQLKNMIETLSDWLGTSDRLLHQIQEKIKWADTMSEVNKKHQKEFEDRVEEAKKSIKADIDLRGHDEFLSESGGIMDFEEDRVRPKR

SEQ ID NO: 170346 - protein, 305 aa, Zea Mays
MASSVAAMPHESASSWRDPSRLTPPRGFVTILISSPDAAGAGGSASSPAAASEPTPRTRRQILDRWTAAAAATTVTDSAAPAPADQRRVARDAELSELASAARPVAARAAVFREPSPAPSDASSTAAAAAATAPAELPPAGPRASSLIQRWREIEAVGPATPRPADPGVSAAASASASASDSDTGSPRGRVGCIVKKLSGASSLPEDELDDVARSELSLSQSAPPSPAPMRDASHYPYQCPSVASAINGPRPPHLVFRTVRGRRAMEELVAAMAHRRRREVAALAESHAVSRFPHKGRIQIRGIR

SEQ ID NO: 170347 - protein, 239 aa, Zea Mays
MLTLKSSNFKSRSATLDQKAHHLFEEIFPSIERLLSAISLKAELGTAGYQSVTVSGNPVHSSLALPVALDAVNEILSNYKNNTFFTEGNHFPRGNRVCSGSVLASREQLPIGIATAAFDGIHSSKWEEPDGAKGCWLIYTMQDGKSCELESYDLMSANDAPERDPMDWVLEGSADGGSTWNILDARNSEMFESRFLRKTFTVDKRYKANAFRFRFLRVRDSHSNPRFQIGSIDLYGKTI

SEQ ID NO: 170348 - protein, 227 aa, Zea Mays
MHLDPCEGVYDNPLLYEKGWNKKLNYVIAISKDGVRDVTKRYTRKWHEVLSRRIITSEETVVSVLSSITGKYRTEGNHFPRGNRVCSGSVLASREQLPIGIATAAFDGIHSSKWEEPDGAKGCWLIYTMQDGKSCELESYDLMSANDAPERDPMDWVLEGSADGGSTWNILDARNSEMFESRFLRKTFTVDKRYKANAFRFRFLRVRDSHSNPRFQIGSIDLYGKTI

SEQ ID NO: 170349 - protein, 229 aa, Zea Mays
MVSSTRVWHNGLGNTQSSERAFNACDATMIQCALVTCGAVIEACHKPANALCLVRILDFTDHVWTECFSNLYGRWMHLDPCEGVYDNPLLYEKGWNKKLNYVIAISKDGVRDVTKRYTRKWHEVLSRRIITSEETVVSVLSSITGKYRTGLSPDALSVIENREKEESEELRKSAYLQVETALSLPGRLSGSVEWRKARRQSFPKREQSMLRFSPCKQGTTSNRNCNSSF

SEQ ID NO: 170350 - protein, 486 aa, Zea Mays
MVSSTRVWHNGLGNTQSSERAFNACDATMIQCALVTCGAVIEACHKPANALCLVRILDFTDHVWTECFSNLYGRWMHLDPCEGVYDNPLLYEKGWNKKLNYVIAISKDGVRDVTKRYTRKWHEVLSRRIITSEETVVSVLSSITGKYRTGLSPDALSVIENREKEESEELRKSAYLQVETALSLPGRLSGSVEWRKARSELGQADSLSCSSCPIRKCVDGHVSNIYDALSAFLSHFFDKKIPKERIIEAFEALKTLMLTLKSSNFKSRSATLDQKAHHLFEEIFPSIERLLSAISLKAELGTAGYQSVTVSGNPVHSSLALPVALDAVNEILSNYKNNTFFTEGNHFPRGNRVCSGSVLASREQLPIGIATAAFDGIHSSKWEEPDGAKDGKSCELESYDLMSANDAPERDPMDWVLEGSADGGSTWNILDARNSEMFESRFLRKTFTVDKRYKANAFRFRFLRVRDSHSNPRFQIGSIDLYGKTI

SEQ ID NO: 170351 - protein, 302 aa, Zea Mays
MVSSTRVWHNGLGNTQSSERAFNACDATMIQCALVTCGAVIEACHKPANALCLVRILDFTDHVWTECFSNLYGRWMHLDPCEGVYDNPLLYEKGWNKKLNYVIAISKDGVRDVTKRYTRKWHEVLSRRIITSEETVVSVLSSITGKYRTEGNHFPRGNRVCSGSVLASREQLPIGIATAAFDGIHSSKWEEPDGAKGCWLIYTMQDGKSCELESYDLMSANDAPERDPMDWVLEGSADGGSTWNILDARNSEMFESRFLRKTFTVDKRYKANAFRFRFLRVRDSHSNPRFQIGSIDLYGKTI

SEQ ID NO: 170352 - protein, 475 aa, Zea Mays
MVSSTRVWHNGLGNTQSSERAFNACDATMIQCALVTCGAVIEACHKPANALCLVRILDFTDHVWTECFSNLYGRWNKKLNYVIAISKDGVRDVTKRYTRKWHEVLSRRIITSEETVVSVLSSITGKYRTGLSPDALSVIENREKEESEELRKSAYLQVETALSLPGRLSGSVEWRKARSELGQADSLSCSSCPIRKCVDGHVSNIYDALSAFLSHFFDKKIPKERIIEAFEALKTLMLTLKSSNFKSRSATLDQKAHHLFEEIFPSIERLLSAISLKAELGTAGYQSVTVSGNPVHSSLALPVALDAVNEILSNYKNNTFFTEGNHFPRGNRVCSGSVLASREQLPIGIATAAFDGIHSSKWEEPDGAKGCWLIYTMQDGKSCELESYDLMSANDAPERDPMDWVLEGSADGGSTWNILDARNSEMFESRFLRKTFTVDKRYKANAFRFRFLRVRDSHSNPRFQIGSIDLYGKTI

SEQ ID NO: 170353 - protein, 221 aa, Zea Mays
MVSSTRVWHNGLGNTQSSERAFNACDATMIQCALVTCGAVIEACHKPANALCLVRILDFTDHVWTECFSNLYGRWMHLDPCEGVYDNPLLYEKGWNKKLNYVIAISKDGVRDVTKRYTRKWHEVLSRRIITSEETVVSVLSSITGKYRTGLSPDALSVIENREKEESEELRKSAYLQVETALSLPGRLSGSVEWRKARQQQLLTAFTPPNGKSLMEPKDVG

SEQ ID NO: 170354 - protein, 109 aa, Zea Mays
MLGSLVTRLSIPRLSHLMPQQHRGRPSSRCYYLPCYCNHASCAVSLKYSSQVSILCDSSPVRQDFLVKKRFQGYVEKQAPGRCPKCSAKGLNKDHRRLFGLLVDMVIIL

SEQ ID NO: 170355 - protein, 545 aa, Zea Mays
MDPSKILIWNVRGLNASARQDAVRAEVVSSRVDVVCLQETKMQDISRFFVIRMLGPDFANFVFRPSIGASGGILVAWKDHINWSGVSRVDDHSVSILFHPVDDVEWWLTCVYGPQFNQDKIAFLQELRDIRASYSGPWLVLGDFNLIYKDEDKNNSNLDRLMKHSFRRWIDDLALKELPLVGRKYTWSNGQHNPTLVKLDSVFCSLDWDDQFPWALLQSSASFDSDHCPLLLGLKDIVQGKPRFHFEAFWTRLEGFLVAVEEAWAAVPASHCPLLTLSMKLKATAKALQGWGEKKVGHIRSQLGLARELLHQFDLAQDSRSLSPEEFWLRNSLKQHSLALASLWRSLVRMRSRICWLKDGDANTALFHSHARYRKAKSFIPRIVSEDGKVFTAQEEKADLFTNFYMNLLGSAINRGAAVDLEQLGVPTFDLEALDSPFSADEVWNTIISLPLDKAPGPDGFTGRFDKVCWSIIKIDVMAAISCVWARKFANMNCLNSAYITLIPKLEGADKVKDFRPISLIHSFAKLVSKLMANRLACQLQHLVS

SEQ ID NO: 170356 - protein, 518 aa, Zea Mays
MDDAAENILASLGRVHLVDLMASEGLPSDSYKMCVSTLMQSLAQYSAAIIQLSPADGALLRSGLDSARFFFHQRGYNSNEAVHSDDSREWCKTSGYYVDSQMCLEMYDYRPGITATDPSGEMELPPSGLPDIFSVLGKVSRDILDAISFSLNLRSCAFTEILDNIPLRSQEVSSSVLSACCHSRPSLEGGHQHSIASQDNGHLLMFSEQEQQIDKTLLTLVKSDMSGLYIKDLHGHWILVDGDIGPHDVIVYSGLALYQETAGYVNPAVHKTEVGIHGCMFGRCSLMFKFMPRSVARLSGSEMRAAGHGVDAQFQVPIQVNDFMQTDRFSDQLFPKTEPSLHTEQDSASFNSVMNKKKGNTRTKPLPPSKRLRQEAQRVLKERVQDIADKKGVKLRFCNLKECESHILSLDSPCENTRTEIGWPQGVPFVHPHDLPNKAKLGFLEAYEPGWTASQQEMELDNCLRHCEPHPDHSSLFSNQIVLPVHCTLAKSEICVDSALCSALEYQSLQKKTDLDGT

SEQ ID NO: 170357 - protein, 475 aa, Zea Mays
MDDAAENILASLGRVHLVDLMASEGLPSDSYKMCVSTLMQSLAQYSAAIIQLSPADGALLRSGLDSARFFFHQRGYNSNEAVHSDDSREWCKTSGYYVDSQMCLEMYDYRPGITATDPSGEMELPPSGLPDIFSVLGKVSRDILDAISFSLNLRSCAFTEILDNIPLRSQEVSSSVLSACCHSRPSLEGGHQHSIASQDNGHLLMFSEQEQQIDKTLLTLVKSDMSGLYIKDLHGHWILVDGDIGPHDVIVYSGLALYQETAGYVNPAVHKTEVGIHGCMFGRCSLMFKFMPRSVARLSGSEMRAAGHGVDAQFQVPIQVNDFMQTDRFSDQLFPKTEPSLHTEQDSASFNSVMNKKKGNTRTKPLPPSKRLRQEAQRVLKERVQDIADKKGVKLRFCNLKECESHILSLDSPCENTRTEIGWPQGVPFVHPHDLPNKAKLGFLEAYEPGWTASQQEMEEPASVNFDVLPTLDMF

SEQ ID NO: 170358 - protein, 457 aa, Zea Mays
MTEGQSETASAPEGVSGLRRNSDDVGWEYGVLVDLNNKDKRLNKELWKERLHEVHKYIARWAFNHAISFNACDNDEFKQMCEAIGQFGPGIEPPTMLDLRGRLLEEEYARTKSLLQEREAEKMKNGCSSMTDAWSDKKRSIMNWTKQSKTWVRMMWCKLTVNASNNMGAKKLLHVKRPYIFWTSCATHTINLMLQGIGNMPQFKKVIDQAKTFTIFVYGHTRTLECMRHFTEGKEIVRPGVTRFASNYLTLDSIQEKKDQLRKMVVHSRWDSLKDVKSKKGKNAIATILNPSFWKDVKLTLAVFAPLFKVLRLVDGDVKPLMGFVYGKLLKAKRQVKEALGNVENRFKDVVAVIEKKMAGRLDSPLHLTAYLLNPHYNYADPSIFDAPKITEGFISCVETFYYHDDEMQEQAANIKLQKFQNREDPFSKKLARTFENFDCNPGNSCLLIERFFISAL

SEQ ID NO: 170359 - protein, 115 aa, Zea Mays
MYKQGGAGVGAGLDRKRISDALDKHLEKAVASPSTSRGSAGGGGVRDHHRLVVPSSVSSIPKGRCSEVGCTCGRRLVWRLGLRSVDAPAQHMVVDTQFWVAFAEIFVLNMREWNL

SEQ ID NO: 170360 - protein, 114 aa, Zea Mays
MYKQGGAGVGAGLDRKRISDALDKHLEKAVASPSTSRGSAGGGGVRDHHRLVVPSSVSSIPKGRCSEGCTCGRRLVWRLGLRSVDAPAQHMVVDTQFWVAFAEIFVLNMREWNL

SEQ ID NO: 170361 - protein, 280 aa, Zea Mays
MNPYDYPDTGYECTVTVTEIDTSNTWWYPSCTKCGRKTTPHNTTYYCDLCKWDGYKFKYKLKFRASDATAIAQMFCFDNIARYIVGKSCEVILRSTNASTPIPPDLAQIVSLKFTFRVIPDDSSFDNQDQVPIALRIISITAAHGRQHALPLKPTNIIEGTSTPQNKLQLQLIENSPSNPFQNLSTSTPPPKQAARKLIYPPLSNPLTYQHTPKSDGEEEITEQTMDTSQIKGKKYALIRISSKKLQINSITIRNSMPYLSEPLFQVSTGSYYITAFNVY

SEQ ID NO: 170362 - protein, 120 aa, Zea Mays
MALYALVLFYHLFAKELAPHKPLAKFLCIKGIVFFCFWQNTPTYCTALHIFVPGFRARYLSWSRRDQIPPFLAGRGAHPGGHPERAGDPRDGRVFRRPLYGLVRFYPNPYGLRGFQSLRR

SEQ ID NO: 170363 - protein, 100 aa, Zea Mays
MNQVSGRNWGGGGGGGTPCCFSLLSGLPAGNGAPVFSSRMDIHRSLSKGLVVLYVRYSQLGTGRGRLRDPFANKSTVLFYSGRTGLIDSDEVACNYHYHC

SEQ ID NO: 170364 - protein, 113 aa, Zea Mays
MGDRDSKRCRKRCSGNESYSYKEKTKQARQLENTPTYCTALHIFVPGFRARYLSWSRRDQIPPFLAGRGAHPGGHPERAGDPRDGRVFRRPLYGLVRFYPNPYGLRGFQSLRR

SEQ ID NO: 170365 - protein, 71 aa, Zea Mays
MNQVSGRNWGGGGGGGTPCCFSLLSGLPAGNGAPVFSSRMDIHRSLSKVSCCCKITLWACTLNGFLLVLSF

SEQ ID NO: 170366 - protein, 114 aa, Zea Mays
MLLQLFPISLLSPRTLPSSSLSPTSSILGNSFVTTSFYIFIIIHRAIHISSHGFQPKKRNSLTGLLHLFAKQRPLFHGIHLPHQLLDGQHHLLPTRFTLLGFHGESLDHQPGLC

SEQ ID NO: 170367 - protein, 58 aa, Zea Mays
MLSLPLWVFLISRVARHFLHSWMLLRNAMKHWWVNHMIISLNESCCFTNTSISLQLRR

SEQ ID NO: 170368 - protein, 100 aa, Zea Mays
MKFKQLESLVEAEAEVRKEKKKKKSRPTEEDEEQVGVVDHSDNNGEMYARKEKKKKKKKKSRTIERDEEPDNDGEMCSPKRRKSVERSKCLKKSKKQQVA

SEQ ID NO: 170369 - protein, 191 aa, Zea Mays
MPRTTVVESSGCPPLRALTTDILGLVKVVEAHARPAGAAKVVETWGAPDASRAIVAASLADRAADPVLAVARRNGVVELLNPLNGSALAAVKTAGSAPNDSGAEGDPLAALHLFARQTSDSILGTFLACTEKGKASIRSITKENADSGSDVGPSATWDVCNGANVQFCSVDHGESYVIFGGHRSELVGYHI

SEQ ID NO: 170370 - protein, 175 aa, Zea Mays
MRTGKLLGCYIGKCSGSIRSIVRHPELPLIASCGLDSYLRIWDTNTRQLLSAVFLKQHLTTVVLDSHFSVEEPGEMKFKQLESLVEAEAEVRKEKKKKKSRPTEEDEEQVGVVDHSDNNGEMYARKEKKKKKKKKSRTIERDEEPDNDGEMCSPKRRKSVERSKCLKKSKKQQVA

SEQ ID NO: 170371 - protein, 743 aa, Zea Mays
MALDTGTAAGIDEAYEFSAPRFFDFVVEETEEAVRAAESWFEAARSHAPSPFNPRIKESRAEVKLAVLCDFAQAEEPAPEVNKQKEPADEMSGPPAAQEERDESPPSLEFLSATDLSVKSADGGSTSTLKMQTRYPAPPTNVAPASSTCDSSSVNTDARTPKMQVNMCRAGPTAASTNVKRSVMIKGGRDLVGTGKAATAGAEIAQENQAVKRQKLDDGRARQILNVKTKVLPHKARADLAGSEMRRSHEDMRSAKEADPYVSAAELVKKFESGTRELSITHSRCRSHEDAASQRSLRRPKLMLTRPKEPDFQTSQRVRTVKVKSSAEIEEEMLAKIPKFRARPFNKTIAEAPSFPPLPRRTPQIPEFNEFHLKTMERASRYADTCSEVSCADTIQSQNKTLKSRQAKPPQLHTAMRARPPSVKSFQELELEELEKAPKFKAKPLNKRILESKGDIGVFFHPKSQVTAPKKFHFSTDVRLGPPSVADLFDKVFTNSHMVFGKLSLHSECSSNSNRQDVPRRTIPNPFNLQTEERGHLKERQLEAHLLQKKMEEEKARVHKANPYPYTTDYPTMPPKPEPKPCTRPEGFQLESSVRHELEQRRLMEEKQRMESEEAQRRIFKAQPVMKEDPFPLPEKERKPLTEVEQFVLHVDERAVQRSEFDTLIKEKEKTYKRLREENEFAHKIEEEKALKQLRRTMVPHARPLPKFDRPFRPQKSTKQVTRPKSPQLQVDERGARRHALIR

SEQ ID NO: 170372 - protein, 642 aa, Zea Mays
MSGPPAAQEERDESPPSLEFLSATDLSVKSADGGSTSTLKMQTRYPAPPTNVAPASSTCDSSSVNTDARTPKMQVNMCRAGPTAASTNVKRSVMIKGGRDLVGTGKAATAGAEIAQENQAVKRQKLDDGRARQILNVKTKVLPHKARADLAGSEMRRSHEDMRSAKEADPYVSAAELVKKFESGTRELSITHSRCRSHEDAASQRSLRRPKLMLTRPKEPDFQTSQRVRTVKVKSSAEIEEEMLAKIPKFRARPFNKTIAEAPSFPPLPRRTPQIPEFNEFHLKTMERASRYADTCSEVSCADTIQSQNKTLKSRQAKPPQLHTAMRARPPSVKSFQELELEELEKAPKFKAKPLNKRILESKGDIGVFFHPKSQVTAPKKFHFSTDVRLGPPSVADLFDKLSLHSECSSNSNRQDVPRRTIPNPFNLQTEERGHLKERQLEAHLLQKKMEEEKARVHKANPYPYTTDYPTMPPKPEPKPCTRPEGFQLESSVRHELEQRRLMEEKQRMESEEAQRRIFKAQPVMKEDPFPLPEKERKPLTEVEQFVLHVDERAVQRSEFDTLIKEKEKTYKRLREENEFAHKIEEEKALKQLRRTMVPHARPLPKFDRPFRPQKSTKQVTRPKSPQLQVDERGARRHALIR

SEQ ID NO: 170373 - protein, 770 aa, Zea Mays
MALDTGTAAGIDEAYEFSAPRFFDFVVEETEEAVRAAESWFEAARSHAPSPFNPRIKESRAEVKLAVLCDFAQAEEPAPEVNKQKEPADEMSGPPAAQEERDESPPSLEFLSATDLSVKSADGGSTSTLKMQTRYPAPPTNVAPASSTCDSSSVNTDARTPKMQVNMCRAGPTAASTNVKRSVMIKGGRDLVGTGKAATAGAEIAQENQAAWTAEAGSPWRSGRRRPGHQDGGGWVPCCLLVQRGAVDSRADPARRRAEGEILNVKTKVLPHKARADLAGSEMRRSHEDMRSAKEADPYVSAAELVKKFESGTRELSITHSRCRSHEDAASQRSLRRPKLMLTRPKEPDFQTSQRVRTVKVKSSAEIEEEMLAKIPKFRARPFNKTIAEAPSFPPLPRRTPQIPEFNEFHLKTMERASRYADTCSEVSCADTIQSQNKTLKSRQAKPPQLHTAMRARPPSVKSFQELELEELEKAPKFKAKPLNKRILESKGDIGVFFHPKSQVTAPKKFHFSTDVRLGPPSVADLFDKLSLHSECSSNSNRQDVPRRTIPNPFNLQTEERGHLKERQLEAHLLQKKMEEEKARVHKANPYPYTTDYPTMPPKPEPKPCTRPEGFQLESSVRHELEQRRLMEEKQRMESEEAQRRIFKAQPVMKEDPFPLPEKERKPLTEVEQFVLHVDERAVQRSEFDTLIKEKEKTYKRLREENEFAHKIEEEKALKQLRRTMVPHARPLPKFDRPFRPQKSTKQVTRPKSPQLQVDERGARRHALIR

SEQ ID NO: 170374 - protein, 518 aa, Zea Mays
MGFEIAPSLRDVSYILGIPVTGHVVTAEPIGDEAVKRMCLHYLGESPGNGEQLCGLIRLTWLYRNFHQLPEHPTINKIAYSTRAYLLYLVGSTLFPDTMRGFVSPRYLPLLADFGKIREYAWGAAALAHLYRGLSVAVTPNATTQFLGSATLLMAWIYEYLPITQPQQKNQSTLLPRACRWNFGGATRGQRKKVMDWRKVFEQLQFSEVNWNPYKDMNPAIVPEYCIAADNICYSRTWLISFNIKEAYVPDRFARQFGREQGRLHGVPMWTRRTWSKWKDWRTEYAREIEEFHQLVGCHFTPPAETNINSFPLHESSAGQNDAGCSLNISHNFSAMVEDLKNDLPVIGRYLEGNLLPSDVASFLERVSTMIKSYTPPQGSRRKDRVSHGPADPVRSKNPRKRGRHSLFQDSFPHRYLGTPVNIVFDGTIPLLNGGEALKEQVAMDPWRVSQSHLTMTTSSSSLDSSSPESMKRRREGGDEIPITRDTDCLQSGRLCVQLKMFKHRDGVNAEAANPIFR

SEQ ID NO: 170375 - protein, 974 aa, Zea Mays
MYPLHLLQYVLLVPQKGLLIHIPVEDHTSLPFHQLLVLIEITEEMMQEMDYNADRAWYDCEEHTTMFDGDHSMYLGDDNSYKKREAEMPKKLTRRDGSLMTLAQSKKMSQMTADNAQWEDRQLLRSGAVKGTEVQTEFDDEEERKVILLVHDTKPPFLDGRVVFTKQAEPVMPLKDPTSDMAIIARKGSSLVREIREKQSMNKSRQRFWELAGSKLGNILGVEKTAEQVDADTAVVGDQGEINFKEEAKFSQHLKDKAEAVSDFAKSKSLSQQRQYLPIFTVRDDLLQVVRENQVVVVVGETGSGKTTQLTQYLHEDGYTTTGVVGCTQPRRVAAMSVAKRVSEEMETDLGDKVGYAIRFEDVTGPNTIIKYMTDGVLLRETLKDADLDKYRVVVMDEAHERSLNTDVLFGILKKVVARRRDFKLIVTSATLNADKFSKFFGGVPVFHIPGRTFPVNIMFSKTPCEDYVEAAVKQAMTIHITSGLGDILIFMTGQEEIEATCYALAERMEQLISSSTKTIPKLEILPIYSQLPADLQAKIFQKAEEGARKCIVATNIAETSLTVDGIFYVIDTGYGKMKVYNPRMGMDALQVFPVSRAAADQRAGRAGRTGPGTCYRLFTESAYQNEMLPNPVPEIQRTNLGNVVLLLKSLRVENLLDFDFMDPPPQENILNSMYQLWVLGALNNVGGLTEIGWKMVEFPLDPTLAKMLLMGEQLECLDEVLTIVSMLSVPSVFFRPKDRAEESDAAREKFFVPESDHLTLLNVYLQWKSNQYRGDWCNDHFLHVKGLRKAREVRSQLLDILKTLKIPLTSCHMEWDVVRKAICSAYFHNSARLKGIGEYVNCRNGMPCHLHPSSALYGLGYTPDYVVYHELVLTTKEYMQCVTAVDPQWLAEMGPMFFSVKETDTSLLDHKKRQKEEKTAMEEEMEKLRRQQAEAARMEKEKEREKRAKQQQQVAMPGLKKGATYLRPKRMGL

SEQ ID NO: 170376 - protein, 1461 aa, Zea Mays
MHTLCVRFRSTGPPCAPCRLASTPHNRVSTAPGQEANGKPDRPIHSPTLAAGRRHLPGYPTFPVPTPSAGASCFQPPSAHPAPGLPPPAHPCSRPPATGRIPRAARSCSRHRPPQPASVQGTRPHHPPPPPTGSRNLPASRAPGKGRHVTTSRRSAGPLPPSMAHAGRSGTGAQAQGAPRPSSHQVPSKTSAVAAGGSSSAPTPTSAAANAMPSSSAQAPPSEGPDTLADKKRAAGGGSVFKPPPPMVAVAVGSIDEDEKPGPTENDATSLSTTIRSNSLRRYRGSGSDDKTSLNESTVTDEDERAPSPNHQDEPHRQEAHISRSSQGSRPHGTPRGYGYYDDRGSHDKHGDRERSASIGYSNSGRRRYHDDRESHTRRAERERSTSNEYTNKRSRHEHSSRSSRTSARSDWDDGRWEWEDTPRRDYRDNRPGSRRQHPTRSPMLAAASPDARLVSPWLDGNTPRLAASPWDNVSPSPAPIRASGSSKGSSYSHSSGRSHQLTFSSTTSSNIIDADRSPSNPDRNSEITEEMMQEMDYNADRAWYDCEEHTTMFDGDHSMYLGDDNSYKKREAEMPKKLTRRDGSLMTLAQSKKMSQMTADNAQWEDRQLLRSGAVKGTEVQTEFDDEEERKVILLVHDTKPPFLDGRVVFTKQAEPVMPLKDPTSDMAIIARKGSSLVREIREKQSMNKSRQRFWELAGSKLGNILGVEKTAEQVDADTAVVGDQGEINFKEEAKFSQHLKDKAEAVSDFAKSKSLSQQRQYLPIFTVRDDLLQVVRENQVVVVVGETGSGKTTQLTQYLHEDGYTTTGVVGCTQPRRVAAMSVAKRVSEEMETDLGDKVGYAIRFEDVTGPNTIIKYMTDGVLLRETLKDADLDKYRVVVMDEAHERSLNTDVLFGILKKVVARRRDFKLIVTSATLNADKFSKFFGGVPVFHIPGRTFPVNIMFSKTPCEDYVEAAVKQAMTIHITSGLGDILIFMTGQEEIEATCYALAERMEQLISSSTKTIPKLEILPIYSQLPADLQAKIFQKAEEGARKCIVATNIAETSLTVDGIFYVIDTGYGKMKVYNPRMGMDALQVFPVSRAAADQRAGRAGRTGPGTCYRLFTESAYQNEMLPNPVPEIQRTNLGNVVLLLKSLRVENLLDFDFMDPPPQENILNSMYQLWVLGALNNVGGLTEIGWKMVEFPLDPTLAKMLLMGEQLECLDEVLTIVSMLSVPSVFFRPKDRAEESDAAREKFFVPESDHLTLLNVYLQWKSNQYRGDWCNDHFLHVKGLRKAREVRSQLLDILKTLKIPLTSCHMEWDVVRKAICSAYFHNSARLKGIGEYVNCRNGMPCHLHPSSALYGLGYTPDYVVYHELVLTTKEYMQCVTAVDPQWLAEMGPMFFSVKETDTSLLDHKKRQKEEKTAMEEEMEKLRRQQAEAARMEKEKEREKRAKQQQQVAMPGLKKGATYLRPKRMGL

SEQ ID NO: 170377 - protein, 1458 aa, Zea Mays
MHTLCVRFRSTGPPCAPCRLASTPHNRVSTAPGQEANGKPDRPIHSPTLAAGRRHLPGYPTFPVPTPSAGASCFQPPSAHPAPGLPPPAHPCSRPPATGRIPRAARSCSRHRPPQPASVQGTRPHHPPPPPTGSRNLPASRAPGKGRHVTTSRRSAGPLPPSMAHAGRSGTGAQAQGAPRPSSHQVPSKTSAVAAGGSSSAPTPTSAAANAMPSSSAQAPPSEGPDTLADKKRAAGGGSVFKPPPPMVAVAVGSIDEDEKPGPTENDATSLSTTIRSNSLRRYRGSGSDDKTSLNVTDEDERAPSPNHQDEPHRQEAHISRSSQGSRPHGTPRGYGYYDDRGSHDKHGDRERSASIGYSNSGRRRYHDDRESHTRRAERERSTSNEYTNKRSRHEHSSRSSRTSARSDWDDGRWEWEDTPRRDYRDNRPGSRRQHPTRSPMLAAASPDARLVSPWLDGNTPRLAASPWDNVSPSPAPIRASGSSKGSSYSHSSGRSHQLTFSSTTSSNIIDADRSPSNPDRNSEITEEMMQEMDYNADRAWYDCEEHTTMFDGDHSMYLGDDNSYKKREAEMPKKLTRRDGSLMTLAQSKKMSQMTADNAQWEDRQLLRSGAVKGTEVQTEFDDEEERKVILLVHDTKPPFLDGRVVFTKQAEPVMPLKDPTSDMAIIARKGSSLVREIREKQSMNKSRQRFWELAGSKLGNILGVEKTAEQVDADTAVVGDQGEINFKEEAKFSQHLKDKAEAVSDFAKSKSLSQQRQYLPIFTVRDDLLQVVRENQVVVVVGETGSGKTTQLTQYLHEDGYTTTGVVGCTQPRRVAAMSVAKRVSEEMETDLGDKVGYAIRFEDVTGPNTIIKYMTDGVLLRETLKDADLDKYRVVVMDEAHERSLNTDVLFGILKKVVARRRDFKLIVTSATLNADKFSKFFGGVPVFHIPGRTFPVNIMFSKTPCEDYVEAAVKQAMTIHITSGLGDILIFMTGQEEIEATCYALAERMEQLISSSTKTIPKLEILPIYSQLPADLQAKIFQKAEEGARKCIVATNIAETSLTVDGIFYVIDTGYGKMKVYNPRMGMDALQVFPVSRAAADQRAGRAGRTGPGTCYRLFTESAYQNEMLPNPVPEIQRTNLGNVVLLLKSLRVENLLDFDFMDPPPQENILNSMYQLWVLGALNNVGGLTEIGWKMVEFPLDPTLAKMLLMGEQLECLDEVLTIVSMLSVPSVFFRPKDRAEESDAAREKFFVPESDHLTLLNVYLQWKSNQYRGDWCNDHFLHVKGLRKAREVRSQLLDILKTLKIPLTSCHMEWDVVRKAICSAYFHNSARLKGIGEYVNCRNGMPCHLHPSSALYGLGYTPDYVVYHELVLTTKEYMQCVTAVDPQWLAEMGPMFFSVKETDTSLLDHKKRQKEEKTAMEEEMEKLRRQQAEAARMEKEKEREKRAKQQQQVAMPGLKKGATYLRPKRMGL

SEQ ID NO: 170378 - protein, 976 aa, Zea Mays
MYPLHLLQYVLLVPQKGLLIHIPVEDHTSLPFHQLLVLMNSEITEEMMQEMDYNADRAWYDCEEHTTMFDGDHSMYLGDDNSYKKREAEMPKKLTRRDGSLMTLAQSKKMSQMTADNAQWEDRQLLRSGAVKGTEVQTEFDDEEERKVILLVHDTKPPFLDGRVVFTKQAEPVMPLKDPTSDMAIIARKGSSLVREIREKQSMNKSRQRFWELAGSKLGNILGVEKTAEQVDADTAVVGDQGEINFKEEAKFSQHLKDKAEAVSDFAKSKSLSQQRQYLPIFTVRDDLLQVVRENQVVVVVGETGSGKTTQLTQYLHEDGYTTTGVVGCTQPRRVAAMSVAKRVSEEMETDLGDKVGYAIRFEDVTGPNTIIKYMTDGVLLRETLKDADLDKYRVVVMDEAHERSLNTDVLFGILKKVVARRRDFKLIVTSATLNADKFSKFFGGVPVFHIPGRTFPVNIMFSKTPCEDYVEAAVKQAMTIHITSGLGDILIFMTGQEEIEATCYALAERMEQLISSSTKTIPKLEILPIYSQLPADLQAKIFQKAEEGARKCIVATNIAETSLTVDGIFYVIDTGYGKMKVYNPRMGMDALQVFPVSRAAADQRAGRAGRTGPGTCYRLFTESAYQNEMLPNPVPEIQRTNLGNVVLLLKSLRVENLLDFDFMDPPPQENILNSMYQLWVLGALNNVGGLTEIGWKMVEFPLDPTLAKMLLMGEQLECLDEVLTIVSMLSVPSVFFRPKDRAEESDAAREKFFVPESDHLTLLNVYLQWKSNQYRGDWCNDHFLHVKGLRKAREVRSQLLDILKTLKIPLTSCHMEWDVVRKAICSAYFHNSARLKGIGEYVNCRNGMPCHLHPSSALYGLGYTPDYVVYHELVLTTKEYMQCVTAVDPQWLAEMGPMFFSVKETDTSLLDHKKRQKEEKTAMEEEMEKLRRQQAEAARMEKEKEREKRAKQQQQVAMPGLKKGATYLRPKRMGL

SEQ ID NO: 170379 - protein, 803 aa, Zea Mays
MPLKDPTSDMAIIARKGSSLVREIREKQSMNKSRQRFWELAGSKLGNILGVEKTAEQVDADTAVVGDQGEINFKEEAKFSQHLKDKAEAVSDFAKSKSLSQQRQYLPIFTVRDDLLQVVRENQVVVVVGETGSGKTTQLTQYLHEDGYTTTGVVGCTQPRRVAAMSVAKRVSEEMETDLGDKVGYAIRFEDVTGPNTIIKYMTDGVLLRETLKDADLDKYRVVVMDEAHERSLNTDVLFGILKKVVARRRDFKLIVTSATLNADKFSKFFGGVPVFHIPGRTFPVNIMFSKTPCEDYVEAAVKQAMTIHITSGLGDILIFMTGQEEIEATCYALAERMEQLISSSTKTIPKLEILPIYSQLPADLQAKIFQKAEEGARKCIVATNIAETSLTVDGIFYVIDTGYGKMKVYNPRMGMDALQVFPVSRAAADQRAGRAGRTGPGTCYRLFTESAYQNEMLPNPVPEIQRTNLGNVVLLLKSLRVENLLDFDFMDPPPQENILNSMYQLWVLGALNNVGGLTEIGWKMVEFPLDPTLAKMLLMGEQLECLDEVLTIVSMLSVPSVFFRPKDRAEESDAAREKFFVPESDHLTLLNVYLQWKSNQYRGDWCNDHFLHVKGLRKAREVRSQLLDILKTLKIPLTSCHMEWDVVRKAICSAYFHNSARLKGIGEYVNCRNGMPCHLHPSSALYGLGYTPDYVVYHELVLTTKEYMQCVTAVDPQWLAEMGPMFFSVKETDTSLLDHKKRQKEEKTAMEEEMEKLRRQQAEAARMEKEKEREKRAKQQQQVAMPGLKKGATYLRPKRMGL

SEQ ID NO: 170380 - protein, 734 aa, Zea Mays
MHTLCVRFRSTGPPCAPCRLASTPHNRVSTAPGQEANGKPDRPIHSPTLAAGRRHLPGYPTFPVPTPSAGASCFQPPSAHPAPGLPPPAHPCSRPPATGRIPRAARSCSRHRPPQPASVQGTRPHHPPPPPTGSRNLPASRAPGKGRHVTTSRRSAGPLPPSMAHAGRSGTGAQAQGAPRPSSHQVPSKTSAVAAGGSSSAPTPTSAAANAMPSSSAQAPPSEGPDTLADKKRAAGGGSVFKPPPPMVAVAVGSIDEDEKPGPTENDATSLSTTIRSNSLRRYRGSGSDDKTSLNVTDEDERAPSPNHQDEPHRQEAHISRSSQGSRPHGTPRGYGYYDDRGSHDKHGDRERSASIGYSNSGRRRYHDDRESHTRRAERERSTSNEYTNKRSRHEHSSRSSRTSARSDWDDGRWEWEDTPRRDYRDNRPGSRRQHPTRSPMLAAASPDARLVSPWLDGNTPRLAASPWDNVSPSPAPIRASGSSKGSSYSHSSGRSHQLTFSSTTSSNIIDADRSPSNPDRNSEITEEMMQEMDYNADRAWYDCEEHTTMFDGDHSMYLGDDNSYKKREAEMPKKLTRRDGSLMTLAQSKKMSQMTADNAQWEDRQLLRSGAVKGTEVQTEFDDEEERKVILLVHDTKPPFLDGRVVFTKQAEPVMPLKDPTSDMAIIARKGSSLVREIREKQSMNKSRQRFWELAGSKLGNILGVEKTAEQILLLLVTKVRLILKKKQSFHNI

SEQ ID NO: 170381 - protein, 773 aa, Zea Mays
MHTLCVRFRSTGPPCAPCRLASTPHNRVSTAPGQEANGKPDRPIHSPTLAAGRRHLPGYPTFPVPTPSAGASCFQPPSAHPAPGLPPPAHPCSRPPATGRIPRAARSCSRHRPPQPASVQGTRPHHPPPPPTGSRNLPASRAPGKGRHVTTSRRSAGPLPPSMAHAGRSGTGAQAQGAPRPSSHQVPSKTSAVAAGGSSSAPTPTSAAANAMPSSSAQAPPSEGPDTLADKKRAAGGGSVFKPPPPMVAVAVGSIDEDEKPGPTENDATSLSTTIRSNSLRRYRGSGSDDKTSLNVTDEDERAPSPNHQDEPHRQEAHISRSSQGSRPHGTPRGYGYYDDRGSHDKHGDRERSASIGYSNSGRRRYHDDRESHTRRAERERSTSNEYTNKRSRHEHSSRSSRTSARSDWDDGRWEWEDTPRRDYRDNRPGSRRQHPTRSPMLAAASPDARLVSPWLDGNTPRLAASPWDNVSPSPAPIRASGSSKGSSYSHSSGRSHQLTFSSTTSSNIIDADRSPSNPDRNSEITEEMMQEMDYNADRAWYDCEEHTTMFDGDHSMYLGDDNSYKKREAEMPKKLTRRDGSLMTLAQSKKMSQMTADNAQWEDRQLLRSGAVKGTEVQTEFDDEEERKVILLVHDTKPPFLDGRVVFTKQAEPVMPLKDPTSDMAIIARKGSSLVREIREKQSMNKSRQRFWELAGSKLGNILGVEKTAEQVDADTAVVGDQGEINFKEEAKFSQHLKDKAEAVSDFAKSKSLSQQRQYLPIFTVRDDLLQE

SEQ ID NO: 170382 - protein, 328 aa, Zea Mays
MGGLGIHNLEVLGWALNLRWLWLKKTQPERPWADFLFKVHSNVKALFSASVHTTVGDGSRTLFWTDRWIHGQSISVLAPTLVSHITVRIKKSRSVQEALVNNRWVNDISGSLSAQIIFDFLVIWDLVQGFQLHPGIPDVHRWSPSASGDYSTKSAYDRFMAGSVSFEPATRIWKSWAPPRCKFFIWLASLNRCWTADRLSRRGLEHPVRCPLCDQQEETVQHILVACVFARDTWWQTLHKVGLHRLTPGLATTTFQDWWREAECQVPKNQKRGFNSLVILVAWWLWKHRNECVFDGASPNISIIMQHIHEDAVRWGLAGARDLRRLWP

SEQ ID NO: 170383 - protein, 115 aa, Zea Mays
MEDGGGDISRSINHDLRLLREPGVPETTTTTDHASGSSSSVAVPIDLAVGESGAGQGAEAPAEVGQGSSDRKRCNTSKLNYRGPLLQHLLLAASSGACISSLDSELSSYLDSDTL

SEQ ID NO: 170384 - protein, 731 aa, Zea Mays
MEGLTLIDVSVEDDLLFDIASPPHAGSLVGAVATSSGAFPSAAGRAPDPDSVMEEQALPERTDSPEQRKAKKGVNLRKSLAWDSAFFTSEGVLDTEELAIVNSTFRKTQGSRLPGIVEEMSRSGESATSTLESESWVMESVETELFDNVRASIQRSLGKPDKVPGRPVAGSNHPKATANVPRVAVAARKGVDRMPQPKIRAPVSTSQGAGVRQRAQVTTKEPVAARVNLLGAAEAKISSKPPRALPRVAMMRSSTTTAVTSGVSDKRSSTGGAANRQAAGKTASTSAGLRSGGGTKSSSISKSGPFTSAATSHGVSMDTKPEAKTKSATLSNKNRTAQRVPVHPPSKSGISKTIPSRSSGNTIPAKGHADRASPSISPSSSMDSMSSVISGASTASTVGRMSHTSESLNGLSPSLRKSNDCPPTPKLRPPVVTEGHSSGTAAPGVNLKATSEMTNQRKGFKPSGLRRPTPKIGYFDAEKYIDQNIGAQLQPQPSKVQCLPDTTQFQSMNVDAAPATYVQQDSKLTATPHEESCASESKVVKLLPLKVEVEPFKVAEPCTHQTDPVVVRPEAVQQQSMEIQCLLYATPNSQQTFGQQVLEPIVAPHEVSACKSNTVKTPLETVQMEVEAPLEAVQLEAEAFKVDKPEACRHLDKFCDQNARALVAEREDCTLMTEAVVALATDYSKENIPVLHENIQANVDASSLVEVLTQKLSSISLGEDNSNVALRSCSE

SEQ ID NO: 170385 - protein, 626 aa, Zea Mays
MEYISPERNLEGTCGDPGPLFADQGGSLLDHLGYQGGGIPQHESPTLDHGLLVDPAGAIPYLSTDSPPFMNDQITCNVIKSASASPESCTKQPQEPLNVESDVQNDAAEQNVHNSNSEEQITSLGCDVQQNTEVIDELLPPKLPESSGNDISNFQPETTYSDAYHGDSLLTENSCNSYQLNNSGAPAADIPNSPALQMENEEMGKLHETSHNENSGSEDDQMNGRKPCPISGRDNEKFNTSAVPPSWEQTKQKNPGTRNGSSTPDDQFDSPPDRFARLERDTPSPDGRVSPERFARLERDTPPPDGDISRPGESSHVHSETMEMEPEYRANDDTPPPDGRMSPPVESSHVHSKKMESQHHAKDVGELARFESPQVRHRSRSSEKHDPSRKRTSSGELSPHARQNSPVERKRRRESRHGDGSPRQRSASPRRRSTPPRRRSISPRRSSHKRRESPRRGDSPRRRHSPRRRESPRKRDSPRRRDSPRRRDSPKRRRDSPRRRDRSKSRSPSRKHDTSRHKKEHDRSRSRSPHSRDHHRRSPRHSPRRRSPPASHRHHSPRRHWSPPANRKTGLGKPGKNLFIAGFSYATTERDLEKKFCKFGRVTSARVVRDKRTFTSGFCTFSIVAS

SEQ ID NO: 170386 - protein, 109 aa, Zea Mays
MASLQQRKQRKDESGGAHAVADEAVRGTGKGKSEAAPGRRKVTYGFHLVEGRMPHGMEDRHVAEFRKLDDGNEVGLFAVFDGHSGADVATYLREHLFDNILMDQGTCLA

SEQ ID NO: 170387 - protein, 436 aa, Zea Mays
MIVPLEQKLNMLWSFIKRHLNSKTIVFLSSVKQVKFVYEIFKKLRPGIPLKCMHGRMKHVVQQAIVADFNEATSVLFSTDITSRGLDIKNVDWVVQVDCPENIDNYIHRVGRTARYNKKGKSLIFLCPEEEAMLEKLKATESKIPIHIRKELGKRAFVTYLKAVYLQKDKKVFNLSRFSAEQFAAYAASLGLPVTPKIRFISHKKNVSKKDMEDIDMKQMKSSLEHEVTITPKINIDLTLCDGDDDILYPKKPTADANMDDRLDDVLHPKESATDTNVTGLERPFKKKKLKINVNRPSGTRVKYDDEGNAIPPLASVAEEVSLEPVVHKDKISQRYAEMLREMQKHDKEDKLEHKKTLREKKLQKKMKLKRKRQEDTGAGSEEDSGSESDRGQDTANKGKKRYFNSDDEDNDAAKDGDVLAQQEALALKLLSNMHS

SEQ ID NO: 170388 - protein, 225 aa, Zea Mays
MEDIDMKQMKSSLEHEVTITPKINIDLTLCDGDDDILYPKKPTADANMDDRLDDVLHPKESATDTNVTGLERPFKKKKLKINVNRPSGTRVKYDDEGNAIPPLASVAEEVSLEPVVHKDKISQRYAEMLREMQKHDKEDKLEHKKTLREKKLQKKMKLKRKRQEDTGAGSEEDSGSESDRGQDTANKGKKRYFNSDDEDNDAAKDGDVLAQQEALALKLLSNMHS

SEQ ID NO: 170389 - protein, 328 aa, Zea Mays
MLEKLKATESKIPIHIRKPKAEQLEQISQSIASVLVKFPNLQELGKRAFVTYLKAVYLQKDKKVFNLSRFSAEQFAAYAASLGLPVTPKIRFISHKKNVSKKDMEDIDMKQMKSSLEHEVTITPKINIDLTLCDGDDDILYPKKPTADANMDDRLDDVLHPKESATDTNVTGLERPFKKKKLKINVNRPSGTRVKYDDEGNAIPPLASVAEEVSLEPVVHKDKISQRYAEMLREMQKHDKEDKLEHKKTLREKKLQKKMKLKRKRQEDTGAGSEEDSGSESDRGQDTANKGKKRYFNSDDEDNDAAKDGDVLAQQEALALKLLSNMHS

SEQ ID NO: 170390 - protein, 695 aa, Zea Mays
MRRPQRRVAAKQTRLREVDEIRLLNEWIDAGKPLPRTKLLPPSKSAGPVPTAGEHPEYGACTLFDELPLSQKTKDGLRKAGFTEMSEIQRAALPHALCGRDILGAAKTGSGKTLAFVIPLIEKLYRERWGPEDGVGCIILSPTNDLAGQIFEVIKKVGQFHNFSGGVIVGRLVQHFNETANFDCSQLQLLVLDEADQILDHGFRNQVDAIISQIPKVRQTLLFSATQTKSVKDLARVSLRDPEYISVHEEARTATPDTLEQYAMIVPLEQKLNMLWSFIKRHLNSKTIVFLSSVKQVKFVYEIFKKLRPGIPLKCMHGRMKHVVQQAIVADFNEATSVLFSTDITSRGLDIKNVDWVVQVDCPENIDNYIHRVGRTARYNKKGKSLIFLCPEEEAMLEKLKATESKIPIHIRKPKAEQLEQISQSIASVLVKFPNLQELEQFAAYAASLGLPVTPKIRFISHKKNVSKKDMEDIDMKQMKSSLEHEVTITPKINIDLTLCDGDDDILYPKKPTADANMDDRLDDVLHPKESATDTNVTGLERPFKKKKLKINVNRPSGTRVKYDDEGNAIPPLASVAEEVSLEPVVHKDKISQRYAEMLREMQKHDKEDKLEHKKTLREKKLQKKMKLKRKRQEDTGAGSEEDSGSESDRGQDTANKGKKRYFNSDDEDNDAAKDGDVLAQQEALALKLLSNMHS

SEQ ID NO: 170391 - protein, 539 aa, Zea Mays
MGKQLLVLDEADQILDHGFRNQVDAIISQIPKVRQTLLFSATQTKSVKDLARVSLRDPEYISVHEEARTATPDTLEQYAMIVPLEQKLNMLWSFIKRHLNSKTIVFLSSVKQVKFVYEIFKKLRPGIPLKCMHGRMKHVVQQAIVADFNEATSVLFSTDITSRGLDIKNVDWVVQVDCPENIDNYIHRVGRTARYNKKGKSLIFLCPEEEAMLEKLKATESKIPIHIRKPKAEQLEQISQSIASVLVKFPNLQELGKRAFVTYLKAVYLQKDKKVFNLSRFSAEQFAAYAASLGLPVTPKIRFISHKKNVSKKDMEDIDMKQMKSSLEHEVTITPKINIDLTLCDGDDDILYPKKPTADANMDDRLDDVLHPKESATDTNVTGLERPFKKKKLKINVNRPSGTRVKYDDEGNAIPPLASVAEEVSLEPVVHKDKISQRYAEMLREMQKHDKEDKLEHKKTLREKKLQKKMKLKRKRQEDTGAGSEEDSGSESDRGQDTANKGKKRYFNSDDEDNDAAKDGDVLAQQEALALKLLSNMHS

SEQ ID NO: 170392 - protein, 385 aa, Zea Mays
MRRPQRRVAAKQTRLREVDEIRLLNEWIDAGKPLPRTKLLPPSKSAGPVPTAGEHPEYGACTLFDELPLSQKTKDGLRKAGFTEMSEIQRAALPHALCGRDILGAAKTGSGKTLAFVIPLIEKLYRERWGPEDGVGCIILSPTNDLAGQIFELLVLDEADQILDHGFRNQVDAIISQIPKVRQTLLFSATQTKSVKDLARVSLRDPEYISVHEEARTATPDTLEQYAMIVPLEQKLNMLWSFIKRHLNSKTIVFLSSVKQVKFVYEIFKKLRPGIPLKCMHGRMKHVVQQAIVADFNEATSVLFSTDITSRGLDIKNVDWVVQVDCPENIDNYIHRVGRTARYNKKGKSLIFLCPEEEAMLEKLKATESKIPIHIRKVSSRIFCF

SEQ ID NO: 170393 - protein, 360 aa, Zea Mays
MPIRDFMGGSHDSMVTLENRVRGLERVVEEMAREISLSSGRRGGGPALGFDSSPGRSSKHNGFHEYSNSKYGRSGDGRMGFAERYFSADAMASGTKNQSWRPDSEPWDSYAYSGSRSGMNVRRGLDSVSSDNRMARNERSNDQVGPRRGWDKGQGPFRFGEGPSARSAWRASKDEATLEAIRVAGEDNGNSRAAARVAIPELDGEALNDDNQGDERGPLWEAWTRAMDAVHLEDMDSAYAELLSTGDAELLVKLMEQTGPVVDQLSNEVANEVLHAVGQFLMEESLYDVALNWLQQLTDLVMENGSDYLGIPLDAKQDVLLGLHEATAIDLPDDWEGATPLQIMKQLASSWHIDLQQLIN

SEQ ID NO: 170394 - protein, 909 aa, Zea Mays
MATAVSKSAVKSHPRLPTTAQPPPPNPGSNAASAGGGAAPPPPPSPAAGATPSKNAAMAELKSRVLAALAKLSDRDTHHIAVEELDRIIRAPPSTDAVPMLLNALAPDSPGLASPARRECLRLLATLCTSHPDAAASHLHKVLAHLARRLKDPASDTSVRDTCRDVAGQLAAVYLRPLSASGVCEAGNATVTLFVKPLFEVMGEQSKSVQGGAAACLAKAVEGAGPGPGAIGMFGKLGPRICKLLGGQGVQAKAGLLGIMGSLAQVGAISSQNMQQTLQSIRDCLENSDWATRKAAADTLSVFATHSVHLIGDGTAPTIAALEACRFDKVRPVRDSMIDAVQLWKKLTGEDANGKLDSRRSIQRGGKSESFDDSSPDSPSNNVKGSSIAEKAAFLLKKRPTLTDRELNPEFFQKLETRKTDDLAVEVVVPHKTLQSHLRGEDETEEDDDPVGPADSNGSAEDEANLTQMRASFNFQNIRDKWAGQRGNRNKITKARTTDVEDRGEPSTKDSTAAAMNISGEGPFINNKTNWLAIQRQLSHLERQQTSLMNMLQDFMGGSHDSMVTLENRVRGLERVVEEMAREISLSSGRRGGGPALGFDSSPGRSSKHNGFHEYSNSKYGRSGDGRMGFAERYFSADAMASGTKNQSWRPDSEPWDSYAYSGSRSGMNVRRGLDSVSSDNRMARNERSNDQVGPRRGWDKGQGPFRFGEGPSARSAWRASKDEATLEAIRVAGEDNGNSRAAARVAIPELDGEALNDDNQGDERGPLWEAWTRAMDAVHLEDMDSAYAELLSTGDAELLVKLMEQTGPVVDQLSNEVANEVLHAVGQFLMEESLYDVALNWLQQLTDLVMENGSDYLGIPLDAKQDVLLGLHEATAIDLPDDWEGATPLQIMKQLASSWHIDLQQLIN

SEQ ID NO: 170395 - protein, 52 aa, Zea Mays
MSEPMVPVVPTLTVPPSPWTSSVAAQGMVWDWDWDWSWRNGGAADFCSSAQN

SEQ ID NO: 170396 - protein, 669 aa, Zea Mays
MCENEDGDLLIESAVKGIPKVFAVSTLVSVIPAQPYIFRNYQYPPGTLEVSPGMAESPSIGAIGTAVSGAPVGIKRGAFMGSCKHRVWEAIRASSAAPYYLDDFSVDANRWQDGAIVANNPTIFAIREAQLLWPDARIDCLVSIGCGSVPTKSRRGGWRYLDTGQVLIESACSVERVEETLDTLIPMLPEMQYFRFNPVDERCGMELDETDPTIWLKLEAATDEYIQKNFLSVKNLCELLVPRYQEEEKPSDIYKSLSFSRLTSLNQGFSESNPILGWRRVVLLVEASFSPDFGKKINHARSLESFCSQNGIRLALMNSTSGFGKPATALPTPITSPLFTGSFPSSPLLYSPEGTQRISRIDLVPPLSLDGHPTTKSSPPTSPLKSRQPSAHVRSLYDKLQNMPQVGVIHLALQNDSTGSVLSWQNDVFVVAEPGELADRFLQSVKTILSTLLRGCNRKGAYSLSKISCLSELVAEWPSFEIGGIHHRYIGRQTQVMEDNQEIGAYMFRRTVPAVHMAPEDVRWMVGAWRERIIICSGKYGLAHGLVKAFMDCGAKAVISSSIEPPDSKTIVYHGMDVNRSLENGKFVIRDEEADESEPEPVSPISDWEDSDVEKGGNHDVDDEEYLAQFMCLMYDKLFREGVTVDTALQQALRSHPKLKYSCHLPNVL

SEQ ID NO: 170397 - protein, 1318 aa, Zea Mays
MSWGLAWKRSSEIFHLTLNYGDYDDNDDRQPSSPPPPASSSPPASASSTPVYSSSPIATRNGDLGFRIELDWSAGDDEDQVALRLQSQLMVALPPPHDAVSVDLTPRDHGEEEGVRIEMRVVRRREALRSVRVSRAPGSALGSGDGAGVLARLIRSNLAPAPAVDGPTAASGVPVLADHWRPITMVSLCNCGMSMLPVELTRLQFLEKLYLDNNKLSVLPPEVGALKNMKVLSFNNNMLVSVPAVELRQCVMLEELSLEHNKLVRPLLDFRSMPKLRILRLFGNPLEFLPEILPLHNLRHVTLANIRIEAVESLKSVTVQIETENSSYFIAARHKLSAFFSLVFRFSSCHHPLLASALVKIMEDRSNHIAISKEENAVRQLISMISSDNRHVVEQACLAISSLASDISSAMQLIKCDIMKPIEAVLKSSDEEELVSVLQVVVTLTFVSDHVAQKVLTKDVLKSLKALCAHKNSEVQRLSLFAIGNLAFCLETRRILMHSESMCDLLIRLTISQECRVSKAAARALAILGENENLRRAIRGRPVAKKGLRILSMDGGGMKGLATVQMLKQIEQGTGKRIHEMFDLICGTSTGGMLAMALGIKQMTLDQCEEIYTKLGKLVFTEPIPKDEAATWKEKIDQLFKSSSQSFRVVVHGSKHSADQFERLLKEMCENEDGDLLIESAVKGIPKVFAVSTLVSVIPAQPYIFRNYQYPPGTLEVSPGMAESPSIGAIGTAVSGAPVGIKRGAFMGSCKHRVWEAIRASSAAPYYLDDFSVDANRWQDGAIVANNPTIFAIREAQLLWPDARIDCLVSIGCGSVPTKSRRGGWRYLDTGQVLIESACSVERVEETLDTLIPMLPEMQYFRFNPVDERCGMELDETDPTIWLKLEAATDEYIQKNFLSVKNLCELLVPRYQEEEKPSDIYKSLSFSRLTSLNQEASFSPDFGKKINHARSLESFCSQNGIRLALMNSTSGFGKPATALPTPITSPLFTGSFPSSPLLYSPEGTQRISRIDLVPPLSLDGHPTTKSSPPTSPLKSRQPSAHVRSLYDKLQNMPQVGVIHLALQNDSTGSVLSWQNDVFVVAEPGELADRFLQSVKTILSTLLRGCNRKGAYSLSKISCLSELVAEWPSFEIGGIHHRYIGRQTQVMEDNQEIGAYMFRRTVPAVHMAPEDVRWMVGAWRERIIICSGKYGLAHGLVKAFMDCGAKAVISSSIEPPDSKTIVYHGMDVNRSLENGKFVIRDEEADESEPEPVSPISDWEDSDVEKGGNHDVDDEEYLAQFMCLMYDKLFREGVTVDTALQQALRSHPKLKYSCHLPNVL

SEQ ID NO: 170398 - protein, 1049 aa, Zea Mays
MARGCSHASSDPTSRPRLPWMAPQPPRACPCLRITGAPSPWSAYATAECRSMPKLRILRLFGNPLEFLPEILPLHNLRHVTLANIRIEAVESLKSVTVQIEVEQACLAISSLASDISSAMQLIKCDIMKPIEAVLKSSDEEELVSVLQVVVTLTFVSDHVAQKVQRLSLFAIGNLAFCLETRRILMHSESMCDLLIRLTISQECRVSKAAARALAILGENENLRRAIRGRPVAKKGLRILSMDGGGMKGLATVQMLKQIEQGTGKRIHEMFDLICGTSTGGMLAMALGIKQMTLDQCEEIYTKLGDSLLPFEVSLPMPMLPTELLIFLGKLVFTEPIPKDEAATWKEKIDQLFKSSSQSFRVVVHGSKHSADQFERLLKEMCENEDGDLLIESAVKGIPKVFAVSTLVSVIPAQPYIFRNYQYPPGTLEVSPGMAESPSIGAIGTAVSGAPVGIKRGAFMGSCKHRVWEAIRASSAAPYYLDDFSVDANRWQDGAIVANNPTIFAIREAQLLWPDARIDCLVSIGCGSVPTKSRRGGWRYLDTGQVLIESACSVERVEETLDTLIPMLPEMQYFRFNPVDERCGMELDETDPTIWLKLEAATDEYIQKNFLSVKNLCELLVPRYQEEEKPSDIYKSLSFSRLTSLNQGFSESNPILGWRRVVLLVEASFSPDFGKKINHARSLESFCSQNGIRLALMNSTSGFGKPATALPTPITSPLFTGSFPSSPLLYSPEGTQRISRIDLVPPLSLDGHPTTKSSPPTSPLKSRQPSAHVRSLYDKLQNMPQVGVIHLALQNDSTGSVLSWQNDVFVVAEPGELADRFLQSVKTILSTLLRGCNRKGAYSLSKISCLSELVAEWPSFEIGGIHHRYIGRQTQVMEDNQEIGAYMFRRTVPAVHMAPEDVRWMVGAWRERIIICSGKYGLAHGLVKAFMDCGAKAVISSSIEPPDSKTIVYHGMDVNRSLENGKFVIRDEEADESEPEPVSPISDWEDSDVEKGGNHDVDDEEYLAQFMCLMYDKLFREGVTVDTALQQALRSHPKLKYSCHLPNVL

SEQ ID NO: 170399 - protein, 1315 aa, Zea Mays
MSWGLAWKRSSEIFHLTLNYGDYDDNDDRQPSSPPPPASSSPPASASSTPVYSSSPIATRNGDLGFRIELDWSAGDDEDQVALRLQSQLMVALPPPHDAVSVDLTPRDHGEEEGVRIEMRVVRRREALRSVRVSRAPGSALGSGDGAGVLARLIRSNLAPAPAVDGPTAASGVPVLADHWRPITMVSLCNCGMSMLPVELTRLQFLEKLYLDNNKLSVLPPEVGALKNMKVLSFNNNMLVSVPVELRQCVMLEELSLEHNKLVRPLLDFRSMPKLRILRLFGNPLEFLPEILPLHNLRHVTLANIRIEAVESLKSVTVQIETENSSYFIAARHKLSAFFSLVFRFSSCHHPLLASALVKIMEDRSNHIAISKEENAVRQLISMISSDNRHVVEQACLAISSLASDISSAMQLIKCDIMKPIEAVLKSSDEEELVSVLQVVVTLTFVSDHVAQKVQRLSLFAIGNLAFCLETRRILMHSESMCDLLIRLTISQECRVSKAAARALAILGENENLRRAIRGRPVAKKGLRILSMDGGGMKGLATVQMLKQIEQGTGKRIHEMFDLICGTSTGGMLAMALGIKQMTLDQCEEIYTKLGKLVFTEPIPKDEAATWKEKIDQLFKSSSQSFRVVVHGSKHSADQFERLLKEMCENEDGDLLIESAVKGIPKVFAVSTLVSVIPAQPYIFRNYQYPPGTLEVSPGMAESPSIGAIGTAVSGAPVGIKRGAFMGSCKHRVWEAIRASSAAPYYLDDFSVDANRWQDGAIVANNPTIFAIREAQLLWPDARIDCLVSIGCGSVPTKSRRGGWRYLDTGQVLIESACSVERVEETLDTLIPMLPEMQYFRFNPVDERCGMELDETDPTIWLKLEAATDEYIQKNFLSVKNLCELLVPRYQEEEKPSDIYKSLSFSRLTSLNQGFSESNPILGWRRVVLLVEASFSPDFGKKINHARSLESFCSQNGIRLALMNSTSGFGKPATALPTPITSPLFTGSFPSSPLLYSPEGTQRISRIDLVPPLSLDGHPTTKSSPPTSPLKSRQPSAHVRSLYDKLQNMPQVGVIHLALQNDSTGSVLSWQNDVFVVAEPGELADRFLQSVKTILSTLLRGCNRKGAYSLSKISCLSELVAEWPSFEIGGIHHRYIGRQTQVMEDNQEIGAYMFRRTVPAVHMAPEDVRWMVGAWRERIIICSGKYGLAHGLVKAFMDCGAKAVISSSIEPPDSKTIVYHGMDVNRSLENGKFVIRDEEADESEPEPVSPISDWEDSDVEKGGNHDVDDEEYLAQFMCLMYDKLFREGVTVDTALQQALRSHPKLKYSCHLPNVL

SEQ ID NO: 170400 - protein, 1316 aa, Zea Mays
MSWGLAWKRSSEIFHLTLNYGDYDDNDDRQPSSPPPPASSSPPASASSTPVYSSSPIATRNGDLGFRIELDWSAGDDEDQVALRLQSQLMVALPPPHDAVSVDLTPRDHGEEEGVRIEMRVVRRREALRSVRVSRAPGSALGSGDGAGVLARLIRSNLAPAPAVDGPTAASGVPVLADHWRPITMVSLCNCGMSMLPVELTRLQFLEKLYLDNNKLSVLPPEVGALKNMKVLSFNNNMLVSVPAVELRQCVMLEELSLEHNKLVRPLLDFRSMPKLRILRLFGNPLEFLPEILPLHNLRHVTLANIRIEAVESLKSVTVQIETENSSYFIAARHKLSAFFSLVFRFSSCHHPLLASALVKIMEDRSNHIAISKEENAVRQLISMISSDNRHVVEQACLAISSLASDISSAMQLIKCDIMKPIEAVLKSSDEEELVSVLQVVVTLTFVSDHVAQKVQRLSLFAIGNLAFCLETRRILMHSESMCDLLIRLTISQECRVSKAAARALAILGENENLRRAIRGRPVAKKGLRILSMDGGGMKGLATVQMLKQIEQGTGKRIHEMFDLICGTSTGGMLAMALGIKQMTLDQCEEIYTKLGKLVFTEPIPKDEAATWKEKIDQLFKSSSQSFRVVVHGSKHSADQFERLLKEMCENEDGDLLIESAVKGIPKVFAVSTLVSVIPAQPYIFRNYQYPPGTLEVSPGMAESPSIGAIGTAVSGAPVGIKRGAFMGSCKHRVWEAIRASSAAPYYLDDFSVDANRWQDGAIVANNPTIFAIREAQLLWPDARIDCLVSIGCGSVPTKSRRGGWRYLDTGQVLIESACSVERVEETLDTLIPMLPEMQYFRFNPVDERCGMELDETDPTIWLKLEAATDEYIQKNFLSVKNLCELLVPRYQEEEKPSDIYKSLSFSRLTSLNQGFSESNPILGWRRVVLLVEASFSPDFGKKINHARSLESFCSQNGIRLALMNSTSGFGKPATALPTPITSPLFTGSFPSSPLLYSPEGTQRISRIDLVPPLSLDGHPTTKSSPPTSPLKSRQPSAHVRSLYDKLQNMPQVGVIHLALQNDSTGSVLSWQNDVFVVAEPGELADRFLQSVKTILSTLLRGCNRKGAYSLSKISCLSELVAEWPSFEIGGIHHRYIGRQTQVMEDNQEIGAYMFRRTVPAVHMAPEDVRWMVGAWRERIIICSGKYGLAHGLVKAFMDCGAKAVISSSIEPPDSKTIVYHGMDVNRSLENGKFVIRDEEADESEPEPVSPISDWEDSDVEKGGNHDVDDEEYLAQFMCLMYDKLFREGVTVDTALQQALRSHPKLKYSCHLPNVL

SEQ ID NO: 170401 - protein, 1245 aa, Zea Mays
MSWGLAWKRSSEIFHLTLNYGDYDDNDDRQPSSPPPPASSSPPASASSTPVYSSSPIATRNGDLGFRIELDWSAGDDEDQVALRLQSQLMVALPPPHDAVSVDLTPRDHGEEEGVRIEMRVVRRREALRSVRVSRAPGSALGSGDGAGVLARLIRSNLAPAPAVDGPTAASGVPVLADHWRPITMVSLCNCGMSMLPVELTRLQFLEKLYLDNNKLSVLPPEVGALKNMKVLSFNNNMLVSVPVELRQCVMLEELSLEHNKLVRPLLDFRSMPKLRILRLFGNPLEFLPEILPLHNLRHVTLANIRIEAVESLKSVTVQIEVEQACLAISSLASDISSAMQLIKCDIMKPIEAVLKSSDEEELVSVLQVVVTLTFVSDHVAQKVQRLSLFAIGNLAFCLETRRILMHSESMCDLLIRLTISQECRVSKAAARALAILGENENLRRAIRGRPVAKKGLRILSMDGGGMKGLATVQMLKQIEQGTGKRIHEMFDLICGTSTGGMLAMALGIKQMTLDQCEEIYTKLGKLVFTEPIPKDEAATWKEKIDQLFKSSSQSFRVVVHGSKHSADQFERLLKEMCENEDGDLLIESAVKGIPKVFAVSTLVSVIPAQPYIFRNYQYPPGTLEVSPGMAESPSIGAIGTAVSGAPVGIKRGAFMGSCKHRVWEAIRASSAAPYYLDDFSVDANRWQDGAIVANNPTIFAIREAQLLWPDARIDCLVSIGCGSVPTKSRRGGWRYLDTGQVLIESACSVERVEETLDTLIPMLPEMQYFRFNPVDERCGMELDETDPTIWLKLEAATDEYIQKNFLSVKNLCELLVPRYQEEEKPSDIYKSLSFSRLTSLNQGFSESNPILGWRRVVLLVEASFSPDFGKKINHARSLESFCSQNGIRLALMNSTSGFGKPATALPTPITSPLFTGSFPSSPLLYSPEGTQRISRIDLVPPLSLDGHPTTKSSPPTSPLKSRQPSAHVRSLYDKLQNMPQVGVIHLALQNDSTGSVLSWQNDVFVVAEPGELADRFLQSVKTILSTLLRGCNRKGAYSLSKISCLSELVAEWPSFEIGGIHHRYIGRQTQVMEDNQEIGAYMFRRTVPAVHMAPEDVRWMVGAWRERIIICSGKYGLAHGLVKAFMDCGAKAVISSSIEPPDSKTIVYHGMDVNRSLENGKFVIRDEEADESEPEPVSPISDWEDSDVEKGGNHDVDDEEYLAQFMCLMYDKLFREGVTVDTALQQALRSHPKLKYSCHLPNVL

SEQ ID NO: 170402 - protein, 1359 aa, Zea Mays
MSWGLAWKRSSEIFHLTLNYGDYDDNDDRQPSSPPPPASSSPPASASSTPVYSSSPIATRNGDLGFRIELDWSAGDDEDQVALRLQSQLMVALPPPHDAVSVDLTPRDHGEEEGVRIEMRVVRRREALRSVRVSRAPGSALGSGDGAGVLARLIRSNLAPAPAVDGPTAASGVPVLADHWRPITMVSLCNCGMSMLPVELTRLQFLEKLYLDNNKLSVLPPEVGALKNMKVLSFNNNMLVSVPVELRQCVMLEELSLEHNKLVRPLLDFRSMPKLRILRLFGNPLEFLPEILPLHNLRHVTLANIRIEAVESLKSVTVQIETENSSYFIAARHKLSAFFSLVFRFSSCHHPLLASALVKIMEDRSNHIAISKEENAVRQLISMISSDNRHVVEQACLAISSLASDISSAMQLIKCDIMKPIEAVLKSSDEEELVSVLQVVVTLTFVSDHVAQKVLTKDVLKSLKALCAHKNSEVQRLSLFAIGNLAFCLETRRILMHSESMCDLLIRLTISQECRVSKAAARALAILGENENLRRAIRGRPVAKKGLRILSMDGGGMKGLATVQMLKQIEQGTGKRIHEMFDLICGTSTGGMLAMALGIKQMTLDQCEEIYTKLGDSLLPFEVSLPMPMLPTELLIFLGKLVFTEPIPKDEAATWKEKIDQLFKSSSQSFRVVVHGSKHSADQFERLLKEMCENEDGDLLIESAVKGIPKVFAVSTLVSVIPAQPYIFRNYQYPPGTLEVSPGMAESPSIGAIGTAVSGAPVGIKRGAFMGSCKHRVWEAIRASSAAPYYLDDFSVDANRWQDGAIVANNPTIFAIREAQLLWPDARIDCLVSIGCGSVPTKSRRGGWRYLDTGQVLIESACSVERVEETLDTLIPMLPEMQYFRFNPVDERCGMELDETDPTIWLKLEAATDEYIQKNFLSVKNLCELLVPRYQEEEKPSDIYKSLSFSRLTSLNQGFSESNPILGWRRVVLLVEASFSPDFGKKINHARSLESFCSQNGIRLALMNSTSGFGKPATALPTPITSPLFTGSFPSSPLLYSPEGTQRISRIDLVPPLSLDGHPTTKSSPPTSPLKSRQPSAHVRSLYDKLQNMPQVGVIHLALQNDSTGSVLSWQNDVFVVAEPGELADRFLQSVKTILSTLLRGCNRKGAYSLSKISCLSELVAEWPSFEIGGIHHRYIGRQTQVMEDNQEIGAYMFRRTVPAVHMAPEDVRWMVGAWRERIIICSGKYGLAHGLVKAFMDCGAKAVISSSIEPPDSKTIVYHGMDVNRSLENGKFVIRDEEADESEPEPVSPISDWEDSDVEKGGNHDVDDEEYLAQFMCLMYDKLFREGVTVDTALQQALRSHPKLKYSCHLPNVL

SEQ ID NO: 170403 - protein, 1290 aa, Zea Mays
MSWGLAWKRSSEIFHLTLNYGDYDDNDDRQPSSPPPPASSSPPASASSTPVYSSSPIATRNGDLGFRIELDWSAGDDEDQVALRLQSQLMVALPPPHDAVSVDLTPRDHGEEEGVRIEMRVVRRREALRSVRVSRAPGSALGSGDGAGVLARLIRSNLAPAPAVDGPTAASGVPVLADHWRPITMVSLCNCGMSMLPVELTRLQFLEKLYLDNNKLSVLPPEVGALKNMKVLSFNNNMLVSVPAVELRQCVMLEELSLEHNKLVRPLLDFRSMPKLRILRLFGNPLEFLPEILPLHNLRHVTLANIRIEAVESLKSVTVQIEVEQACLAISSLASDISSAMQLIKCDIMKPIEAVLKSSDEEELVSVLQVVVTLTFVSDHVAQKVLTKDVLKSLKALCAHKNSEVQRLSLFAIGNLAFCLETRRILMHSESMCDLLIRLTISQECRVSKAAARALAILGENENLRRAIRGRPVAKKGLRILSMDGGGMKGLATVQMLKQIEQGTGKRIHEMFDLICGTSTGGMLAMALGIKQMTLDQCEEIYTKLGDSLLPFEVSLPMPMLPTELLIFLGKLVFTEPIPKDEAATWKEKIDQLFKSSSQSFRVVVHGSKHSADQFERLLKEMCENEDGDLLIESAVKGIPKVFAVSTLVSVIPAQPYIFRNYQYPPGTLEVSPGMAESPSIGAIGTAVSGAPVGIKRGAFMGSCKHRVWEAIRASSAAPYYLDDFSVDANRWQDGAIVANNPTIFAIREAQLLWPDARIDCLVSIGCGSVPTKSRRGGWRYLDTGQVLIESACSVERVEETLDTLIPMLPEMQYFRFNPVDERCGMELDETDPTIWLKLEAATDEYIQKNFLSVKNLCELLVPRYQEEEKPSDIYKSLSFSRLTSLNQGFSESNPILGWRRVVLLVEASFSPDFGKKINHARSLESFCSQNGIRLALMNSTSGFGKPATALPTPITSPLFTGSFPSSPLLYSPEGTQRISRIDLVPPLSLDGHPTTKSSPPTSPLKSRQPSAHVRSLYDKLQNMPQVGVIHLALQNDSTGSVLSWQNDVFVVAEPGELADRFLQSVKTILSTLLRGCNRKGAYSLSKISCLSELVAEWPSFEIGGIHHRYIGRQTQVMEDNQEIGAYMFRRTVPAVHMAPEDVRWMVGAWRERIIICSGKYGLAHGLVKAFMDCGAKAVISSSIEPPDSKTIVYHGMDVNRSLENGKFVIRDEEADESEPEPVSPISDWEDSDVEKGGNHDVDDEEYLAQFMCLMYDKLFREGVTVDTALQQALRSHPKLKYSCHLPNVL

SEQ ID NO: 170404 - protein, 109 aa, Zea Mays
MLGHFMAPAARTGQEDRKTRPCQPMIYTKGRRACAAELLVRGRGRQKSMMGSPMVRLRSTVHGRLKSLAVMNLKILFTLMLCVALEKKRVAFIALAYALACWEHTNHIC

SEQ ID NO: 170405 - protein, 332 aa, Zea Mays
MAAAGRSDRAASPAPPSATADGARPVVEVAAPAETARRAKIGVYFATWWALNVIFNIYNKKVLNAFPYPWLTSTLSLAAGSAIMLASWATRIAEAPQTDLDFWKALTPVAIAHTIGHVAATVSMAKVAVSFTHIIKSGEPAFSVLVSRFFLGEHFPAPVYFSLLPIIGGCALAAVTELNFNMVGFMGAMISNLAFVVRTIFSKKGMKGKSVSGMNYYACLSIMSLVILLPFAVAMEGPKLWAAGWQQAVAEIGPNFVWWVAAQSVFYHLYNQVSYMSLDEISPLTFSIGNTMKRISVIVASIIIFQTPVQPINALGAAIAILGTFIYSQAKQ

SEQ ID NO: 170406 - protein, 54 aa, Zea Mays
MDEYRASQRQRRSRAGCGFDGEVCDGRHRANCIFGTLNIVFRNIVIQKIYFTKK

SEQ ID NO: 170407 - protein, 159 aa, Zea Mays
MGAAAAAKHALQVVAAGGDAGQSSFSANSPPTTGAGFVALDVGELSSLAGDAGPPGTPIAPPRTPRVVRSLSRKGDRKPADADANATAGTSVQTISGGRERPQLFVHVAAGDLGDAPGSARLVVHTPLAGTPGSKSRRFGRRAAPWLDPRRVVFLFATL

SEQ ID NO: 170408 - protein, 59 aa, Zea Mays
MAMAMAMLAVAGLQSAGRTARVAGFVGPSLRRVAVAELARGLWPLGRRRRLRNSDSSDK

SEQ ID NO: 170409 - protein, 218 aa, Zea Mays
MGAAAAAKHAVVAAGGDAGQSSFSANSPPTTGAGFVALDVGELSSLAGDAGPPGTPIAPPRTPRVVRSLSRKGDRKPADADANATAGGGRERPQLFVHVAAGDLGDAPGSARLVVHTPLAGTPGSKSRRFGRRAAPWLDPRRVVFLFATLPKDTFVSLRQNDGDGDGHARSGRVAERRTDCPRRRFCRPQPPSGCRCRASSGALASRPSSSPSQQRQQ

SEQ ID NO: 170410 - protein, 169 aa, Zea Mays
MGAAAAAKHALQVVAAGGDAGQSSFSANSPPTTGAGFVALDVGELSSLAGDAGPPGTPIAPPRTPRVVRSLSRKGDRKPADADANATAGGGRERPQLFVHVAAGDLGDAPGSARLVVHTPLAGTPGSKSRRFGRRAAPWLDPRRVVFLFATLADSSSGGGGGSGGSDAR

SEQ ID NO: 170411 - protein, 98 aa, Zea Mays
MTFSLLCRKSDLALLHMVPCAPLSRLLDNIQEDVVATGGIDTNAVIFDQSSGQILCTLTGHSKKNRYYGIEMFGSTYRVSSIIDVGTSLLCTRSGTPL

SEQ ID NO: 170412 - protein, 119 aa, Zea Mays
MLHPHGLRRHCPPRIYLRLFRQRRWQGDVWPPPRPQHYPNMTFSLLCRKSDLALLHMVPCAPLSRLLDNIQEDVVATGGIDTNAVIFDQSSGQILCTLTGHSKKNRYYGIEMFGSTYRV

SEQ ID NO: 170413 - protein, 133 aa, Zea Mays
MLHPHGLRRHCPPRIYLRLFRQRRWQGDVWPPPRPQHYPNMTFSLLCRKSDLALLHMVPCAPLSRLLDNIQEDVVATGGIDTNAVIFDQSSGQILCTLTGHSKKITTLKSVPRDQLFATGSADKAISIYHRFK

SEQ ID NO: 170414 - protein, 573 aa, Zea Mays
MAHNLLPVAVVLAVALLMAPAAGYPWLSCGTSSSFAANGTYQDHFNFAAATLPKNASTSPDLFASIVVGTVPEQLSAMALCRGDVNSTTCFSCLTEAFGDLPSACSDDKAATIYYDPCMVHYSDVHTLPGDDDTGPSIDTYPIGDNQYVTADPGQFIRLLAALVNATADYAAYNSTRRFATGQADTGFDPEFPELYALAQCTPDQTPAQCHKCLAGLISQSLGGFQNRDGARMLAVSCTYRYETKPFYNGPAMVRLASPSSGAPAPAPAVNSRVRAADGGRRKYHVPWVAIAVVLPALAAMNLVACLCFRRRRRRLLIAQAKHQNPMYSTEAEDTEMVDSMMMDVSALRAATGDFDESNKLGEGGFGAVYKGVLPDGEEIAVKRLSSSSSQGVQELKNELALVAKLKHRNLVRLIGVCLGQQERLLVYEFLPNRSLDLILFDTENEERGRRRLDWAQRYKIINGVARGLQYLHEDSQLKVVHRDLKASNVLLDENMNPKISDFGLARIFGRGQTQAVTRRVVGTYGYMAPEYMMRGNYSVRSDAFSFGVMVLEVVTGRKNSDDGCNLLATIDR

SEQ ID NO: 170415 - protein, 657 aa, Zea Mays
MANHLVPCAAIVAAVVLLMPCATGYPWPFCHDSDNFKANSSYQAHLDFVAATLPMNASASPDLFATAVVGTVPEQLWAVGLCRGDVNATACFNCLTQAFRDLQNDCSYDKGATIYYDPCMLHYSDNQQLLADDESDLPYFISYNGNVTSDQARFNGLVAELVNATAEHAAYNSTRRFATGESRAGFEPKVYSLAQCTPDLTAARCRTCLEAIISQSLDGFQNLVGGRALWINCTYRYETAPFFDGPAMVQIAPPPSSGAPAPAPTVAPSMQPTSGTPAAVAGGGGRKYSRLPSVVVAAVLAAVTALNLAACLCFWRRRRRTAEEKQTYPMYSTVAEDTDMVDSMMMDASILRAATGDFDESNKLGEGGFGAVYKGVLPDGGEVAVKRLSQGSSRGVEELKNELALVAKLRHKNVVTLVGICLEQQERLLVYEFVANRSLNLIIFDAEKRERLDWRHRHQIINGIARGLQYLHEDSQLKVVHRDLNPSNILLDANMDPKISGFGLARIVGRDQQTQAVVSQGVVGTYGYMAPEYALRGNYSVKSDAFSFGVTVLEIISGRKNSAIYNGGKPDDLLDTVWQHWEAGTVVETVDPCMDGGFPEGDVLRCIHVALLCVQGDPAARPAMSSVVMMLGGDTITLQAPSKPMIFEYYQESPENE

SEQ ID NO: 170416 - protein, 697 aa, Zea Mays
MRHCWSAWLLALCLVSVQLLAPLVCERLLVAAQNLSPPALTPPLVKEVDDVVEHVWISCGLDRGSLEDVRKHFNYNHVFDILRTLSGKDTKDSSPETEDASKALSPEIKNTLLNCLSKHPLVVAAHESAKNLPIDYIKMLFALLRRDVAQGSTGAATTSAPPAAVKSNPSPSLGEPSSTKPDKNPDPPLETTPEEKMVPQTEKTVAKKEDNSNMSITAVIGLSVSAIALLALLCLCNFVCRAKQASSSEVGVDKPPLNQNLSNLSVASLKFSKGNSIDVNKLGALPLKSEAGQNGSRPTTPPSMPPPAPAHPKAPPSSTPQAPASLKAPPSSTPQAPAPLKAPHSSTPETPAPPSKPSSVLHSEPSSPSALKAAPPPKDAPQPKAAPPPPPKSTGPPPPAMSGSSNTRPPPLMKKSGNKMDDGANSHEAKTKLKPFFWDKVTANANQSMVWDHLKSGSFQFNEGKMESLFGYNSVEKIGGDGKKDLLSKDIPQFVRILEPKKAQNLAISLRALSVSPEEVCSAVKEGNELPSDLIDTLLKWIPSNEEELRLRLYTGELSQLGPAEQFLKSIIDIPYIFQRLDALLFMSSLPEETSNVKHAFATLEVACQELKNSRLFLKLLEAVLKTGNRMNVGTFRGGAQAFKLDTLLKLSDVKGTDGKTTLLHFVVEEIIRSEGIRATRAAKDTDGRQRSWMQIN

SEQ ID NO: 170417 - protein, 584 aa, Zea Mays
MAASTGYVPGSRPTTPPSMPPPAPAHPKAPPSSTPQAPASLKAPPSSTPQAPAPLKAPHSSTPETPAPPSKPSSVLHSEPSSPSALKAAPPPKDAPQPKAAPPPPPKSTGPPPPAMSGSSNTRPPPLMKKSGNKMDDGANSHEAKTKLKPFFWDKVTANANQSMVWDHLKSGSFQFNEGKMESLFGYNSVEKIGGDGKKDLLSKDIPQFVRILEPKKAQNLAISLRALSVSPEEVCSAVKEGNELPSDLIDTLLKWIPSNEEELRLRLYTGELSQLGPAEQFLKSIIDIPYIFQRLDALLFMSSLPEETSNVKHAFATLEVACQELKNSRLFLKLLEAVLKTGNRMNVGTFRGGAQAFKLDTLLKLSDVKGTDGKTTLLHFVVEEIIRSEGIRATRAAKDTDGNNMRTEDDYKQLGLKVVSNLSDELQNVRKAAILDADQLTMSVATLGHKLVKTKEFLNTGMRSLDEHSGFHRKLKHFAEQCQTDVSLLQEEEKKIRSLVRGTVDYFHGSTGKDEGLRLFVVVRDFLAMLDKVCKEVKEASKVAPKKTKTAQPSQASFNDPRRKLFPAIQDLRADSSSSDEDD

SEQ ID NO: 170418 - protein, 178 aa, Zea Mays
MKGNKIIYLVRLCVGRHYCWSVVPLRLGFCVYICNHHLYTIQSKTLHCPTWYQTRLRLGFYLSLPNSRRLSLKTSSRRPLLLPSATGTVPGRLILPSRRNIRTLTTLRLRGDIVTPRPLPNRRYFWQLSSIIYCPHRPTRFFCAHFVLTHAHPRKLSGWSTILNCFKPSTLNLKVLLR

SEQ ID NO: 170419 - protein, 53 aa, Zea Mays
MYCEVLLDSAFSLQDGSTRQSTLDVAQQQLPPCPRVVCVAVFFSWKNLIIDGE

SEQ ID NO: 170420 - protein, 371 aa, Zea Mays
MTSPTSHHPDSSTPHAGIGNGNGGNHHLHPPTLTPAPASTPAAPPAHAHGGPQVRLMCSFGGRILPRPGDRQLRYVGGETRIVSFPRAAASFAALVAALAKAAPALFAPGAPRPSLKYQLPQDDLDSLISVTSDDDVDHLVDELDRIHDLSANVARPPRLRVFLFAPAPAPDAAFGSVLSGTAGDAAPSDQWFVDALNAPAPHPIERVRSESSSIVSDVPDYLFSLDSPSDDPSPGPSAARAKSDATETPHHHGDDVPPSARQIPHVAGGASSWPAPPPPYMAQPMYYFPVPPPVHYLDQSAQSGYMPRPIYHIVGGGGSEAPGGDLHAAGGVYGVSHHMQGFPPMMYAPPRAVIYNYKSEGMPSLPPEDA

SEQ ID NO: 170421 - protein, 377 aa, Zea Mays
MTSPTSHHPDSSTPHAGIGNGNGGNHHLHPPTLTPAPASTPAAPPAHAHGGPQVRLMCSFGGRILPRPGDRQLRYVGGETRIVSFPRAAASFAALVAALAKAAPALFAPGAPRPSLKYQLPQDDLDSLISVTSDDDVDHLVDELDRIHDLSANVARPPRLRVFLFAPAPAPDAAFGSVLSGTAGDAAPSDQWFVDALNAPAPHPIERVRSESSSIVSDVPDYLFSLDSPSDDPSPGPSAARAKSDATETPHHHGDDVPPSARQIPHVAGGASSWPAPPPPYMAQPMYYFPVPPPVHYLDQSAQSGYMPRPIYHIVGGGGSEAPGGDLHAAGGVYGVSHHMQGFPPMMYAPPRAVIYNYKSEGMPSLPPEDSAAVQSS

SEQ ID NO: 170422 - protein, 370 aa, Zea Mays
MYGSPVSKDLNVPVQPPMISSGLLRYRSAPSTVLGDLCEDFLPSASGAASPDNVFSRFLAEHHTRDDKPSPPPPAAVHFPSEADMASQQQQQMMFHSHHHQQQQQMVGAKSGLYRTVSSDIETAAAVGTGGASNLIRQSSSPAGFLDHLNMDNGYGAMLRAGMATADSLAGSGSRLKGQLSFSSRQGSLMSQISEMDSEEVGGSSPEAAGGGRGYIPGYPMGSGSGWEDSSALMSDNLSGLKRPRDSSEPGQSVQSRITHQFSLPKTSSEMASIDKFLQFQDAVPCKIRAKRGCATHPRSIAERVRRTKISERIRKLQELVPNMDKQTNTSDMLDLAVDYIKELQKQVKVLKETQANCTCPASKSQQHSC

SEQ ID NO: 170423 - protein, 341 aa, Zea Mays
MYGSPVSKDLNVPVQPPMISSGLLRYRSAPSTVLGDLCEDFLPSASGAASPDNVFSRFLAEHHTRDDKPSPPPPAAVHFPSEADMASQQQQQMMFHSHHHQQQQQMVGAKSGLYRTVSSDIETAAAVGTGGASNLIRQSSSPAGFLDHLNMDNGYGAMLRAGMATADSLAGSGSRLKGQLSFSSRQGSLMSQISEMDSEEVGGSSPEAAGGGRGYIPGYPMGSGSGWEDSSALMSDNLSGLKRPRDSSEPGQDAVPCKIRAKRGCATHPRSIAERVRRTKISERIRKLQELVPNMDKQTNTSDMLDLAVDYIKELQKQVKVLKETQANCTCPASKSQQHSC

SEQ ID NO: 170424 - protein, 371 aa, Zea Mays
MYGSPVSKDLNVPVQPPMISSGLLRYRSAPSTVLGDLCEDFLPSASGAASPDNVFSRFLAEHHTRDDKPSPPPPAAVHFPSEADMASQQQQQMMFHSHHHQQQQQMVGAKSGLYRTVSSDIETAAAVGTGGASNLIRQSSSPAGFLDHLNMDNGYGAMLRAGMATADSLAGSGSRLKGQLSFSSRQGSLMSQISEMDSEEVGGSSPEAAGGGRGYIPGYPMGSGSGWEDSSALMSDNLSGLKRPRDSSEPGQSRITHQFSLPKTSSEMASIDKFLQFQDAVPCKIRAKRGCATHPRSIAERVRRTKISERIRKLQELVPNMDKQTNTSDMLDLAVDYIKELQKQVKNSKASSLGIEKDVRQLSFFFCGFEL

SEQ ID NO: 170425 - protein, 84 aa, Zea Mays
MLTSVRVKCTQPFQLFPGSHLCPVSVRIWVLIHLNWLLKTTPEHYIKKKTSHKSRKPPEPLPVCSSYTQRHHSPCENEPDRSRA

SEQ ID NO: 170426 - protein, 571 aa, Zea Mays
MFSHYKVISRKNRAEDHKCRTRMSRGYHTLSVSVTNSSATQQAHLAWKQLGHMYTYRGPRFPLLGRAACAVSLSFTRFHIIPGVMALAVGKMALAPPVLADSRPFIPRMDGIITKAQDTRQFLSSLVCSIWEGITLLVRAVHLAFLFFPATALAPFADKFSIAFRRRWLSLMRRTLEKAGPAFIKWGQWAATRPDLFPSDLCVELAKLHSAAPAHGFAYSKAAIEKAFGRQLSEIFESFEENPVASGSIAQIHRATLKHQHPGKHVAVKVRHPNVGESIKRDFLLINLVAKASDMVPGLSWLRLDESVRQFAVFMMSQVDLSREAAHLSRFIYNFRRWRHVSFPKPLYPFVHPSVLVETFENGESVSRFMEEIEGNARMKKDLAHIGTYAFLKMLLEDNFIHADMHPGNILVRLNENKLARRRFFRAKPHIVFLDVGMTAELTRSDRDNLQQFFKAVATRDGRTAAKCTLQLSKNQSCPNPVAFTEELDKTFTFWGTPEGDVFHPVECMHELLDTVRRHKVNIDGNICTVMVTILVLEGWQRKLDPGFDIMQTLKTLLLEKDIKQPIDFFS

SEQ ID NO: 170427 - protein, 106 aa, Zea Mays
MVQLERRIVFPLVYRLIELTLLLPVATATVERAFSAMKIIKTELCNKMSWLNDLMVCYIEREIFKRLDLQKIKKAFQNKKTRQTQLPRSPRTGLNYRFYSIYGIWL

SEQ ID NO: 170428 - protein, 107 aa, Zea Mays
MGNMMDNLLVRSLTSKSKGRVDDIAPPSPVKAPDDDETDKAEGEESPMMETVRSKCITQLLLLGAIDSIQVSSFLHFICMLLDLSPSIVSLTMWTGSTFVCDTIEDF

SEQ ID NO: 170429 - protein, 414 aa, Zea Mays
MREVSFMLPPLLSLLLECAKKTDQTVVSISLGALVHLIEVGGHQFSDGDWETLLKSIRDASYTTQPLELLNSLGFHKSNNQQLLSREESNAHGNSYHGSRGEPSIVNNGEHSHAEAGPQTSLENSEGLPSPSGRTQPAVSPRGQSFGQRIMGNMMDNLLVRSLTSKSKGRVDDIAPPSPVKAPDDDETDKAEGEESPMMETVRSKCITQLLLLGAIDSIQKRYWSRLKATQQIAIMDILLSLLEFASSYNSPSNFRTRMHHIPLERPPLNLLRQELVGTTIYLDILHKSTVEQDKIDSIEETNGLNVESGDQEKIKYLAEGKLVSFCGQILKEASVLQPSTGEAASADIHRVLDLRAPVIVKVLKGMCIMDAQIFRRHLKEFYPLITKLICCDQMDVRGALGDLFSKQLTPLMP

SEQ ID NO: 170430 - protein, 699 aa, Zea Mays
MKNQEDGRNQFERAKAHKSTMEAAISEFNRKPSKGIEYLLSNKLVENKASSVAQFLKSNPSLDKVMIGEYLGQHEEFPLAVMHSYVDSMKFIGLKFDAAIRAFLKGFRLPGEAQKIDRIMEKFAERYCADNPELFKNADTAYVLAYAVIMLNTDAHNPMVWPKMSKSDFVRMNTASDAEECVPNELLEEIYDSIVKEEIKMKDDSHDTSKSTKRPETEERGRLVNILNLALPRLKSASDTKAESEKIIKQTQALFKNQGQKKGVFHVAQQVELVRPMLEAVGWPLLATFSVTMEEGDSKPRVVSCMEGFRAGIHLTRVLGMDTMRYAFLTSLVRFTFLHAPKEMRSKNVEALRTLLGLADTDMDALQDTWNAVLECVSRLEYITSNPSISATVMLGSNQISRDSVVQSLKELAGKPAEQIFVNSVKLPSDSIVEFFTALCGVSAEELKQTPARVFSLQKLVEISYYNMARIRLVWARIWSVLAQHFIAAGSHNEEKVAMYAIDSLRQLGMKYLERAELNNFTFQSDILKPFVILMRNTHNSKIRGLIVDCIVQLIKSKVGSIKSGWRCVFMIFTAAADDEDESIVESAFENVEQVILEHFDQVVGDCFMDCVNCLIGFANNKCTPRISLKAIALLRICEDRLAEGFIPGGAIKPIDVVPEANFDVTEHYWFPMLAGLSDLTLDSRPEACWKGWAFFFWG

SEQ ID NO: 170431 - protein, 785 aa, Zea Mays
MTVILRGQIFLNARALSRIAQGSQIADTNSIVSSQTVSVKSSSLQCLVIILKSLADWEQLRRDSSKQGSIVESHEEDASRRLTTDEMKNQEDGRNQFERAKAHKSTMEAAISEFNRKPSKGIEYLLSNKLVENKASSVAQFLKSNPSLDKVMIGEYLGQHEEFPLAVMHSYVDSMKFIGLKFDAAIRAFLKGFRLPGEAQKIDRIMEKFAERYCADNPELFKNADTAYVLAYAVIMLNTDAHNPMVWPKMSKSDFVRMNTASDAEECVPNELLEEIYDSIVKEEIKMKDDSHDTSKSTKRPETEERGRLVNILNLALPRLKSASDTKAESEKIIKQTQALFKNQGQKKGVFHVAQQVELVRPMLEAVGWPLLATFSVTMEEGDSKPRVVSCMEGFRAGIHLTRVLGMDTMRYAFLTSLVRFTFLHAPKEMRSKNVEALRTLLGLADTDMDALQDTWNAVLECVSRLEYITSNPSISATVMLGSNQISRDSVVQSLKELAGKPAEQIFVNSVKLPSDSIVEFFTALCGVSAEELKQTPARVFSLQKLVEISYYNMARIRLVWARIWSVLAQHFIAAGSHNEEKVAMYAIDSLRQLGMKYLERAELNNFTFQSDILKPFVILMRNTHNSKIRGLIVDCIVQLIKSKVGSIKSGWRCVFMIFTAAADDEDESIVESAFENVEQVILEHFDQVVGDCFMDCVNCLIGFANNKCTPRISLKAIALLRICEDRLAEGFIPGGAIKPIDVVPEANFDVTEHYWFPMLAGLSDLTLDSRPEACWKGWAFFFWG

SEQ ID NO: 170432 - protein, 915 aa, Zea Mays
MFSVLLLRFRESLKGEIGVFFPLIVLRSLDSSDSPLSQKASVLRMLEKVCKDPQMLADVFVNYDCDLEGPNLFERTVSALSRIAQGSQIADTNSIVSSQTVSVKSSSLQCLVIILKSLADWEQLRRDSSKQGSIVESHEEDASRRLTTDEMKNQEDGRNQFERAKAHKSTMEAAISEFNRKPSKGIEYLLSNKLVENKASSVAQFLKSNPSLDKVMIGEYLGQHEEFPLAVMHSYVDSMKFIGLKFDAAIRAFLKGFRLPGEAQKIDRIMEKFAERYCADNPELFKNADTAYVLAYAVIMLNTDAHNPMVWPKMSKSDFVRMNTASDAEECVPNELLEEIYDSIVKEEIKMKDDSHDTSKSTKRPETEERGRLVNILNLALPRLKSASDTKAESEKIIKQTQALFKNQGQKKGVFHVAQQVELVRPMLEAVGWPLLATFSVTMEEGDSKPRVVSCMEGFRAGIHLTRVLGMDTMRYAFLTSLVRFTFLHAPKEMRSKNVEALRTLLGLADTDMDALQDTWNAVLECVSRLEYITSNPSISATVMLGSNQISRDSVVQSLKELAGKPAEQIFVNSVKLPSDSIVEFFTALCGVSAEELKQTPARVFSLQKLVEISYYNMARIRLVWARIWSVLAQHFIAAGSHNEEKVAMYAIDSLRQLGMKYLERAELNNFTFQSDILKPFVILMRNTHNSKIRGLIVDCIVQLIKSKVGSIKSGWRCVFMIFTAAADDEDESIVESAFENVEQVILEHFDQVVGDCFMDCVNCLIGFANNKCTPRISLKAIALLRICEDRLAEGFIPGGAIKPIDVVPEANFDVTEHYWFPMLAGLSDLTLDSRPEVRHCALEVLFDLLNERGHKFSSPFWESIFHRVLFPIFDHVRHAGRDGLSSSGDDWLRDTSIHSLQLICNLFNTFYKFI

SEQ ID NO: 170433 - protein, 550 aa, Zea Mays
MLNTDAHNPMVWPKMSKSDFVRMNTASDAEECVPNELLEEIYDSIVKEEIKMKDDSHDTSKSTKRPETEERGRLVNILNLALPRLKSASDTKAESEKIIKQTQALFKNQGQKKGVFHVAQQVELVRPMLEAVGWPLLATFSVTMEEGDSKPRVVSCMEGFRAGIHLTRVLGMDTMRYAFLTSLVRFTFLHAPKEMRSKNVEALRTLLGLADTDMDALQDTWNAVLECVSRLEYITSNPSISATVMLGSNQISRDSVVQSLKELAGKPAEQIFVNSVKLPSDSIVEFFTALCGVSAEELKQTPARVFSLQKLVEISYYNMARIRLVWARIWSVLAQHFIAAGSHNEEKVAMYAIDSLRQLGMKYLERAELNNFTFQSDILKPFVILMRNTHNSKIRGLIVDCIVQLIKSKVGSIKSGWRCVFMIFTAAADDEDESIVESAFENVEQVILEHFDQVVGDCFMDCVNCLIGFANNKCTPRISLKAIALLRICEDRLAEGFIPGGAIKPIDVVPEANFDVTEHYWFPMLAGLSDLTLDSRPEACWKGWAFFFWG

SEQ ID NO: 170434 - protein, 617 aa, Zea Mays
MLNTDAHNPMVWPKMSKSDFVRMNTASDAEECVPNELLEEIYDSIVKEEIKMKDDSHDTSKSTKRPETEERGRLVNILNLALPRLKSASDTKAESEKIIKQTQALFKNQGQKKGVFHVAQQVELVRPMLEAVGWPLLATFSVTMEEGDSKPRVVSCMEGFRAGIHLTRVLGMDTMRYAFLTSLVRFTFLHAPKEMRSKNVEALRTLLGLADTDMDALQDTWNAVLECVSRLEYITSNPSISATVMLGSNQISRDSVVQSLKELAGKPAEQIFVNSVKLPSDSIVEFFTALCGVSAEELKQTPARVFSLQKLVEISYYNMARIRLVWARIWSVLAQHFIAAGSHNEEKVAMYAIDSLRQLGMKYLERAELNNFTFQSDILKPFVILMRNTHNSKIRGLIVDCIVQLIKSKVGSIKSGWRCVFMIFTAAADDEDESIVESAFENVEQVILEHFDQVVGDCFMDCVNCLIGFANNKCTPRISLKAIALLRICEDRLAEGFIPGGAIKPIDVVPEANFDVTEHYWFPMLAGLSDLTLDSRPEVRHCALEVLFDLLNERGHKFSSPFWESIFHRVLFPIFDHVRHAGRDGLSSSGDDWLRDTSIHSLQLICNLFNTFYKFAA

SEQ ID NO: 170435 - protein, 1111 aa, Zea Mays
MLTQMISIVFRRMESEQVSVSPGSSVVKDMPSSITNDSENGEISTDGQDEEKVTLGDALSMNRPSEAPPTSVEELQNLAGGADIKGLEAVLDKAVELEDGKKVSRGIDLDTVNIIQRDALLLFRTLCKMSMKEESDEVATKTRLLSLELLQGLLEGVSNVFIKNFHFIDSVKAYLSYALLRASVSSSPVVFQYACGMFSVLLLRFRESLKGEIGVFFPLIVLRSLDSSDSPLSQKASVLRMLEKVCKDPQMLADVFVNYDCDLEGPNLFERTVSALSRIAQGSQIADTNSIVSSQTVSVKSSSLQCLVIILKSLADWEQLRRDSSKQGSIVESHEEDASRRLTTDEMKNQEDGRNQFERAKAHKSTMEAAISEFNRKPSKGIEYLLSNKLVENKASSVAQFLKSNPSLDKVMIGEYLGQHEEFPLAVMHSYVDSMKFIGLKFDAAIRAFLKGFRLPGEAQKIDRIMEKFAERYCADNPELFKNADTAYVLAYAVIMLNTDAHNPMVWPKMSKSDFVRMNTASDAEECVPNELLEEIYDSIVKEEIKMKDDSHDTSKSTKRPETEERGRLVNILNLALPRLKSASDTKAESEKIIKQTQALFKNQGQKKGVFHVAQQVELVRPMLEAVGWPLLATFSVTMEEGDSKPRVVSCMEGFRAGIHLTRVLGMDTMRYAFLTSLVRFTFLHAPKEMRSKNVEALRTLLGLADTDMDALQDTWNAVLECVSRLEYITSNPSISATVMLGSNQISRDSVVQSLKELAGKPAEQIFVNSVKLPSDSIVEFFTALCGVSAEELKQTPARVFSLQKLVEISYYNMARIRLVWARIWSVLAQHFIAAGSHNEEKVAMYAIDSLRQLGMKYLERAELNNFTFQSDILKPFVILMRNTHNSKIRGLIVDCIVQLIKSKVGSIKSGWRCVFMIFTAAADDEDESIVESAFENVEQVILEHFDQVVGDCFMDCVNCLIGFANNKCTPRISLKAIALLRICEDRLAEGFIPGGAIKPIDVVPEANFDVTEHYWFPMLAGLSDLTLDSRPEVRHCALEVLFDLLNERGHKFSSPFWESIFHRVLFPIFDHVRHAGRDGLSSSGDDWLRDTSIHSLQLICNLFNTFYKFI

SEQ ID NO: 170436 - protein, 912 aa, Zea Mays
MTVILRGQIFLNARALSRIAQGSQIADTNSIVSSQTVSVKSSSLQCLVIILKSLADWEQLRRDSSKQGSIVESHEEDASRRLTTDEMKNQEDGRNQFERAKAHKSTMEAAISEFNRKPSKGIEYLLSNKLVENKASSVAQFLKSNPSLDKVMIGEYLGQHEEFPLAVMHSYVDSMKFIGLKFDAAIRAFLKGFRLPGEAQKIDRIMEKFAERYCADNPELFKNADTAYVLAYAVIMLNTDAHNPMVWPKMSKSDFVRMNTASDAEECVPNELLEEIYDSIVKEEIKMKDDSHDTSKSTKRPETEERGRLVNILNLALPRLKSASDTKAESEKIIKQTQALFKNQGQKKGVFHVAQQVELVRPMLEAVGWPLLATFSVTMEEGDSKPRVVSCMEGFRAGIHLTRVLGMDTMRYAFLTSLVRFTFLHAPKEMRSKNVEALRTLLGLADTDMDALQDTWNAVLECVSRLEYITSNPSISATVMLGSNQISRDSVVQSLKELAGKPAEQIFVNSVKLPSDSIVEFFTALCGVSAEELKQTPARVFSLQKLVEISYYNMARIRLVWARIWSVLAQHFIAAGSHNEEKVAMYAIDSLRQLGMKYLERAELNNFTFQSDILKPFVILMRNTHNSKIRGLIVDCIVQLIKSKVGSIKSGWRCVFMIFTAAADDEDESIVESAFENVEQVILEHFDQVVGDCFMDCVNCLIGFANNKCTPRISLKAIALLRICEDRLAEGFIPGGAIKPIDVVPEANFDVTEHYWFPMLAGLSDLTLDSRPEVRHCALEVLFDLLNERGHKFSSPFWESIFHRVLFPIFDHVRHAGRDGLSSSGDDWLRDTSIHSLQLICNLFNTFYKVACVLPFSCLTNILCIIQNISVMKLVIRYFYRYHIETCLVGHRLTVALTGGILYASTSSQFAA

SEQ ID NO: 170437 - protein, 872 aa, Zea Mays
MLEKVCKDPQMLADVFVNYDCDLEGPNLFERTVSALSRIAQGSQIADTNSIVSSQTVSVKSSSLQCLVIILKSLADWEQLRRDSSKQGSIVESHEEDASRRLTTDEMKNQEDGRNQFERAKAHKSTMEAAISEFNRKPSKGIEYLLSNKLVENKASSVAQFLKSNPSLDKVMIGEYLGQHEEFPLAVMHSYVDSMKFIGLKFDAAIRAFLKGFRLPGEAQKIDRIMEKFAERYCADNPELFKNADTAYVLAYAVIMLNTDAHNPMVWPKMSKSDFVRMNTASDAEECVPNELLEEIYDSIVKEEIKMKDDSHDTSKSTKRPETEERGRLVNILNLALPRLKSASDTKAESEKIIKQTQALFKNQGQKKGVFHVAQQVELVRPMLEAVGWPLLATFSVTMEEGDSKPRVVSCMEGFRAGIHLTRVLGMDTMRYAFLTSLVRFTFLHAPKEMRSKNVEALRTLLGLADTDMDALQDTWNAVLECVSRLEYITSNPSISATVMLGSNQISRDSVVQSLKELAGKPAEQIFVNSVKLPSDSIVEFFTALCGVSAEELKQTPARVFSLQKLVEISYYNMARIRLVWARIWSVLAQHFIAAGSHNEEKVAMYAIDSLRQLGMKYLERAELNNFTFQSDILKPFVILMRNTHNSKIRGLIVDCIVQLIKSKVGSIKSGWRCVFMIFTAAADDEDESIVESAFENVEQVILEHFDQVVGDCFMDCVNCLIGFANNKCTPRISLKAIALLRICEDRLAEGFIPGGAIKPIDVVPEANFDVTEHYWFPMLAGLSDLTLDSRPEVRHCALEVLFDLLNERGHKFSSPFWESIFHRVLFPIFDHVRHAGRDGLSSSGDDWLRDTSIHSLQLICNLFNTFYKFAA

SEQ ID NO: 170438 - protein, 932 aa, Zea Mays
MLEKVCKDPQMLADVFVNYDCDLEGPNLFERTVSALSRIAQGSQIADTNSIVSSQTVSVKSSSLQCLVIILKSLADWEQLRRDSSKQGSIVESHEEDASRRLTTDEMKNQEDGRNQFERAKAHKSTMEAAISEFNRKPSKGIEYLLSNKLVENKASSVAQFLKSNPSLDKVMIGEYLGQHEEFPLAVMHSYVDSMKFIGLKFDAAIRAFLKGFRLPGEAQKIDRIMEKFAERYCADNPELFKNADTAYVLAYAVIMLNTDAHNPMVWPKMSKSDFVRMNTASDAEECVPNELLEEIYDSIVKEEIKMKDDSHDTSKSTKRPETEERGRLVNILNLALPRLKSASDTKAESEKIIKQTQALFKNQGQKKGVFHVAQQVELVRPMLEAVGWPLLATFSVTMEEGDSKPRVVSCMEGFRAGIHLTRVLGMDTMRYAFLTSLVRFTFLHAPKEMRSKNVEALRTLLGLADTDMDALQDTWNAVLECVSRLEYITSNPSISATVMLGSNQISRDSVVQSLKELAGKPAEQIFVNSVKLPSDSIVEFFTALCGVSAEELKQTPARVFSLQKLVEISYYNMARIRLVWARIWSVLAQHFIAAGSHNEEKVAMYAIDSLRQLGMKYLERAELNNFTFQSDILKPFVILMRNTHNSKIRGLIVDCIVQLIKSKVGSIKSGWRCVFMIFTAAADDEDESIVESAFENVEQVILEHFDQVVGDCFMDCVNCLIGFANNKCTPRISLKAIALLRICEDRLAEGFIPGGAIKPIDVVPEANFDVTEHYWFPMLAGLSDLTLDSRPEVRHCALEVLFDLLNERGHKFSSPFWESIFHRVLFPIFDHVRHAGRDGLSSSGDDWLRDTSIHSLQLICNLFNTFYKVACVLPFSCLTNILCIIQNISVMKLVIRYFYRYHIETCLVGHRLTVALTGGILYASTSSQFAA

SEQ ID NO: 170439 - protein, 1112 aa, Zea Mays
MLTQMISIVFRRMESEQVSVSPGSSVVKDMPSSITNDSENGEISTDGQDEEKVTLGDALSMNRPSEAPPTSVEELQNLAGGADIKGLEAVLDKAVELEDGKKVSRGIDLDTVNIIQRDALLLFRTLCKMSMKEESDEVATKTRLLSLELLQGLLEGVSNVFIKNFHFIDSVKAYLSYALLRASVSSSPVVFQYACGMFSVLLLRFRESLKGEIGVFFPLIVLRSLDSSDSPLSQKASVLRMLEKVCKDPQMLADVFVNYDCDLEGPNLFERTVSALSRIAQGSQIADTNSIVSSQTVSVKSSSLQCLVIILKSLADWEQLRRDSSKQGSIVESHEEDASRRLTTDEMKNQEDGRNQFERAKAHKSTMEAAISEFNRKPSKGIEYLLSNKLVENKASSVAQFLKSNPSLDKVMIGEYLGQHEEFPLAVMHSYVDSMKFIGLKFDAAIRAFLKGFRLPGEAQKIDRIMEKFAERYCADNPELFKNADTAYVLAYAVIMLNTDAHNPMVWPKMSKSDFVRMNTASDAEECVPNELLEEIYDSIVKEEIKMKDDSHDTSKSTKRPETEERGRLVNILNLALPRLKSASDTKAESEKIIKQTQALFKNQGQKKGVFHVAQQVELVRPMLEAVGWPLLATFSVTMEEGDSKPRVVSCMEGFRAGIHLTRVLGMDTMRYAFLTSLVRFTFLHAPKEMRSKNVEALRTLLGLADTDMDALQDTWNAVLECVSRLEYITSNPSISATVMLGSNQISRDSVVQSLKELAGKPAEQIFVNSVKLPSDSIVEFFTALCGVSAEELKQTPARVFSLQKLVEISYYNMARIRLVWARIWSVLAQHFIAAGSHNEEKVAMYAIDSLRQLGMKYLERAELNNFTFQSDILKPFVILMRNTHNSKIRGLIVDCIVQLIKSKVGSIKSGWRCVFMIFTAAADDEDESIVESAFENVEQVILEHFDQVVGDCFMDCVNCLIGFANNKCTPRISLKAIALLRICEDRLAEGFIPGGAIKPIDVVPEANFDVTEHYWFPMLAGLSDLTLDSRPEVRHCALEVLFDLLNERGHKFSSPFWESIFHRVLFPIFDHVRHAGRDGLSSSGDDWLRDTSIHSLQLICNLFNTFYKFAA

SEQ ID NO: 170440 - protein, 86 aa, Zea Mays
MKNQEDGRNQFERAKAHKSTMEAAISEVMIGEYLGQHEEFPLAVMHSYVDSMKFIGLKFDAAIRAFLKGFRLPGEAQKIDRIMEKF

SEQ ID NO: 170441 - protein, 462 aa, Zea Mays
MLTQMISIVFRRMESEQVSVSPGSSVVKDMPSSITNDSENGEISTDGQDEEKVTLGDALSMNRPSEAPPTSVEELQNLAGGADIKGLEAVLDKAVELEDGKKVSRGIDLDTVNIIQRDALLLFRTLCKMSMKEESDEVATKTRLLSLELLQGLLEGVSNVFIKNFHFIDSVKAYLSYALLRASVSSSPVVFQYACGMFSVLLLRFRESLKGEIGVFFPLIVLRSLDSSDSPLSQKASVLRMLEKVCKDPQMLADVFVNYDCDLEGPNLFERTVSALSRIAQGSQIADTNSIVSSQTVSVKSSSLQSLADWEQLRRDSSKQGSIVESHEEDASRRLTTDEMKNQEDGRNQFERAKAHKSTMEAAISEFNRKPSKGIEYLLSNKLVENKASSVAQFLKSNPSLDKVMIGEYLGQHEEFPLAVMHSYVDSMKFIGLKFDAAIRAFLKGFRLPGEAQKIDRIMEKF

SEQ ID NO: 170442 - protein, 53 aa, Zea Mays
MTARTGGLSLLFVTLYLYRFRSCSEALQPCTAAPCCVVAGERRLVDPSWSCCC

SEQ ID NO: 170443 - protein, 201 aa, Zea Mays
MAAMVRGPAMASAAGPGATSSAAAAAAAAAEEMRWRQLDSGVSAVSFGFVATAILVSMFLAMAILEHFLRPPTTAHAPPRGRGVLRRLRLFLLGRSGGAPGGTDLEAARKLHGHAPLEKNLHSSLHRERATKDWGLESTRKENTSYGVAEKEIRRTAANRQGPILVCSHTEIWSRSLGIASLVVHRTTATQGPSAVIILAA

SEQ ID NO: 170444 - protein, 298 aa, Zea Mays
MGNCVASGGATTVTAAGEDGRRRGRRWKAPREEQLGSVPGRIFSNDGRSRTAAVFTQQGRKGVNQDGHGPHGHLVARRVRDALPLKLMAAVRESKPGLDMAAAAWRKAFARAYKAMDKDLRSHATLDCFCSGSTAVTVLKLGSDLYMANIGDSRAVLGSRDGGGMVAVQLTVDLKPDVPSEAERIKKCRGRVFALQDEPEVPRVWLPFDDAPGLAMARAFGDFCLKDYGVISVPEFFHWSLTEKDQFVILASDGIMISQLNTILRCTVTTCDLLLSAVLQLLNLFRVQLERANWFSHL

SEQ ID NO: 170445 - protein, 319 aa, Zea Mays
MGNCVASGGATTVTAAGEDGRRRGRRWKAPREEQLGSVPGRIFSNDGRSRTAAVFTQQGRKGVNQDAMLVWDGFGGEEDVVLCGVFDGHGPHGHLVARRVRDALPLKLMAAVRESKPGLDMAAAAWRKAFARAYKAMDKDLRSHATLDCFCSGSTAVTVLKLGSDLYMANIGDSRAVLGSRDGGGMVAVQLTVDLKPDVPSEAERIKKCRGRVFALQDEPEVPRVWLPFDDAPGLAMARAFGDFCLKDYGVISVPEFFHWSLTEKDQFVILASDGIMISQLNTILRCTVTTCDLLLSAVLQLLNLFRVQLERANWFSHL

SEQ ID NO: 170446 - protein, 352 aa, Zea Mays
MLYSRVNSTYPISSSLPTLLSARPPHPGDRCVLRFEGRPSHAPVCCSSALRSPFQRSALRHRSAAVHPFPSSPEPPLPRPVSTSRPVSNNCIRPSSCKMVLCQGVSVGNAQLLAFPGRSSSLKSTQFLVKTNHFPARALRVGTDSIHHAMPTSSPRENSVRGIPSLSRQHNQHPRSVSCQASSLASFSYPELTSKPRWWWRTLACVPYLLPLHNMWSYADVIYQLHTYLQGFSLLYTFIDTMTLCPGWLFLVIFMTVYFFVVRRKWSPHFLRFHVILAILLDTGSQAVATMCTWMPSIVYQGKPMQYLWMSIAFIQIFTVLECLRCALCGMYPNVPFISHTAFIHSDLNLFR

SEQ ID NO: 170447 - protein, 414 aa, Zea Mays
MGNCCVTPNGAADAGGGKKPKEPKQKKGKKPNPFSIEYNRSTPASAPRLVVLREPTGRDIAERYELGAELGRGEFGVTYLCTDRASGEALACKSISKKKLRTPVDVEDVRREVEIMRHLPKHPNIVTLRDTYEDDNAVHLVMELCEGGELFDRIVARGHYTERAAALVTRTIVEVVQMCHKHGVMHRDLKPENFLFANKKESAALKAIDFGLSVFFTPGERFTEIVGSPYYMAPEVLKRNYGPEVDVWSAGVILYILLCGVPPFWAESEQGVAQAIIRSVIDFKRDPWPRVSDNAKDLVRGMLNPDPKRRLTAQQVLDHPWLQNIKKAPNVNLGETVKARLQQFSVMNKFKKHALRVIAEHLSVEEAADIKDMFEKMDLNKDQMLNFDELKLGLHKFGHQIPDADVQILMEAVS

SEQ ID NO: 170448 - protein, 346 aa, Zea Mays
MQRRRAREQRLHRRRGRRARPDPVGGGRADGAHVADAVPAAGADGRHPGLPHGAVEPPVPHRLPHQRVRRLRGPLQQPADGRHPGGVRRPAQPPVAGPPAQPADGPHPGGAGAGAVPVAGPVLQPAHGPHPARRRARRDQHRRPLPQQAHRRPLPPVRRRPAHRQGGPVVELPQLRPQQAGVPAGAHVPGPVPQPHPRHRAAVAGAPVHAAEAGPQLQPPVRPAPQGPRRHQARVQAVRAQPVQQRDPARGMPGPGVSEPVAMVFYTLLCSPSPAFFSCPNLEGRRYGAWFSYRQKKVRPRGGGANMLSHAHARLIFEQLSVYEMTAVYVYCLVECAVYLVSIRSA

SEQ ID NO: 170449 - protein, 1515 aa, Zea Mays
MDRIRDGRRGGVSVGGVPPPPPPRRRLRSNGGGGPRDSPRSERRRGERLMLNGGGGCASRDDGDDISDESLGDDDDDAEQELVPRYHQQRRSPSTAPPPSSPPPPGGGHHSSSSSGGGGYHNHHHGQHHQMQWKGGSNPIVSKAVDEMIGVPVPRKARSASTKRSSHEWPVPGGGTSGGSTGAGDGSQIQRPLSRPISPASASTTVPARKKLKPLGGGSSGGPGQASKQRPSPSPAPSTTPPQPPPPKMSKSPSFIQEEIEVAEVLFGLTRQFSCPPKQEVNHKLDPRDVPESKCGNSSSAPSSGARPSDSTSLSAIAPKRKKPRLAKYDEDSRPASPTKPELVEPSSKPEPPPVARSEAKMATSAATESGTSTAPAAVQLETLRKPEKTEDSELRPSEPDRRNHSLESQAELPASLPAPSVKPDAEAKPAPPPGKLSDDIDASSDPDADKKGLDSEMDMLGRGNSEKKDGERTLGGLDIDLEDQKVQRIPADESTPKKLTLQLDLEKPSLGDEKSPSQRRQPHQHPQQLQQLKPSKAEIKHEKSAMPAVTPPIPIPVGGWLGNFPPFGYLSPVPGLSGAGLHHPMDVKPGSSSGLQHAALLPPPTRSKRCATHCYIAQFIQHQQRVAKMNSFWPPAVAAAAAAANRSGPLFGARPFSMGVVPPTDAASMLVNPMQGSYPIRAHTPMQEAKAPMATSFQGSLSKDKALGNAAGPESSQRKQPPAHETQQSTPMPNMLQALAFIFPFNQQHAMVAAANAANRAGDAKSSGASNAMPPSASAHTLAANSGATAMNLSFANLQPADAQFLAILQNGYQFQVAAHPGGPPYRGMAPPGPAVPFINGHVYSSPMLHPSQQQGAQPQSHQKTQLPNLPSSSQKHQPQHSQGLLGYAPNANAAAAASNSHNYSSGNQRPVLAHRQESDKTGEDGLSSDDKPSHSQKSGYEHNFAVPVHLPNFAMMPAAQPAGSQSEKKLSDHHHQQQQPQVSRGQGVRIDLASSQPFVMPFGSIGPPGSAPSGLDFSALAQSHAFLQSHQEAARHGYPQLNFAAAQSTQHKPQHGETKSVAGDSSLTHIAGDSQRKKSTSTKYSGDSQQHSLSFTRTESKNHVPPFLSGSTNESSSRTLSLIGTESSNTFMGSKSTNSTTPASTPPAASSSISQQHQHFLQMQVQHKHQHQQMIQHHHLNRPRSAAPSTQNSAGGYPDRLNMASFQNMMYPPNAAQGQGRVQSPQLKASSGRGTPSSTATTPPAAAPPNLIVMKTSSLHPQQAKIPMQALSTPGHQSQSSLSMSSSKMAPVTNLSTGGGDLSRSSNAPVASGSPSNSVSKSTGGSPPATGNAKGVQQPVQLPSPQQQLAKNSVSTCGSKSTPANHFSMAMPSILGQQPNSSPGSNTGSKQQSHMSSSMKQQPFPQGHFFISSTYAPQAPGAGGAAALGLYQKRPGDKTQPQAPHQQNALSAAAGSNMKSLHPSSGGFMHLAAATQSAGGGMPHTHMPAAQLSFGTMPVPLKPSSDQKPAAGK

SEQ ID NO: 170450 - protein, 1507 aa, Zea Mays
MDRIRDGRRGGVSVGGVPPPPPPRRRLRSNGGGGPRDSPRSERRRGERLMLNGGGGCASRDDGDDISDESLGDDDDDAEQELVPRYHQQRRSPSTAPPPSSPPPPGGGHHSSSSSGGGGYHNHHHGQHHQMQWKGGSNPIVSKAVDEMIGVPVPRKARSASTKRSSHEWPVPGGGTSGGSTGAGDGSQIQRPLSRPISPASASTTVPARKKLKPLGGGSSGGPGQASKQRPSPSPAPSTTPPQPPPPKMSKSPSFIQEEIEVAEVLFGLTRQFSCPPKQEVNHKLDPRDVPESKCGNSSSAPSSGARPSDSTSLSAIAPKRKKPRLAKYDEDSRPASPTKPELVEPSSKPEPPPVARSEAKMATSAATESGTSTAPAAVQLETLRKPEKTEDSELRPSEPDRRNHSLESQAELPASLPAPSVKPDAEAKPAPPPGKLSDDIDASSDPDADKKGLDSEMDMLGRGNSEKKDGERTLGGLDIDLEDQKVQRIPADESTPKKLTLQLDLEKPSLGDEKSPSQRRQPHQHPQQLQQLKPSKAEIKHEKSAMPAVTPPIPIPVGGWLGNFPPFGGLVSEGAVLCLGSYLSPVPGLSGAGLHHPMDVKPGSSSGLQHAALLPPPTRSKRCATHCYIAQFIQHQQRVAKMNSFWPPAVAAAAAAANRSGPLFGARPFSMGVVPPTDAASMLVNPMQGSYPIRAHTPMQEAKAPMATSFQGSLSKDKALGNAAGPESSQRKQPPAHETQQSTPMPNMLQALAFIFPFNQQHAMVAAANAANRAGDAKSSGASNAMPPSASAHTLAANSGATAMNLSFANLQPADAQFLAILQNGYQFQVAAHPGGPPYRGMAPPGPAVPFINGHVYSSPMLHPSQQQGAQPQSHQKTQLPNLPSSSQKHQPQHSQGLLGYAPNANAAAAASNSHNYSSGNQRPVLAHRQESDKTGEDGLSSDDKPSHSQKSGYEHNFAVPVHLPNFAMMPAAQPAGSQSEKKLSDHHHQQQQPQVSRGQGVRIDLASSQPFVMPFGSIGPPGSAPSGLDFSALAQSHAFLQSHQEAARHGYPQLNFAAAQSTQHKPQHGETKSVAGDSSLTHIAGDSQRKKSTSTKYSGDSQQHSLSFTRTESKNHVPPFLSGSTNESSSRTLSLIGTESSNTFMGSKSTNSTTPASTPPAASSSISQQHQHFLQMQVQHKHQHQQMIQHHHLNRPRSAAPSTQNSAGGYPDRLNMASFQNMMYPPNAAQGQGRVQSPQLKASSGRGTPSSTATTPPAAAPPNLIVMKTSSLHPQQAKIPMQALSTPGHQSQSSLSMSSSKMAPVTNLSTGGGDLSRSSNAPVASGSPSNSVSKSTGGSPPATGNAKGVQQPVQLPSPQQQLAKNSVSTCGSKSTPANHFSMAMPSILGQQPNSSPGSNTGSKQQSHMSSSMKQQPFPQGHFFISSTYAPQAPGAGGAAALGLYQKRPGDKTQPQAPHQQNALSAATQSAGGGMPHTHMPAAQLSFGTMPVPLKPSSDQKPAAGK

SEQ ID NO: 170451 - protein, 87 aa, Zea Mays
MHLLPSPSVKGSRLANLYSVSPAQTPVKVQKSGPGARAGRVPLRWSRRCVPVAAPPAGRCGAVVHGESVRRPAWVNCVRAGVIDCRS

SEQ ID NO: 170452 - protein, 108 aa, Zea Mays
MHLLPSPSVKGSRLANLYSVSPAQTPVKVQKSGPGARAGRVPLRWSRRCVPVAAPPAGRCGAVVHGESVRRPAWVNCVRAGVIDCVSETGVLCVSVCVCSGLSESKRS

SEQ ID NO: 170453 - protein, 182 aa, Zea Mays
MVSLRFPTAAIPRLPPSQAPNGVAIAATVAAAAAAAAAVAASLTLTGKSTGRPVPHPAPLWASLSLADAAAPSSVEPRTGATFPTEAAVGRRLLGIGLRKTSVLGLKSIDVYAFGVYADDNDLKQQLKEKYSKFSVSELKGNAHLRRVWEVGFRSSVDKTPKSCFRALLRFSRMNTNYQRGL

SEQ ID NO: 170454 - protein, 140 aa, Zea Mays
MLNDTLMLAVAALNPEALYTSKMARKPKFQHAVTMAIKKLSSSSSKASAAIDQYSFFRKQARLFGGEEAKDSALNGRASAGGGDDEDGEPSGPCFAARTQPKLATDQYNGPGQDEQAAPLRPRSKRQKKLSIKGLYMLQK

SEQ ID NO: 170455 - protein, 90 aa, Zea Mays
MASADWENCKWAGEEDHEFAYDCLTKNKWWSDMEKVLKAVSPIYPVLRLAYQQKSVSISSFLPKMMSAMAKIRSNLGDDPINKNLCDRLM

SEQ ID NO: 170456 - protein, 149 aa, Zea Mays
MTKQFCNRWQTRIASSDLYVVPVRTPSAMAHPMYGSGPLRSRNAANSDEIQLRIDPVHGDLDEEIDGLQSRVRMLKGVAQEINSEAKSQNDFLHELQMTLAKAQAGVKNNMRRLNKSIIQQGSNHVLHVVLFALFCFFIVYLLSKFSRR

SEQ ID NO: 170457 - protein, 122 aa, Zea Mays
MTKQFCNRWQACHTQACKMSRPRLVSSSLPRDIRPESRAAICTSSPFARLARWRTRCTAPGHSDPGTRRTRTKSSCGSTRCTGTSTRRSTGCNPGSACSKGGFVLFKALLLQALLYYRWPRR

SEQ ID NO: 170458 - protein, 100 aa, Zea Mays
MTKQFCNRWQIRPESRAAICTSSPFARLARWRTRCTAPGHSDPGTRRTRTKSSCGSTRCTGTSTRRSTGCNPGSACSKGGFVLFKALLLQALLYYRWPRR

SEQ ID NO: 170459 - protein, 104 aa, Zea Mays
MSQYLCIGRFSATSFQVLGHMKTVCVLILGWILFDSALTVKNILGMLLAVMGMVVYSWAVEAEKKAAAPIPRNKGGMLDGEDVPLKARVSGVPAVDLEDGDVKG

SEQ ID NO: 170460 - protein, 174 aa, Zea Mays
MCPPPTRRNAPCVVSFLAVLSSLPPYLPPRPSLHALHFIPDADADDSGRSPRRTRARSHFLTTPSPARLPVTVSPLRSRSSSSCRMYRAKRAASLRAKRQRLGKYELGCTIGEGTFAKVRIAKNMDTGDHVAIKILDKAKVHKNKLAEQIRREIYTMKLIQHPNVVRLYEGMGS

SEQ ID NO: 170461 - protein, 178 aa, Zea Mays
MCPPPTRRNAPCVVSFLAVLSSLPPYLPPRPSLHALHFIPDADADDSGRSPRRTRARSHFLTTPSPARLPVTVSPLRSRSSRPVGERRDPTDFFPCMPANSEHVATQPLFIDLAAAVGCTGLRELLRSERSASALASTSSDAPSGKGHLPRSGSPRTWTLGIMLPSRSSTRPRFTRIN

SEQ ID NO: 170462 - protein, 153 aa, Zea Mays
MCPPPTRRNAPCVVSFLAVLSSLPPYLPPRPSLHALHFIPDADADDSGRSPRRTRARSHFLTTPSPARLPVTVSPLRSRSSSSCRMYRAKRAASLRAKRQRLGKYELGCTIGEGTFAKVRIAKNMDTGDHVAIKILDKAKVHKNKLAEQGMGS

SEQ ID NO: 170463 - protein, 173 aa, Zea Mays
MCPPPTRRNAPCVVSFLAVLSSLPPYLPPRPSLHALHFIPDADADDSGRSPRRTRARSHFLTTPSPARLPVTVSPLRSRSSSCRMYRAKRAASLRAKRQRLGKYELGCTIGEGTFAKVRIAKNMDTGDHVAIKILDKAKVHKNKLAEQIRREIYTMKLIQHPNVVRLYEGMGS

SEQ ID NO: 170464 - protein, 176 aa, Zea Mays
MCPPPTRRNAPCVVSFLAVLSSLPPYLPPRPSLHALHFIPDADADDSGRSPRRTRARSHFLTTPSPARLPVTVSPLRSRSSSSCRMYRAKRAASLRAKRQRLGKYELGCTIGEGTFAKVRIAKNMDTGDHVAIKILDKAKVHKNKLAEQEGNLYDEANTTSQCCSPVRGKSFNFPS

SEQ ID NO: 170465 - protein, 175 aa, Zea Mays
MCPPPTRRNAPCVVSFLAVLSSLPPYLPPRPSLHALHFIPDADADDSGRSPRRTRARSHFLTTPSPARLPVTVSPLRSRSSSCRMYRAKRAASLRAKRQRLGKYELGCTIGEGTFAKVRIAKNMDTGDHVAIKILDKAKVHKNKLAEQEGNLYDEANTTSQCCSPVRGKSFNFPS

SEQ ID NO: 170466 - protein, 712 aa, Zea Mays
MAARPPAPASRSIEAAHRPFVPNSRLPGMAVSRQSDGWRGRTSPRQGRGFGVQPQRHGPGHGGPLGRGSLGRGAAGRGGRFPPQPRFQQYGEVPAASQETMPQAATADGMSWMPRDAERRQSTAAPPGNSVKAKKLKSPLCFRCKLSGHLNDECKADLDCVVCNKKNSHVVAKCPLLKLPKPDASFFGFGNNELGFFRIPDFDYRLETPDPAPTALIKVSGGKLSTEAVQAELARFITKEWVWEALPHSDDSFLVVFPSVDELIRMADVEFTLKNHGVTLTISEWKDASDVEPSYQLDEVWVHVRGVPHAWRHYLGFWALGSVIGATLDVDMYTYRKMGVIRLLVGVMSRDPLPLTTDIVFDKKGYEITYSIEDKNFIPASPVIFREESRNDGGGGMDKVSEQEDKSPEHAFKKHKLDGKGGGAGSMAGGFGDGEDSPMLGAAAISPLEKANEPVPAVMKGFPLLNLSALHSVRPSLIGRTGADLKLHKNGMSSAAGFLSGGKRSSVVGSYDTNGCNLMLQSILDEQIVSNMKGADPTGVINSVHTTRIVPDASSWSKNIPDEQLVSNKKGVGPSVVLTSAHTAMNMPAACCWSMGQRSFAFEREGQPMDDVRKIERSLHIGAGQVKLPIPPEKKLMPPGKDEDSTLKAMKRASRRNLDGDLSGFKPAGQALRTVSTSSLPIGPFQSGYPFGVTEAIKLGHPSARGAATVGC

SEQ ID NO: 170467 - protein, 734 aa, Zea Mays
MAARPPAPASRSIEAAHRPFVPNSRLPGMAVSRQSDGWRGRTSPRQGRGFGVQPQRHGPGHGGPLGRGSLGRGAAGRGGRFPPQPRFQQYGEVPAASQETMPQAATADGMSWMPRDAERRQSTAAPPGNSVKAKKLKSPLCFRCKLSGHLNDECKADLDCVVCNKKNSHVVAKCPLLKLPKPDASFFGFGNNELGFFRIPDFDYRLETPDPAPTALIKVSGGKLSTEAVQAELARFITKEWVWEALPHSDDSFLVVFPSVDELIRMADVEFTLKNHGVTLTISEWKDASDVEPSYQLDEVWVHVRGVPHAWRHYLGFWALGSVIGATLDVDMYTYRKMGVIRLLVGVMSRDPLPLTTDIVFDKKGYEITYSIEDKNFIPASPVIFREESRNDGGGGMDKVSEQEDKSPEHAFKKHKLDGKGGGAGSMAGGFGDGEDSPMLGAAAISPLEKANEPVPAVMKGFPLLNLSALHSVRPSLIGRTGADLKLHKNGMSSAAGFLSGGKRSSVVGSYDTNGCNLMLQSILDEQIVSNMKGADPTGVINSVHTTRIVPDASSWSKAARQEHRMQNIYSQLSAGVFSCGKRNIVVGSDSTNGCNFLLQNIPDEQLTEYSLQPAFQGQRSFAFEREGQPMDDVRKIERSLHIGAGQVKLPIPPEKKLMPPGKDEDSTLKAMKRASRRNLDGDLSGFKPAGQALRTVSTSSLPIGPFQSGYPFGVTEAIKLGHPSARGAATVGC

SEQ ID NO: 170468 - protein, 689 aa, Zea Mays
MAARPPAPASRSIEAAHRPFVPNSRLPGMAVSRQSDGWRGRTSPRQGRGFGVQPQRHGPGHGGPLGRGSLGRGAAGRGGRFPPQPRFQQYGEVPAASQETMPQAATADGMSWMPRDAERRQSTAAPPGNSVKAKKLKSPLCFRCKLSGHLNDECKADLDCVVCNKKNSHVVAKCPLLKLPKPDASFFGFGNNELGFFRIPDFDYRLETPDPAPTALIKVSGGKLSTEAVQAELARFITKEWVWEALPHSDDSFLVVFPSVDELIRMADVEFTLKNHGVTLTISEWKDASDVEPSYQLDEVWVHVRGVPHAWRHYLGFWALGSVIGATLDVDMYTYRKMGVIRLLVGVMSRDPLPLTTDIVFDKKGYEITYSIEDKNFIPASPVIFREESRNDGGGGMDKVSEQEDKSPEHAFKKHKLDGKGGGAGSMAGGFGDGEDSPMLGAAAISPLEKANEPVPAVMKGFPLLNLSALHSVRPSLIGRTGADLKLHKNGMSSAAGFLSGGKRSSVVGSYDTNGCNLMLQSILDEQIVSNMKGADPTGVINSVHTTRIVPDASSWSKNIPDEQLVSNKKGVGPSVVLTSAHTAMNMPAACCWSMGQRSFAFEREGQPMDDVRKIERSLHIGAGQVKLPIPPEKKLMPPGKDEDSTLKAMKRASRRNLDGDLSGFKPAGQALRTVSTSSLPIGPFQSVS

SEQ ID NO: 170469 - protein, 427 aa, Zea Mays
MSKAGSFILARESVNCCILFILRRGAGRVRRRDLLDGAGRVDLRVGGLRRCLRLVVSRRVGVPGRLRAGVRLRGGRELRGRHAADRRVALEGAHRVGGAVVRREAIYEAHGGVPAQGRGAVIVLRGQEAVAALRFHGRARQPGVLGDHDLVLLHEIQVRELDLLVLLPVPDAVGGVVPRLLLLLRVGQRRLGRRRDGHDLRHDPDVGELELQEARGGLEEVAGGEREVAGERAAVGGDDIRERHEREAQQLVLQVVLDPAEHPHLAAERGVDVPRAHAEAQRLVEHRVAAPAVDHLRGRRRRAVPRQREPRVHVLLVVDADVLDVPRATHVHVDVPDQLRGRRCRRRNRSSLVLLRLLHGKTTPLLLQGFSSASTAKGEATNQTDETHNNSKKYHASSSTEFCAGGRGSCIVQIREVGEAKLSADPY

SEQ ID NO: 170470 - protein, 160 aa, Zea Mays
MAEPVACDTSREVAKLKSRLVLLERKNAAFKMQMKELSMKLQLAGQGKNEALYKAGPFGTVKALRTNPTVTPDLSINPRLASLLEQVAVKKELIVALANSNVKEMLEVWFTNIKRAGIPNYLVVALDDNIESFCKSKDVPVYRRDPDDGIDNIEILTWNP

SEQ ID NO: 170471 - protein, 425 aa, Zea Mays
MSDSHETDRNIEIWKIKKLIKALESARGNGTSMISLIMPPRDQVARVAKMLGDEYGTASNIKSRVNRQSVLAAITSAQQRLKLYNKVPPNGLVLYTGTIVTEDGKEKKVTIDFEPFKPINVSLYLCDNKFHTEALNELLESDDKFGFIVMDGNGTLFGTLSGNTREVLHKFTVDLPKKHGRGGQSALRFARLRMEKRHNYVRKTAELATQFFINPATSQPNVAGLILAGSADFKTELSQSDMFDQRLQAKILNVVDVSYGGENGFNQAIELSAEILANVKFIQEKKLIGKYFEEISQDTGKYVFGVDDTLKALEMGAVETLIVWENLDINRYVIKNSTTGEIIIKHLNKEQEADQSNFRDPSTNTDLEVQEKMSLLEWFANDNKSQEGSQFCRGFGGIGGMLRYQLDIRSFDELSDDDDVYEDSD

SEQ ID NO: 170472 - protein, 119 aa, Zea Mays
MTTSLRRDPSSVEDLVALVACCATSWISVLLMSFLMMTMCMKTLTSNQPISCQGWPMEGRNSSTSPYLRRSTRKATIQGLMGMGQRHPLQEELKTKMILSHNHGSNVTRRYPTISQLFQ

SEQ ID NO: 170473 - protein, 93 aa, Zea Mays
MHTQGVVKYLQKGERISPCNGSVRLGGEKLPAASARCLNEEAAATRTRSRRATGIAFIFRSSCCSPVPPSRGTTGWLGCRGETPIVSEVATLL

SEQ ID NO: 170474 - protein, 120 aa, Zea Mays
MNITSQGNSTLIRWGIFPAESDNAMSNATAMGIIYRLTQHHVQLPENLGSYQLLEWNVQPLPRRSWFQEHVVSMLLGILLVILVTLSAFLVVLVWRKKFSGQAAYRPVDSVVPEQELQPL

SEQ ID NO: 170475 - protein, 75 aa, Zea Mays
MTLMAGIIVRNTLVTYDRHNEKIGFWKTNCSELWERLHIGDTPSPAPSSDTSSEHDMSPAPAPSNLPGHFVFRNN

SEQ ID NO: 170476 - protein, 68 aa, Zea Mays
MSSSSGVLGEDIVSFGRESELKPQHAIFGCENSETGDLFSQHADGIMGLGRGQLSIMDQLVEKGVISD

SEQ ID NO: 170477 - protein, 186 aa, Zea Mays
MLVGVLMQRSLEALAFHLPGDLAVPLVQLLAGLHFRAIAGSVLLRQCLPMVLHQCPPVPLFLMDMELLTGTITRHQPQHMMQAHFLLTVSRSAPQNHSSMPQGQWQHRTTRVPIKSRMVARERQLQAHMQVIPVGPKHQLQAPIQVIPAGPVRQLLAAMQTIWDPSIALPSNHRFASSLSEMLCWL

SEQ ID NO: 170478 - protein, 196 aa, Zea Mays
MSAAALSPVLSFSRSRRYYYWFCCKMDTEATLNKSGGSESVMSLLEQLAEVFGNLKSHTEAFLQLQNGMQWEDIKGHFLSLDKSYGSKFDELVEKQKALEEKKAEACRLIAEKEADISIKERASLNQLQELRDAAVSSLAEVRQKYKVELAEILDTSESKYKKVSLRSWLRGTGKLMQFISYKLSGFQRHSPLHHC

SEQ ID NO: 170479 - protein, 171 aa, Zea Mays
MDTEATLNKSGGSESVMSLLEQLAEVFGNLKSHTEAFLQLQNGMQWEDIKGHFLSLDKSYGSKFDELVEKQKALEEKKAEACRLIAEKEADISIKERASLNQLQELRDAAVSSLAEVRQKYKVELAEILDTSESKYKKVSLRSWLRGTGKLMQFISYKLSGFQRHSPLHHC

SEQ ID NO: 170480 - protein, 578 aa, Zea Mays
MIHPSRLQLTPNYPLERVLGEILARNADTEYLSSRCGLAGATDRATFRAKVPMATYEDLQPYIRRIADGDRSPILSGHPVSEFLTSSGTSGGERKLMPTIEDELNRRQLLYSLQMPVMNLYVPGMDKGKALHFLFVKSETKTPGGLAARPVLTSYYKSNHFRNRPFDAYNNYTSPTAAILCADAFQSMYAQMVCGLCQRQDVLRVGAVFASGLLRAIRFLQLNWEQLAEDIEAGSLTPRVTDPSVREAVAGILRPDPAVAELVRSECSGGDWAGIVTRIWPNTKYLDVIVTGAMAQYIPTLKHYSGGLPMACTMYASSECYFGLNLRPMCDPSEVSYTLMPNMCYFEFLPMGGAVDASQLVDLGRVERGREYELVITTYAGLNRYRVGDVLQVTGFHNSAPQFRFVRRKNVLLSIESDKTDEAELQRAVERASALLRPHGAAVVEYTSQAYTKSIPGHYVVYWELLQAKGGAAVDGETLEGCCLEMEEALNAVYRQSRVADGSIGPLEIRVVRPGTFEELMDYAISRGASINQYKVPRCVTFPPIIELLDSRVVSSHLSPALPHWTAGQRSGSGSGSD

SEQ ID NO: 170481 - protein, 567 aa, Zea Mays
MVLCVFFLYIWCAAANPADPGVFKSKKYLSLYGSGKHRHLKECRKGSSDVRLQLEGTGEKQEHEVAASSEMSMTQYKDNIPSCMSSTFSAFLLLFYPLSFVLSCCQSHEWSSEQQATEEGMFFCSLCEVQVLKYSKHCRVCDKCVDGFDHHCRWLNNCIGRRNYGRFFILMSTALILLILQSATGVLVLVLCFVERKEFCLQIVSKLGSSFSVVPFVIVVASCTILAMVASLPIAQLLFFHILLIKKGISTYDYIIALREQEQDDLSGQQSPQMSRVSSYTGLSSTSSFGPLRRGSWCTPPRLFLEDQFDVIPSEAASSHNSAMKRKEDEGKRKKGSGAVQISPWALARLNAEEVSRVAAEARKKSKVLLPIRKDDYSRDHETDSSYGGMSNGRIDLGTDSKRRTNRRGRQPSDLSLKPVAKISTDVIDSTSRDMAPEALSNLAPLQLEALSAFHPSRAASCVNAGGSSPDSSLDSPDLHLYRVSAVSSSGAEDLQLTALTAPGSTPQQGIQLSRSTSDGYEASGGEDSDRIPSRIVHRSSNWASIILNSDQSASSSGILVPKNRLS

SEQ ID NO: 170482 - protein, 340 aa, Zea Mays
MVASLPIAQLLFFHILLIKKGISTYDYIIALREQEQDDLSGQQSPQMSRVSSYTGLSSTSSFGPLRRGSWCTPPRLFLEDQFDVIPSEAASSHNSAMKRKEDEGKRKKGSGAVQISPWALARLNAEEVSRVAAEARKKSKVLLPIRKDDYSRDHETDSSYGGMSNGRIDLGTDSKRRTNRRGRQPSDLSLKPVAKISTDVIDSTSRDMAPEALSNLAPLQLEALSAFHPSRAASCVNAGGSSPDSSLDSPDLHLYRVSAVSSSGAEDLQLTALTAPGSTPQQGIQLSRSTSDGYEASGGEDSDRIPSRIVHRSSNWASIILNSDQSASSSGILVPKNRLS

SEQ ID NO: 170483 - protein, 437 aa, Zea Mays
MARASRSRGAWCLNPRSFLEVPVPSPCIARVPRRESRPAQREEKKKEGSFSRFFCLFCGSFLGAVMRRHGWQLPYHPLQVVAVSVFLALAFAFYVFFAPFVGRNVFQYVVIGLYTPLGISTYDYIIALREQEQDDLSGQQSPQMSRVSSYTGLSSTSSFGPLRRGSWCTPPRLFLEDQFDVIPSEAASSHNSAMKRKEDEGKRKKGSGAVQISPWALARLNAEEVSRVAAEARKKSKVLLPIRKDDYSRDHETDSSYGGMSNGRIDLGTDSKRRTNRRGRQPSDLSLKPVAKISTDVIDSTSRDMAPEALSNLAPLQLEALSAFHPSRAASCVNAGGSSPDSSLDSPDLHLYRVSAVSSSGAEDLQLTALTAPGSTPQQGIQLSRSTSDGYEASGGEDSDRIPSRIVHRSSNWASIILNSDQSASSSGILVPKNRLS

SEQ ID NO: 170484 - protein, 712 aa, Zea Mays
MLSNLWSPPAAPSHTALARAHRCGKIESMARASRSRGAWCLNPRSFLEVPVPSPCIARVPRRESRPAQREEKKKEGSFSRFFCLFCGSFLGAVMRRHGWQLPYHPLQVVAVSVFLALAFAFYVFFAPFVGRNVFQYVVIGLYTPLVLCVFFLYIWCAAANPADPGVFKSKKYLSLYGSGKHRHLKECRKGSSDVRLQLEGTGEKQEHEVAASSEMSMTQYKDNIPSCMSSTFSAFLLLFYPLSFVLSCCQSHEWSSEQQATEEGMFFCSLCEVQVLKYSKHCRVCDKCVDGFDHHCRKLWEVFYSNVNRPYLGLHGLCNLGQLILQSATGVLVLVLCFVERKEFCLQIVSKLGSSFSVVPFVIVVASCTILAMVASLPIAQLLFFHILLIKKGISTYDYIIALREQEQDDLSGQQSPQMSRVSSYTGLSSTSSFGPLRRGSWCTPPRLFLEDQFDVIPSEAASSHNSAMKRKEDEGKRKKGSGAVQISPWALARLNAEEVSRVAAEARKKSKVLLPIRKDDYSRDHETDSSYGGMSNGRIDLGTDSKRRTNRRGRQPSDLSLKPVAKISTDVIDSTSRDMAPEALSNLAPLQLEALSAFHPSRAASCVNAGGSSPDSSLDSPDLHLYRVSAVSSSGAEDLQLTALTAPGSTPQQGIQLSRSTSDGYEASGGEDSDRIPSRIVHRSSNWASIILNSDQSASSSGILVPKNRLS

SEQ ID NO: 170485 - protein, 194 aa, Zea Mays
MTLMHYLCKVLAARSPQLLNFYADLVSLDAASKIQLKMLAEEMQAVSKGLEKVQLEYDASERDGPVSKIFREKLKEFTDNAGSDVQSLSSLFSEVGKKADALIKYFGEDPVRCPFEQVISTLLTFVTTFRKAHEENLKQAELEKKKAEKEAEAEKAKNAQLTGKNHSKSSNPSRQAKQAIERTRSVSRRGRDAG

SEQ ID NO: 170486 - protein, 1214 aa, Zea Mays
MALFRKFFLKKTPDRLLEISENVYVFDCCFSTDSMGEDEYRDYLSGIVAQLQEFFPDTSLMASNFWSGDKRSRISDILSEYDMTVMDYPQQYEGCPLLQLEMIHHFLKSCENWLSVEGQHNMLLMHCERGGWPVLAFMLAGLLLYRKIYTGEQRTLEMVYKQARRDFIQQFFPLNPQPSHLRYLHYITRQGGGSEWPPISRPLILDSIVLHVVPRFDTDGGCRPYLIVHGQDSSPGNKSAKVLYEMPKTKKHLQRYGQAEVPIKLSVSCHVHGDVVLEFIHIGDNIENKETMFRVMFNTAFVQSNILELNRDDIDVAWNVNNQFPRDFRAEVHFSDPVSFKPAATIEEVADDGDETDVASVDTGEEFYEAEEYWHDARKDPATHSIDGGISLNDIAEFDGGATTEERSSLEKHRSDEGVKIAVSQNFGSMNEKVAIAPTSSFENQEGLQQPREVLPNAKLSKNNDQENSDVHDIQVVATSVDSEGHKFGSTGQEDTKGVIAQTLVTTVDLSGSDGIHCQTDEQTKMSEYPDLDYTAFGSPRSLSRTDGDAHMRTKKNEGLQNGDIKIITENTISVDNELVIYEEKTIVVNGNAIQVVKNVVNEESIAAKIGKPITESRTSLDNDNGKIQTAKPSDIANGKLDGCRLESCLETVPTKKTTVHDRIVVLPATGVATEIKAKQEVLVDKQDFGIVLPQSRTVARARSPRLGSDDRGQIPDKAVLSVLKEMVVGNAKMEDQPKLAKPKIMRRWISPKKESDATSVRRPSHPPSRYYSSPAALGIRSISTDGKISVVNDAPLLSLKQPYGSNLTREATSAQSAPSPPQKSLLLGAQSASRSQVSPPPPPPPPPATNYSSSSTPMHMGLASTGLSNLPQGASPPRSPVAQKHAFAPPAPPPPPPPPPRSGVGGNTPPPPPPRLNNSAIAPPPPPSTITRSSAPPPPPPPQSMSRSAPPPPPPPPPSLCSNVPLPPLSCTLSAPPPPPPPPLPSMARSAAPSPPPPPPSRGAPPPLPLGRGAPPPPPPPPPPGRGAPPPPPPPGRGASLPPPPPPSRGAPPPPPPPVSRAGPPPPPPPPGARCGPPPPPPPPGASAPPPPPPPGARPGAPPPPPPLGARPGAPPPPPPPGGGGRGPLPPRAPGVPTPPRAPGVPLPPGSNPSLGRGRGAVRPMGSAIGAAASRKSTLKPLHWVKVTRALQGSLWEELQRNTDSQRVRCIRT

SEQ ID NO: 170487 - protein, 1478 aa, Zea Mays
MALFRKFFLKKTPDRLLEISENVYVFDCCFSTDSMGEDEYRDYLSGIVAQLQEFFPDTSLMASNFWSGDKRSRISDILSEYDMTVMDYPQQYEGCPLLQLEMIHHFLKSCENWLSVEGQHNMLLMHCERGGWPVLAFMLAGLLLYRKIYTGEQRTLEMVYKQARRDFIQQFFPLNPQPSHLRYLHYITRQGGGSEWPPISRPLILDSIVLHVVPRFDTDGGCRPYLIVHGQDSSPGNKSAKVLYEMPKTKKHLQRYGQAEVPIKLSVSCHVHGDVVLEFIHIGDNIENKETMFRVMFNTAFVQSNILELNRDDIDVAWNVNNQFPRDFRAEVHFSDPVSFKPAATIEEVADDGDETDVASVDTGEEFYEAEEYWHDARKDPATHSIDGGISLNDIAEFDGGATTEERSSLEKHRSDEGVKIAVSQNFGSMNEKVAIAPTSSFENQEGLQQPREVLPNAKLSKNNDQENSDVHDIQVVATSVDSEGHKFGSTGQEDTKGVIAQTLVTTVDLSGSDGIHCQTDEQTKMSEYPDLDYTAFGSPRSLSRTDGDAHMRTKKNEGLQNGDIKIITENTISVDNELVIYEEKTIVVNGNAIQVVKNVVNEESIAAKIGKPITESRTSLDNDNGKIQTAKPSDIANGKLDGCRLESCLETVPTKKTTVHDRIVVLPATGVATEIKAKQEVLVDKQDFGIVLPQSRTVARARSPRLGSDDRGQIPDKAVLSVLKEMVVGNAKMEDQPKLAKPKIMRRWISPKKESDATSVRRPSHPPSRYYSSPAALGIRSISTDGKISVVNDAPLLSLKQPYGSNLTREATSAQSAPSPPQKSLLLGAQSASRSQVSPPPPPPPPPPPPPPPLPSMARSAAPSPPPPPPSRGAPPPLPLGRGAPPPPPPPPPPGRGAPPPPPPPGRGASLPPPPPPSRGAPPPPPPPVSRAGPPPPPPPPGARCGPPPPPPPPGASAPPPPPPPGARPGAPPPPPPLGARPGAPPPPPPPGGGGRGPLPPRAPGVPTPPRAPGVPLPPGSNPSLGRGRGAVRPMGSAIGAAASRKSTLKPLHWVKVTRALQGSLWEELQRNTDSQSVSEFDVSELESLFPAAVPKSDDSSKSERRKSLGSKPEKVHLIELRRANNTEIMLTKVKMPLSDLVSAALTLDQSTLDVDQVENLIKFCPTKEEMELLKNYTGDKQILGKCEQFFLELMKVPRMESKLRVFSFKIQFGSQVADLRRNLDIIDSSCNEIRTSLKLKEIMKKILLLGNTLNQGTARGAAVGFRLDSLLKLTDTRATNNKMTLMHYLCKVLAARSPQLLNFYADLVSLDAASKIQLKMLAEEMQAVSKGLEKVQLEYDASERDGPVSKIFREKLKEFTDNAGSDVQSLSSLFSEVGKKADALIKYFGEDPVRCPFEQVISTLLTFVTTFRKAHEENLKQAELEKKKAEKEAEAEKAKNAQLTGKNHSKSSNPSRQAKQAIERTRSVSRRGRDAG

SEQ ID NO: 170488 - protein, 1374 aa, Zea Mays
MALFRKFFLKKTPDRLLEISENVYVFDCCFSTDSMGEDEYRDYLSGIVAQLQEFFPDTSLMASNFWSGDKRSRISDILSEYDMTVMDYPQQYEGCPLLQLEMIHHFLKSCENWLSVEGQHNMLLMHCERGGWPVLAFMLAGLLLYRKIYTGEQRTLEMVYKQARRDFIQQFFPLNPQPSHLRYLHYITRQGGGSEWPPISRPLILDSIVLHVVPRFDTDGGCRPYLIVHGQDSSPGNKSAKVLYEMPKTKKHLQRYGQAEVPIKLSVSCHVHGDVVLEFIHIGDNIENKETMFRVMFNTAFVQSNILELNRDDIDVAWNVNNQFPRDFRAEVHFSDPVSFKPAATIEEVADDGDETDVASVDTGEEFYEAEEYWHDARKDPATHSIDGGISLNDIAEFDGGATTEERSSLEKHRSDEGVKIAVSQNFGSMNEKVAIAPTSSFENQEGLQQPREVLPNAKLSKNNDQENSDVHDIQVVATSVDSEGHKFGSTGQEDTKGVIAQTLVTTVDLSGSDGIHCQTDEQTKMSEYPDLDYTAFGSPRSLSRTDGDAHMRTKKNEGLQNGDIKIITENTISVDNELVIYEEKTIVVNGNAIQVVKNVVNEESIAAKIGKPITESRTSLDNDNGKIQTAKPSDIANGKLDGCRLESCLETVPTKKTTVHDRIVVLPATGVATEIKAKQEVLVDKQDFGIVLPQSRTVARARSPRLGSDDRGQIPDKAVLSVLKEMVVGNAKMEDQPKLAKPKIMRRWISPKKESDATSVRRPSHPPSRYYSSPAALGIRSISTDGKISVVNDAPLLSLKQPYGSNLTREATSAQSAPSPPQKSLLLGAQSASRSQVSPPPPPPPPPATNYSSSSTPMHMGLASTGLSNLPQGASPPRSPVAQKHAFAPPAPPPPPPPPPRSGVGGNTPPPPPPRLNNSAIAPPPPPSTITRSSAPPPPPPPQSMSRSAPPPPPPPPPSLCSNVPLPPLSCTLSAPPPPPPPPLPSMARSAAPSPPPPPPSRGAPPPLPLGRGAPPPPPPPPPPGRGAPPPPPPPGRGASLPPPPPPSRGAPPPPPPPVSRAGPPPPPPPPGARCGPPPPPPPPGASAPPPPPPPGARPGAPPPPPPLGARPGAPPPPPPPGGGGRGPLPPRAPGVPTPPRAPGVPLPPGSNPSLGRGRGAVRPMGSAIGAAASRKSTLKPLHWVKVTRALQGSLWEELQRNTDSQSVSEFDVSELESLFPAAVPKSDDSSKSERRKSLGSKPEKVHLSAALTLDQSTLDVDQVENLIKFCPTKEEMELLKNYTGDKQILGKCEQFFLELMKVPRMESKLRVFSFKIQFGSQVADLRRNLDIIDSSCNEIRTSLKLKEIMKKILLLGNTLNQGTAREYYFHLT

SEQ ID NO: 170489 - protein, 706 aa, Zea Mays
MGCVASKNTVSVTPAADSSGGLRDRSHPRAQESAAPVPLPVPVPSLRSSSSAARRSEKVKDDAEEPGKAVVAVAASSRSFRLRSLRKSLEGEQVAAGWPPWLSAVAGEAIQGWIPLKADSFEKLEKVGQGTYSSVFRARDLETGKIVALKKVRFDNFEPESVRFMAREIQILRRLDHPNVMKLEGLITSRLSCSLYLVFEYMEHDLAGLCSSPDIKFTEAQLKCYMNQLLSGLEHCHSRHVVHRDIKGANLLVNNEGVLKIADFGLANFFDPSKNHPLTSRVVTLWYRPPELLLGSTHYDAAVDLWSVGCVFPEMYRGKPILQGRTEVEQLHKIFKLCGSPADDYWKKSKLPHATIFKPHHPYTSTLRDVFKELPENALSLLETLLSVEPYKRGTASGALSSEFFRTKPYACEPSSLPNYAPNKEMDAKLRENALRRKASSRGHGTEASKKSSRLSRAAREPSAVPKQIISRTEESKTNVNATKDGTTQDRAKLNGDARLFVDIQPVSAAQVKESARHVKNESREQIPFSGPLSVSSSSGFAWARRPHEDRSFARSRTRSSSRGQFPADAVQGCNTQAKENAGLRELHSRDIPVSVSHVGSRVRDRGPHDAAKRAVLKKWSQLERPDSFDSCDTYHSHNFSNAMFLGGTLSSKNGFKLQGGHNQEEKVEYSGPLLSQSHKVDELLQKNERHIRQAVRTSWFRRACH

SEQ ID NO: 170490 - protein, 121 aa, Zea Mays
MIQVVEVSTSKTGKHGHAKCHFVAIDIFNGKKLEDIVPSSHNCDIPHVNRTEYQLIDISEDGFVSLLTSDGNTKDDLRLPTDETLVAQIKEGFESGKDLVVTVQSAMGEEQICALKDVGPK

SEQ ID NO: 170491 - protein, 1499 aa, Zea Mays
MDNDNGDVDDLGSGWFEVKKKHRSSSKYTLQRSSGGSSHKIPNLLSRSGANSDSSRWHDKLQHPSPSINANVGVDGSGSGETTNVHGEGCNDVSTSPSGLNSGLNASASEDRVERLEELAVAEKTSESPENDLADHADPSLPHEPSTCSGSPAKCADLSQHVKCSPKTESVGVLSITPVKFGDFDEVPGLSLPSDSYRDNNTSRGHRHTEDVAHLKNVQKDASELKPETDTCTTIDEASPIMVQGTETPNHDSGLIASVDSVTLSCSKNDHEVPVTSSSVPVASMEGRTLLHDEAPASADFGSETAESKERFRQRLWCFLFENLNRAVDELYLLCELECDMEQINESILVLEEAISDFQELKSRAEHFDNTKKSPGVPKEGMPMAVKADHRRPHALSWEVRRMTSSPHRQEILSSSLEAFQRIQLELACKQAGIAAERFTSSSSEKVLGSSSKLTTASATVRNISLKVESQVKLPDTSVKKIAGEKLSRDAFKSGKSYPQSMPSYSARSRRGSLEPISEIEKHTFKKDRELLENKFDRLKSTDVVKKTTAHLEKEKQITAPWKSMDAWKEKRNWEDILKSPVRSSRVSHSPGVGRKVTDRARVLHDKLMSPEKKKRSALDMKKEAEEKHARALRIRSQLESERVQRLQRTSEKLHRVNEWQAVRSSKLREVMNARHQRGESRHEAYLAQVAKRAGDESTKVNEVRFITSLNEENKKFLLRQKLHDSEMRRAEKLQVIKTKQKEDTAREEAVLERRKFLEAEKMQRLAEIQRKKEEAIFRREEERKASSAAREARAAEQQRRKEIRAKAQQEEAELLAQKLAEKLRESEQRRKYYLEQIRERASMDLRDQPSPFQRRFPSKDCQNRSSSANSGEDSQTTGNSSAADSMVKSSNNAQIKRRIKKIRQRLMALKHEFIEPSIGESTGITHRSGLGAAKAKLSRWLQDLQRLRQARKEGAASIGLIVSDIAKYLEGKDLELHASRQVGLLDFIASALPASHTSKPGACQVTVYLLRLLRVLLSLPANRTYFLVQNLLPPIIPMLSASLENYIKVAASNSGSSNLLSNKTSAETTESSGEVLDGFLWTVAMIVGHVHINGEQLQMQGGLIELIVAYQIIHRLRDLFALYDRPQVEGSPLPSSILFGLNLLSVLTSKPGNFSTIDWESCKCRTLGGNIVQEYEYLSSQDSLGCQSMTLDQFGDAKSPTIYSELAEDSKSCKQHDLSIPVDRKLVDEASKDLLVMAAGLNNSAMQPSDLGITTEKHSGNPSQGDENNTVDSFLEGRKTNNVCALYSSSGKGNEMNLKQPAMLLLSALAETGLVTLPSLLTAVLLQANNNRSSSEQTLAILPSNFEEVATGVLKVLNNMARLDITLLQHMLLPFESLHEQMESAKRSGWFAASRVSATSWLLFFVPCWEPSCSSVGKESHYTSQGVRPAICFLQRPRVDAHLGCCSDRCLLRLRSEPKRCTAGNKHGYAALLAQVLPNFRIKFSRFHCCGWFWKQFH

SEQ ID NO: 170492 - protein, 201 aa, Zea Mays
MEIKKLKAALERLNSVTNLGTVCKSCSCGFSAMLVELSNCSIEGPSGSARSLNSNHIDEKSQNQALIEWRPREASDDDGGWSIRAFAEKINRKSRLLPPSARQERELPLQPNDLLRVGVAGPAVAEQPTNLPASRRQSTPPTPLPRRCWTTSRGTWQLAQCRVLPSTSVTVAEQATNSPYVVAYTPSEHLLRYLAASSVRE

SEQ ID NO: 170493 - protein, 106 aa, Zea Mays
MDLGNLSSPTVLSAHMDLIEVSIDGVIGLALDPRPRSPGYRPRSSENSEKITACWFLLISLLIFSTCFTILQKSCLLQHLIAYLFLLFYVCFLFLRSICYSLSLRL

SEQ ID NO: 170494 - protein, 115 aa, Zea Mays
MRLMQLLLVLLVAARRHRRRHLRLRLVLLQVEREREVAGPRRRRRRRPRRRRGRRIHRHVGGSIRECPKRRRRDQSIRVYSSLVKRYRQMLSPSSMRLPPSARSFCWLQIYVSVE

SEQ ID NO: 170495 - protein, 795 aa, Zea Mays
MSGPPKRLHEESSHSTPAKRPLDDNSLYSSPSGKAIQSSSSDFHGFFEHDGRFAKIQRVEARDDKRPPLVHRMHGSSNFVDHTVLSDSRLEPKHNKDTRDNKADDRDTKADARDVYSDPSIEFQFNKIDSDVKIDNRADGNEIRADRRGHHDYKGDTKFDKDNHPIVASSLGWKDNKEHRGKRYFEQPSDNADWRFPRPGLQGTDETLKGLTSMEDRNSRDAHDSAFDNKAESKGEDKFRDKDRKKKDEKHRDFGSREGERNDRRTGIQLGGSGVERREMQREERDAEKWDRERKDSLRDKEGNDREKDSAKKDPSMVMEKDNTIVEKLLSDGPVKNAEHENTTTETKVLKDDAWKGHDRDPKDKKREKDLDAGDRHEQRSKYNDKESDDNGTEGDTEKDKDVFGSVQRRRMVRPRGGGSQASQRDPRFRSRTRDGEGAQGKSEVSAILYKAGECMQELLKSWKDFEATQEATNVESLQNGPTLEIRIPAEFVTSTNRQVKGAQLWGTDIYTNDSDLVAVLMHTGYCSPTSSPPPSAIQELHATVQVLPPQESYTSTLRNNVRSRAWGAGIGCSFRIERCCIVKKGGGTIDLEPRLSHTSAVEPTLAPVAVERTMTTRAAASNALRQQRFVREVTIQYNLCNEPWLKYSISIVADKGLKKSLYTSARLKKGEVIYLETHFNSLHRYELCFSGEKPRGIGSSSNASDAEPEKHQSSSHHSQNGSVEHELRDVFRWSRCKKAMPESAMRSTGIPLPADQLEVLQDNLEWEDVQWSQTGVWVAGKEYPLARVHFLSGN

SEQ ID NO: 170496 - protein, 485 aa, Zea Mays
MDLLKMLNMRIQQQKLRCLRTMHGKVMTGILKTRKERRIWMQETGMSKEANIMTRNQMIMAPKVIQKKIKMFLEVFNAGGWCDQGEVVAKHLNVIPDFDPERVMAKGLKVSQISTSLAEFIKYWCFVWNWSKSEVSAILYKAGECMQELLKSWKDFEATQEATNVESLQNGPTLEIRIPAEFVTSTNRQVKGAQLWGTDIYTNDSDLVAVLMHTGYCSPTSSPPPSAIQELHATVQVLPPQESYTSTLRNNVRSRAWGAGIGCSFRIERCCIVKKGGGTIDLEPRLSHTSAVEPTLAPVAVERTMTTRAAASNALRQQRFVREVTIQYNLCNEPWLKYSISIVADKGLKKSLYTSARLKKGEVIYLETHFNSLHRYELCFSGEKPRGIGSSSNASDAEPEKHQSSSHHSQNGSVEHELRDVFRWSRCKKAMPESAMRSTGIPLPADQLEVLQDNLEWEDVQWSQTGVWVAGKEYPLARVHFLSGN

SEQ ID NO: 170497 - protein, 461 aa, Zea Mays
MDLLKMLNMRIQQQKLRCLRTMHGKVMTGILKTRKERRIWMQETGMSKEANIMTRNQMIMAPKVIQKKIKMFLEVFNAGGWCDQGEVVAKHLNVIPDFDPERVMAKGKSEVSAILYKAGECMQELLKSWKDFEATQEATNVESLQNGPTLEIRIPAEFVTSTNRQVKGAQLWGTDIYTNDSDLVAVLMHTGYCSPTSSPPPSAIQELHATVQVLPPQESYTSTLRNNVRSRAWGAGIGCSFRIERCCIVKKGGGTIDLEPRLSHTSAVEPTLAPVAVERTMTTRAAASNALRQQRFVREVTIQYNLCNEPWLKYSISIVADKGLKKSLYTSARLKKGEVIYLETHFNSLHRYELCFSGEKPRGIGSSSNASDAEPEKHQSSSHHSQNGSVEHELRDVFRWSRCKKAMPESAMRSTGIPLPADQLEVLQDNLEWEDVQWSQTGVWVAGKEYPLARVHFLSGN

SEQ ID NO: 170498 - protein, 97 aa, Zea Mays
MVVVTGCTSLGTSSPLRRQCRSIAMHRSSSVGRSAPAAGSNAMISNDIGLYDMLSPRQITALSLSQDIVHYTIKISFLGSGRTSITCTSCYLSFSLS

SEQ ID NO: 170499 - protein, 257 aa, Zea Mays
MLEVPQKNYSFAQISWYGLRWILSFLLMEGMTHFFHYNAFVVSRLWQQLSPFEVFIISYGVLNFMWLKFFLIWRYFRFWSLVGGVETPENMPRCINNCHDLESFWKSWHASFNKWLVRYLYIPLGGSQRKLLSIWVIFTFVAVWHDLEWKLISWAWLTCLFFIPEILVKSLSSKFQATSSLGMLVHREFKAIAGAVTISCLMVANLVGYVVGPSGIKVLISRMAGKDALPSLAFIFTTFYVGVKLMFHIRDASKNQG

SEQ ID NO: 170500 - protein, 295 aa, Zea Mays
MERGLSLDRYTFLMYLCYLTYAPVYIAGPIVGYNAFAAQLEVPQKNYSFAQISWYGLRWILSFLLMEGMTHFFHYNAFVVSRLWQQLSPFEVFIISYGVLNFMWLKFFLIWRYFRFWSLVGGVETPENMPRCINNCHDLESFWKSWHASFNKWLVRYLYIPLGGSQRKLLSIWVIFTFVAVWHDLEWKLISWAWLTCLFFIPEILVKSLSSKFQATSSLGMLVHREFKAIAGAVTISCLMVANLVGYVVGPSGIKVLISRMAGKDALPSLAFIFTTFYVGVKLMFHIRDASKNQG

SEQ ID NO: 170501 - protein, 503 aa, Zea Mays
MGGVPWNRVELTLLVLYALGFYLVVIWRSLRLSHEYSGRLYGLRVGSLAGHLNDLSDAQWRNFRGNLPILTVVMGAFLILVNTLRYCYGLKGRGTALLWLILSLSYLCYLHGACVVFVLLIALINYSIVKLFAHYKYCTSLIWSFNLSVLILNRVYEGYSFSLFGQNMAFLDNYRGTFRWHICFNFVVLRMISFGCDYCWTIHSSHFDFKKHMQRCQVCYSGKTCYFALQERGLSLDRYTFLMYLCYLTYAPVYIAGPIVGYNAFAAQLEVPQKNYSFAQISWYGLRWILSFLLMEGMTHFFHYNAFVVSRLWQQLSPFEVFIISYGVGGVETPENMPRCINNCHDLESFWKSWHASFNKWLVRYLYIPLGGSQRKLLSIWVIFTFVAVWHDLEWKLISWAWLTCLFFIPEILVKSLSSKFQATSSLGMLVHREFKAIAGAVTISCLMVANLVGYVVGPSGIKVLISRMAGKDALPSLAFIFTTFYVGVKLMFHIRDASKNQG

SEQ ID NO: 170502 - protein, 330 aa, Zea Mays
MGGVPWNRVELTLLVLYALGFYLVVIWRSLRLSHEYSGRLYGLRVGSLAGHLNDLSDAQWRNFRGNLPILTVVMGAFLILVNTLRYCYGLKGRGTALLWLILSLSYLCYLHGACVVFVLLIALINYSIVKLFAHYKYCTSLIWSFNLSVLILNRVYEGYSFSLFGQNMAFLDNYRGTFRWHICFNFVVLRMISFGCDYCWTIHSSHFDFKKHMQRCQVCYSGKTCYFALQERGLSLDRYTFLMYLCYLTYAPVYIAGPIVGYNAFAAQLEVPQKNYSFAQISWYGLRWILSFLLMEGMTHFFHYNAFVVSRLWQQLSPFEVFIISYGYRC

SEQ ID NO: 170503 - protein, 193 aa, Zea Mays
MWLKFFLIWRYFRFWSLVGGVETPENMPRCINNCHDLESFWKSWHASFNKWLVRYLYIPLGGSQRKLLSIWVIFTFVAVWHDLEWKLISWAWLTCLFFIPEILVKSLSSKFQATSSLGMLVHREFKAIAGAVTISCLMVANLVGYVVGPSGIKVLISRMAGKDALPSLAFIFTTFYVGVKLMFHIRDASKNQG

SEQ ID NO: 170504 - protein, 283 aa, Zea Mays
MGGVPWNRVELTLLVLYALGFYLVVIWRSLRLSHEYSGRLYGLRVGSLAGHLNDLSDAQWRNFRGNLPILTVVMGAFLILVNTLRYCYGLKGRGTALLWLILSLSYLCYLHGACVVFVLLIALINYSIVKLFAHYKYCTSLIWSFNLSVLILNRVYEGYSFSLFGQNMAFLDNYRGTFRWHICFNFVVLRMISFGCDYCWTIHSSHFDFKKHMQRCQVCYSGKTCYFALQERGLSLDRYTFLMYLCYLTYAPVYIAGPIVGYNAFAAQVLEPTRGIGVWLENC

SEQ ID NO: 170505 - protein, 86 aa, Zea Mays
MLGFDYCKRSCNECAHELAHLALNGETDQVLMWVDPFPTFVNAQLTADSRFSWYLTKLVCWVSKKKSQAVRQAGLHANQHRMLLNQ

SEQ ID NO: 170506 - protein, 310 aa, Zea Mays
MVYLAFLQDDASCHGEETQSLLEANLGSQLKSKCSDWRAPALILGLECLESMAFNGIATNLVVYLRSVLHGGIASSAATVSLWYGTSFFVPILGAAIADTCLGNYKTILISLIMYLFGIVLITVATFMPSTSVLCDVSSCLSSNGTQTVIFFAGLYLTAVGCGGVRSALLPFGANQFNNENSLDIKKRRNFFSLFYICVIFGVITSGTIIVWVQENVSWAIGYGVATTCIGLALIGFLVGTPIFQEDEPCGSPVKSIFQVIVASFRNMSLEVPADSCLLYEVGSNHIQRTKLAHSDDFSYHASIGQLLTA

SEQ ID NO: 170507 - protein, 537 aa, Zea Mays
MVYLAFLQDDASCHGEETQSLLEANLGSQLKSKCSDWRAPALILGLECLESMAFNGIATNLVVYLRSVLHGGIASSAATVSLWYGTSFFVPILGAAIADTCLGNYKTILISLIMYLFGIVLITVATFMPSTSVLCDVSSCLSSNGTQTVIFFAGLYLTAVGCGGVRSALLPFGANQFNNENSLDIKKRRNFFSLFYICVIFGVITSGTIIVWVQENVSWAIGYGVATTCIGLALIGFLVGTPIFQEDEPCGSPVKSIFQVIVASFRNMSLEVPADSCLLYEVGSNHIQRTKLAHSDDFRFLDKAAVISDPSLVYGGCRSSWSICTVTEVEELKVLIRLLPIWVTGIFFGAAISQMHTTFIQQGTVMDTKIGSLSIPPASLYSFEVICVTLWVLAVNKVLVPAIRTYFANGVELTQLQRIGIGRFLMIFAMAMAALLETKRLHIVQEGELLSIVWQLPQYFVIAGAECFGIITQLEFFRGQAPDSMKSILTAFALLTTALGNYLSSAIITLIAGVTRVWHSPGWIPDDLNKGHLDYYY

SEQ ID NO: 170508 - protein, 438 aa, Zea Mays
MPSTSVLCDVSSCLSSNGTQTVIFFAGLYLTAVGCGGVRSALLPFGANQFNNENSLDIKKRRNFFSLFYICVIFGVITSGTIIVWVQENVSWAIGYGVATTCIGLALIGFLVGTPIFQEDEPCGSPVKSIFQVIVASFRNMSLEVPADSCLLYEVGSNHIQRTKLAHSDDFRFLDKAAVISDPSLVYGGCRSSWSICTVTEVEELKVLIRLLPIWVTGIFFGAAISQMHTTFIQQGTVMDTKIGSLSIPPASLYSFEVICVTLWVLAVNKVLVPAIRTYFANGVELTQLQRIGIGRFLMIFAMAMAALLETKRLHIVQEGELLSIVWQLPQYFVIAGAECFGIITQLEFFRGQAPDSMKSILTAFALLTTALGNYLSSAIITLIAGVTRVWHSPGWIPDDLNKGHLDYYYWCLTTLSLVNFVVYLYFASKYKLKKVVC

SEQ ID NO: 170509 - protein, 314 aa, Zea Mays
MLVIKWNSNRDFLCWNMSLEVPADSCLLYEVGSNHIQRTKLAHSDDFRFLDKAAVISDPSLVYGGCRSSWSICTVTEVEELKVLIRLLPIWVTGIFFGAAISQMHTTFIQQGTVMDTKIGSLSIPPASLYSFEVICVTLWVLAVNKVLVPAIRTYFANGVELTQLQRIGIGRFLMIFAMAMAALLETKRLHIVQEGELLSIVWQLPQYFVIAGAECFGIITQLEFFRGQAPDSMKSILTAFALLTTALGNYLSSAIITLIAGVTRVWHSPGWIPDDLNKGHLDYYYWCLTTLSLVNFVVYLYFASKYKLKKVVC

SEQ ID NO: 170510 - protein, 712 aa, Zea Mays
MPPARVRGAAAGLADDARDLQRQMGCMAGILQIFDRQRLIAGAAGRQAARQRQAHKRLPPPSAPPPGNTHSNSSSNVPVQSSSTSKIVLEKTFSKCMTENSSLSIESSRASSSSSSCSSFSSLDGNKSVQQELPYINEELFVQRSLKTSPSLKESDMNTKSGHPNVGFRDIVKDSINRDPGGLTVKTSVQEARRNGQYKDSPRPLLLSKSMDGTCIIGIDRTTKVPANVTESGRCLQERSRFSCDDRRLLRPAETQECKRPSSRLKELPRLSLDSRKESLSPGSRQKSISYKRTDDILLDTLRPQDSPSNRRANSVIAKLMGLEEATNATGVLTADSCEPTRSPRPAQATQHERPSRSPKNTCQDSCSMQPKNQLKAKPSQRIATEAAPWRQQDRSANNTKAEQCREAEGRARTASVYADIERSGGFNFLECNNKDFRALRILGALNAKDAKSKNDSSGGSVAIHRTGYDLTTSSGSFQAPIVVMKPARTTEKHGVSLASVAPIAGLRSLRKLPAGRYSSFTGTNDKMQLRMSRDQSKSEETVSSASSPRPTSSSSPRNVLKKSEPERRSRPPVSPKSPSKKSNEAVSPKGRTRSKPSQVKCHRDEVLQITGNRISLAKQVDVSIMDCPKPLGGNSTFVPEGNTAATASQKAASILGSDQNIHSLDNIPSPVSVLDASFYHKRISDSFKEAHYATQRTSIPSCQRADKASDR

SEQ ID NO: 170511 - protein, 145 aa, Zea Mays
MVAAVTPAPLSVVLVPPVPDHRVGIFAGTEFVASIPSHPAPSFTVARVGPQSRPTPPPPLQLNQFIFKGMERRTNREIFVHCRLQICVSSCSSSVPRSSASKVLSYTISCAIYCPHGHNQFIYVLSFVHITWRYESWDGHMFIVT

SEQ ID NO: 170512 - protein, 168 aa, Zea Mays
MVHPQQNDTTNTPGMLPVEPAEEPIYVNAKQYHAILRRRQTRAKLEAQNKMVKNRKPYLHESRHRHAMKRARGSGGRFLNTKQLQEQNQQYQASSGSLCSKIIANSIISQSGPTCTPSSGTAGASTAGQDRSCLPSVGFRPTTNFSDQGRGGLKLAVIGMQQRVSTIR

SEQ ID NO: 170513 - protein, 217 aa, Zea Mays
MKPVLSLGKEGSAFLAPKLHYSPSFACIPYTSDAYYSAVGVLTGYPPHAIVHPQQNDTTNTPGMLPVEPAEEPIYVNAKQYHAILRRRQTRAKLEAQNKMVKNRKPYLHESRHRHAMKRARGSGGRFLNTKQLQEQNQQYQASSGSLCSKIIANSIISQSGPTCTPSSGTAGASTAGQDRSCLPSVGFRPTTNFSDQGRGGLKLAVIGMQQRVSTIR

SEQ ID NO: 170514 - protein, 286 aa, Zea Mays
MKHSGHKVCDRDSSSESDRSHQEASAASESSPNEHTSTQSDNDEDHGKDNQDTMKPVLSLGKEGSAFLAPKLHYSPSFACIPYTSDAYYSAVGVLTGYPPHAIVCSLLIFQFLSSWPHSVHPQQNDTTNTPGMLPVEPAEEPIYVNAKQYHAILRRRQTRAKLEAQNKMVKNRKPYLHESRHRHAMKRARGSGGRFLNTKQLQEQNQQYQASSGSLCSKIIANSIISQSGPTCTPSSGTAGASTAGQDRSCLPSVGFRPTTNFSDQGRGGLKLAVIGMQQRVSTIR

SEQ ID NO: 170515 - protein, 94 aa, Zea Mays
MGRSVEHMVLAVWFVRVDNFSVGRCREDGGRGEAGAEELLGGASQEPHRRCHDAGLPRCQSRQGATCRSGQGGCPKNESIKVCSWILHSERLKR

SEQ ID NO: 170516 - protein, 90 aa, Zea Mays
MGRSVEHMVLAVWFVRVDNFSVGRCREDGGRGEAGAEELLGGASQEPHRRCHDAGLPRCQSRQGATCRSGQGGCPKILFLLPSDEGTSIL

SEQ ID NO: 170517 - protein, 62 aa, Zea Mays
MVFSYLSSRVVLRAARYQFQLEHAKLKRYSPARSVFSVYCVEALPFYVNYAVNVQFLWTLNF

SEQ ID NO: 170518 - protein, 151 aa, Zea Mays
MLIYMLHRKFEPCEGIEDLSLTGQKVVGDYVAGSSRGDVEILHVHEIIFSTIDKPKLLAQLSALLSEVGLNIREAHVFSTTDGFCLDVFVVDGWDTKPLLLKVEAVLMTMIFFSSHFLGAIPTFLFHIFWVPVQPFYACVKKWKTYMNFVE

SEQ ID NO: 170519 - protein, 68 aa, Zea Mays
MDVIFGVGGAIFLHPDIRDLRGIGVQGKLPWQRISDDGHSASCSTGVLFGNGLDRHAACRMAWMPPAS

SEQ ID NO: 170520 - protein, 66 aa, Zea Mays
MILPYFKAKPGPGTTQAPEASKRSRIHHCHGQVLQKLKLIMDKTLPCVTMGAFAGGPWIRLLMGGE

SEQ ID NO: 170521 - protein, 172 aa, Zea Mays
MPPASIVPVIGDLRSNRLVCLRRDRGSYRAFVSVDEVLDLCVTGAEYEGSRAAQAASSWAEQTGESKRMDQELEPQVQRLTSASTVLRRVLDNPALQDYQENNGFGDLNCPAACTASPSPTGSTGPQARCREADTDRRETVPPQFCNGTSLLKYPEGKLDVFLIHQLGKSER

SEQ ID NO: 170522 - protein, 151 aa, Zea Mays
MPPASIVPVIGDLRSNRLVCLRRDRGSYRAFVSVDEVLDLCVTGAEYEGSRAAQAASSWAEQTGESKRMDQELEPQVQRLTSASTVLRRVLDNPALQDYQENNGFGDLNCPAACTASPSPTGSTGPQARCREADTDRRETVPPQEMNFHQT

SEQ ID NO: 170523 - protein, 114 aa, Zea Mays
MPPASIVPVIGDLRSNRLVCLRRDRGSYRAFVSVDEVLDLCVTGAEYEGSRAAQAASSWAEQTGESKRMDQELEPQVQRLTSASTVLRRVLDNPALQDYQENNGFGDLKLSLTV

SEQ ID NO: 170524 - protein, 68 aa, Zea Mays
MAPLYHLCLSICGLRIAPTLTPPSSPSTPSAAPVLALEIADRLIMGGSVSTSFSVGQGIPFLCPLSSV

SEQ ID NO: 170525 - protein, 91 aa, Zea Mays
MDQELEPQVQRLTSASTVLRRVLDNPALQDYQENNGFGDLNCPAACTASPSPTGSTGPQARCREADTDRRETVPPQVKYLFSPLSLFFSIF

SEQ ID NO: 170526 - protein, 113 aa, Zea Mays
MVRAGGSGHRRGTRSPLCSSKKMRDRGRRRRRARGRNRLVRARGWIRSLSPRPYRELRSCLDLTGPRDYSSPEEMVQRLTSASTVLRRVLDNPALQDYQENNGFGDLKLSLTV

SEQ ID NO: 170527 - protein, 76 aa, Zea Mays
MVQRLTSASTVLRRVLDNPALQDYQENNGFGDLNCPAACTASPSPTGSTGPQARCREADTDRRETVPPQEMNFHQT

SEQ ID NO: 170528 - protein, 315 aa, Zea Mays
MAFFVLFHSTHCTLHQLLFMVPYFLDEETGWALEVDELKKQLEEARSKGISVRALVVINPGNPTGQVLTEENQKKIVEFCKNERLVLLADEVYQENIYVEDKQFHSFKKIARSLGYTDDDLPLVSFQSISKGYYGECGKRGGYMEITGFSPQVRDQIYKMASINLCSNITGQILASLVMNPPKAGDESFESFRLERDGILSSLGRRAKALEEAFNSLEGITCNKAEGAMYLFPRLHLPRKAIGAAQAAGTAPDAYYAKRLLEATGIVFVPGSGFGQVPGTWHIRSTILPQEDKIPGIVSRFKEFHDKFMDEFRDY

SEQ ID NO: 170529 - protein, 81 aa, Zea Mays
MTPRWRHADPSTSPSSSLPLDSLQFPGQSSCRLSATHRLSEMESPPLTVEATAFTEKNDGHDFGGYNQDVKEKESWRQETP

SEQ ID NO: 170530 - protein, 388 aa, Zea Mays
MDTCVDRIVLHWRFKDADPRRIYPRSSFCINCKGAMPFYSNRRCTRRGNRIVAGKVIKESYGKQKQQHTFTIQVFWSKGPGKLPPLHLLLVKGRNLYRMMTFRQPWANEAERLKILEEKHNRGDDARRVRALNRPNSAGNTLKGKKKLHKEKHKSRSERPHRQSNITELDKGKKRPAQSSKSDLPNKRSKKEGSQVPSRKKDTGGRMAKKNGPCQDKSICTGQNSSLCKDNREKHSHATFQKKCHAEPLNNGPSGSGWNRTAGGHSQFEGRHITPASHVEANHGNFVSVQHPCVERLQRPTQSREVALAHPGGGHPYVLSSAAMGLRHQNGATAGVHAPAYFRGLPLSQQRAAFPSASTPQTGYHPHPEELFVAPHFRYPRGSAGFRR

SEQ ID NO: 170531 - protein, 526 aa, Zea Mays
MPVTRRRAAVAAVAQEEGRDAAIYISSDSDAGSDPEDSESEEEEDTSDEDFIDVSDSEADDGESSDEEGEEDSESEAEAEAEQLGADRSEVACNKIAGLLSSGRSLEGLKLAEYKVYLKKNGLSQTGGMDTCVDRIVLHWRFKDADPRRIYPRSSFCINCKGDVCRGDAVLFKQKVYEKRHAKCIGNRIVAGKVIKESYGKQKQQHTFTIQVFWSKGPGKLPPLHLLLVKGRNLYRMMTFRQPWANEAERLKILEEKHNRGDDARRVRALNRPNSAGNTLKGKKKLHKEKHKSRSERPHRQSNITELDKGKKRPAQSSKSDLPNKRSKKEGSQVPSRKKDTGGRMAKKNGPCQDKSICTGQNSSLCKDNREKHSHATFQKKCHAEPLNNGPSGSGWNRTAGGHSQFEGRHITPASHVEANHGNFVSVQHPCVERLQRPTQSREVALAHPGGGHPYVLSSAAMGLRHQNGATAGVHAPAYFRGLPLSQQRAAFPSASTPQTGYHPHPEELFVAPHFRYPRGSAGFRR

SEQ ID NO: 170532 - protein, 377 aa, Zea Mays
MRIQGEFILGHPFVSTVKVMFVGAMPFYSNRRCTRRGNRIVAGKVIKESYGKQKQQHTFTIQVFWSKGPGKLPPLHLLLVKGRNLYRMMTFRQPWANEAERLKILEEKHNRGDDARRVRALNRPNSAGNTLKGKKKLHKEKHKSRSERPHRQSNITELDKGKKRPAQSSKSDLPNKRSKKEGSQVPSRKKDTGGRMAKKNGPCQDKSICTGQNSSLCKDNREKHSHATFQKKCHAEPLNNGPSGSGWNRTAGGHSQFEGRHITPASHVEANHGNFVSVQHPCVERLQRPTQSREVALAHPGGGHPYVLSSAAMGLRHQNGATAGVHAPAYFRGLPLSQQRAAFPSASTPQTGYHPHPEELFVAPHFRYPRGSAGFRR

SEQ ID NO: 170533 - protein, 182 aa, Zea Mays
MAKKNGPCQDKSICTGQNSSLCKDNREKHSHATFQKKCHAEPLNNGPSGSGWNRTAGGHSQFEGRHITPASHVEANHGNFVSVQHPCVERLQRPTQSREVALAHPGGGHPYVLSSAAMGLRHQNGATAGVHAPAYFRGLPLSQQRAAFPSASTPQTGYHPHPEELFVAPHFRYPRGSAGFRR

SEQ ID NO: 170534 - protein, 516 aa, Zea Mays
MPVTRRRAAVAAVAQEEGRDAAIYISSDSDAGSDPEDSESEEEEDTSDEDFIDVSDSEADDGESSDEEGEEDSESEAEAEAEQLGADRSEVACNKIAGLLSSGRSLEGLKLAEYKVYLKKNGLSQTGGMDTCVDRIVLHWRFKDADPRRIYPRSSFCINCKGAMPFYSNRRCTRRGNRIVAGKVIKESYGKQKQQHTFTIQVFWSKGPGKLPPLHLLLVKGRNLYRMMTFRQPWANEAERLKILEEKHNRGDDARRVRALNRPNSAGNTLKGKKKLHKEKHKSRSERPHRQSNITELDKGKKRPAQSSKSDLPNKRSKKEGSQVPSRKKDTGGRMAKKNGPCQDKSICTGQNSSLCKDNREKHSHATFQKKCHAEPLNNGPSGSGWNRTAGGHSQFEGRHITPASHVEANHGNFVSVQHPCVERLQRPTQSREVALAHPGGGHPYVLSSAAMGLRHQNGATAGVHAPAYFRGLPLSQQRAAFPSASTPQTGYHPHPEELFVAPHFRYPRGSAGFRR

SEQ ID NO: 170535 - protein, 207 aa, Zea Mays
MLCEGGELLDRILSRGGKYSEDDAKAVLVQILNVVAFCHIQGVVHRDLKPENFLFTSKDENSHLKAIDFGLSDFVKPDERLNDIVGSAYYVAPEVLHRCYSTEADVWSIGVIAYILLCGSRPFWARTESGIFRSVLKADPSYNEAPWPSLTPEAMDFVKRLLCKDPRRRMTAAQALKIIMPLGCRWTFLYSDLSKLIFVPHLYGKPL

SEQ ID NO: 170536 - protein, 245 aa, Zea Mays
MTWGMRSDGATLATPAPPRLRRAHARGSPSPSKSSPKQRLCEGGELLDRILSRGGKYSEDDAKAVLVQILNVVAFCHIQGVVHRDLKPENFLFTSKDENSHLKAIDFGLSDFVKPDERLNDIVGSAYYVAPEVLHRCYSTEADVWSIGVIAYILLCGSRPFWARTESGIFRSVLKADPSYNEAPWPSLTPEAMDFVKRLLCKDPRRRMTAAQALKIIMPLGCRWTFLYSDLSKLIFVPHLYGKPL

SEQ ID NO: 170537 - protein, 55 aa, Zea Mays
MLTRCGRSSPTTSTSPTQSPTSYRVGRFCVCMKGGYGWSREACNGQHTLYWHNEC

SEQ ID NO: 170538 - protein, 53 aa, Zea Mays
MYLLKLFFTCKVLKKSKYIFIHLFFMKRVSSYEPEFRETFIKGSFGIKSNGGD

SEQ ID NO: 170539 - protein, 69 aa, Zea Mays
MPPRSVAIALSRPPSGCFVAVAAVAATLLLPLGYLPSCCRVSPLRCGRALTAPVGRSVAAAAASATGDH

SEQ ID NO: 170540 - protein, 252 aa, Zea Mays
MTASGLTVDHPIMTTTDFWTSHECLLLPYEQALTREDSTSGLFYDCSAHMLWVGERTRQLDGAHVEFLRGVANPLGIKVSDKMNPSELVKLIDILNPSNKPGRITIITRMGAENMRVKLPHLIRAVRNAGLIVTWITDPMHGNTIKAPCGLKTRPFDSILAEVRAFFDVHDQEGSHPGGVHLEMTGQNVTECIGGSRTVTFDDLSDRYHTHCDPRLNASQSLELAFIIAERLRKRRMRSGLNSSLPLPPLAF

SEQ ID NO: 170541 - protein, 116 aa, Zea Mays
MKRGWAMRRSRPVSVPSCAPASDAASSRPTTRENGCENCPFLEMDREHDNVVNCTTPNFTGIISLMDPSRSWAARWLRIGRFIPGCYTLAVSEELPEEYQGICQDNNVQYVPPKRV

SEQ ID NO: 170542 - protein, 87 aa, Zea Mays
MKRGWAMRRSRPVSVPSCAPASDAASSRPTTRIISLMDPSRSWAARWLRIGRFIPGCYTLAVSEELPEEYQGICQDNNVQYVPPKRV

SEQ ID NO: 170543 - protein, 149 aa, Zea Mays
MERPAPVRKSHTSTADLLIWPEGAPQESPAGATPPSNRRPHQPSEALRKVVFGGQVTEEEAESLNKRSPEIYGTTLGTVISFVCAVVDLCCCGWRNSLDLRKPCSAPKWKEMTGSGIFAAGGEAEEDESANASATPIRTAPKNYQVLLM

SEQ ID NO: 170544 - protein, 320 aa, Zea Mays
MERPAPVRKSHTSTADLLIWPEGAPQESPAGATPPSNRRPHQPSEALRKVVFGGQVTEEEAESLNKRSPEIYGTTLGTVISFVCAVVDLCCCGWRNSLDLRKPCSAPKWKEMTGSGIFAAGGEAEEDESANASATPIRTAPKNYQAISTISHISFSEEESISPKKPTSIAEVAKQRELSGTLLSEDDSKMKKQISDLKSKELSGHDIFAPPEDPRPRNSENGSTSQTPGKNVSNFKFGEADEDGMVKTAKKIPTKKFTDLAGNIFKGDETPPGTAEKHLSTAKLKEMTGSDIFADGKAPSRDYLGGIRKPPGGESSIALV

SEQ ID NO: 170545 - protein, 133 aa, Zea Mays
MKKQISDLKSKELSGHDIFAPPEDPRPRNSENGSTSQTPGKNAHVSNFKFGEADEDGMVKTAKKIPTKKFTDLAGNIFKGDETPPGTAEKHLSTAKLKEMTGSDIFADGKAPSRDYLGGIRKPPGGESSIALV

SEQ ID NO: 170546 - protein, 160 aa, Zea Mays
MARLGLLALAVAVLALASGVASQAPGPAPSADCASALAGLMGCLPYVQQGSTQGKPDRECCAGVKAALKSPATVVCLCAAVGQNYGMPVNLTRGAGLPAACGEDPAALSKCNKPTASGTAPAVPSPGSSKSSSSAAAAIRFPVSAFAVVVAATLLSHCLL

SEQ ID NO: 170547 - protein, 205 aa, Zea Mays
MTQATVDGKKNKVYGQNLCYLAKLFLDHKTLYYDVDLFLFYVLCECDDRGCHMVGYFSKEKHSEESYNLACILTLPPYQRKGYGKFLIAFSYELSKKEGKVGTPERPLSDLGLLSYRGYWTRVLLEILKKHKGNISIKELSDMTAIKADDILSTLQSLDLIQYRKGQHVICADPKVLDRHLKAAGRGGLDVDVSKLIWTPYKEQG

SEQ ID NO: 170548 - protein, 390 aa, Zea Mays
MGSMEASTAPENGSSAAGGGAGGTACNGAGAASNGGGMERRLRSSAASASWAAHLPLEVGTRVMCRWRDQKLHPVKVIERRKGSACSSPADYEYYVHYTEFNRRLDEWVKLDQLDLDTVETVVDEKVEDKATSLKMTRHQKRKIDETHVEQGHEELDAASLREHEEFTKVKNIAKIELGRYEIDTWYFSPFPPEYNDCPKLFFCEFCLNFMKRKEQLQRHMKKCDLKHPPGDEIYRSGTLSMFEEKHSEESYNLACILTLPPYQRKGYGKFLIAFSYELSKKEGKVGTPERPLSDLGLLSYRGYWTRVLLEILKKHKGNISIKELSDMTAIKADDILSTLQSLDLIQYRKGQHVICADPKVLDRHLKAAGRGGLDVDVSKLIWTPYKEQG

SEQ ID NO: 170549 - protein, 168 aa, Zea Mays
MGSMEASTAPENGSSAAGGGAGGTACNGAGAASNGGGMERRLRSSAASASWAAHLPLEVGTRVMCRWRDQKLHPVKVIERRKGSACSSPADYEYYVHYTEFNRRLDEWVKLDQLDLDTVETVVDEKVEDKATSLKMTRHQKRKIDETHVEDMRSLMQPACGNMKNSQR

SEQ ID NO: 170550 - protein, 625 aa, Zea Mays
MATGADLTSPTGAAAAAAAARKDRHIVSWSSEEDGVLRAQIALHGTDNWTIIAAQFKDKTARQCRRRWYNYLNSECKKGGTDNAVKNRFSTLCKRRAKDDELYQENGVPCSNTNAKKVLTETGRLTPGGAGSLVHIKQTRSSSYNLKENLVPNMKLFELEKSTQDARQPLATISSNNQDNVNTVKSQNLVPTTKQLLGPEQHCVKREGNFLKKDDPKVATLLQQSDFLCSLATKIKSDNTSKSMDEAWQQLQDHLVKKEHNKVPENSGSEIASLLEELDDLIVDPYERKDEDEQKLSEHNGRTDVDNDHCNGSSQTSIVVTTNMVPEEMMGDCPVDNCNEDSSLCRKVLSGSTEPCPGAKMTGCGNLSEDQVAEGSVLQRVESISPVITDIDDLLVDPYESEAEDEEKSGEQNGQIDVHAEQCFGSSQTIIEVISDMAPDEVMETCSADNREEHSSICRNVLSGSMAPCPGAEIPTSEKMSELAEDSRLQCMEFASPVLANFASKECGETPEPQVLNEIVEDSRLQCIEFNSPAHTILPDKTGAENFASPSFDVVAKDSKPPSLEFTSPAHTVATFQPYADGIPTPKFTASERSFLLSVLELTSPGSRPETSQQPSCKRALLNSL

SEQ ID NO: 170551 - protein, 606 aa, Zea Mays
MATGADLTSPTGAAAAAAAARKDRHIVSWSSEEDGVLRAQIALHGTDNWTIIAAQFKDKTARQCRRRWYNYLNSECKKGGWSREEDMLLCEAQKVLGNKWTEIAKVVSGRTDNAVKNRFSTLCKRRAKDDELYQENGVPCSNTNAKKVLTETGRLTPGGAGSLVHIKQTRSSSYNLKENLVPNMKLFELEKSTQDARQPLATISSNNQDNVNTVKSQNLVPTTKQLLGPEQHCVKREGNFLKKDDPKVATLLQQSDFLCSLATKIKSDNTSKSMDEAWQQLQDHLVKKEHNKVPENSGSEIASLLEELDDLIVDPYERKDEDEQKLSEHNGRTDVDNDHCNGSSQTSIVVTTNMVPEEMMGDCPVDNCNEDSSLCRKVLSGSTEPCPGAKMTGCGNLSEDQVAEGSVLQRVESISPVITDIDDLLVDPYESEAEDEEKSGEQNGQIDVHAEQCFGSSQTIIEVISDMAPDEVMETCSADNREEHSSICRNVLSGSMAPCPGAEIPTSEKMSELAEDSRLQCMEFASPVLANFASKECGETPEPQVLNEIVEDSRLQCIEFNSPAHTILPDKTGAENFASPSFDVVAKDREEFSAVSFRADLTRVKA

SEQ ID NO: 170552 - protein, 566 aa, Zea Mays
MLLCEAQKVLGNKWTEIAKVVSGRTDNAVKNRFSTLCKRRAKDDELYQENGVPCSNTNAKKVLTETGRLTPGGAGSLVHIKQTSYNLKENLVPNMKLFELEKSTQDARQPLATISSNNQDNVNTVKSQNLVPTTKQLLGPEQHCVKREGNFLKKDDPKVATLLQQSDFLCSLATKIKSDNTSKSMDEAWQQLQDHLVKKEHNKVPENSGSEIASLLEELDDLIVDPYERKDEDEQKLSEHNGRTDVDNDHCNGSSQTSIVVTTNMVPEEMMGDCPVDNCNEDSSLCRKVLSGSTEPCPGAKMTGCGNLSEDQVAEGSVLQRVESISPVITDIDDLLVDPYESEAEDEEKSGEQNGQIDVHAEQCFGSSQTIIEVISDMAPDEVMETCSADNREEHSSICRNVLSGSMAPCPGAEIPTSEKMSELAEDSRLQCMEFASPVLANFASKECGETPEPQVLNEIVEDSRLQCIEFNSPAHTILPDKTGAENFASPSFDVVAKDSKPPSLEFTSPAHTVATFQPYADGIPTPKFTASERSFLLSVLELTSPGSRPETSQQPSCKRALLNSL

SEQ ID NO: 170553 - protein, 422 aa, Zea Mays
MATGADLTSPTGAAAAAAAARKDRHIVSWSSEEDGVLRAQIALHGTDNWTIIAAQFKDKTARQCRRRWYNYLNSECKKGGWSREEDMLLCEAQKVLGNKWTEIAKVVSGRTDNAVKNRFSTLCKRRAKDDELYQENGVPCSNTNAKKVLTETGRLTPGGAGSLVHIKQTSYNLKENLVPNMKLFELEKSTQDARQPLATISSNNQDNVNTVKSQNLVPTTKQLLGPEQHCVKREGNFLKKDDPKVATLLQQSDFLCSLATKIKSDNTSKSMDEAWQQLQDHLVKKEHNKVPENSGSEIASLLEELDDLIVDPYERKDEDEQKLSEHNGRTDVDNDHCNGSSQTSIVVTTNMVPEEMMGDCPVDNCNEDSSLCRKVLSGSTEPCPGAKMTGCGNLSEDQVAEGSRMDRLMCMLSSVLVLLKLS

SEQ ID NO: 170554 - protein, 633 aa, Zea Mays
MATGADLTSPTGAAAAAAAARKDRHIVSWSSEEDGVLRAQIALHGTDNWTIIAAQFKDKTARQCRRRWYNYLNSECKKGGWSREEDMLLCEAQKVLGNKWTEIAKVVSGRTDNAVKNRFSTLCKRRAKDDELYQENGVPCSNTNAKKVLTETGRLTPGGAGSLVHIKQTRSSSYNLKENLVPNMKLFELEKSTQDARQPLATISSNNQDNVNTVKSQNLVPTTKQLLGPEQHCVKREGNFLKKDDPKVATLLQQSDFLCSLATKIKSDNTSKSMDEAWQQLQDHLVKKEHNKVPENSGSEIASLLEELDDLIVDPYERKDEDEQKLSEHNGRTDVDNDHCNGSSQTSIVVTTNMVPEEMMGDCPVDNCNEDSSLCRKVLSGSTEPCPGAKMTGCGNLSEDQVAEDPYESEAEDEEKSGEQNGQIDVHAEQCFGSSQTIIEVISDMAPDEVMETCSADNREEHSSICRNVLSGSMAPCPGAEIPTSEKMSELAEDSRLQCMEFASPVLANFASKECGETPEPQVLNEIVEDSRLQCIEFNSPAHTILPDKTGAENFASPSFDVVAKDSKPPSLEFTSPAHTVATFQPYADGIPTPKFTASERSFLLSVLELTSPGSRPETSQQPSCKRALLNSL

SEQ ID NO: 170555 - protein, 169 aa, Zea Mays
MVHVNFYRNYGKTFKKPRRPYEKERLDAELKLVARELLTLDEKNPRRIFEGEALLRRMNRYGLLGEGQNKLDYVLALTVENFLQRRLQTIVFKNGMAKSIHHARVLIRQRHIRVGRQLVNIPSFMVRVESEKHIDFSLTSPLGGGPAGRVKRKNQKKASGGGDAEEDEE

SEQ ID NO: 170556 - protein, 329 aa, Zea Mays
MAIHPRTTGGRRQPLPLPLKGALLAAIAVATALSVLFVLSFTDTLTFTDTLPYLGFRPRDVDKRDGNRRYLYWGSRVDCPGKHCGSCAGLGHQESSLRCALEEALFLDRVLVMPAKMCLSSVHNTKGVLQSSNATSQQRWETGSCAMESLYDIDLISRTVPVILDNPRSWYEIISRSTKLGEDGLVVHVQGVSRAELKQNSNYSGALLINRTASPLAWFMECKDRTKRSSVMLPYTFLPTMATRKLRDAANKMKEILGDYDAIHVRRGDLLKNRKDRFGVERSLHPHLDRDTRPEFIKKRIAKWIRPGRTLFISSNERTPGFFSSLSDK

SEQ ID NO: 170557 - protein, 137 aa, Zea Mays
MVTLSGAHSIGVARCRFFTNRLPPNPSDMDRDLARSLKATCDQNGLDSKVVQDPVTPVALDNQYYKNVHNGKVLFTSDAALNSTDDARKVVDGFANNAVDWYRAFADAMVKMGNIRDRTINRPKPEIREKCFIYNTY

SEQ ID NO: 170558 - protein, 234 aa, Zea Mays
MDKIKDSSRQSKQLEDLTAKMRECKRLIKEFDRILKDEEKKDTPEANKQLNDKKQFMIKELNSYVTLRKTYQSSLGNKRIELFDTGTDQVADKSPVQMASEMSNQELISAGRKQMDQTDQAIERSKMVVAQTVEVGAQTAATLSQQTEQMKRIGNELDSVHFSLKKASQMVKEIGRQVATDKCIMAFLFLIVCGVIAIIVVKIVNPHNKNIRDIPGLAPPAMNRRLLSIDALGL

SEQ ID NO: 170559 - protein, 88 aa, Zea Mays
MRSSEAMELLGFPPYSRPSPSEVKAAYRRMVMESHPDRVPTHLKSQAESKFKEEEDQGVGWKFMLCVLVFQLATEDQIERWLKPRFYS

SEQ ID NO: 170560 - protein, 60 aa, Zea Mays
MEVHVMRSGVPTSHGRSNRTLVKAPFLLIMFAAVSFGAFSASRAYQRQKELCSSQNPFLP

SEQ ID NO: 170561 - protein, 177 aa, Zea Mays
MPFSDDEEDISMDEDSLNITEHNDIQDKIAINQINAFQLIGMSSCLDLSGFFEKEDVSERKIRFASNYSPAYLFEKIESIVRKMGFQVHKSNGKLKVIQDCKGLANSRGQESLLISAEVFEINEYLYVVELKKSSGDCSLYRKLCETLSEDLGTCKSQQFLKQDSIRQDIGRYNSSF

SEQ ID NO: 170562 - protein, 246 aa, Zea Mays
MLTGNLPFDDQNVVVLYQKILKGNAHIPKWLSQGAQDILRKILDPNPVTRIDVDGIRAHDWFKQGYAPAMPFSDDEEDISMDEDSLNITEHNDIQDKIAINQINAFQLIGMSSCLDLSGFFEKEDVSERKIRFASNYSPAYLFEKIESIVRKMGFQVHKSNGKLKVIQDCKGLANSRGQESLLISAEVFEINEYLYVVELKKSSGDCSLYRKLCETLSEDLGTCKSQQFLKQDSIRQDIGRYNSSF

SEQ ID NO: 170563 - protein, 448 aa, Zea Mays
MRMGKYEMGRTLGEGHFGKVRLARHADTGRPFAIKILDRQRILAMKIHDQIKREIATLKLLKHPNVVRLYEVSASKTKIYMVLEYVNGGELFDKIALKGKLTEKEGRKLFQQLIDAVGYCHEKGVYHRDLKPENVLVDAKGNIKVSDFGLSALPQNQQKDGLLHTTCGSPNYIAPEVLLNKGYDGSISDVWSCGVILYVMLTGNLPFDDQNVVVLYQKILKGNAHIPKWLSQGAQDILRKILDPNPVTRIDVDGIRAHDWFKQGYAPAMPFSDDEEDISMDEDSLNITEVTYHNDIQDKIAINQINAFQLIGMSSCLDLSGFFEKEDVSERKIRFASNYSPAYLFEKIESIVRKMGFQVHKSNGKLKVIQDCKGLANSRGQESLLISAEVFEINEYLYVVELKKSSGDCSLYRKLCETLSEDLGTCKSQQFLKQDSIRQDIGRYNSSF

SEQ ID NO: 170564 - protein, 448 aa, Zea Mays
MRMGKYEMGRTLGEGHFGKVRLARHADTGRPFAIKILDRQRILAMKIHDQIKREIATLKLLKHPNVVRLYEVSASKTKIYMVLEYVNGGELFDKIYMQALKGKLTEKEGRKLFQQLIDAVGYCHEKGVYHRDLKPENVLVDAKGNIKVSDFGLSALPQNQQKDGLLHTTCGSPNYIAPEVLLNKGYDGSISDVWSCGVILYVMLTGNLPFDDQNVVVLYQKILKGNAHIPKWLSQGAQDILRKILDPNPVTRIDVDGIRAHDWFKQGYAPAMPFSDDEEDISMDEDSLNITEHNDIQDKIAINQINAFQLIGMSSCLDLSGFFEKEDVSERKIRFASNYSPAYLFEKIESIVRKMGFQVHKSNGKLKVIQDCKGLANSRGQESLLISAEVFEINEYLYVVELKKSSGDCSLYRKLCETLSEDLGTCKSQQFLKQDSIRQDIGRYNSSF

SEQ ID NO: 170565 - protein, 73 aa, Zea Mays
MAFTTHPPPALCSLSISSGGRRSTLQAAAKRCRTARPPASTSSSPSSCRRSGSSSSSAAGWAGSCSQQLFGVS

SEQ ID NO: 170566 - protein, 119 aa, Zea Mays
MAFTTHPPPALCSLSISSGGRRSTLQAAAKRCRTARPPASTSSSPSSCRRSGSSSSSAAGLSSGSASSSPSSATSQASSTLSGSSPCSRPAERNHGSLPLPGRHAAGRAVLLIASFCFR

SEQ ID NO: 170567 - protein, 188 aa, Zea Mays
MAARRLGSPASRWLRPSALLLLVASALLSAPSPARALRFDLESGHTKCVSDEIKVNAMAVGKYHFAFTAAEAGDYLACFWAPDHKPPVTIGFEFDWRSGVSAKDYPSVAKKGKVDMMELELKKLEETIKNIHEEMLYLREREEEMQDVNRRTNSRMAWLGFLSLGVCLSVAGLQLWHLKTFFERKKLL

SEQ ID NO: 170568 - protein, 420 aa, Zea Mays
MLHPQMTTAIAIEDVRREVRILSSLTGHSNLVQFYDAFEDEDNVYIVMELCKGGELLDRILARGGKYSEEDAKVVMVQILSVVSFCHLQGVVHRDLKPENFLFSSKDENSPLKVIDFGLSDFVKPDERLNDIVGSAYYVAPEVLHRSYATEADMWSIGVIAYILLCGSRPFWARTESGIFRAVLKAEPSFDEAPWPTLTAEAKDFVKRLLNKDYRKRMTAAQALSHPWIRNSQQVKVPLDMIIYKLMRAYISSSSLRKSALRALAKTLTTDQLFYVREQFELLGPNKNGYISLQNLKSALAKNSTDAMKDSRVVDFVNTVCALQYRKLDFEEFAASAISVYQMEALETWEQHARRAYELFDKEGNRPIVIEELASELGLGPSVPLHVVLQDWVRHADGKLSFLGFIKLLHGVSSRSIPKA

SEQ ID NO: 170569 - protein, 421 aa, Zea Mays
MTTAIAIEDVRREVRILSSLTGHSNLVQFYDAFEDEDNVYIVMELCKGGELLDRILARGGKYSEEDAKVVMVQILSVVSFCHLQGVVHRDLKPENFLFSSKDENSPLKVIDFGLSDFVKPDERLNDIVGSAYYVAPEVLHRSYATEADMWSIGVIAYILLCGSRPFWARTESGIFRAVLKAEPSFDEAPWPTLTAEAKDFVKRLLNKDYRKRMTAAQALSHPWIRNSQQVKVPLDMIIYKLMRAYISSSSLRKSALRALAKTLTTDQLFYVREQFELLGPNKNGYISLQNLKSALAKNSTDAMKDSRVVDFVNTETGFRRVRRFRHQRLPDGSPGDLGAAREARVRAVRQGRKPAHCDRGTCVGARTWPVSASPRCPPRLGQTRRREAELPGVHQALARGLVALDPKGLALYTIHPSSLLL

SEQ ID NO: 170570 - protein, 415 aa, Zea Mays
MKAMLMTTAIAIEDVRREVRILSSLTGHSNLVQFYDAFEDEDNVYIVMELCKGGELLDRILARGGKYSEEDAKVVMVQILSVVSFCHLQGVVHRDLKPENFLFSSKDENSPLKVIDFGLSDFVKPDERLNDIVGSAYYVAPEVLHRSYATEADMWSIGVIAYILLCGSRPFWARTESGIFRAVLKAEPSFDEAPWPTLTAEAKDFVKRLLNKDYRKRMTAAQALSHPWIRNSQQVKVPLDMIIYKLMRAYISSSSLRKSALRALAKTLTTDQLFYVREQFELLGPNKNGYISLQNLKSALAKNSTDAMKDSRVVDFVNTYRKLDFEEFAASAISVYQMEALETWEQHARRAYELFDKEGNRPIVIEELASELGLGPSVPLHVVLQDWVRHADGKLSFLGFIKLLHGVSSRSIPKA

SEQ ID NO: 170571 - protein, 420 aa, Zea Mays
MKAMLMTTAIAIEDVRREVRILSSLTGHSNLVQFYDAFEDEDNVYIVMELCKGGELLDRILARGGKYSEEDAKVVMVQILSVVSFCHLQGVVHRDLKPENFLFSSKDENSPLKVIDFGLSDFVKPDERLNDIVGSAYYVAPEVLHRSYATEADMWSIGVIAYILLCGSRPFWARTESGIFRAVLKAEPSFDEAPWPTLTAEAKDFVKRLLNKDYRKRMTAAQALSHPWIRNSQQVKVPLDMIIYKLMRAYISSSSLRKSALRALAKTLTTDQLFYVREQFELLGPNKNGYISLQNLKSALAKNSTDAMKDSRVVDFVNTVCALQYRKLDFEEFAASAISVYQMEALETWEQHARRAYELFDKEGNRPIVIEELASELGLGPSVPLHVVLQDWVRHADGKLSFLGFIKLLHGVSSRSIPKA

SEQ ID NO: 170572 - protein, 78 aa, Zea Mays
MEETKPAPEAMLRCARAALLLASLRRPRAPTPTQDRRRTSYSPSSAAAAKAVRPGLRSPGDVACFVDAHWSDSERDDA

SEQ ID NO: 170573 - protein, 399 aa, Zea Mays
MAPPSRDYWLGFFRGAGDNIFDAIEAAITVAASDHPAALRERRDGIAERLFTALLVTSAAAAAAGAAAAAPGGGAAGGTPVAGAPTPAQLHPEGAASVPSLCSSDRAEAIADDAAPRCDDPVLAETERIKAVLLSDQEKPEAELLELLRRLQELDLAFDTLDATAIGKAVANFRKHSSKQIRNLVRSLIEDWKHTVDVWIAHRRDAVVDQTPQSMGPSSLEQEDRGAASTHMDEGDLFATPSTTIRLSEENMDGDGSIMTNDSRDCGQRYPMMNQEPARRPPPMGQRYDPEPCWRQSRPQELSNGQTKEQFVAEMLARPSSVESGPGRPQARPRQQHQDTPAAQARPQPAASEKPAAQLDANSVRAKLELAKNAKLEATKRKLQEGYQESDNGRCLSSE

SEQ ID NO: 170574 - protein, 183 aa, Zea Mays
MTNDSRDCGQRYPMMNQEPARRPPPMGQRYDPEPCWRQSRPQELSNGQTKEQFVAEMLARPSSVESGPGRPQARPRQQHQDTPAAQARPQPAASEKPAAQLDANSVRAKLELAKNAKLEATKRKLQEGYQESDNAKKQRNVQMVGPQNLPKQGNTNNNRSFQPSGSGRPRSSGNVNSNRNWSR

SEQ ID NO: 170575 - protein, 513 aa, Zea Mays
MAPPSRDYWLGFFRGAGDNIFDAIEAAITVAASDHPAALRERRDGIAERLFTALLVTSAAAAAAGAAAAAPGGGAAGGTPVAGAPTPAQLHPEGAASVPSLCSSDRAEAIADDAAPRCDDPVLAETERIKAVLLSDQEKPEAELLELLRRLQELDLAFDTLDATAIGKAVANFRKHSSKQIRNLVRSLIEDWKHTVDVWIAHRRDAVVDQTPQSMGPSSLEQEDRGAASTHMDEGDLFATPSTTIRLSEENMDGDGSIMTNDSRDCGQRYPMMNQEPARRPPPMGQRYDPEPCWRQSRPQELSNGQTKEQFVAEMLARPSSVESGPGRPQARPRQQHQDTPAAQARPQPAASEKPAAQLDANSVRAKLELAKNANSTRTPQQLKPGRSRLRPRNRRLNSTRTLCERSWSSRRTPSSRRPRGSSRKGTKNPITRRSRGTYRWWVRRTCPSKGTRTTTVVSSLAVAAGQGVAATSIATGTGQDERHRFQFRFQFLQERQDPFSFSFSFYIGYNNF

SEQ ID NO: 170576 - protein, 434 aa, Zea Mays
MAPPSRDYWLGFFRGAGDNIFDAIEAAITVAASDHPAALRERRDGIAERLFTALLVTSAAAAAAGAAAAAPGGGAAGGTPVAGAPTPAQLHPEGAASVPSLCSSDRAEAIADDAAPRCDDPVLAETERIKAVLLSDQEKPEAELLELLRRLQELDLAFDTLDATAIGKAVANFRKHSSKQIRNLVRSLIEDWKHTVDVWIAHRRDAVVDQTPQSMGPSSLEQEDRGAASTHMDEGDLFATPSTTIRLSEENMDGDGSIMTNDSRDCGQRYPMMNQEPARRPPPMGQRYDPEPCWRQSRPQELSNGQTKEQFVAEMLARPSSVESGPGRPQARPRQQHQDTPAAQARPQPAASEKPAAQLDANSVRAKLELAKNAKLEAAAPGHPSSSSQAAAGCVRETGGSTRRELCASEAGAREERQARGDQEEAPGRVPRIR

SEQ ID NO: 170577 - protein, 491 aa, Zea Mays
MAPPSRDYWLGFFRGAGDNIFDAIEAAITVAASDHPAALRERRDGIAERLFTALLVTSAAAAAAGAAAAAPGGGAAGGTPVAGAPTPAQLHPEGAASVPSLCSSDRAEAIADDAAPRCDDPVLAETERIKAVLLSDQEKPEAELLELLRRLQELDLAFDTLDATAIGKAVANFRKHSSKQIRNLVRSLIEDWKHTVDVWIAHRRDAVVDQTPQSMGPSSLEQEDRGAASTHMDEGDLFATPSTTIRLSEENMDGDGSIMTNDSRDCGQRYPMMNQEPARRPPPMGQRYDPEPCWRQSRPQELSNGQTKEQFVAEMLARPSSVESGPGRPQARPRQQHQDTPAAQARPQPAASEKPAAQLDANSVRAKLELAKNAKLEATKRKPRQQHQDTPAAQARPQPAASEKPAAQLDANSVRAKLELAKNAKLEATKRKLQEGYQESDNAKKQRNVQMVGPQNLPKQGNTNNNRSFQPSGSGRPRSSGNVNSNRNWSR

SEQ ID NO: 170578 - protein, 84 aa, Zea Mays
MNRSAATGMRSPSFGSPTERSLSCVAPSPTDPLLIHGRVSDASKPGQSEQRAASQPPVQTWHQIDGVTTELERSMQQSILPTSC

SEQ ID NO: 170579 - protein, 454 aa, Zea Mays
MGCAQGKCCLPRHPRRGSAAVGGRGGATLGRAAVPGAGLVLEYAALAVAGLYPDSPARESQDTHLVATRFAGDPDLHLFAVFDGHGAAGASCAGFARDALPRLLLASLAAGPAAAFRDAMLAANAEMHAAPGVDDSMSGTTAVAALVAGGALHVANVGDSRAVAGVWRAGRLVAEDLSWDQTPFRADERARVKACGARVMSVEQVEGMRDPEDVGWTPNEGDPPRVWARDALYPGTAFTRSLGDLAAEAVGVIAEPEVKSVEITPSHLFFVVASDGVFEFLSSQEVVDRVAMYQDPRDACSAIAAESYKLWLEHENRTDDITIIIVHIRDMENSGPAGSDKADYGSIGASIAGQTIQSEIPVFVQPEASNMNRSAATGMRSPSFGSPTERSLSCVAPSPTDPLLIHGRVSDASKPGQSEQRAASQPPVQTWHQIDGVTTELERSMQQSILPTSC

SEQ ID NO: 170580 - protein, 340 aa, Zea Mays
MGCAQGKCCLPRHPRRGSAAVGGRGGATLGRAAVPGAGLVLEYAALAVAGLYPDSPARESQDTHLVATRFAGDPDLHLFAVFDGHGAAGASCAGFARDALPRLLLASLAAGPAAAFRDAMLAANAEMHAAPGVDDSMSGTTAVAALVAGGALHVANVGDSRAVAGVWRAGRLVAEDLSWDQTPFRADERARVKACGARVMSVEQVEGMRDPEDVGWTPNEGDPPRVWARDALYPGTAFTRSLGDLAAEAVGVIAEPEVKSVEITPSHLFFVVASDGVFEFLSSQEVVDRVAMYQDPRDACSAIAAESYKLWLEHENRTDDITIIIVHIRDMENAVRSCRE

SEQ ID NO: 170581 - protein, 454 aa, Zea Mays
MGCAQGKCCLPRHPRRGSAAVGGRGGATLGRAAVPGAGLVLEYAALAVAGLYPDSPARESQDTHLVATRFAGDPDLHLFAVFDGHGAAGASCAGFARDALPRLLLASLAAGPAAAFRDAMLAANAEMHAAPGVDDSMSGTTAVAALVAGGALHVANVGDSRAVAGVWRAGRLVAEDLSWDQTPFRADERARVKACGARVMSVEQVEGMRDPEDVGWTPNEGDPPRVWARDALYPGTAFTRSLGDLAAEAVGVIAEPEVKSVEITPSHLFFVVASDGVFEFLSSQEVVDRVAMYQDPRDACSAIAAESYKLWLEHENRTDDITIIIVHIRDMENAGPAGSDKADYGSIGASIAGQTIQSEIPVFVQPEASNMNRSAATGMRSPSFGSPTERSLSCVAPSPTDPLLIHGRVSDASKPGQSEQRAASQPPVQTWHQIDGVTTELERSMQQSILPTSC

SEQ ID NO: 170582 - protein, 62 aa, Zea Mays
MCCFVVLIICVTKIAKSSLEKALAENGELHVGTSQLPGVTSPLDLQQPLVIKIDTSNEDHEK

SEQ ID NO: 170583 - protein, 241 aa, Zea Mays
MFILKDFLVWIKENLGPWGPLVLALAYIPLTVLAVPASILTLGGGYLFGLPVGFVADSIGAAIGATAAFLLGRTIGRSYVLSKCKDYPKFQAVAIAIQRSGFKIVLLLRLVPLLPFNMLNYLLSVTPVGVGEYMLASWLGMMPITLALVYVGTTLKDLSDVTHGWSEISTTRRILIISGFVLSVVLIICVTKIAKSSLEKALAENGELHVGTSQLPGVTSPLDLQQPLVIKIDTSNEDHEK

SEQ ID NO: 170584 - protein, 174 aa, Zea Mays
MFILKDFLVWIKENLGPWGPLVLALAYIPLTVLAVPASILTLGGGYLFGLPVGFVADSIGAAIGATAAFLLGRTIGRSYVLSKCKDYPKFQAVAIAIQRSGFKIVLLLRLVPLLPFNMLNYLLSVTPVGVGEYMLASWLGMMPITLALVYVGTTLKDLSDVTHGWSEISTTRRN

SEQ ID NO: 170585 - protein, 65 aa, Zea Mays
MGNIRNYSESGDFEGLSGLDQGEFGSMGSFGVGPRLHPSDSLSCSSINSYTWRGLSIWLASGVCC

SEQ ID NO: 170586 - protein, 170 aa, Zea Mays
MVVSIIGLLLFGKLLEPLWGSKELSKFIFIVNLSTSACVFMTAIVLYYITQQEIYLYTPFSGFYGVLSGLLVGIKQLLPDQELNLFVLKIKAKWIPSLVALISILGSIFIYDFMSYLPVLLFGMYMSWIYLRYFQKRLETSLKGDPSEEFSFSSFFPEFTISRPNSICIP

SEQ ID NO: 170587 - protein, 171 aa, Zea Mays
MFFALNLVVNQTHLSCSVQTHPDFRVPTPTALLALHSANSFRGDPEQETQQRGGSRRAAAATMMSGSSPPPPSLPAGNDPFCLEPDNCRLCRANNSRDGCQHHWPSFIWEVVRTSMGFKRVIKVHFYRQPFNFCLCFHDCYCAVLYNSARDLPLYSFFWILWGSIRIVGGH

SEQ ID NO: 170588 - protein, 170 aa, Zea Mays
MFFALNLVVNQTHLSCSVQTHPDFRVPTPTALLALHSANSFRGDPEQETQQRGGSRRAAAATMMSGSSPPPPSLPAGSGGFFRGYTKLCKGLAVILLIVHLVVQLFPSAVTYLALIPGRTIPFAWNLITAGYVEQTIPAILLFLDFMGFYQDCWWALNSFYLIKSLIFLC

SEQ ID NO: 170589 - protein, 345 aa, Zea Mays
MFFALNLVVNQTHLSCSVQTHPDFRVPTPTALLALHSANSFRGDPEQETQQRGGSRRAAAATMMSGSSPPPPSLPAGSGGFFRGYTKLCKGLAVILLIVHLVVQLFPSAVTYLALIPGRTIPFAWNLITAGYVEQTIPGMVVSIIGLLLFGKLLEPLWGSKELSKFIFIVNLSTSACVFMTAIVLYYITQQEIYLYTPFSGFYGVLSGLLVGIKQLLPDQELNLFVLKIKAKWIPSLVALISILGSIFIYDFMSYLPVLLFGMYMSWIYLRYFQKRLETSLKGDPSEEFSFSSFFPEFVRPFLDPIASVFHRLLCGRSDARGETLDTSPLPGSDSFEANRRRSLS

SEQ ID NO: 170590 - protein, 286 aa, Zea Mays
MCARCSSSRSSTRAARGKTRGYKRFFKRVALETSDYLKDDCLLVNCTVGVVQSHTEGPKIYTIPVPRSNMALHIGQLLTSGKRTDIAFEVDGEMFPAHKVILSARSPVFRAQLFGPMKDKDMKCIKIEDMEAPVFKALLHFMYWDELPDLEELTGVNTTWVSTLMAQHLLAAADRYALERLKLLCELKLCEDVAINTVANTLALAEQHHCYQLKTVCLKFVALPENLKAVMQTDGFDYLQQSCPSLLTELLEYVAKIGEHSVSPCLYSTEVLDGGDANGRRVKPRI

SEQ ID NO: 170591 - protein, 139 aa, Zea Mays
MAENLAPEKRHSFVHNGQKVFEWDQTLEEVNMYIELPKGVPTKLFHCSIQASHVEHDLTHPVKTDSSFWTIEDGEMHITLQKREKGKTWSSPIQGQGILDPYAADQEQKRLMLQRFQEEAQFSGTCPDPRTFMGGIRSE

SEQ ID NO: 170592 - protein, 149 aa, Zea Mays
MAENLAPEKRHSFVHNGQKVFEWDQTLEEVNMYIELPKGVPTKLFHCSIQASHVEVGIRGNPPYLNHDLTHPVKTDSSFWTIDGEMHITLQKREKGKTWSSPIQGQGILDPYAADQEQKRLMLQRFQEEAQFSGTCPDPRTFMGGIRSE

SEQ ID NO: 170593 - protein, 60 aa, Zea Mays
MSLMDGFFQSSGPEFSSDSKQTLLLCLFLFVDACIMYVCMFSVTDSFLLVCICMCMHSKI

SEQ ID NO: 170594 - protein, 287 aa, Zea Mays
MSLSPADSAAYWLRWQVLVCGALIALPAAAAAALLPRLRRAAPPLRAADLWVSCWARLHPGWLLAYRAFALAAAVALLARLLVGHGLTVFYFYTQWTFLLVTIYFAFATAISAHGCWVYSRKSLRKSDESHGFLNADVENRDVSNSISGERKKDETKMMVSYYEQIANERRAGFWGRCMQIIYQTSAGATMLTDVTFWGLLVPFFYRDKFGLALVTDGMHSLNAVFLLIDTVLNNMVAIPVSGPFIIWSSYMVPRHGNRSYPLLLFVLVGRQGEAHLFPTDVSTCLC

SEQ ID NO: 170595 - protein, 234 aa, Zea Mays
MAVARLCAAAAAARLQPALAAGARGLGTAAEVAAGARWEPMGAREYYDYRRAMYGDITHKAILVDAAGTLLAPTEPMAQVYRTIGQKYGVDYSEDEILMRYRWAYAQPWGRSRLRYVNDGRPFWQYIVSSSTGCSNLEYFEELYQYYTTEKALKCDRWFDAVAVSAEVAAEKPNPTIFLKACELLGVKPEEVVHIGDDRRNDLWGARDAGCDAWLWGSDVYSFKEVAERIGVEV

SEQ ID NO: 170596 - protein, 712 aa, Zea Mays
MSRAHRIGQQETVNIYRFVTCKSVEEDILERAKKKMVLDHLVIQKLNAEGRLEKKESKKGGPIFDKNELSAILRFGAEELFKEDKTDEETKRNLESLDIDEILERAEKVETKGGEGEEGNELLSAFKVANFSSVEDDATFWSRLIQPDPADIVQETLAPRAARNKKSYIEDPQLDKNNNRKRRAVETQEKPRRLSGRTVETVNSLPLVDGAVAQVREWSFGNVPKKDASRFVRAVKKFGNATQIGLIVDDVGGVLAKVPHEAQIELFDLLVDGCQEAVKENTDIKGTVLDFFGVAVKAYELLARVEELQFLAKRIARYKDPIKQYRIQLPYKKPQWSASCGWTETDDARLMVGIHWYGYGNWEKIRLDPKLGLTTKIAPATLGERETFLPRAPNLDNRASALLQKEYAKFSGKSLKVKGNTRQTVNNDSNSGVRSMRGRQKDVPEKDDNKPNKDDIQKRRVIVEAEAREEGEISESEAETRYRQDKEEKWLEWCSEVLDEEQETLKRLDRLQNTSVNLPKEKVLSRIRKYLLIIGDKIGEVVRQHSESYRQSRMVMRLWNYVATFSNMSGEQLHDLYMKLSQDQLEGGVGPSHGGNFTSIPPNKGGNSNQLHPSRNQRPTRSLQYNSESFHNESSGSSEAWKRRRRADTDNQFDTQPLCQPPIMTNGNRLQESSSSAGILGWGPVEIRRYGNERPKRAVHPSHFPTGHGPLL

SEQ ID NO: 170597 - protein, 822 aa, Zea Mays
MSSGKLVLLDKLLVRLRETNHRVLIFSQMVKMLDILAEYLSLRGFQFQRLDGSTRADLRHQAMEHFNAPGSDDFCFLLSTRAGGLGINLATADTVIIFDSDWNPQNDLQAMSRAHRIGQQETVNIYRFVTCKSVEEDILERAKKKMVLDHLVIQKLNAEGRLEKKESKKGGPIFDKNELSAILRFGAEELFKEDKTDEETKRNLESLDIDEILERAEKVETKGGEGEEGNELLSAFKVANFSSVEDDATFWSRLIQPDPADIVQETLAPRAARNKKSYIEDPQLDKNNNRKRRAVETQEKPRRLSGRTVETVNSLPLVDGAVAQVREWSFGNVPKKDASRFVRAVKKFGNATQIGLIVDDVGGVLAKVPHEAQIELFDLLVDGCQEAVKENTDIKGTVLDFFGVAVKAYELLARVEELQFLAKRIARYKDPIKQYRIQLPYKKPQWSASCGWTETDDARLMVGIHWYGYGNWEKIRLDPKLGLTTKIAPATLGERETFLPRAPNLDNRASALLQKEYAKFSGKSLKVKGNTRQTVNNDSNSGVRSMRGRQKDVPEKDDNKPNKDDIQKRRVIVEAEAREEGEISESEAETRYRQDKEEKWLEWCSEVLDEEQETLKRLDRLQNTSVNLPKEKVLSRIRKYLLIIGDKIGEVVRQHSESYRQSRMVMRLWNYVATFSNMSGEQLHDLYMKLSQDQLEGGVGPSHGGNFTSIPPNKGGNSNQLHPSRNQRPTRSLQYNSESFHNESSGSSEAWKRRRRADTDNQFDTQPLCQPPIMTNGNRLQESSSSAGILGWGPVEIRRYGNERPKRAVHPSHFPTGHGPLL

SEQ ID NO: 170598 - protein, 1183 aa, Zea Mays
MGLGKTIQSVSMLGFLHNAQEINGPFLVVVPLSTLSNWAKEFRKWLPNMNVVVYVGNRASREMCQQHEFFSDKKGGRHVKFHTLITTYEVILKDKAVLSKIKWNYLMVDEAHRLKNCEASLYTTLLEFSTKNKLLITGTPLQNSVEELWALLHFLDPVKFNSKDSFVERYKNLSSFNETELANLHKELRPHILRRVIKDVEKSLPPKIERILRVEMSPLQKQYYKWILERNFQNLNKGVRGNQDLDWNNVTILSHLLLLGQAVPHLLLLAQEVSHLAVHYLSNWSMGKATRQDLAVVSLLNIVVELKKCCNHPFLFESADHGYGGDSIGDRNKVERIVMSSGKLVLLDKLLVRLRETNHRVLIFSQGLFSVVWFGSNPHYGCPKRESKKMVKMLDILAEYLSLRGFQFQRLDGSTRADLRHQAMEHFNAPGSDDFCFLLSTRAGGLGINLATADTVIIFDSDWNPQNDLQAMSRAHRIGQQETVNIYRFVTCKSVEEDILERAKKKMVLDHLVIQKLNAEGRLEKKESKKGGPIFDKNELSAILRFGAEELFKEDKTDEETKRNLESLDIDEILERAEKVETKGGEGEEGNELLSAFKVANFSSVEDDATFWSRLIQPDPADIVQETLAPRAARNKKSYIEDPQLDKNNNRKRRAVETQEKPRRLSGRTVETVNSLPLVDGAVAQVREWSFGNVPKKDASRFVRAVKKFGNATQIGLIVDDVGGVLAKVPHEAQIELFDLLVDGCQEAVKENTDIKGTVLDFFGVAVKAYELLARVEELQFLAKRIARYKDPIKQYRIQLPYKKPQWSASCGWTETDDARLMVGIHWYGYGNWEKIRLDPKLGLTTKIAPATLGERETFLPRAPNLDNRASALLQKEYAKFSGKSLKVKGNTRQTVNNDSNSGVRSMRGRQKDVPEKDDNKPNKDDIQKRRVIVEAEAREEGEISESEAETRYRQDKEEKWLEWCSEVLDEEQETLKRLDRLQNTSVNLPKEKVLSRIRKYLLIIGDKIGEVVRQHSESYRQSRMVMRLWNYVATFSNMSGEQLHDLYMKLSQDQLEGGVGPSHGGNFTSIPPNKGGNSNQLHPSRNQRPTRSLQYNSESFHNESSGSSEAWKRRRRADTDNQFDTQPLCQPPIMTNGNRLQESSSSAGILGWGPVEIRRYGNERPKRAVHPSHFPTGHGPLL

SEQ ID NO: 170599 - protein, 922 aa, Zea Mays
MAFFSNSGSKADSEGYNLNEKADDDGIHESIRDGNDGLNSRQWNLNEKAEDAYHSEAEQYESGQSGLYASRQHVQRGGRSSGGPWGTNFLKDSRSKQTAKEVASNSGRGMDAANSHDDMDGSREDDELNRANGEVPAEEMLSDDYYEQDGEDQIESLHRGGMKQSSCSTSGGAAKSGSRQMKKMSKYNAYDNDEYNDENDDDSDADEDDPADMDFEPDGETDKATDKDKFMDSENSDGDDDDDLELSDDEDDFVENRRQPKRLKIVATKTSKGGQLPMPVQPKRGVSHSDEEYFSGKDSDVPSDSDFKHIPKKPDRLHQKPVGRSDVAPISSHNELRTSGRRRTVKKISYAESEESDDSEEKSNKRQKLIKEEPEEEDGETIEKVLWHQPKGVAEEAIRNHRSAQPTVASLTSDFDQQWDELEFYIKWKGQSYLHCQWKILSELQSVSGFKKVINYTKRVSEEQRYKRALSREEVEVERIFADRVSKADGDDLVPEYLVKWQGLPYAESTWEKDTDIDFAQDAIDEYKAREAASAILGKTVDFQRKKSKASLRRLDGQPEWLKAGKLRDYQLEGLNFLVNGWRNDTNVILADEMGLGKTIQSVSMLGFLHNAQEINGPFLVVVPLSTLSNWAKEFRKWLPNMNVVVYVGNRASREMCQQHEFFSDKKGGRHVKFHTLITTYEVILKDKAVLSKIKWNYLMVDEAHRLKNCEASLYTTLLEFSTKNKLLITGTPLQNSVEELWALLHFLDPVKFNSKDSFVERYKNLSSFNETELANLHKELRPHILRRVIKDVEKSLPPKIERILRVEMSPLQKQYYKWILERNFQNLNKGVRGNQLFQLAHLGIECNLAVSDLDWNNVTILSHLLLLGQAVPHLLLLAQEVSHLAVHYLSNWSMGKATRQDLAVVSQICSPMYHFLTLLLN

SEQ ID NO: 170600 - protein, 1706 aa, Zea Mays
MAFFSNSGSKADSEGYNLNEKADDDGIHESIRDGNDGLNSRQWNLNEKAEDAYHSEAEQYESGQSGLYASRQHVQRGGRSSGGPWGTNFLKDSRSKQTAKEVASNSGRGMDAANSHDDMDGSREDDELNRANGEVPAEEMLSDDYYEQDGEDQIESLHRGGMKQSSCSTSGGAAKSGSRQMKKMSKYNAYDNDEYNDENDDDSDADEDDPADMDFEPDGETDKATDKDKFMDSENSDGDDDDDLELSDDEDDFVENRRQPKRLKIVATKTSKGGQLPMPVQPKRGVSHSDEEYFSGKDSDVPSDSDFKHIPKKPDRLHQKPVGRSDVAPISSHNELRTSGRRRTVKKISYAESEESDDSEEKSNKRQKLIKEEPEEEDGETIEKVLWHQPKGVAEEAIRNHRSAQPTVASLTSDFDQQWDELEFYIKWKGQSYLHCQWKILSELQSVSGFKKVINYTKRVSEEQRYKRALSREEVEVHDVGKEMELDLIKQYSQVERIFADRVSKADGDDLVPEYLVKWQGLPYAESTWEKDTDIDFAQDAIDEYKAREAASAILGKTVDFQRKKSKASLRRLDGQPEWLKAGKLRDYQLEGLNFLVNGWRNDTNVILADEMGLGKTIQSVSMLGFLHNAQEINGPFLVVVPLSTLSNWAKEFRKWLPNMNVVVYVGNRASREMCQQHEFFSDKKGGRHVKFHTLITTYEVILKDKAVLSKIKWNYLMVDEAHRLKNCEASLYTTLLEFSTKNKLLITGTPLQNSVEELWALLHFLDPVKFNSKDSFVERYKNLSSFNETELANLHKELRPHILRRVIKDVEKSLPPKIERILRVEMSPLQKQYYKWILERNFQNLNKGVRGNQVSLLNIVVELKKCCNHPFLFESADHGYGGDSIGDRNKVERIVMSSGKLVLLDKLLVRLRETNHRVLIFSQMVKMLDILAEYLSLRGFQFQRLDGSTRADLRHQAMEHFNAPGSDDFCFLLSTRAGGLGINLATADTVIIFDSDWNPQNDLQAMSRAHRIGQQETVNIYRFVTCKSVEEDILERAKKKMVLDHLVIQKLNAEGRLEKKESKKGGPIFDKNELSAILRFGAEELFKEDKTDEETKRNLESLDIDEILERAEKVETKGGEGEEGNELLSAFKVANFSSVEDDATFWSRLIQPDPADIVQSYIEDPQLDKNNNRKRRAVETQEKPRRLSGRTVETVNSLPLVDGAVAQVREWSFGNVPKKDASRFVRAVKKFGNATQIGLIVDDVGGVLAKVPHEAQIELFDLLVDGCQEAVKENTDIKGTVLDFFGVAVKAYELLARVEELQFLAKRIARYKDPIKQYRIQLPYKKPQWSASCGWTETDDARLMVGIHWYGYGNWEKIRLDPKLGLTTKIAPATLGERETFLPRAPNLDNRASALLQKEYAKFSGKSLKVKGNTRQTVNNDSNSGVRSMRGRQKDVPEKDDNKPNKDDIQKRRVIVEAEAREEGEISESEAETRYRQDKEEKWLEWCSEVLDEEQETLKRLDRLQNTSVNLPKEKVLSRIRKYLLIIGDKIGEVVRQHSESYRQSRMVMRLWNYVATFSNMSGEQLHDLYMKLSQDQLEGGVGPSHGGNFTSIPPNKGGNSNQLHPSRNQRPTRSLQYNSESFHNESSGSSEAWKRRRRADTDNQFDTQPLCQPPIMTNGNRLQESSSSAGILGWGPVEIRRYGNERPKRAVHPSHFPTGHGPLL

SEQ ID NO: 170601 - protein, 760 aa, Zea Mays
MEHFNAPGSDDFCFLLSTRAGGLGINLATADTVIIFDSDWNPQNDLQAMSRAHRIGQQETVNIYRFVTCKSVEEDILERAKKKMVLDHLVIQKLNAEGRLEKKESKKGGPIFDKNELSAILRFGAEELFKEDKTDEETKRNLESLDIDEILERAEKVETKGGEGEEGNELLSAFKVANFSSVEDDATFWSRLIQPDPADIVQETLAPRAARNKKSYIEDPQLDKNNNRKRRAVETQEKPRRLSGRTVETVNSLPLVDGAVAQVREWSFGNVPKKDASRFVRAVKKFGNATQIGLIVDDVGGVLAKVPHEAQIELFDLLVDGCQEAVKENTDIKGTVLDFFGVAVKAYELLARVEELQFLAKRIARYKDPIKQYRIQLPYKKPQWSASCGWTETDDARLMVGIHWYGYGNWEKIRLDPKLGLTTKIAPATLGERETFLPRAPNLDNRASALLQKEYAKFSGKSLKVKGNTRQTVNNDSNSGVRSMRGRQKDVPEKDDNKPNKDDIQKRRVIVEAEAREEGEISESEAETRYRQDKEEKWLEWCSEVLDEEQETLKRLDRLQNTSVNLPKEKVLSRIRKYLLIIGDKIGEVVRQHSESYRQSRMVMRLWNYVATFSNMSGEQLHDLYMKLSQDQLEGGVGPSHGGNFTSIPPNKGGNSNQLHPSRNQRPTRSLQYNSESFHNESSGSSEAWKRRRRADTDNQFDTQPLCQPPIMTNGNRLQESSSSAGILGWGPVEIRRYGNERPKRAVHPSHFPTGHGPLL

SEQ ID NO: 170602 - protein, 909 aa, Zea Mays
MAFFSNSGSKADSEGYNLNEKADDDGIHESIRDGNDGLNSRQWNLNEKAEDAYHSEAEQYESGQSGLYASRQHVQRGGRSSGGPWGTNFLKDSRSKQTAKEVASNSGRGMDAANSHDDMDGSREDDELNRANGEVPAEEMLSDDYYEQDGEDQIESLHRGGMKQSSCSTSGGAAKSGSRQMKKMSKYNAYDNDEYNDENDDDSDADEDDPADMDFEPDGETDKATDKDKFMDSENSDGDDDDDLELSDDEDDFVENRRQPKRLKIVATKTSKGGQLPMPVQPKRGVSHSDEEYFSGKDSDVPSDSDFKHIPKKPDRLHQKPVGRSDVAPISSHNELRTSGRRRTVKKISYAESEESDDSEEKSNKRQKLIKEEPEEEDGETIEKVLWHQPKGVAEEAIRNHRSAQPTVASLTSDFDQQWDELEFYIKWKGQSYLHCQWKILSELQSVSGFKKVINYTKRVSEEQRYKRALSREEVEVERIFADRVSKADGDDLVPEYLVKWQGLPYAESTWEKDTDIDFAQDAIDEYKAREAASAILGKTVDFQRKKSKASLRRLDGQPEWLKAGKLRDYQLEGLNFLVNGWRNDTNVILADEMGLGKTIQSVSMLGFLHNAQEINGPFLVVVPLSTLSNWAKEFRKWLPNMNVVVYVGNRASREMCQQHEFFSDKKGGRHVKFHTLITTYEVILKDKAVLSKIKWNYLMVDEAHRLKNCEASLYTTLLEFSTKNKLLITGTPLQNSVEELWALLHFLDPVKFNSKDSFVERYKNLSSFNETELANLHKELRPHILRRVIKDVEKSLPPKIERILRVEMSPLQKQYYKWILERNFQNLNKGVRGNQLFQLAHLGIECNLAVSDLDWNNVTILSHLLLLGQAVPHLLLLAQEVSHLAVHYLSNWSMGKATRYHFLTLLLN

SEQ ID NO: 170603 - protein, 845 aa, Zea Mays
MSSGKLVLLDKLLVRLRETNHRVLIFSQGLFSVVWFGSNPHYGCPKRESKKMVKMLDILAEYLSLRGFQFQRLDGSTRADLRHQAMEHFNAPGSDDFCFLLSTRAGGLGINLATADTVIIFDSDWNPQNDLQAMSRAHRIGQQETVNIYRFVTCKSVEEDILERAKKKMVLDHLVIQKLNAEGRLEKKESKKGGPIFDKNELSAILRFGAEELFKEDKTDEETKRNLESLDIDEILERAEKVETKGGEGEEGNELLSAFKVANFSSVEDDATFWSRLIQPDPADIVQETLAPRAARNKKSYIEDPQLDKNNNRKRRAVETQEKPRRLSGRTVETVNSLPLVDGAVAQVREWSFGNVPKKDASRFVRAVKKFGNATQIGLIVDDVGGVLAKVPHEAQIELFDLLVDGCQEAVKENTDIKGTVLDFFGVAVKAYELLARVEELQFLAKRIARYKDPIKQYRIQLPYKKPQWSASCGWTETDDARLMVGIHWYGYGNWEKIRLDPKLGLTTKIAPATLGERETFLPRAPNLDNRASALLQKEYAKFSGKSLKVKGNTRQTVNNDSNSGVRSMRGRQKDVPEKDDNKPNKDDIQKRRVIVEAEAREEGEISESEAETRYRQDKEEKWLEWCSEVLDEEQETLKRLDRLQNTSVNLPKEKVLSRIRKYLLIIGDKIGEVVRQHSESYRQSRMVMRLWNYVATFSNMSGEQLHDLYMKLSQDQLEGGVGPSHGGNFTSIPPNKGGNSNQLHPSRNQRPTRSLQYNSESFHNESSGSSEAWKRRRRADTDNQFDTQPLCQPPIMTNGNRLQESSSSAGILGWGPVEIRRYGNERPKRAVHPSHFPTGHGPLL

SEQ ID NO: 170604 - protein, 1720 aa, Zea Mays
MAFFSNSGSKADSEGYNLNEKADDDGIHESIRDGNDGLNSRQWNLNEKAEDAYHSEAEQYESGQSGLYASRQHVQRGGRSSGGPWGTNFLKDSRSKQTAKEVASNSGRGMDAANSHDDMDGSREDDELNRANGEVPAEEMLSDDYYEQDGEDQIESLHRGGMKQSSCSTSGGAAKSGSRQMKKMSKYNAYDNDEYNDENDDDSDADDDPADMDFEPDGETDKATDKDKFMDSENSDGDDDDDLELSDDEDDFVENRRQPKRLKIVATKTSKGGQLPMPVQPKRGVSHSDEEYFSGKDSDVPSDSDFKHIPKKPDRLHQKPVGRSDVAPISSHNELRTSGRRRTVKKISYAESEESDDSEEKSNKRQKLIKEEPEEEDGETIEKVLWHQPKGVAEEAIRNHRSAQPTVASLTSDFDQQWDELEFYIKWKGQSYLHCQWKILSELQSVSGFKKVINYTKRVSEEQRYKRALSREEVEVHDVGKEMELDLIKQYSQVERIFADRVSKADGDDLVPEYLVKWQGLPYAESTWEKDTDIDFAQDAIDEYKAREAASAILGKTVDFQRKKSKASLRRLDGQPEWLKAGKLRDYQLEGLNFLVNGWRNDTNVILADEMGLGKTIQSVSMLGFLHNAQEINGPFLVVVPLSTLSNWAKEFRKWLPNMNVVVYVGNRASREMCQQHEFFSDKKGGRHVKFHTLITTYEVILKDKAVLSKIKWNYLMVDEAHRLKNCEASLYTTLLEFSTKNKLLITGTPLQNSVEELWALLHFLDPVKFNSKDSFVERYKNLSSFNETELANLHKELRPHILRRVIKDVEKSLPPKIERILRVEMSPLQKQYYKWILERNFQNLNKGVRGNQVSLLNIVVELKKCCNHPFLFESADHGYGGDSIGDRNKVERIVMSSGKLVLLDKLLVRLRETNHRVLIFSQMVKMLDILAEYLSLRGFQFQRLDGSTRADLRHQAMEHFNAPGSDDFCFLLSTRAGGLGINLATADTVIIFDSDWNPQNDLQAMSRAHRIGQQETVNIYRFVTCKSVEEDILERAKKKMVLDHLVIQKLNAEGRLEKKESKKGGPIFDKNELSAILRFGAEELFKEDKTDEETKRNLESLDIDEILERAEKVETKGGEGEEGNELLSAFKACDVANFSSVEDDATFWSRLIQPDPADIVQETLAPRAARNKKSYIEDPQLDKNNNRKRRAVETQEKPRRLSGRTVETVNSLPLVDGAVAQVREWSFGNVPKKDASRFVRAVKKFGNATQIGLIVDDVGGVLAKVPHEAQIELFDLLVDGCQEAVKENTDIKGTVLDFFGVAVKAYELLARVEELQFLAKRIARYKDPIKQYRIQLPYKKPQWSASCGWTETDDARLMVGIHWYGYGNWEKIRLDPKLGLTTKIAPATLGERETFLPRAPNLDNRASALLQKEYAKFSGKSLKVKGNTRQTVNNDSNSGVRSMRGRQKDVPEKDDNKPNKDDIQKRRVIVEAEAREEGEISESEAETRYRQDKEEKWLEWCSEVLDEEQETLKRLDRLQNTSVNLPKEKVLSRIRKYLLIIGDKIGEVVRQHSESYRQSRMVMRLWNYVATFSNMSGEQLHDLYMKLSQDQLEGGVGPSHGGNFTSIPPNKGGNSNQLHPSRNQRPTRSLQYNSESFHNESSGSSEAWKRRRRADTDNQFDTQPLCQPPIMTNGNRLQESSSSAGILGWGPVEIRRYGNERPKRAVHPSHFPTGHGPLL

SEQ ID NO: 170605 - protein, 1723 aa, Zea Mays
MAFFSNSGSKADSEGYNLNEKADDDGIHESIRDGNDGLNSRQWNLNEKAEDAYHSEAEQYESGQSGLYASRQHVQRGGRSSGGPWGTNFLKDSRSKQTAKEVASNSGRGMDAANSHDDMDGSREDDELNRANGEVPAEEMLSDDYYEQDGEDQIESLHRGGMKQSSCSTSGGAAKSGSRQMKKMSKYNAYDNDEYNDENDDDSDADEDDPADMDFEPDGETDKATDKDKFMDSENSDGDDDDDLELSDDEDDFVENRRQPKRLKIVATKTSKGGQLPMPVQPKRGVSHSDEEYFSGKDSDVPSDSDFKHIPKKPDRLHQKPVGRSDVAPISSHNELRTSGRRRTVKKISYAESEESDDSEEKSNKRQKLIKEEPEEEDGETIEKVLWHQPKGVAEEAIRNHRSAQPTVASLTSDFDQQWDELEFYIKWKGQSYLHCQWKILSELQSVSGFKKVINYTKRVSEEQRYKRALSREEVEVERIFADRVSKADGDDLVPEYLVKWQGLPYAESTWEKDTDIDFAQDAIDEYKAREAASAILGKTVDFQRKKSKASLRRLDGQPEWLKAGKLRDYQLEGLNFLVNGWRNDTNVILADEMGLGKTIQSVSMLGFLHNAQEINGPFLVVVPLSTLSNWAKEFRKWLPNMNVVVYVGNRASREMCQQHEFFSDKKGGRHVKFHTLITTYEVILKDKAVLSKIKWNYLMVDEAHRLKNCEASLYTTLLEFSTKNKLLITGTPLQNSVEELWALLHFLDPVKFNSKDSFVERYKNLSSFNETELANLHKELRPHILRRVIKDVEKSLPPKIERILRVEMSPLQKQYYKWILERNFQNLNKGVRGNQVSLLNIVVELKKCCNHPFLFESADHGYGGDSIGDRNKVERIVMSSGKLVLLDKLLVRLRETNHRVLIFSQGLFSVVWFGSNPHYGCPKRESKKMVKMLDILAEYLSLRGFQFQRLDGSTRADLRHQAMEHFNAPGSDDFCFLLSTRAGGLGINLATADTVIIFDSDWNPQNDLQAMSRAHRIGQQETVNIYRFVTCKSVEEDILERAKKKMVLDHLVIQKLNAEGRLEKKESKKGGPIFDKNELSAILRFGAEELFKEDKTDEETKRNLESLDIDEILERAEKVETKGGEGEEGNELLSAFKVANFSSVEDDATFWSRLIQPDPADIVQETLAPRAARNKKSYIEDPQLDKNNNRKRRAVETQEKPRRLSGRTVETVNSLPLVDGAVAQVREWSFGNVPKKDASRFVRAVKKFGNATQIGLIVDDVGGVLAKVPHEAQIELFDLLVDGCQEAVKENTDIKGTVLDFFGVAVKAYELLARVEELQFLAKRIARYKDPIKQYRIQLPYKKPQWSASCGWTETDDARLMVGIHWYGYGNWEKIRLDPKLGLTTKIAPATLGERETFLPRAPNLDNRASALLQKEYAKFSGKSLKVKGNTRQTVNNDSNSGVRSMRGRQKDVPEKDDNKPNKDDIQKRRVIVEAEAREEGEISESEAETRYRQDKEEKWLEWCSEVLDEEQETLKRLDRLQNTSVNLPKEKVLSRIRKYLLIIGDKIGEVVRQHSESYRQSRMVMRLWNYVATFSNMSGEQLHDLYMKLSQDQLEGGVGPSHGGNFTSIPPNKGGNSNQLHPSRNQRPTRSLQYNSESFHNESSGSSEAWKRRRRADTDNQFDTQPLCQPPIMTNGNRLQESSSSAGILGWGPVEIRRYGNERPKRAVHPSHFPTGHGPLL

SEQ ID NO: 170606 - protein, 863 aa, Zea Mays
MAFFSNSGSKADSEGYNLNEKADDDGIHESIRDGNDGLNSRQWNLNEKAEDAYHSEAEQYESGQSGLYASRQHVQRGGRSSGGPWGTNFLKDSRSKQTAKEVASNSGRGMDAANSHDDMDGSREDDELNRANGEVPAEEMLSDDYYEQDGEDQIESLHRGGMKQSSCSTSGGAAKSGSRQMKKMSKYNAYDNDEYNDENDDDSDADEDDPADMDFEPDGETDKATDKDKFMDSENSDGDDDDDLELSDDEDDFVENRRQPKRLKIVATKTSKGGQLPMPVQPKRGVSHSDEEYFSGKDSDVPSDSDFKHIPKKPDRLHQKPVGRSDVAPISSHNELRTSGRRRTVKKISYAESEESDDSEEKSNKRQKLIKEEPEEEDGETIEKVLWHQPKGVAEEAIRNHRSAQPTVASLTSDFDQQWDELEFYIKWKGQSYLHCQWKILSELQSVSGFKKVINYTKRVSEEQRYKRALSREEVEVHDVGKEMELDLIKQYSQVERIFADRVSKADGDDLVPEYLVKWQGLPYAESTWEKDTDIDFAQDAIDEYKAREAASAILGKTVDFQRKKSKASLRRLDGQPEWLKAGKLRDYQLEGLNFLVNGWRNDTNVILADEMGLGKTIQSVSMLGFLHNAQEINGPFLVVVPLSTLSNWAKEFRKWLPNMNVVVYVGNRASREMCQQHEFFSDKKGGRHVKFHTLITTYEVILKDKAVLSKIKWNYLMVDEAHRLKNCEASLYTTLLEFSTKNKLLITGTPLQNSVEELWALLHFLDPVKFNSKDSFVERYKNLSSFNETELANLHKELRPHILRRVIKDVEKSLPPKIERILRVEMSPLQKQYYKWILERNFQNLNKGVRGNQVKQFLTCYC

SEQ ID NO: 170607 - protein, 892 aa, Zea Mays
MAFFSNSGSKADSEGYNLNEKADDDGIHESIRDGNDGLNSRQWNLNEKAEDAYHSEAEQYESGQSGLYASRQHVQRGGRSSGGPWGTNFLKDSRSKQTAKEVASNSGRGMDAANSHDDMDGSREDDELNRANGEVPAEEMLSDDYYEQDGEDQIESLHRGGMKQSSCSTSGGAAKSGSRQMKKMSKYNAYDNDEYNDENDDDSDADDDPADMDFEPDGETDKATDKDKFMDSENSDGDDDDDLELSDDEDDFVENRRQPKRLKIVATKTSKGGQLPMPVQPKRGVSHSDEEYFSGKDSDVPSDSDFKHIPKKPDRLHQKPVGRSDVAPISSHNELRTSGRRRTVKKISYAESEESDDSEEKSNKRQKLIKEEPEEEDGETIEKVLWHQPKGVAEEAIRNHRSAQPTVASLTSDFDQQWDELEFYIKWKGQSYLHCQWKILSELQSVSGFKKVINYTKRVSEEQRYKRALSREEVEVERIFADRVSKADGDDLVPEYLVKWQGLPYAESTWEKDTDIDFAQDAIDEYKAREAASAILGKTVDFQRKKSKASLRRLDGQPEWLKAGKLRDYQLEGLNFLVNGWRNDTNVILADEMGLGKTIQSVSMLGFLHNAQEINGPFLVVVPLSTLSNWAKEFRKWLPNMNVVVYVGNRASREMCQQHEFFSDKKGGRHVKFHTLITTYEVILKDKAVLSKIKWNYLMVDEAHRLKNCEASLYTTLLEFSTKNKLLITGTPLQNSVEELWALLHFLDPVKFNSKDSFVERYKNLSSFNETELANLHKELRPHILRRVIKDVEKSLPPKIERILRVEMSPLQKQYYKWILERNFQNLNKGVRGNQDLDWNNVTILSHLLLLGQAVPHLLLLAQEVSHLAVHYLSNWSMGKATRYHFLTLLLN

SEQ ID NO: 170608 - protein, 1732 aa, Zea Mays
MAFFSNSGSKADSEGYNLNEKADDDGIHESIRDGNDGLNSRQWNLNEKAEDAYHSEAEQYESGQSGLYASRQHVQRGGRSSGGPWGTNFLKDSRSKQTAKEVASNSGRGMDAANSHDDMDGSREDDELNRANGEVPAEEMLSDDYYEQDGEDQIESLHRGGMKQSSCSTSGGAAKSGSRQMKKMSKYNAYDNDEYNDENDDDSDADEDDPADMDFEPDGETDKATDKDKFMDSENSDGDDDDDLELSDDEDDFVENRRQPKRLKIVATKTSKGGQLPMPVQPKRGVSHSDEEYFSGKDSDVPSDSDFKHIPKKPDRLHQKPVGRSDVAPISSHNELRTSGRRRTVKKISYAESEESDDSEEKSNKRQKLIKEEPEEEDGETIEKVLWHQPKGVAEEAIRNHRSAQPTVASLTSDFDQQWDELEFYIKWKGQSYLHCQWKILSELQSVSGFKKVINYTKRVSEEQRYKRALSREEVEVERIFADRVSKADGDDLVPEYLVKWQGLPYAESTWEKDTDIDFAQDAIDEYKAREAASAILGKTVDFQRKKSKASLRRLDGQPEWLKAGKLRDYQLEGLNFLVNGWRNDTNVILADEMGLGKTIQSVSMLGFLHNAQEINGPFLVVVPLSTLSNWAKEFRKWLPNMNVVVYVGNRASREMCQQHEFFSDKKGGRHVKFHTLITTYEVILKDKAVLSKIKWNYLMVDEAHRLKNCEASLYTTLLEFSTKNKLLITGTPLQNSVEELWALLHFLDPVKFNSKDSFVERYKNLSSFNETELANLHKELRPHILRRVIKDVEKSLPPKIERILRVEMSPLQKQYYKWILERNFQNLNKGVRGNQLFQLAHLGIECNLAVSDLDWNNVTILSHLLLLGQAVPHLLLLAQEVSHLAVHYLSNWSMGKATRQDLAVVSLLNIVVELKKCCNHPFLFESADHGYGGDSIGDRNKVERIVMSSGKLVLLDKLLVRLRETNHRVLIFSQMVKMLDILAEYLSLRGFQFQRLDGSTRADLRHQAMEHFNAPGSDDFCFLLSTRAGGLGINLATADTVIIFDSDWNPQNDLQVLDHLVIQKLNAEGRLEKKESKKGGPIFDKNELSAILRFGAEELFKEDKTDEETKRNLESLDIDEILERAEKVETKGGEGEEGNELLSAFKVANFSSVEDDATFWSRLIQPDPADIVQETLAPRAARNKKSYIEDPQLDKNNNRKRRAVETQEKPRRLSGRTVETVNSLPLVDGAVAQVREWSFGNVPKKDASRFVRAVKKFGNATQIGLIVDDVGGVLAKVPHEAQIELFDLLVDGCQEAVKENTDIKGTVLDFFGVAVKAYELLARVEELQFLAKRIARYKDPIKQYRIQLPYKKPQWSASCGWTETDDARLMVGIHWYGYGNWEKIRLDPKLGLTTKIAPATLGERETFLPRAPNLDNRASALLQKEYAKFSGKSLKVKGNTRQTVNNDSNSGVRSMRGRQKDVPEKDDNKPNKDDIQKRRVIVEAEAREEGEISESEAETRYRQDKEEKWLEWCSEVLDEEQETLKRLDRLQNTSVNLPKEKVLSRIRKYLLIIGDKIGEVVRQHSESYRQSRMVMRLWNYVATFSNMSGEQLHDLYMKLSQDQLEGGVGPSHGGNFTSIPPNKGGNSNQLHPSRNQRPTRSLQYNSESFHNESSGSSEAWKRRRRADTDNQFDTQPLCQPPIMTNGNRLQESSSSAGILGWGPVEIRRYGNERPKRAVHPSHFPTGHGPLL

SEQ ID NO: 170609 - protein, 151 aa, Zea Mays
MSAAMAPPLPSRSPPPPRPRPPLLLSYPHTPPLRTPPFHFHSPRRGVNRCRRRRRPISHTVPSVRSASAVPLAGRPSENRAPRGSGGRGGSRFHRQVARPASSTSSSSVLCTTRSSPRSRLPTLLRSILGSFGKSPSLPSCAGGRPSRGRR

SEQ ID NO: 170610 - protein, 237 aa, Zea Mays
MQKPVASVVSLCPQLWHRHFRRAPLLPRARGLPSSSPILTRRRSVLPRSTSTHLAAVSTAAAAAAAPSATPYPVYDRLLPCPLQDDPPRIEHLVAREDEVAADFIARSLGLPPLYAADLIEFGAVYYALVAPQPPPYASPEHFRLFREVTEPSVLRRRASIKGKTVREAQKTFRVTDPNQRLEAGTYLRVHVHPKRFPRCYQIDWKSRVIAVADEYVVLDKPAATSVNFEPLGGRSN

SEQ ID NO: 170611 - protein, 279 aa, Zea Mays
MQKPVASVVSLCPQLWHRHFRRAPLLPRARGLPSSSPILTRRRSVLPRSTSTHLAAVSTAAAAAAAPSATPYPVYDRLLPCPLQDDPPRIEHLVAREDEVAADFIARSLGLPPLYAADLIEFGAVYYALVAPQPPPYASPEHFRLFREVTEPSVLRRRASIKGKTVREAQKTFRVTDPNQRLEAGTYLRVHVHPKRFPRCYQIDWKSRVIAVADEYVVLDKPAATSVGGATDNIEESCAVFTSRALGLETPLLTTHQIDNCSEVWYYLKRKSSALFSMD

SEQ ID NO: 170612 - protein, 231 aa, Zea Mays
MQKPVASVVSLCPQLWHRHFRRAPLLPRARGLPSSSPILTRRRSVLPRSTSTHLAAVSTAAAAAAAPSATPYPVYDRLLPCPLQDDPPRIEHLVAREDEVAADFIARSLGLPPLYAADLIEFGAVYYALVAPQPPPYASPEHFRLFREVTEPSVLRRRASIKGKTVREAQKTFRVTDPNQRLEAGTYLRVHVHPKRFPRCYQIDWKSRVIAVADEYVVLDKPAATSVICTE

SEQ ID NO: 170613 - protein, 167 aa, Zea Mays
MRPVNRAPRLVSEDCIERWHLCQMEVLDCSKVPWPSSSIRKAYNVNGCGWPQQEAAYECKINLLTGKTHQIRAQLAAIGAPIIGDSAYMTAAMAAMANPSINPFGRERLSYNSEEEKEAAVEAWIASHGKEPKSVIGLQASEISWDHEGKHHSYKAGVPWWWQDPDS

SEQ ID NO: 170614 - protein, 230 aa, Zea Mays
MSAAMAPPLPSRSPPPPRPRPPLLLSYPHTPPLRTPPFHFHSPRRGVNRCRRRRRPISHTVPSVRSASAVPLAGRPSENRAPRGSGGRGGSRFHRQVARPASSVSTPLTNSQYAADLIEFGAVYYALVAPQPPPYASPEHFRLFREVTEPSVLRRRASIKGKTVREAQKTFRVTDPNQRLEAGTYLRVHVHPKRFPRCYQIDWKSRVIAVADEYVVLDKPAATSSLLRVH

SEQ ID NO: 170615 - protein, 346 aa, Zea Mays
MQKPVASVVSLCPQLWHRHFRRAPLLPRARGLPSSSPILTRRRSVLPRSTSTHLAAVSTAAAAAAAPSATPYPVYDRLLPCPLQDDPPRIEHLVAREDEVAADFIARSLGLPPLYAADLIEFGAVYYALVAPQPPPYASPEHFRLFREVTEPSVLRRRASIKGKTVREAQKTFRVTDPNQRLEAGTYLRVHVHPKRFPRCYQIDWKSRVIAVADEYVVLDKPAATSVGGATDNIEESCAVFTSRALGLETPLLTTHQIDNCSEGCVVLSKTKEFCSVFHGLIREKQVKKLYLALTTAPVSTGTITHYMRPVNRAPRLVSEGILFIFGCRETVCSLYEHMCTLTTFC

SEQ ID NO: 170616 - protein, 164 aa, Zea Mays
MLWPLLKIVKYCIERWHLCQMEVLDCSKVPWPSSSIRKAYNVNGCGWPQQEAAYECKINLLTGKTHQIRAQLAAIGAPIIGDSAYMTAAMAAMANPSINPFGRERLSYNSEEEKEAAVEAWIASHGKEPKSVIGLQASEISWDHEGKHHSYKAGVPWWWQDPDS

SEQ ID NO: 170617 - protein, 635 aa, Zea Mays
MLSSSASRREAAAARATKNGELPKSAAAVAWKDVAATARSGELSKAVTGAELSKAVAAVRDAAAVQHEGWMVRYGRRKIGRSFFHTRYFVLESRLLAYYKKKPKDNMVPLKSLLIDGNCRVEDRGLKNHHGQMIYVLCVYNQKEKEHQITMGAHDIEDALAWKKKIELLIDQQPDSAVKTHKSFATIDFDMDLGGQFSLSDHDSAAEDEEERPTLVRRTTIGNGPPDSIHDWTKDADFGMSGQNEPTQLYSKKNWRLLRCQNGLRIYEELLEVEYLARSCSRAMRAVGVVEATCEAIFGLMMSMDATRYEWDCSFRQGSLVEEVDGHTAVLYHRLQLHWCPRLIWPRDLCYVRYWRRNDDGSYVVLFRSTEHPNCIRQRGFVRAFIESGGFKICPLKCRNGRPRTQVQHLMQIDLKGWFLNYSTSFQYHSLLQILNCVADDIHITPRIPAMESMADVNLAQKDEKLKEVDSKTKPEDQQQAENKNMGTIDEESDDDEDYHVPEADIEEITNKSDNEAKHTDEPPEKIDLSCFSGILHHDPDEKSRNCWTVPDSKLFKFVARISQMTNRRYLLQVISWSLQPLIGLRTPSVWIMLAGRKIVLLRLLLRKGCIHSLSTYRFPGQLTIAWSCISSQVP

SEQ ID NO: 170618 - protein, 275 aa, Zea Mays
MAVRRRPAAAAAGDLPPQAPPADAAPTPAPDELVLRPPNLRVAAVAAVLFLAPFSYLSFVRYRLGADLQRSILKCGAMSLIGFCVALKLIPVAASYHLRRRMFGYDINKKGLPTGQIKVPEALGLVVGIIYLVIAIIFQQFHYAPDSIWLVEYNAALASVCFMILLGFVDDVLDVPWRVKLALPTFAALPLLMAYAGGTSIIIPKPLTPYVGLTVLELGLFYKLFMLLLAVFCTNSINIHAGLNGLEVGQTIVISAAISKLSKLMNSLFILSCHS

SEQ ID NO: 170619 - protein, 431 aa, Zea Mays
MAVRRRPAAAAAGDLPPQAPPADAAPTPAPDELVLRPPNLRVAAVAAVLFLAPFSYLSFVRYRLGADLQRSILKCGAMSLIGFCVALKLIPVAASYHLRRRMFGYDINKKGLPTGQIKVPEALGLVVGIIYLVIAIIFQQFHYAPDSIWLVEYNAALASVCFMILLGFVDDVLDVPWRVKLALPTFAALPLLMAYAGGTSIIIPKPLTPYVGLTVLELGLFYKLFMLLLAVFCTNSINIHAGLNGLEVGQTIVISAAVLIHNVMRIASSTDIETQQAHEFSIYLVLPFLTISLALLAFNWYPSIVFVGDTYTYFAGMALAVIGILGHFSETLLLFFLPQVLNFLCSVPQLFHFVPCPRHRLPRFDPETGLLTGTKDGNLVNIFLRLFGKCSEKALCIRLLIFQALCCVFCFWLRYMLTGWNMGSAEEQLEG

SEQ ID NO: 170620 - protein, 219 aa, Zea Mays
MAVRRRPAAAAAGDLPPQAPPADAAPTPAPDELVLRPPNLRVAAVAAVLFLAPFSYLSFVRYRLGADLQRSILKCGAMSLIGFCVALKLIPVAASYHLRRRMFGYDINKKGLPTGQIKVPEALGLVVGIIYLVIAIIFQQFHYAPDSIWLVEYNAALASVCFMILLGFVDDVLDVPWRVKLALPTFAALPLLMAYAGGTSIIIPKPLTPYVGLTVLELA

SEQ ID NO: 170621 - protein, 506 aa, Zea Mays
MVIEMTPPSSGRLSALLRRCAASGALSPGAQLHAQALVGGRLPDTTLDTDLVLLYSRCGALHRAREVFDGMPSPSMHAYNVLLAASPPDAAVKLVSRLVASGLRPDRYSVPAVLRACAESRDALLGSVLHGFAVRLGLLANVVVSGALLDMYAKTGTLGDAGRVFDEMPERDAVAWNCMVTGYARAGRSEETLELFRKAQIESAGMARDLRAVPSVLNVCADEGQLMKGREIHGRMARCLASSSDTVVGNALIDMYGKCGQVDGAQAVFASMEEKNVVSWSSLISCYGVHGMGKEALRVYEEMVSVGVKPNCVTFVSILSSCSHSGLVSDGRRIFESMRKVHAVEPTADHYACMVDLLGRAGAIEEAVGLVNEMPMEPGASLWGALLSACAIHNNVDVGEVAAYRLFELEEDNASNYVTLCGIYDAIGRSDSVAGLRSRMRELGMVKTPGCSWVHVKGRAYAFYQGCVPRYLRRQMLRVLGHLLEDMAGSGYENEHLSMCHGIVGY

SEQ ID NO: 170622 - protein, 369 aa, Zea Mays
MSDADAAGSKEAPRCDYCMGLPAVVYCRADSARLCLPCDRHVHGANTVSTRHARAPLCARCRAAAATAVASPRGGGGGFVCADCYCLEKEDEEKGEEHRDPRPLHHDHDAVEEYAGCPSIAELAAILGVAGYDEKAAAAGGDVGWWSTWEEPQVVCLEDVVVPTTSCHGLHPLLAPPSPKNRSSGGELADVVIRQLEELAKSEAAAVAASYAELEPGDGEQLPPWASPELDIGAAADFGALDAADADAAWHDAATMAFAAVPSHEEAWIATACDVDARRAEVEVEEAREQAAPAPDEPCLSSFVDMSEIFPASVTLSSGGDVDNSGNKPDEETAPRPQLLATTALVPVTEKKGGYDVAHPDRGTVISRY

SEQ ID NO: 170623 - protein, 219 aa, Zea Mays
MPRRLKTKLGGATEECDFDSKGNLGNLLLIIVPTVCDEDGNPFGDDSSTCRSRSLSYLSLSMALGCLFIWTHTYSLMQKSGKLYNKMQSKSIQCPADSDEEHEHAKEDGPAGCADEEAPLPTSVKPREHEHGEEEEHQMEAPPLSCESEVADKGFWTKLKDAIHQFIEELMAPRTISAIIGFVVGLVPWLKSLIVGDGAPLKVIQDSLQLMGDGTIPCI

SEQ ID NO: 170624 - protein, 52 aa, Zea Mays
MLPYLCSFSFHLPTCNACVLPLIMHQGIMNFPTRHHTITKQTNPKVRETIED

SEQ ID NO: 170625 - protein, 131 aa, Zea Mays
MQNTLHNVPFPLNSTVQHDNRILLLSINQPNTVQSNKIAFQPFMKEKKVLVWFHNHYYCLLSRSDACHFFSIHNKTDTPKGTTTQGCLHRLSDATDSAEKRYFTRDSTESCAGSYGWSLDGISRIAGTGLL

SEQ ID NO: 170626 - protein, 121 aa, Zea Mays
MNALKASCADLHSIVEDPLPAAKAVADELLAARMEKRVSLNAEVGGQPTTCGAAGPSIHNDKDNGPGIGKPHSLMERNATARTSQWEESHGLDGSEPPSPPRPRLPSPRRLPPSPLPPPEQ

SEQ ID NO: 170627 - protein, 178 aa, Zea Mays
MRIVGDGAVETWAAADEAMRANLRILAGEEKTREILDKLEKSTCSTNPISTPAVEKVMNALKASCADLHSIVEDPLPAAKAVADELLAARMEKRVSLNAEVGGQPTTCGAAGPSIHNDKDNGPGIGKPHSLMERNATARTSQWEESHGLDGSEPPSPPRPRLPSPRRLPPSPLPPPEQ

SEQ ID NO: 170628 - protein, 220 aa, Zea Mays
MLIGAKGKRFAKKRYAEKAQMKKTLKMHDESNKRQKVDDDVQEGALPPYLLDRDQTQRAKVLSNTIKQKRKEKAGKWDVPLPKVRPVAEEEMFKVLRTGKRKTKQWKRMVTKATFVGAGFTRKPPKYERFIRPTGLRFTKAHVTHPELKCTFNLDIISVKKNPNGPMYTSLGVMTRGTIIEVNVSELGLVTPAGKVVWGKYAQVTNNPENDGCINAVLLV

SEQ ID NO: 170629 - protein, 141 aa, Zea Mays
MFLCQRPVAEEEMFKVLRTGKRKTKQWKRMVTKATFVGAGFTRKPPKYERFIRPTGLRFTKAHVTHPELKCTFNLDIISVKKNPNGPMYTSLGVMTRGTIIEVNVSELGLVTPAGKVVWGKYAQVTNNPENDGCINAVLLV

SEQ ID NO: 170630 - protein, 179 aa, Zea Mays
MPQGDHIELHQKRHGKRLDHEERKRKREAREVHRRSKDARNLIGAKGKRFAKKRYAEKAQMKKTLKMHDESNKRQKVDDDVQEGALPPYLLDRDQTQRAKVLSNTIKQKRKEKAGKWDVPLPKVRPVAEEEMFKVLRTGKRKTKQWKRMVTKATFVGAGFTRKPPKKTQMVQCTLLLVL

SEQ ID NO: 170631 - protein, 227 aa, Zea Mays
MSDEGGTGEPLSDSQKREIAVWFLSNAPAGEIHYVAKDVRALLGDDAVYEAAAAEAFPEYNKARLVSLELPDRSGDIIITAYGEIDKNNYLDPRTAQVASIDHMKQTCTKLRPAEDEELPSAYIEEFRCALDVELSKYVAEAYPKGTCAVYCTSGKDIEGPGADFCFAAVISATKRSPQNFWYCLVHAFCLFLIPEEICHIFLNLAHMDQLGLLCIRKRLKNLTDPL

SEQ ID NO: 170632 - protein, 204 aa, Zea Mays
MSDEGGTGEPLSDSQKREIAVWFLSNAPAGEIHYVAKDVRALLGDDAVYEAAAAEAFPEYNKARLVSLELPDRSGDIIITAYGEIDKNNYLDPRTAQVASIDHMKQTCTKLRPAEDEELPSAYIEEFRCALDVELSKYVAEAYPKGTCAVYCTSGKDIEGPGADFCFAAVISATKRSPQNFWSTEYCVIQQWQLAFNLDYGIQL

SEQ ID NO: 170633 - protein, 50 aa, Zea Mays
MFDPVSLSCGHIFCYLCCCSAASVTPVDVQQGVFSDAMHLDALNMLLRHR

SEQ ID NO: 170634 - protein, 113 aa, Zea Mays
MAWMFMNGILQQILNRYVGNIHLQVTDAVLQEFFQSIGPIEGCKLIRKEKIPTSRVTRRSSLAVVAAVLPPLVGPKRGRGEAAGVQTSTQVEVLARMTRSRSIDICIIISSLY

SEQ ID NO: 170635 - protein, 85 aa, Zea Mays
MATLLRIVLGIGSGRPEPIMLYTKHVRTKNDGCLGVLKLATYDKEALSCPLDDMPQNIVLYLLLTCVHLISAESREQGRRLRHVP

SEQ ID NO: 170636 - protein, 483 aa, Zea Mays
MFKSSCINEGENGSSCHSSELPDMGSSVTDVHKNSGKYLPGLFQDLPWNKIWFMEYASDLKENPQTSASSRSHSSFSQDNGNGNSKECFENYAAEEGLHQISRLNVPQQIYAGHPSHRLANSTSANILDFSSSCFVDESDWTAPLAGKKLLPPLLLSNMLDLSGDLELYLGCLRKVQYHLESLFDELLQAVEEACFADVLDEDSFNMPDMILKLKTSTRSSSLPLDSSTDSERRKLSPVYCSHSIGDDSQQSHGEAQVDMFWQQNVPLSPNGSTFPSSPSTNSDNYPVSWFCFSPKTHGTGTYIPNVSYQTYRERIMLERDTIRARKQRQRLPGRRYYSAEQGFSGSQTEEDTIAQSATNQSPKKQNSVQQSGYSGKSTVPDADFVCFREHVATEGGTKQLAVGRETMPPSSSSGIALAQNGQGNRICEPSSPATADLLHAAESLEFGSLGPFSLGLVSTSTQFEEAFPALPTRKRAEGAENH

SEQ ID NO: 170637 - protein, 886 aa, Zea Mays
MAAAAYLGGRGQGADGGWFVPGAGDGWAPPWGRRGGGGAAAAAAAAAGERETLAVVMARRAPPPSAIRRDAVRVAEAAAGEVLLRVHPTREAERRRQDVIAYLTRLIGSSLGCEVFAFGSVPLRTYLPDGDVDITVLGNTWLNSTLIDDVRSMLQSEQENCDAELKLTGLHFIDAEVKLIKCVIENIIVDVSFNQIGGVSTFCFLELVDRQVGKNHLFKRSIMLTKAWCYHESRILGAHHGLISTYALETLVLYIFNMFHKSLHGPLEVLYKFLEYFSKFDWDRYGISLNGPVDLSSLPSLTVEPTEVQGELLLGKDFHQGSLDRLVVIPNEFDGCDTQFRQKFLNIVDPLKANNNLGRSVSKANFYRIRSAFSFGAQKLGQILLLPSEYICDEIYGFFSNTLKRHGKGERLDIDASSAFQPLLGPESTLSEDGSMFKSSCINEGENGSSCHSSELPDMGSSVTDVHKNSASSRSHSSFSQDNGNGNSKECFENYAAEEGLHQISRLNVPQQIYAGHPSHRLANSTSANILDFSSSCFVDESDWTAPLAGKKLLPPLLLSNMLDLSGDLELYLGCLRKVQYHLESLFDELLQAVEEACFADVLDEDSFNMPDMILKLKTSTRSSSLPLDSSTDSERRKLSPVYCSHSIGDDSQQSHGEAQVDMFWQQNVPLSPNGSTFPSSPSTNSDNYPVSWFCFSPKTHGTGTYIPNVSYQTYRERIMLERDTIRARKQRQRLPGRRYYSAEQGFSGSQTEEDTIAQSATNQSPKKQNSVQQSGYSGKSTVPDADFVCFREHVATEGGTKQLAVGRETMPPSSSSGIALAQNGQGNRICEPSSPATADLLHAAESLEFGSLGPFSLGLVSTSTQFEEAFPALPTRKRAEGAENH

SEQ ID NO: 170638 - protein, 895 aa, Zea Mays
MQQYSYEILPFQRLHCGCVASKNSYDLLDSGGVHCVTCMKNSLAQSASGQVVPKLFPSPINLRFFGKSDELLSSRNFEQPPSLTLDSRNDDIAFVNKSNHLFMVKGIEAGQSSNILRQKEIENGSRQIKWEQPTLSFGDMGRPFLTRSQSALESPQCTRRDDNKDPTTDSTSESFSEACLSMSLGIANNVNRMEATSTAERPVLLSTTAIAEGRELATTLSPFQHAQRARHFLTRPPRIGEGAAFDPTRDMFPHLRVARPPADGRGRNQLLPRYWPRITDQELQQISGDSNSTIVPLFEKVLSASDAGRIGRLVLPKACAEAYFPPISQPEGRPLTIQDARGKEWHFQFRFWPNNNSRMYVLEGVTPCIQSLQLQAGDTVTFSRIDPGGKLVMGFRKATNTVSLPDSQISAIANGSLLSETLFSTANENIGVVSGYPGFLHSIKGAADLHPNSLYDHHMNLVDGDVSWNKADKFGSRPDEGSLQFLQKRSHNIGSKSRRFLIDAEDAMELKLTWEEAQELLRPAPTAKPTVVMIEDYEFEEYDEPPVFAKRSIFTIRATGEQDQWIQCDDCSKWRRLPLNVIVAPKWTCTDNSWDSKCCSCSAPEELTPRELQSVLQQYEEMRRRKGSYGLKLNVAEMDASSLDAFATAAVFGEVGNQGSASVATTTKHPRHRPGCTCIVCIQPPSGKGPKHSPACTCNVCMTVRRRFKTLMMRKKQRQSEREEAEAGKKIAWVNRDEPEGSSLSRSPQTLDSTRDNSDVTATMLDKVSDVNKQGHIDVDLNLHPAAPAVQAAQQQPRPVSMMGLLEVAGRPLDNYMKQNGLTSLVGEQGGGSSSTATVPPPALVESEERTSNEGLVPSASAEREPNAMAVDEAGENQQDKAADDDDDAVAAAAT

SEQ ID NO: 170639 - protein, 473 aa, Zea Mays
MAMAAAAAAATKRCMNPACGAPASVLGAGGDWRKGWPLRSGCFALLCDKCGLAYEQFVFCDIFHQKESGWRDCSFCGKRLHCGCVASKNSYDLLDSGGVHCVTCMKNSLAQSASGQVVPKLFPSPINLRFFGKSDELLSSRNFEQPPSLTLDSRNDDIAFVNKSNHLFMVKGIEAGQSSNILRQKEIENGSRQIKWEQPTLSFGDMGRPFLTRSQSALESPQCTRRDDNKDPTTDSTSESFSEACLSMSLGIANNVNRMEATSTAERPVLLSTTAIAEGRELATTLSPFQHAQRARHFLTRPPRIGEGAAFDPTRDMFPHLRVARPPADGRGRNQLLPRYWPRITDQELQQISGDSNSTIVPLFEKVLSASDAGRIGRLVLPKACAEAYFPPISQPEGRPLTIQDARGKEWHFQFRFWPNNNSRMYVLEGVTPCIQSLQLQAGDTVTFSRIDPGGKLVMGFRKATNTVSLPVS

SEQ ID NO: 170640 - protein, 882 aa, Zea Mays
MRRAGVGAGGGRGLEEGLAAAVRMLRPTLRQVRASGQVVPKLFPSPINLRFFGKSDELLSSRNFEQPPSLTLDSRNDDIAFVNKSNHLFMVKGIEAGQSSNILRQKEIENGSRQIKWEQPTLSFGDMGRPFLTRSQSALESPQCTRRDDNKDPTTDSTSESFSEACLSMSLGIANNVNRMEATSTAERPVLLSTTAIAEGRELATTLSPFQHAQRARHFLTRPPRIGEGAAFDPTRDMFPHLRVARPPADGRGRNQLLPRYWPRITDQELQQISGDSNSTIVPLFEKVLSASDAGRIGRLVLPKACAEAYFPPISQPEGRPLTIQDARGKEWHFQFRFWPNNNSRMYVLEGVTPCIQSLQLQAGDTVTFSRIDPGGKLVMGFRKATNTVSLPDSQISAIANGSLLSETLFSTANENIGVVSGYPGFLHSIKGAADLHPNSLYDHHMNLVDGDVSWNKADKFGSRPDEGSLQFLQKRSHNIGSKSRRFLIDAEDAMELKLTWEEAQELLRPAPTAKPTVVMIEDYEFEEYDEPPVFAKRSIFTIRATGEQDQWIQCDDCSKWRRLPLNVIVAPKWTCTDNSWDSKCCSCSAPEELTPRELQSVLQQYEEMRRRKGSYGLKLNVAEMDASSLDAFATAAVFGEVGNQGSASVATTTKHPRHRPGCTCIVCIQPPSGKGPKHSPACTCNVCMTVRRRFKTLMMRKKQRQSEREEAEAGKKIAWVNRDEPEGSSLSRSPQTLDSTRDNSDVTATMLDKVSDVNKQGHIDVDLNLHPAAPAVQAAQQQPRPVSMMGLLEVAGRPLDNYMKQNGLTSLVGEQGGGSSSTATVPPPALVESEERTSNEGLVPSASAEREPNAMAVDEAGENQQDKAADDDDDAVAAAAT

SEQ ID NO: 170641 - protein, 687 aa, Zea Mays
MAMAAAAAAATKRCMNPACGAPASVLGAGGDWRKGWPLRSGCFALLCDKCGLAYEQFVFCDIFHQKESGWRDCSFCGKRLHCGCVASKNSYDLLDSGGVHCVTCMKNSLAQSASGQVVPKLFPSPINLRFFGKSDELLSSRNFEQPPSLTLDSRNDDIAFVNKSNHLFMVKGIEAGQSSNILRQKEIENGSRQIKWEQPTLSFGDMGRPFLTRSQSALESPQCTRRDDNKDPTTDSTSESFSEACLSMSLGIANNVNRMEATSTAERPVLLSTTAIAEGRELATTLSPFQHAQRARHFLTRPPRIGEGAAFDPTRDMFPHLRVARPPADGRGRNQLLPRYWPRITDQELQQISGDSNSTIVPLFEKVLSASDAGRIGRLVLPKACAEAYFPPISQPEGRPLTIQDARGKEWHFQFRFWPNNNSRMYVLEGVTPCIQSLQLQAGDTVTFSRIDPGGKLVMGFRKATNTVSLPDSQISAIANGSLLSETLFSTANENIGVVSGYPGFLHSIKGAADLHPNSLYDHHMNLVDGDVSWNKADKFGSRPDEGSLQFLQKRSHNIGSKSRRFLIDAEDAMELKLTWEEAQELLRPAPTAKPTVVMIEDYEFEEYDEPPVFAKRSIFTIRATGEQDQWIQCDDCSKWRRLPLNVIVAPKWTCTDNSWDSKCCSCSAPEELTPRELQSVLQQYEE

SEQ ID NO: 170642 - protein, 83 aa, Zea Mays
MALPASSSGLFRFVSPRSRPQSTDIVAAASWGVFAGTAGLYLVQGSVSRPGKRLSTLLGLPSQTFPLDLMIWWAEGDAHPTFS

SEQ ID NO: 170643 - protein, 366 aa, Zea Mays
MAPAAATGDYLDDDEFDDYNPHPYAGGYDITATYGSPRPPSLATCYPVASPAATPAPTAPQVPRPPLPQTPAPAPAPAPQPPKPSSPPAPAPAPAAEPYYWPKPYDYGDAPRHLPMYPTPEVFRGWPFLPPPPGPHCRSTCARVRARDYWRQCMRGLDYLFGHSDGYGERHIGVDSLGVPVYANRKGGVEDSVAVEVAPPAVGTVQWHDAGELQFQNNRSSWYGDTEEETHSYEQPTYTSYDRSYEQPTYTSYDRSYEQPTYTSYDRSYEQPSYTSYDRSYEQPYSFHAVPDETTWFPNQTYQDVYKEEEPQFQEFFSYDEDNKISSQPIFSYNQHFGEQSLHIHVEPPETVSSHKLEYYEESIYL

SEQ ID NO: 170644 - protein, 141 aa, Zea Mays
MEDGTRRSQAPAQAQAEAAARSPLQLGEEGTRRSLVPPGQAEEEARSPLQLVEEGTRRSLVPPGQAEAAARSPLQPGDGTRRSLVPPGQAEEERTGAARRPRPPRAAPSSSGWGPCTTPRAPRWCRRARRRGPCRRGRRRS

SEQ ID NO: 170645 - protein, 104 aa, Zea Mays
MLLVGQTSGRQCCLQQYNTLHWMSESICFSCIQQYKSAVWNKFAQRASATITADHRIKNNRPSIDAKKGEAEVDVWRWWEGECSYIWFQLQPRHSREGNHYSFT

SEQ ID NO: 170646 - protein, 415 aa, Zea Mays
MGVQRASGVSLLHALLVVFWALSSRRAKGQNPSGHLSVDASPQNVRKIPDKMFGIFFEEINHAGAGGLWSELVSNRGFEAGGPNTPSNIDPWLIIGDESSIIVGTDRTSCFERNPVALRMEVLCGSKKTNACPSGGVGVYNPGYWGMNIEKGKVYKVSLHVRSSDALSLTASLTSSDGLQKLAAHTITGSKKTFAKWTKVEFHLRSNQNNSNSRFQLTTSKSGVVWLDQVSVMPMDTYMGHGFRKDLASMLANLEPQFLKFPGGNYAMGNYLRNAFRWSETVGPWEERPGHFNDAWGYWTDDGLGFFEFLQLAEDLGASPVWVVNDGASLNEEVSTKTIASLVKEITKSFTQRLNLPTQTSTLYQVVIGQLFRHPTLPIFMMFMSTPLRLICFQKLVCLTTHHVEHRRQLLASTL

SEQ ID NO: 170647 - protein, 616 aa, Zea Mays
MAVDSRVDKTLSILRPQALTDYRALLASLGWPPSLSSPDTEKDKYPQIPNPLVLMNEGNKARYSQSFQALCALQHVQGNRESRLCQTAKVTPALADLKYFTRTACFDNGLWAIDELVHPIASRMEYHFVKWSEQPEFIFTLVYKITKDFMDGVDDVLQPLIDQARLVGLSAKESWVTGMVKILVGYLERQIFPALVCSYQDHATVGKPEVDSSWLHLNDVMISFDKRMQLLADSGIQKMTSLSEGLSRSLSVFSIYAEHPDWLQIWADVELCSAQDKLKSEMEDETSWSCSGQHDQRGHMENSTKFLLSTREDYKAPPVCEFVTKTALSMVERGRVLPNRGMQIQYNRSSSVRFLNGFFLVLRERCEALQLSNTALEDHSLSKTSCAINAARYCENVLREWDEDTTFLDMGPQGSLYTDEIGFLVKLGTDHLEQILSWVLLEFEDLSWEYVQSIGSWSGQTILDDEILDEENTGVSPGFVPSLDVLMDRTAKLKRYLNSKDFLDLWRSIAEGLDYYIYSSIRWAEVSFSDPGITQLRVDIKALLHIFRPFCSRPEAFLPFLSESLRLLTMKKSDAQCLLETLMDDTKSDDCLKREGLHHVNASQAAKILSSRKFSG

SEQ ID NO: 170648 - protein, 531 aa, Zea Mays
MAVDSRVDKTLSILRPQALTDYRALLASLGWPPSLSSPDTEKDKYPQIPNPLVLMNEGNKARYSQSFQALCALQHVQGNRESRLCQTAKVTPALADLKYFTRTACFDNGLWAIDELVHPIASRMEYHFVKWSEQPEFIFTLVYKITKDFMDGVDDVLQPLIDQARLVGLSAKESWVTGMVKILVGYLERQIFPALVCSYQDHATVGKPEVDSSWLHLNDVMISFDKRMQLLADSGIQKMTSLSEGLSRSLSVFSIYAEHPDWLQIWADVELCSAQDKLKSEMEDETSWSCSGQHDQRGHMENSTKFLLSTREDYKAPPVCEFVTKTALSMVERGRVLPNRGMQIQYNRSSSVRFLNGFFLVLRERCEALQLSNTALEDHSLSKTSCAINAARYCENVLREWDEDTTFLDMGPQGSLYTDEIGFLVKLGTDHLEQILSWVLLEFEDLSWEYVQSIGSWSGQTILDDEILDEENTGVSPGFVPSLDVLMDRTAKLKRYLNSKDFLDLWRSIAEGLDYYIYSSIRWAEALLFKT

SEQ ID NO: 170649 - protein, 718 aa, Zea Mays
MPPPPPPSVRGFLDAHFASPDDLAAAPALAELLRRECDGLDASLRRAEARLGAAAASWLARYSEARANLLRVRSRGGRLVAEDDGAEAVRTVGLPALVREIQRIDTIRLYAEATLQLESLVGNLEDAAFSIVRQAPKSKLSSILRKSNETEWKQGKLLHAVDAVKDIERELVRISTSRPQWANLVMAVDSRVDKTLSILRPQALTDYRALLASLGWPPSLSSPDTEKDKYPQIPNPLVLMNEGNKARYSQSFQALCALQHVQGNRESRLCQTAKVTPALADLKYFTRTACFDNGLWAIDELVHPIASRMEYHFVKWSEQPEFIFTLVYKITKDFMDGVDDVLQPLIDQARLVGLSAKESWVTGMVKILVGYLERQIFPALVCSYQDHATVGKPEVDSSWLHLNDVMISFDKRMQLLADSGIQKMTSLSEGLSRSLSVFSIYAEHPDWLQIWADVELCSAQDKLKSEMEDETSWSCSGQHDQRGHMENSTKFLLSTREDYKAPPVCEFVTKTALSMVERGRVLPNRGMQIQYNRSSSVRFLNGFFLVLRERCEALQLSNTALEDHSLSKTSCAINAARYCENVLREWDEDTTFLDMGPQGSLYTDEIGFLVKLGTDHLEQILSWVLLEFEDLSWEYVQSIGSWSGQTILDDEILDEENTGVSPGFVPSLDVLMDRTAKLKRYLNSKDFLDLWRSIAEGLDYYIYSSIRWAEMHSACWKH

SEQ ID NO: 170650 - protein, 110 aa, Zea Mays
MKLSKTHVHRNEAQQTNKSDKVKPIVPAFCHPVKYVCHIAPIVGGDELVQDICAPIVKNIYQGTKNTSTNKDHDKWVCELDYAIQGLAPHVRETLGSSKKNQRCRILSDL

SEQ ID NO: 170651 - protein, 773 aa, Zea Mays
MVPALADAKHYLSYRRAGLFYHFFLFLCFGQDQRRLPVPTYSSSPTHALQLQLRPRLRLRVIVRVCAWTETASHPPTTQTRSTHHHRLIRLYGNRFSFCACFSHGHAARRRPHGRHALHLPCAPRAHRLGTARRRLQRDPPHLHAAAPGQDQASRGGAQLPALLLQRQRHRRQRRHPPATLLGAAAHLRARRDPRLRRRGRAHLGRRPALQHHGGGRRRQAHAHVLHRVPADGPPHPDRHGRGPRQDTGHGQPRRHALRRAGALRPAPLVSLARRPFLHLPAGHQRHVVADEPHHLLRVHGGWGPHRRPGGEWLPPAPHRRPGHHLRRAPVVRHHLPSARHAGERRAARPPRRLAAVVEVGARGVHQLHARRLPAGGGHGRMPLRSPGPVLQGPRLLQGGAQLRPQARRPRPAAVAGQRHGDRPDRPLLPERHHPAQVHGCRALQVGVPDGGVQDAARPQPDQALPAHRVQRHRRRVRAEPGVRVRPTHLGEPVGVPGPQRAHVDHGGRGDVAGGVQHHHVAQEAAQVLRLLLLLLQRVGGPLPDVRVRLPLVRADLQHHGAGDAAAAAGAAHAVRPAGQRGARVGGPEAPRRAQTHALRRLLRRQRQLARRHRLHRRMERAPHALQLGRHGHAGLVHGHRHGQGVRRLRTGLLLQRHGRREQHHLRQGRPGPQLPARGEEHERRRLPGAREAAVRLLLHQEEDPRHRHHRRGRLPVQGLLQRRRVRHAIEDSEPGDQCRRPYAAVFACFRFHVIAAVIITFAIFAHHSYSSM

SEQ ID NO: 170652 - protein, 218 aa, Zea Mays
MFMISFMLQAQTMEMMYTIIADEFKSMDNKDMRPEDHLNFFCLGTGKNHHLMAAQNQRNLHIKVQRVWLSSTLLITPKLNMVSEQIQTVPLTNPANDLPVLLLQSLSLCLVELMRRDDVGAAAANRNRNGSVMRVKEKCSEEEGDSVCSVCIDGGELLLCDKCPSAFHHACVGLQATPEGDWCCPLCRCGVCGGSDLDDDTAEGFTDKTIIYCEQCER

SEQ ID NO: 170653 - protein, 283 aa, Zea Mays
MATTALLRALRRPSSEAALRLATKANVQTTNGYRHLNNRNLSVFNEFSKQLKGEAKSNPEFQKSMKEFSEKLDVVKEDLKVRTKKTTETIYKRVDDVWSEAEETSKKVTANIKEKMFAAKEEVKESFGVGKEESTSCRDGLPEGSKHEKTEASSHSDGTTEDATDSHTLFTKLKSTISSASPVVSGAFAKLKDTKVSTLAKQGYEIVKDELSSNSSRKKKHQARHASAKVEKSTRTDLVLTPTKKTVLGEKWEEFKNKIRGHPVYRRVDEYTKPVVTKGQELE

SEQ ID NO: 170654 - protein, 302 aa, Zea Mays
MATTALLRALRRPSSEAALRLATKANVQTTNGYRHLNNRNLSVFNEFSKQLKGEAKSNPEFQKSMKEFSEKLDVVKEDLKVRTKKTTETIYKRVDDVWSEAEETSKKVTANIKEKMFAAKEEVKESFGVGKEESTSCRDGLPEGSKHEKTEASSHSDGTTEDATDSHTLFTKLKSTISSASPVVSGAFAKLKDTKVSTLAKQGYEIVKDELSSNSSRKKKHQARHASAKVEKSTRTDLVLTPTKKTVLGEKWEEFKNKIRGHPVYRRVDEYTKPVVTKGQELKMSGKDGRQVTIQWFRKFKT

SEQ ID NO: 170655 - protein, 410 aa, Zea Mays
MKEFSEKLDVVKEDLKVRTKKTTETIYKRVDDVWSEAEETSKKVTANIKEKMFAAKEEVKESFGVGKEESTSCRDGLPEGSKHEKTEASSHSDGTTEDATDSHTLFTKLKSTISSASPVVSGAFAKLKDTKVSTLAKQGYEIVKDELSSNSSRKKKHQARHASAKVEKSTRTDLVLTPTKKTVLGEKWEEFKNKIRGHPVYRRVDEYTKPVVTKGQEVAEDVRERWETSDNPVVQKIQDLNESLLEETSAAVTFREIRQRDPSFSLSDFVADVQEMIKPVLTAYSKGDAETLKNYCTKEVIERCKGEREAYASQGIFFDHKILHISEADVLETKMFGSSPIIILRFQTQQIYCVRDREGQVTEGGQDTIQTVFYSWAMQLMDSDEVPEEESYYPVWRLREMQQAGIKALI

SEQ ID NO: 170656 - protein, 469 aa, Zea Mays
MATTALLRALRRPSSEAALRLATKANVQTTNGYRHLNNRNLSVFNEFSKQLKGEAKSNPEFQKSMKEFSEKLDVVKEDLKVRTKKTTETIYKRVDDVWSEAEETSKKVTANIKEKMFAAKEEVKESFGVGKEESTSCRDGLPEGSKHEKTEASSHSDGTTEDATDSHTLFTKLKSTISSASPVVSGAFAKLKDTKVSTLAKQGYEIVKDELSSNSSRKKKHQARHASAKVEKSTRTDLVLTPTKKTVLGEKWEEFKNKIRGHPVYRRVDEYTKPVVTKGQEVAEDVRERWETSDNPVVQKIQDLNESLLEETSAAVTFREIRQRDPSFSLSDFVADVQEMIKPVLTAYSKGDAETLKNYCTKEVIERCKGEREAYASQGIFFDHKILHISEADVLETKMFGSSPIIILRIYCVRDREGQVTEGGQDTIQTVFYSWAMQLMDSDEVPEEESYYPVWRLREMQQAGIKALI

SEQ ID NO: 170657 - protein, 326 aa, Zea Mays
MATTALLRALRRPSSEAALRLATKANVQTTNGYRHLNNRNLSVFNEFSKQLKGEAKSNPEFQKSMKEFSEKLDVVKEDLKVRTKKTTETIYKRVDDVWSEAEETSKKVTANIKEKMFAAKEEVKESFGVGKEESTSCRDGLPEGSKHEKTEASSHSDGTTEDATDSHTLFTKLKSTISSASPVVSGAFAKLKDTKVSTLAKQGYEIVKDELSSNSSRKKKHQARHASAKVEKSTRTDLVLTPTKKTVLGEKWEEFKNKIRGHPVYRRVDEYTKPVVTKGQEVAEDVRERWETSDNPVVQKIQDLNESLLEETSAAVTFREIRQRDP

SEQ ID NO: 170658 - protein, 470 aa, Zea Mays
MATTALLRALRRPSSEAALRLATKANVQTTNGYRHLNNRNLSVFNEFSKQLKGEAKSNPEFQKSMKEFSEKLDVVKEDLKVRTKKTTETIYKRVDDVWSEAEETSKKVTANIKEKMFAAKEEVKESFGVGKEESTSCRDGLPEGSKHEKTEASSHSDGTTEDATDSHTLFTKLKSTISSASPVVSGAFAKLKDTKVSTLAKQGYEIVKDELSSNSSRKKKHQARHASAKVEKSTRTDLVLTPTKKTVLGEKWEEFKNKIRGHPVYRRVDEYTKPVVTKGQEVAEDVRERWETSDNPVVQKIQDLNESLLEETSAAVTFREIRQRDPSFSLSDFVADVQEMIKPVLTAYSKGDAETLKNYCTKEVIERCKGEREAYASQGIFFDHKILHISEADVLETKMFGSSPIIILRQIYCVRDREGQVTEGGQDTIQTVFYSWAMQLMDSDEVPEEESYYPVWRLREMQQAGIKALI

SEQ ID NO: 170659 - protein, 307 aa, Zea Mays
MATTALLRALRRPSSEAALRLATKANVQTTNGYRHLNNRNLSVFNEFSKQLKGEAKSNPEFQKSMKEFSEKLDVVKEDLKVRTKKTTETIYKRVDDVWSEAEETSKKVTANIKEKMFAAKEEVKESFGVGKEESTSCRDGLPEGSKHEKTEASSHSDGTTEDATDSHTLFTKLKSTISSASPVVSGAFAKLKDTKVSTLAKQGYEIVKDELSSNSSRKKKHQARHASAKVEKSTRTDLVLTPTKKTVLGEKWEEFKNKIRGHPVYRRVDEYTKPVVTKGQEVAEDVRERWETSDNPVVQKIQEYYLE

SEQ ID NO: 170660 - protein, 399 aa, Zea Mays
MATTALLRALRRPSSEAALRLATKANVQTTNGYRHLNNRNLSVFNEFSKQLKGEAKSNPEFQKSMKEFSEKLDVVKEDLKVRTKKTTETIYKRVDDVWSEAEETSKKVTANIKEKMFAAKEEVKESFGVGKEESTSCRDGLPEGSKHEKTEASSHSDGTTEDATDSHTLFTKLKSTISSASPVVSGAFAKLKDTKVSTLAKQGYEIVKDELSSNSSRKKKHQARHASAKVEKSTRTDLVLTPTKKTVLGEKWEEFKNKIRGHPVYRRVDEYTKPVVTKGQEVAEDVRERWETSDNPVVQKIQDLNESLLEETSAAVTFREIRQRDPSFSLSDFVADVQEMIKPVLTAYSKGDAETLKNYCTKEVIERCKGEREAYASQGIFFDHKKLMYWKQRCLDLHP

SEQ ID NO: 170661 - protein, 132 aa, Zea Mays
MLELLNQLDGFDSRGDVKVILATNRIESLDPALLRPGRIDRKIEFPLPDIKTRRRIFQIHTSKMTLADDVNLEEFVMTKDEFSGADIKAICTEAGLLALRERRMKVTHADFKKAKEKVMYKKKEGVPDGLYM

SEQ ID NO: 170662 - protein, 270 aa, Zea Mays
MHNKVLSVVGILQDEVDPMVSVMKVEKAPLESYADIGGLDSQIQEIKEAVELPLTHPELYEDIGIRPPKGVILYGEPGTGKTLLAKAVANSTSATFLRVVGSELIQKYLGDGPKLVRELFRVADELSPSIVFIDEIDAVGTKRYDAHSGGEREIQRTMLELLNQLDGFDSRGDVKVILATNRIESLDPALLRPGRIDRKIEFPLPDIKTRRRIFQIHTSKMTLADDVNLEEFVMTKDEFSGADIKAICTEAGLLALRERRMKISRRQRRR

SEQ ID NO: 170663 - protein, 516 aa, Zea Mays
MGTTYKCCFIFKRRFHTRDAPPPEDVRALFSVHAGGGPHMGADDLRRYLVATGQEEAELSSDCSDTPIIMALERGVRVIELDMWPNSTIDDINIVHGRTLTTPVSLIKCLRSIKKHAFVASPYPVIITLEDHLPSQLQEKVAKMVVEVFGNILYYPPDDTHELKELPSPEQLKGRVLLSTKPPKEYLETKLSDSTKEGDADLHLGKGTGDDAVWGKEVPDFRTEIQSAEKDDENDDVDDEEEQKLQPHIAPQYKHLITIRAGKPKDSLADALKSDPEKVRRLSLSEQQLAKAAKDHATEIVRFTQRNILRIYPKGTRVTSSNYNPFVGWVHGAQMVAFNMQGYGRALWLMHGFYKANGGCGYVKKPDFLMQTEPQVFDPREPQPVKKTLKVKVYMGDGWRMDFKQTHFDQYSPPDFYTRVGIAGVPADSVMKKTNAIEDNWTPVWEKEFSFPLTVPELALLRVEVHEYDMSEKDDFGGQTVLPVSELRPGIRAVALFDRKGMKYNHVKLLMRFEFA

SEQ ID NO: 170664 - protein, 561 aa, Zea Mays
MGTTYKCCFIFKRRFHTRDAPPPEDVRALFSVHAGGGPHMGADDLRRYLVATGQEEAEVERLLEQIVQGRARVPRLARPLLSLDDFHRYLFSHDLNPPIRHPQLSSDCSDTPIIMALERGVRVIELDMWPNSTIDDINIVHGRTLTTPVSLIKCLRSIKKHAFVASPYPVIITLEDHLPSQLQEKVAKMVVEVFGNILYYPPDDTHELKELPSPEQLKGRVLLSTKPPKEYLETKLSDSTKEGDADLHLGKGTGDDAVWGKEVPDFRTEIQSAEKDDENDDVDDEEEQKLQPHIAPQYKHLITIRAGKPKDSLADALKSDPEKVRRLSLSEQQLAKAAKDHATEIVRFTQRNILRIYPKGTRVTSSNYNPFVGWVHGAQMVAFNMQGYGRALWLMHGFYKANGGCGYVKKPDFLMQTEPQVFDPREPQPVKKTLKVKVYMGDGWRMDFKQTHFDQYSPPDFYTRVGIAGVPADSVMKKTNAIEDNWTPVWEKEFSFPLTVPELALLRVEVHEYDMSEKDDFGGQTVLPVSELRPGIRAVALFDRKGMKYNHVKLLMRFEFA

SEQ ID NO: 170665 - protein, 591 aa, Zea Mays
MGTTYKCCFIFKRRFHTRDAPPPEDVRALFSVHAGGGPHMGADDLRRYLVATGQEEAEVERLLEQIVQGRARVPRLARPLLSLDDFHRYLFSHDLNPPIRHPQVHHDMTRPLSHYFIYTGHNSYLTGNQLSSDCSDTPIIMALERGVRVIELDMWPNSTIDDINIVHGRTLTTPVSLIKCLRSIKKHAFVASPYPVIITLEDHLPSQLQEKVAKMVVEVFGNILYYPPDDTHELKELPSPEQLKGRVLLSTKPPKEYLETKLSDSTKEGDADLHLGKGTGDDAVWGKEVPDFRTEIQSAEKDDENDDVDDEEEQKLQPHIAPQYKHLITIRAGKPKDSLADALKSDPEKVRRLSLSEQQLAKAAKDHATEIVRFTQRNILRIYPKGTRVTSSNYNPFVGWVHGAQMVAFNMQGYGRALWLMHGFYKANGGCGYVKKPDFLMQTEPQVFDPREPQPVKKTLKVKVYMGDGWRMDFKQTHFDQYSPPDFYTRVGIAGVPADSVMKKTNAIEDNWTPVWEKEFSFPLTVPELALLRVEVHEYDMSEKDDFGGQTVLPVSELRPGIRAVALFDRKGMKFHMRQLEADQTSPGSRR

SEQ ID NO: 170666 - protein, 495 aa, Zea Mays
MGTTYKCCFIFKRRFHTRDAPPPEDVRALFSVHAGGGPHMGADDLRRYLVATGQEEAEVERLLEQIVQGRARVPRLARPLLSLDDFHRYLFSHDLNPPIRHPQVHHDMTRPLSHYFIYTGHNSYLTGNQLSSDCSDTPIIMALERGVRVIELDMWPNSTIDDINIVHGRTLTTPVSLIKCLRSIKKHAFVASPYPVIITLEDHLPSQLQEKVAKMVVEVFGNILYYPPDDTHELKELPSPEQLKGRVLLSTKPPKEYLETKLSDSTKEGDADLHLGKGTGDDAVWGKEVPDFRTEIQSAEKDDENDDVDDEEEQKLQPHIAPQYKHLITIRAGKPKDSLADALKSDPEKVRRLSLSEQQLAKAAKDHATEIVRFTQRNILRIYPKGTRVTSSNYNPFVGWVHGAQMVAFNMQGYGRALWLMHGFYKANGGCGYVKKPDFLMQTEPQVFDPREPQPVKKTLKVKVYMGDGWRMDFKQTHFDQYSPPDFYTRSQQTR

SEQ ID NO: 170667 - protein, 380 aa, Zea Mays
MGTTYKCCFIFKRRFHTRDAPPPEDVRALFSVHAGGGPHMGADDLRRYLVATGQEEAEVERLLEQIVQGRARVPRLARPLLSLDDFHRYLFSHDLNPPIRHPQVHHDMTRPLSHYFIYTGHNSYLTGNQLSSDCSDTPIIMALERGVRVIELDMWPNSTIDDINIVHGRTLTTPVSLIKCLRSIKKHAFVASPYPVIITLEDHLPSQLQEKVAKMVVEVFGNILYYPPDDTHELKELPSPEQLKGRVLLSTKPPKEYLETKLSDSTKEGDADLHLGKGTGDDAVWGKEVPDFRTEIQSAEKDDENDDVDDEEEQKLQPHIAPQYKHLITIRAGKPKDSLADALKSDPEKVRRLSLSEQQLAKAAKDHATEIVSFLCSKSK

SEQ ID NO: 170668 - protein, 559 aa, Zea Mays
MGTTYKCCFIFKRRFHTRDAPPPEDVRALFSVHAGGGPHMGADDLRRYLVATGQEEAEVERLLEQIVQGRARVPRLARPLLSLDDFHRYLFSHDLNPPIRHPQVHHDMTRPLSHYFIYTGHNSYLTGNQLSSDCSDTPIIMALERGVRVIELDMWPNSTIDDINIVHGRTLTTPVSLIKCLRSIKKHAFVASPYPVIITLEDHLPSQLQEKVAKMVVEVFGNILYYPPDDTHELKELPSPEQLKGRVLLSTKPPKEYLETKLSDSTKEGDADLHLGKGTGDDAVWGKEVPDFRTEIQSAEKDDENDDVDDEEEQKLQPHIAPQYKHLITIRAGKPKDSLADALKSDPEKVRRLSLSEQQLAKAAKDHATEIVRFTQRNILRIYPKGTRVTSSNYNPFVGWVHGAQMVAFNMQGYGRALWLMHGFYKANGGCGYVKVYMGDGWRMDFKQTHFDQYSPPDFYTRVGIAGVPADSVMKKTNAIEDNWTPVWEKEFSFPLTVPELALLRVEVHEYDMSEKDDFGGQTVLPVSELRPGIRAVALFDRKGMKYNHVKLLMRFEFA

SEQ ID NO: 170669 - protein, 268 aa, Zea Mays
MRTASPGWLPPNSFHPRLLRSDGPPGPAAGRIASAAMVKAYPTVNEDYLKAVDKAKRKLRGLIAEKNCAPLMLRLAWHSAGTFDVATKTGGPFGTMKNPAEQAHGANAGLEIAIRLLEPIKEQFPILSYADFYQLAGVVAVEVTGGPDVPFHPGRQDKPEPPPEGRLPDATQGSDHLRQVFSTQMGLSDQDIVALSGGHTLGRCHKDRSGFEGAWTSNPLIFDNSYFKKAFCSYQVTKPSSLIHPSAHLLTNTQRTRTLSLLTTPRPT

SEQ ID NO: 170670 - protein, 597 aa, Zea Mays
MLQRAASNAYSWWWASHIRTTQSKWLDANLQDMENRVKIMLKLLGQEADSFGKRAEMYYHTRPEVISHVEQVYRAYRALVERYDHISKELHKANHTIATACPEEVQYAMLEEEDHDFPKAITPIKTHKSLVQEILNAKRQGPSGSGWNKPPSHPRMSAEEAQEEIGRLQKSILVLQTEKEYVKSSYESGIARYREIEKQIADTQNEICLIQDRFDAHAAIGDDEARALMTITALRSCQGTIAELVRHFEELIKLAAVELEKTKSLRAQLYAMMDGDTDTCSREASSTDTSVVARSYPVTKAILELQPIYEKLDKFFSSGSESSAEEIAENVDELVDKVINLELKFPKQTAQINQLIQENENLKNKLDELQDEMALRDDQSELNEQIKQLEDEFSTVRVLERSILEEEASVSTGFSEVFSCIINISKALGSFGPEDLHNLSAAVEDGAMVPRDVFLEQSAEESKGGDFRDIEAPTLRHSLGQDREDVSEVVSDNGNDGIHGSRNANEEIIPGSCLMQQVRYKLRLHFDDHIDPLFSSENENIVHDSGEGNVDSSSGKVFQSSSETENGSRNFPNGEIMRGEYPLGIVGQTHLLHSAVV

SEQ ID NO: 170671 - protein, 66 aa, Zea Mays
MCSPPCPAVVVARSSTTARRRSVVLRPRSRSVPNLRGIYDQDLVIPRSSFSRSTRLKTLSICLVKA

SEQ ID NO: 170672 - protein, 88 aa, Zea Mays
MLRCCTTVAPPSPGECIRARHRALGSAPALPPISPSCAATACPSPFGPCSPMARACRNIVLPFLLSLRASPSPSRASLLLLPWWMDGG

SEQ ID NO: 170673 - protein, 186 aa, Zea Mays
MAALAPSKILGTKLNFAGSSRYATAAPTAGAQKIVSLFSKKPAQKPKPSAVSSSSPDISDELAKWYGPDRRIYLPDGLLDRSEVPEYLTGEVPGDYGYDPFGLGKKPEDFAKYQAYELIHARWAMLGAAGAVIPEACNKFGANCGPEAVWFKTGALLLDGNTLSYFGNSIPINLVVAVIAERTPSL

SEQ ID NO: 170674 - protein, 103 aa, Zea Mays
MMSDLKRLKKIKFRTHKVIYRRYAGLFFSICVDITDNELAYLECIHLFVEILDHFFSNVCELDLVFNFHKVYLILDEFILAGELQETSKKAIIERMGELEKLE

SEQ ID NO: 170675 - protein, 57 aa, Zea Mays
MLRTSVGMKASTTSKTSRQTGSHNSSDGGGGRGGSTSGSISSETVRQASTRNAPMLK

SEQ ID NO: 170676 - protein, 213 aa, Zea Mays
MAQQPGCAPVLQLLCLRRLAGSRARLCACKLSLSAWLHRNELRVAKKHLAGRIDRVDCSLDECQVITEATREEVTIIHGDLSAFQKEMETVHLVVRSLETKLGRLAYTQDRTTRGIYDLCEFTKRLDQSPKADTRQVTSSTSRPAIESSERIIRVASLPPTLEPESPRIEAPKVVRSSTVMSASGLSLLAGTTIPPKRSEVNTDIHWPWLNQF

SEQ ID NO: 170677 - protein, 305 aa, Zea Mays
MRWFDLIVCLPTHFHYSLFLLLSHLYTHLSSTPRDRLYEAHQCMVHVVARHACSVDSDVSLAMSTTYRSSFFLLFYYFCDGLGLHRQGPHHREQRRAREGAGRGAARRRRPLRGVPVRHPGVPGHALRALRPPVLRRRRHRRHGGLHLRQRRRGAPELRHPGPEAEPRAEGHGDGAGPHRPQPELRHLHPPLQDHRRAGPRRHAGVPGPSVAEVLADGRHGELPRPLGLAGRVARVVGPVRSEHVVLRGVRQYRAWCRNESASDVDWGAHVTVQVRCREVYRGGIHPRRRMVGWHWSQLYFRTVR

SEQ ID NO: 170678 - protein, 462 aa, Zea Mays
MPRESQNTSGQIILDYTKAIQESVFEQLRVVREGHLRIVFNPDLKIASWEFCARRHEELVPRRSIIPQVSNLGAAVQKYQAATQNSTSLSAQDMQNNCNSFVACARQLAKALEVPLVNDLGYTKRYVRCLQIAEVVNCMKDLIDHSRQTGSGPIDSLHNLPRRTPSGASTLQPQQQQTEEKQAIPQSSNQSGQNSAPMAGVQPSASANGDVTSNVTLSCAPSTSAPSPSVVGLLQNSMNSRQDHAMSSNNGGPYSGGNVAIPKVNSTSSLHSNPPTSFPSPAPTTSNNSMMPAPQNTNQLSSPTTSPSIPPMQPPAARPQEAEPSDSQSSVQKILQDLMSSQMNGVGHSGNDTKTPNGLTHGANGVNCLLGNAAANNSGIGGMGFGAMSGFGHGMRTAMANNPMAMGARMGMNHGAHDLSQLGQLQHQQQHQQQHDIGSQLLGGFRSGNSFNNMQYDWKPSQ

SEQ ID NO: 170679 - protein, 493 aa, Zea Mays
MMPSGPPNPMGHGQPVGGAAPSLLRTSSSLLSGGGQPGMGGGGGGMLSSQSPFSSLVSPRTQFGGNGLLGGASLLNRPPFGNGGPMPGPGSMQAVGMQMSTLQQRAGLDGASDFISAEGSDPLSFPSSSQVNLGNQMGSDNLQATSQQQQQQMDAMQDMQQQLPMSYNQQQLPPQHSQQLQQPQATVKLENGGSMISIKPEQQMAQPDQMMRSASGVKLEPQQLQAQMMRSLSSVKMEQQTSDSSAFLQQQQQQQHLLQLTKQIRNCPELVSIGGPNAIANPQAATAAQLTLLQQQRLLHMQQQQQQQILKNLPLQRNQLQQQQQHQQQQQLLRQQSLNMRTPGKSSPYEPGTCAKRLTHYMYHQQNRPQDNNIEYWRNFVNEYFAPNAKKRWCVSLYGSGRQTTGVFPQLFSFRMYGTVRFVIGNLAGVLKQQLRYYRDYAKLNMPVVHLKNFCTSTCHVSPRIRLGRLFWITQKQSKKVSLSNCVLYERGI

SEQ ID NO: 170680 - protein, 72 aa, Zea Mays
MSNLFSCLWYNEVDRFTPRDQLSFAYTYLKLRRTNPDRPFRLNMFKDCERRSIAKLFHHRTEERHNSAQLTR

SEQ ID NO: 170681 - protein, 277 aa, Zea Mays
MSTSVSAAAVAALVPPLTGRRSPPASRVPQICRRRIRSKPRIFSSSPSFPIVPAAAMATGGAAPTASDAGSKKKLLILDSEEDLAVSLAKYTAELSEKFAAERGAFTAVLSGGSLIEALRKLTEPPYLDSVDWSKWHVFWVDERVVPKDHVDSNYKLAYDGFLSKVPIPPGQVYAINDALSAEGAADDYEACLKQLVKNGVISMSAATGFPRFDLQLLGMGPDGHIASLFPGHPLVNEKESNQLIRIRCDGGDWSWKGGSGAEGALRQANLVRPAAC

SEQ ID NO: 170682 - protein, 248 aa, Zea Mays
MSTSVSAAAVAALVPPLTGRRSPPASRVPQICRRRIRSKPRIFSSSPSFPIVPAAAMATGGAAPTASDAGSKKKLLILDSEEDLAVSLAKYTAELSEKFAAERGAFTAVLSGGSLIEALRKLTEPPYLDSVDWSKWHVFWVDERVVPKDHVDSNYKLAYDGFLSKVPIPPGQVYAINDALSAEGAADDYEACLKQLVKNGVISMSAATGFPSNQLIRIRCDGGDWSWKGGSGAEGALRQANLVRPAAC

SEQ ID NO: 170683 - protein, 251 aa, Zea Mays
MHSNTEYCSIHGSKAMEDKDSVPHSVVEKDTEALLLHDVLLNGILAIGTLGHHVDSLCPVACIEEDDLFIMDDEKAIVEERDDEEPRNDQVKEDVALETEPCEPVWPIVEPAKMHSLSMKEDNFTCFVAEEILIREVEDGGGANIQERPLLMLEKVEKVRTTLADLFAAEVFSSSSPREYSCQDIIDVAVASTSKHASCMEKMHQKKPRKPTPKPLKATRKLSRVMRKMLGKKIHPEQLNGRSNAEGPLTA

SEQ ID NO: 170684 - protein, 91 aa, Zea Mays
MDISHPHPKACSARSYARAPRTSTPLVAFGAIYAEVKKKTSRWISRSSRTLMSSRIRLATSPSQLPVVGCLRWLRFDSAYFDLYYVNDSSL

SEQ ID NO: 170685 - protein, 245 aa, Zea Mays
MRRRPGIAGLQNAAATRDQFRLVGENVAKVRTDVMKEQLATFRSQLEEFARKHKSDIRKNPVFRQQFHEMCAKVGVDPLASNKGVWAELLGIGVQIVDICIATRSHNGGLIDLLDLRKLLGQKRKATLESLSEDDCLRAISKLKVLGSGFEVISVGRRKLVRSVPTELNKDHSGILGLAQADGYVTVEQVEKEFSWSTGRAIDALETLLKEGLAMIDDGHRDGKRRYWFPCVTVSSDTAAVEVKS

SEQ ID NO: 170686 - protein, 153 aa, Zea Mays
MNLIVDICIATRSHNGGLIDLLDLRKLLGQKRKATLESLSEDDCLRAISKLKVLGSGFEVISVGRRKLVRSVPTELNKDHSGILGLAQADGYVTVEQVEKEFSWSTGRAIDALETLLKEGLAMIDDGHRDGKRRYWFPCVTVSSDTAAVEVKS

SEQ ID NO: 170687 - protein, 440 aa, Zea Mays
MTYVNPDPQPLAAATADDSATQHQAAVTAAPQSTRGALGFFATAEPKQGATMVAPSSPQGVPGFAVVPQAQGVENIAPPASPQGPPGFCVTPGLAPQQGAPVMAPPQGVTMMAPQQQHFAPAMVPGSQQVMQMLLQALQAQAQAQAQAMVAHQPAQGMAPSQCLPMCHPSTVEMQQAQAGHVTAPPPVPLGPPLMMQQQQQPSQADTVIMAQPPLPLDPPLLQQQQPSQADTVIMAQPPLPLGSAMLQQQPPQGATMMMAQPPLPLFPPSVMLQHNPQGNQVTMAQPQFAALPCKRQRLDQYDNNYGQHMTGHQEETAITNAAIGQFYGPNIHNGVPYFGAPEPSLPPDATNTIYVEGLPINCTRREVAHIFRQYMGFLEMRLVNKGSNKHLCFVDFATPAQAFFAMRNLQGYKFDEQDPHSRILNLQFSRSPRMGSHAS

SEQ ID NO: 170688 - protein, 142 aa, Zea Mays
MGKNQAYKAMQWARLGSSSDALGTADALEDGMDGMKQGIINPSDIDVTFEDFPYYVSENTKNVLLSCAFIHLEKKEFIKQFAEISSINQRILLFGPAGSEIYQETLVKALAKHFGARLLVVDSLLLPWRGRIRTQRKEVKRG

SEQ ID NO: 170689 - protein, 238 aa, Zea Mays
MGKNQAYKAMQWARLGSSSDALGTADALEDGMDGMKQGIINPSDIDVTFEDFPYYVSENTKNVLLSCAFIHLEKKEFIKQFAEISSINQRILLFGPAGSEIYQETLVKALAKHFGARLLVVDSLLLPWIPDGNDLGGLCEEDHGFFCSAESLRPDFSAGEEVERLAMTELIEVISEENKSGPLIVLLKDVEKSFIGVTESLSSSRSKFESLPSGVLIIGSHTQMDSRKEKVHALLLII

SEQ ID NO: 170690 - protein, 138 aa, Zea Mays
MGKNQAYKAMQWARLGSSSDALGTADALEDGMDGMKQGIINPSDIDVTFEDFPYYVSENTKNVLLSCAFIHLEKKEFIKQFAEISSINQRILLFGPAGSEIYQETLVKALAKHFGARLLVVDSLLLPWEESGSSLPSD

SEQ ID NO: 170691 - protein, 142 aa, Zea Mays
MGKNQAYKAMQWARLGSSSDALGTADALEDGMDGMKQGIINPSDIDVTFEDFPYYVSENTKNVLLSCAFIHLEKKEFIKQFAEISSINQRILLFGPAGSEIYQETLVKALAKHFGARLLVVDSLLLPWGTKLWLSRQSDACF

SEQ ID NO: 170692 - protein, 477 aa, Zea Mays
MATPLAPASSFITRPLALALVLVAAALCRPASCAAAAAAADRITRLPGQPEVSFGQYSGYVGVDGDGGGKRALFYYFVEADAPDPASKPLVLWLNGGPGCSSLGVGAFSENGPFRPSGQVLVKNEYSWNKEANVIYLETPAGVGYSYSADAAYYQGVDDKMTAMDNMVFLQRWLQKFPQYRGRDLYIAGESYAGHYIPQLAEAMVEFNNKEERIFNLKGVALGNPVLEFATDFNSRAEYFWSHGLISDATFRAFTSACNYSRYVAEYYGGALSPLCARVMNRVTRETSRFVDKYDVTLDVFLSSVLSQSKTLSPHVGQRVDVCVEDETVRYLNRRDVQAALHARLVGVDKWAVCSSVLQYELLNLQIPTINVVGSLVRSGIRVLVYSGDQDSVIPLTGSRTLVQSLARGMGLKTTTPYRVWFEGQQVGGWTQVYGGGALSFATVRGASHEAPFSQPGRSLVLFRAFLQGQPLPETFS

SEQ ID NO: 170693 - protein, 111 aa, Zea Mays
MFSMALPLALTLRLSLPLPPPSCPLPRRRSQAPPPHSRDLVLGHLLQLRLCFVVRALPVPRRVRVGPAHDSHDVTPRLLAPSAHSSVSVFRCLFVAVLVPTAEQDGDCEGR

SEQ ID NO: 170694 - protein, 79 aa, Zea Mays
MATTAIGSGRGSGTAALCFLVACLLLASPSSFVAGTEAAAAYGAGAGAGRKLMQTSAGAMGYPGTNLPPATYPAVPCCP

SEQ ID NO: 170695 - protein, 264 aa, Zea Mays
MLIPGGQKNPHPRRGRHLVVLLACERRHRAHISVAWRQRIVPFPSNSADPTSSHTSGVSPRFAVGHIHVVILDPDECVCHIHRSSTDLARMFGRASPRMNLIQSAAMKKISPRSTTNKRKKRTSPKDKEKELKRDYKALKEARQQSGVSWDERLCRIEAEEPIWNNLTTSNERLKKFRTKSFPLFEALGELYDGNIAEGTMNFTSIEPSRPHVTQPCQGAATQPSQAAFTLTQPSQIAFTQPSLAAFAQPSRTAFRHPSLPAFP

SEQ ID NO: 170696 - protein, 114 aa, Zea Mays
MYRFVKPATGISVHWKISTDERFFPYFQNCIGAIDGTHVPITISAEKQAPYRNRKGTLSQNVMLVCDFDLNFTFISSGWEGLATDARVLRSVLLAGFHVPEGNIILSMEDMLTH

SEQ ID NO: 170697 - protein, 631 aa, Zea Mays
MDLTMSTTTMSTSPALDHDHDHGHHLLSSASPTSTDSPATAMRPRPPSLPPTIPACDPHDGPASLQLIEDLTTHAGAIQQRVLGEILAMNAGTDYVRGFLGANDDDDSAEGRHADELAATFKERVPVVEYEDVKPYIERIANGAPSSLISSKTITELLTSSGTSGGQPKLMPSTEEELDRKTFLYNLLVPVMNKYVEGLDEGRCMYLLFVKPEMKTPSGLVARPVLTSYYKSRHFRERPDSPYTRYTSPNEAILCADSAQSMYAQLLCGLARRGEVLRVGAVFASAFLRALKFLEGHWRALCDDIRAGRVDAARVTDRACRDAVARVVARPDAALADAIAAECEAGAASWRGIVRRLWPRTKYIDVIVTGSMAQYVPLLEFYGGGLPLVSTMYASSECYFGINLRPLDRPEDVAYTLLPNMCYYEFIKVEKDGEEVRDGEVVDLVDVEVGAYYELVVTTFTGLYRYRVGDILQVSGFHNAAPQFRFVHRRNVVLSVDTDKTSEDDLLRAVTAAKRLLAPLGAILSEYTAYAGLDSVYRRCRSRDRSVGPLEIRVVSPGAFDELMDLCVSHGSSVNQYKTPRCIKHPDAIAVLEARVVGRFFSDTVPHWEPFNVVDANAATEADAHGAATAS

SEQ ID NO: 170698 - protein, 157 aa, Zea Mays
MAIPNVAETKTRSMEEEVIKLQKCLQDKDEQLCSSTSSTEQYHHELDDLRTHLSFTQATGEAELNEKDSSLKDHRLRVNNLGEQLDLLQKDVQAREVTQMQLKDIVIRIETNIMDEVAKAFEIAMLRGGIGILSTHWTNKTKNLESQLKSTRELIRS

SEQ ID NO: 170699 - protein, 367 aa, Zea Mays
MKWRRVNNGRACMPATAHVRIILKIITKKCDKSMIRKRYMHLTEEFLSENPSMCAYMAPSLDARQDVVVTEVPKLGKAAAQKAIKEWGQPKSRITHLVFCTTSGVDMPGADYQLTKALGLRPSVNRLMMYQQGCFAGGTVLRVAKDLAENNRGARVLVVCSEITAVTFRGPSESHLDSLVGQALFGDGAAAVVVGADPDGRVERPLFQLVSAAQTILPDSEGAIDGHLREVGLTFHLLKDVPGLISKNIERALEDAFEPLGISDWNSIFWVAHPGGPAILDQVEARVGLDKARMRATRHVLSEYGNMSSACVLFILDEMRKRSAEDGQATTGEGLDWGVLFGFGPGLTVETVVLHSVPITTGAPTAA

SEQ ID NO: 170700 - protein, 707 aa, Zea Mays
MSSLDPSPATSTQQQKQLESLVNLLTQGSRFYRKAYNELFSGVTTEQDPDSSTNIPEYMLFGWHLFLMLHLRSPELFKDLVSCIHGLVAVLAILLIHVPAKFRSFTIEGSSHLIKQTEKGVDLIASLCHNYHTSEERLKEMLHKSHNAIEDIFHMKALSASECKPENLDKIDTDDLMYFKGLIDMECFQSNLEKMEKLCNSNSCKGELDFKSILINNDYIPYDENSTGDSTNLGHSKCAFETLASPTKTIKNMLTVPSSPLSPATGGSVKIVQMTPVTSAMTTAKWLREVISSLPDKPSSKLQQFLSSCDRDLTNAVTERVSIVLEAIFPTKSSANRGVSLGLNCANAFDIPWAEARKVEASKLYYRVLEAICRAELQNSNVNNLTPLLSNERFHRCLIACSADLVLATHKTVIMMFPAVLESTGLTAFDLSKIIENFVRHEETLPRELKRHLNSLEEQLLESMAWEKGSSLYNSLIVARPSVASEINRLGLLAEPMPSLDDLVSRQNVRIEGLPATPSKKRAAGPDDNADPRSPKRSCNESRNTVVERNLQTPPPKQSHMVSTSLKAKCHPLQSTFASPTVCNPVGGNEKCADVTIHIFFSKILKLAAIRIRNLCERVQCVEQTERVYNVFKQILEQQTTLFFNRHIDQLILCCLYGVAKVCQLELTFREILNNYKREAQCKPEVFSSIYIGSTNRNGQRSLSWCH

SEQ ID NO: 170701 - protein, 816 aa, Zea Mays
MSSLDPSPATSTQQKQLESLVNLLTQGSRFYRKAYNELFSGVTTEQDPDSSTNIPEYMLFGWHLFLMLHLRSPELFKDLVSCIHGLVAVLAILLIHVPAKFRSFTIEGSSHLIKQTEKGVDLIASLCHNYHTSEERLKEMLHKSHNAIEDIFHMKALSASECKPENLDKIDTDDLMYFKGLIDMECFQSNLEKMEKLCNSNSCKGELDFKSILINNDYIPYDENSTGDSTNLGHSKCAFETLASPTKTIKNMLTVPSSPLSPATGGSVKIVQMTPVTSAMTTAKWLREVISSLPDKPSSKLQQFLSSCDRDLTNAVTERVSIVLEAIFPTKSSANRGVSLGLNCANAFDIPWAEARKVEASKLYYRVLEAICRAELQNSNVNNLTPLLSNERFHRCLIACSADLVLATHKTVIMMFPAVLESTGLTAFDLSKIIENFVRHEETLPRELKRHLNSLEEQLLESMAWEKGSSLYNSLIVARPSVASEINRLGLLAEPMPSLDDLVSRQNVRIEGLPATPSKKRAAGPDDNADPRSPKRSCNESRNTVVERNLQTPPPKQSHMVSTSLKAKCHPLQSTFASPTVCNPVGGNEKCADVTIHIFFSKILKLAAIRIRNLCERVQCVEQTERVYNVFKQILEQQTTLFFNRHIDQLILCCLYGVAKVCQLELTFREILNNYKREAQCKPEVFSSIYIGSTNRNGVLVSRHVGIITFYNEVFVPAAKPFLVSLISSGTHPEDKKNASGQIPGSPKPSPFPNLPDMSPKKVSASHNVYVSPLRQTKLDLLLSPSSRSFYACIGEGTHAYQSPSKDLAAINSRLN

SEQ ID NO: 170702 - protein, 817 aa, Zea Mays
MSSLDPSPATSTQQQKQLESLVNLLTQGSRFYRKAYNELFSGVTTEQDPDSSTNIPEYMLFGWHLFLMLHLRSPELFKDLVSCIHGLVAVLAILLIHVPAKFRSFTIEGSSHLIKQTEKGVDLIASLCHNYHTSEERLKEMLHKSHNAIEDIFHMKALSASECKPENLDKIDTDDLMYFKGLIDMECFQSNLEKMEKLCNSNSCKGELDFKSILINNDYIPYDENSTGDSTNLGHSKCAFETLASPTKTIKNMLTVPSSPLSPATGGSVKIVQMTPVTSAMTTAKWLREVISSLPDKPSSKLQQFLSSCDRDLTNAVTERVSIVLEAIFPTKSSANRGVSLGLNCANAFDIPWAEARKVEASKLYYRVLEAICRAELQNSNVNNLTPLLSNERFHRCLIACSADLVLATHKTVIMMFPAVLESTGLTAFDLSKIIENFVRHEETLPRELKRHLNSLEEQLLESMAWEKGSSLYNSLIVARPSVASEINRLGLLAEPMPSLDDLVSRQNVRIEGLPATPSKKRAAGPDDNADPRSPKRSCNESRNTVVERNLQTPPPKQSHMVSTSLKAKCHPLQSTFASPTVCNPVGGNEKCADVTIHIFFSKILKLAAIRIRNLCERVQCVEQTERVYNVFKQILEQQTTLFFNRHIDQLILCCLYGVAKVCQLELTFREILNNYKREAQCKPEVFSSIYIGSTNRNGVLVSRHVGIITFYNEVFVPAAKPFLVSLISSGTHPEDKKNASGQIPGSPKPSPFPNLPDMSPKKVSASHNVYVSPLRQTKLDLLLSPSSRSFYACIGEGTHAYQSPSKDLAAINSRLN

SEQ ID NO: 170703 - protein, 146 aa, Zea Mays
MASLASTLEKLTRGNKRAEKIRRYIVVESIYQNSGQIAPLDEIVRLKEKYRFRVILEESHSFGVLGKSGRGLAEHYGVPVSVWPQLFLMFHHNAPPVVSDRGALLPSSQTRPNCLVKCLGQSGHQEWSHGTSAGHYKKLINVRGFC

SEQ ID NO: 170704 - protein, 98 aa, Zea Mays
MASLASTLEKLTRGNKRAEKIRRYIVVESIYQNSGQIAPLDEIVRLKEKYRFRVILEESHSFGVLGKSGRGLAEHYGVPEPFLAGDISPSRLSTSRRR

SEQ ID NO: 170705 - protein, 254 aa, Zea Mays
MLRACTRVGGAGAGGCGRRERLMASLIPFLPPSPYSTHLPRQPQSQPPTAATQPAAAARPSRFRLLFARAAAQRQRDSEPAPAAEERRSLAVRTGELFLGLAALLLRGTGAERSGGAAVEEMEARDGVVWEQRPQDVDAERRRRELTSPGFSFSAAGLLFPYHLGAAQCLMDRGYITETTPLAGSSAGAIICAVIASGNTMQDALQVTKVLADNCRSKGTAFRLGAVLKDVLVEFLPDDLHIRCNGRIRAILEA

SEQ ID NO: 170706 - protein, 348 aa, Zea Mays
MLRACTRVGGAGAGGCGRRERLMASLIPFLPPSPYSTHLPRQPQSQPPTAATQPAAAARPSRFRLLFARAAAQRQRDSEPAPAAEERRSLAVRTGELFLGLAALLLRGTGAERSGGAAVEEMEARDGVVWEQRPQDVDAERRRRELTSPGFSFSAAGLLFPYHLGAAQCLMDRGYITAVLKDVLVEFLPDDLHIRCNGRIRVAITQLSWRPRALLVDQFDSKEDVINAVITSSFIPGYLAPRPATFFRNRLGIDGGLTLFMPPTSAAETVRICAFPASRLGLQDIGISPDCNPENRASPRQLFNWALEPAADETLDKLYELGYLDAAVWAEQNYAELIAKNDQSLVAD

SEQ ID NO: 170707 - protein, 177 aa, Zea Mays
MLRACTRVGGAGAGGCGRRERLMASLIPFLPPSPYSTHLPRQPQSQPPTAATQPAAAARPSRFRLLFARAAAQRQRDSEPAPAAEERRSLAVRTGELFLGLAALLLRGTGAERSGGAAVEEMEARDGVVWEQRPQDVDAERRRRELTSPGFSFSAAGLLFPYHLGAAQCLMDRGYIT

SEQ ID NO: 170708 - protein, 551 aa, Zea Mays
MTEGLCLSKHLTNCVHSNLSFSRFLQFRDPHAQRRHPLVDPMVVSEIRRCLSEGIEFQGELLNFRKDGAPLHNRLRLVPMHGDDGYVTHVIGIQLFSEANIDLSSVSYPVYKQKSSSRPSIQDLNSSPHEHAPKIQSADHCGMLQLSDEVLAHNILSRLSPRDVASIGSVCTRMHELTKNDHLRKMVCQNAWGRDVTVRLEMSTKMVGWGRLARELTTLEAASWRKFTVGGRVEPSRCNFSACAVGNRLVLFGGEGVNMQPMDDTFVLNLEAATPEWRRVKVSASPPGRWGHTLSWLNGSWLVVFGGCGQQGLLNDVFVLDLDAQQPTWREVASEGPPLPRSWHSSCTLDGSKLVVSGGCAESGVLLSDTFLLDLTKEKPAWREIPTSWSPPSRLGHTTSVYGATKLFMFGGLAKSGSLRLRSSDAYTVDVSEDSPQWRQLATTTGFPNVSPPPRLDHVAVSLPCGRIIIFGGSIAGLHSPAQLFLIDPAEEKPIWRILNVPGQPPKFAWGHSTCVVGGTRVLVLGGHTGEEWILNELHELCLASRPDEDG

SEQ ID NO: 170709 - protein, 220 aa, Zea Mays
MFYRVSRKNPGYIKANSKRIDPKEPLMEIDLTNSSTWTGNWSQLCPTCKIIRPMRSKHCPTCKHCVEQFDHHCPWISNCVGKRNKWDFFVFLWMGIATSFLGAAVGFHRLQTEPVILSSSESWIHFMVTKHPGAVLFMFLDVFLLTGALILTGAQAVQIARNITTNEAANRSRYTYLRGPDGRFRNPYSRGCQRNCTDFLISGYSNDEEVAWPTLQQTVQ

SEQ ID NO: 170710 - protein, 194 aa, Zea Mays
MEIDLTNSSTWTGNWSQLCPTCKIIRPMRSKHCPTCKHCVEQFDHHCPWISNCVGKRNKWDFFVFLWMGIATSFLGAAVGFHRLQTEPVILSSSESWIHFMVTKHPGAVLFMFLDVFLLTGALILTGAQAVQIARNITTNEAANRSRYTYLRGPDGRFRNPYSRGCQRNCTDFLISGYSNDEEVAWPTLQQTVQ

SEQ ID NO: 170711 - protein, 545 aa, Zea Mays
MAEIEVVSEGGRRDEDEERRRQQQQGAGEPDPVVDVYSAAAYGDLERLRGFVEQGGAATALREPDGNGYHALQWAALNNYPHVALYIVEHGGDVNATDHARQTALHWAAVRGSTSVADVLMEHGARVEAADVNGFRAVHVASQYGQTAFLHHIISKYGADFDALDIDGRSALHWAAYKGNADTIRLLLFMDANQVRQDKNGCTPLHWAAIRGNLEVCTVLVHTGTKEELTLKDSGGLTPVQLAAEKGHRHLSNVLSNATKVSFEDKFFPGKSRKIGYAPFLFAYLVICLILFLNSIVFAPNFSRITATAGLWSWAAVSLFFASQVMFYRVSRKNPGYIKANSKRIDPKEPLMEIDLTNSSTWTGNWSQLCPTCKIIRPMRSKHCPTCKHCVEQFDHHCPWISNCVGKRNKWDFFVFLWMGIATSFLGAAVGFHRLQTEPVILSSSESWIHFMVTKHPGAVLFMFLDVFLLTGALILTGAQAVQIARNITTNEAANRSRYTYLRGPDGRFRNPYSRGCQRNCTDFLISGYSNDEEVAWPTLQQTVQ

SEQ ID NO: 170712 - protein, 247 aa, Zea Mays
MAEIEVVSEGGRRDEDEERRRQQQQGAGEPDPVVDVYSAAAYGDLERLRGFVEQGGAATALREPDGNGYHALQWAALNNYPHVALYIVEHGGDVNATDHARQTALHWAAVRGSTSVADVLMEHGARVEAADVNGFRAVHVASQYGQTAFLHHIISKYGADFDALDIDGRSALHWAAYKGNADTIRLLLFMDANQVRQDKNGCTPLHWAAIRGNLEVCTVLVHTGTKEELTLKDSGGLTPVQLAAEKV

SEQ ID NO: 170713 - protein, 207 aa, Zea Mays
MEIKGTMVSSLCSECDKLYPGPQHLCSIDIESTAVPRWMSSLRFLSSINIELLALGAQDFHVLGSIPSLRCLSIHVKETRDERLVIGKCYPFRCLTEMQIDYESMAVVFAPGSMQNLKELHLVFGVKEVMHKYGDCNFGLEHLMSLEHVSVKTMYSIMPEEVEAVKDEFQKSLDMNPGKPTLIVDYKYPIKAASLLLKDYKHSLSPC

SEQ ID NO: 170714 - protein, 75 aa, Zea Mays
MAEIVTGAMGTLLPKLANLIKEEYNLASSEARSRRPVVRSAKSAGHSLFGGGGGGGTKEVRTIFFFFLIGGANCD

SEQ ID NO: 170715 - protein, 799 aa, Zea Mays
MAEIVTGAMGTLLPKLANLIKEEYNLQKKVRGEIMFLEAELKSMEAALIKVSEAPIDHPPDIQVKLWTREVRELSYDLEDSIDRFMVRVGDGKPHSFKGFIDRSLHLLTRGRIQHSIGIDIKEIRSRIKDVSERRDRKATELVGAEEKSSDLVRRLMEGDKEASKQPVVLSIAGFGGLGKTTLANLVYEKIKGQFGCGAFVYVSHNPDVVKVFKNMLYQLDGDKYRDINQGTWSEEQLIWELRKFLLHKRYFIVIDDIWNTSVWETIQCSLMHNECGSIIIITTRNIDVAKQAGSVYQMEPLSLSDSTKLFCQRIFGSEDKCPPHNLAEVAGKILQKCGGVPLAIITMASMLADKTGKEINTHNYWSHVYQSMGSGLNGSTNVKNMRRILSVSYYDLPSHLKTCLLYLSLFPEDYRIKTRGLIWKWIGEGFVHEEQGKTLYEVGEDYIEELINRSMLEPVDIGRDGKTVSCRIHDMVLDLISFLSNEEHFLTKVGEQQPISLDLPKKIHRLSLQISQEEEVKQLATMSFSHVRSLTVSTKVFQLMPKLSAFLVLRVLNLKKCKGVRNHHFKDICNMFHLRYLSLNAEFITEMPREIQNLQFLQVLDISNLGHKVKMPTIIHLRQLLRLCFRPMWGIRLPDGFGKLTSLQEVKGIITIKLPSMLHNLGCLTNLRTLAIDFCDWDESYEEPFIQCLSNLVSLKSMEIKGTMVSSLCSECDKLYPGPQHLCSIDIESTAVPRWMSSLCFLSSINIELLALGAQDFHVLGSIPSLRCLSIHVKETRDEILVIGNCYPFRCLTV

SEQ ID NO: 170716 - protein, 353 aa, Zea Mays
MVSIGTKRGSSTKVLACKKLAKRRRSKELCNLNSSLDVTRTDQQRGRKEAAEPMKDHPLALECSKSDAQGQLDRTLEDAQNITELSNQENLLPTVSPGFISTSNGKGTNIHDTQFEEEPTATLPIDGSSQCIIDISPLRSCSALERSLPSPPQASFVKRSPVWRVVDAKHVFKELPQQPHFLPLQKYPPTLREGIALGMMVSFSELVKFTMEASIDDSMEWFEDKVRTVSLLEANGFSVQSIQSVLTELIEIKSERARIHGEIGKLSSKLAENTASSSRVGALLDEKDGAAAQLEQELGRIRQESQKMAQEKEKIDAEGVSIKTACSGYEDLCSDAERKFKEVLAQLRRKGAR

SEQ ID NO: 170717 - protein, 489 aa, Zea Mays
MDKIKYEIREGEQEWVNEGRSRLGLKDKDTKNGPWVAHIRLMKSNHTWHSAPVNNQELLSEMGVFDVRRNSAVRHTEEQLVKSLGVKKCISNSKEGKTSPIQELQGKLKGNNNFSRNIVLALSVSRDGQTNLSPDRLVSIGTKRGSSTKVLACKKLAKRRRSKELCNLNSSLDVTRTDQQRGRKEAAEPMKDHPLALECSKSDAQGQLDRTLEDAQNITELSNQENLLPTVSPGFISTSNGKGTNIHDTQFEEEPTATLPIDGSSQCIIDISPLRSCSALERSLPSPPQASFVKRSPVWRVVDAKHVFKELPQQPHFLPLQKYPPTLREGIALGMMVSFSELVKFTMEASIDDSMEWFEDKVRTVSLLEANGFSVQSIQSVLTELIEIKSERARIHGEIGKLSSKLAENTASSSRVGALLDEKDGAAAQLEQELGRIRQESQKMAQEKEKIDAEGVSIKTACSGYEDLCSDAERKFKEVLAQLRRKGAR

SEQ ID NO: 170718 - protein, 504 aa, Zea Mays
MDKIKYEIREGEQEWVNEGRSRLGLKDKDTKNGPWVAHIRLMKSNHTWHSAPVNNQELLSEMGVFDGELQGSVSGRSVDAHDMLCIAELRKKTASVRRNSAVRHTEEQLVKSLGVKKCISNSKEGKTSPIQELQGKLKGNNNFSRNIVLALSVSRDGQTNLSPDRLVSIGTKRGSSTKVLACKKLAKRRRSKELCNLNSSLDVTRTDQQRGRKEAAEPMKDHPLALECSKSDAQGQLDRTLEDAQNITELSNQENLLPTVSPGFISTSNGKATLPIDGSSQCIIDISPLRSCSALERSLPSPPQASFVKRSPVWRVVDAKHVFKELPQQPHFLPLQKYPPTLREGIALGMMVSFSELVKFTMEASIDDSMEWFEDKVRTVSLLEANGFSVQSIQSVLTELIEIKSERARIHGEIGKLSSKLAENTASSSRVGALLDEKDGAAAQLEQELGRIRQESQKMAQEKEKIDAEGVSIKTACSGYEDLCSDAERKFKEVLAQLRRKGAR

SEQ ID NO: 170719 - protein, 448 aa, Zea Mays
MDKIKYEIREGEQEWVNEGRSRLGLKDKDTKNGPWVAHIRLMKSNHTWHSAPVNNQELLSEMGVFDVRRNSAVRHTEEQLVKSLGVKKCISNSKEGKTSPIQELQGKVSIGTKRGSSTKVLACKKLAKRRRSKELCNLNSSLDVTRTDQQRGRKEAAEPMKDHPLALDRTLEDAQNITELSNQENLLPTVSPGFISTSNGKGTNIHDTQFEEEPTATLPIDGSSQCIIDISPLRSCSALERSLPSPPQASFVKRSPVWRVVDAKHVFKELPQQPHFLPLQKYPPTLREGIALGMMVSFSELVKFTMEASIDDSMEWFEDKVRTVSLLEANGFSVQSIQSVLTELIEIKSERARIHGEIGKLSSKLAENTASSSRVGALLDEKDGAAAQLEQELGRIRQESQKMAQEKEKIDAEGVSIKTACSGYEDLCSDAERKFKEVLAQLRRKGAR

SEQ ID NO: 170720 - protein, 507 aa, Zea Mays
MDKIKYEIREGEQEWVNEGRSRLGLKDKDTKNGPWVAHIRLMKSNHTWHSAPVNNQELLSEMGVFDGELQGSVSGRSVDAHDMLCIAELRKKTASVRRNSAVRHTEEQLVKSLGVKKCISNSKEGKTSPIQELQGKLKGNNNFSRNIVLALSVSRDGQTNLSPDRLVSIGTKRGSSTKVLACKKLAKRRRSKELCNLNSSLDVTRTDQQRGRKEAAEPMKDHPLALDRTLEDAQNITELSNQENLLPTVSPGFISTSNGKGTNIHDTQFEEEPTATLPIDGSSQCIIDISPLRSCSALERSLPSPPQASFVKRSPVWRVVDAKHVFKELPQQPHFLPLQKYPPTLREGIALGMMVSFSELVKFTMEASIDDSMEWFEDKVRTVSLLEANGFSVQSIQSVLTELIEIKSERARIHGEIGKLSSKLAENTASSSRVGALLDEKDGAAAQLEQELGRIRQESQKMAQEKEKIDAEGVSIKTACSGYEDLCSDAERKFKEVLAQLRRKGAR

SEQ ID NO: 170721 - protein, 53 aa, Zea Mays
MCSTALLLPLLLQLRLRLRLRLQPPEEQGDGDGGHRGVLLAGRRHGRMNRSAS

SEQ ID NO: 170722 - protein, 244 aa, Zea Mays
MVDQFKSNTSFMSSKILEARDKLSQEVRYRTELQGSHGDTVPVALGDEGGVSGSLVEGLGVLKGQDDSAMLTSFSNTDYGKPQPIEQDKDIVSVHTIGETGAVSSDNTGSSGVPVQLVPVSRDTTTVAPLSRTEESTHDLSTEDEAAAEEEEEQGLQMSEIPLTDSSPPKDGQQKQPLAAISERSGADYQKSDNVEDGGDGVEDDDGDEWLEEEAWDPGNTQIPIADDEDVSFSDLEEEDDGAA

SEQ ID NO: 170723 - protein, 326 aa, Zea Mays
MQTGRRRQRGSPKRWSRSRGTRHRGPSYGSTSPSSPTTRTRMQDHALAVESLAPELADLRIELCPSHMSEDCFWKIYFVLLHPKLRKDDADILSTPQILEARDKLSQEVRYRTELQGSHGDTVPVALGDEGGVSGSLVEGLGVLKGQDDSAMLTSFSNTDYGKPQPIEQDKDIVSVHTIGETGAVSSDNTGSSGVPVQLVPVSRDTTTVAPLSRTEESTHDLSTEDEAAAEEEEEQGLQMSEIPLTDSSPPKDGQQKQPLAAISERSGADYQKSDNVEDGGDGVEDDDGDEWLEEEAWDPGNTQIPIADDEDVSFSDLEEEDDGAA

SEQ ID NO: 170724 - protein, 1093 aa, Zea Mays
MIEFEFIVDLGSFTKLWICNLEKQSDVLDIGSQQVEVGDDGGLMDRCCLNVREGDGRGLGQLESGMVVYSRVVIIDQSINRDLCEIDLSIIAIKRRSIYAENTFDAAREILYQVEYGYKHANVFYFDGWDGIGASAALKEAAKRLKSSASKFDSVLHLDCSLWKSRRALQKAIAEEIKLPHSVMAILSQHDKEDDFNGVEEGARNEVREIIKHTYTKLATVKRLVVVFHNGSGSFIDLSEFGIPLNRNFKGDVLLWTMQGRFRPYVSYTIKEKDPNMVYLYVDPDTVQLDDTSLWGIVNEEAKEVAQYTGTIDHMAVVACILYTWKLKDMGNIDWDTHASNYWVCDGIIQGSSSSEAWDWKVGDALQRNMHLGWISRSYMDYFFSSSAIEMQMQHYLPRPPAICCTSEIISVPAEATSFFLQPKYGDEESQLLASMFKHSASNLRVLHLSGCTFRFASPPFLCCSNLRFLLLHRCKDDGTSITPTEGKELDDQSGAWRACFGKLQVMDLSYTKWWWLLSQRMNIMANLRELNAKGIKNLSTSHLRGCGRLVKLRVEDGSVDGQRLILENSVALELAVLVNHAKDEGATYISFRGCAQLRSILLGGLFCCLHELDLSCTSVETVDLREVEAQRLKRLILLGCQKLRAILWPPRSSSILETLDVFCVSTTPSTASGQEWPHLCKWEEKRKEATSASTAESSSLDRNWYICVRDARLLRSLDVFYTYENNRCSIGWPARVEFTTPPASGDLVAAQGVNILQQSIHVVDVYARDMITHNQLIHDEDATAGDEDGEGAIHWMWDCPTTRTMHGHGLYIHVQAEDDEQEGELNIGGTWSMPPRFICTSADVMHVHDCLSITSGISLSYITSWDLLNWCRVERCPMLRSVFTAFSEGKENDISSDSWLIFQNLTTFWASHLPMAKHIWNWSPRAYPSAYSFQQLQFLHLDYCPRVIFVLPLDSNMSLPQLETLEIICCGDLREIFRPQDPRLENQEEVVKHFPKLRRIHLHNLPTLRSICGRMMSSPMLETINVTGCLALRRLPAVGGRLGQPPTVVCEKDWWNALEWDGLEAKHHPSLFRPKHSCHYRKPKLLRGSVLR

SEQ ID NO: 170725 - protein, 840 aa, Zea Mays
MVYLYVHRDIVQLDDTSLWGIVNEEAKEVAQYTGIMDHMVVVACILYTWKLKDMGNIDWDTHASNYWVCDGIIQGSSSSEAWAWKVGDALQRNTQLDWRRSYMHEFFSSSAIEMQMQHHLPRPPVICCTSKIISVPAEATSFFLQPKYEDEESPSRGVVTVDTTIQLPASMFKHSASNLRVLHLSRCTFRFASPPFLYCSNLRFLRLHRCEDDGTSITPTEGKELDDQSGAWRACFGKLRVMDLSYTQWCWLLSERMMNIMANLRELNAKGIKNLSTSHLRGCGSLIKLRVEDGSVDGQRLILENSVALEQAVLTNDAKDEGATVDRIRNISFRGCAQLRSILLRGLFCCLHELDLSCTSVETVNLRKVQAQRLKRLILLGCQKLRAILWPLSTSSIAKTLDVFCVSTTPSMTASGQEWPRLCKWEEKRKEANSASTTESSSLDRNWYICVRDARLLRSLQIFRTYENNRFSLGWPTRVEFTTPPASGDLVAAQGVSILQQTIHVVDVYARDMITHNQLIHDEDATAGDEDGEGAIHWMWDCPMTRTMHGHGWYIHVQAEDDEQEGEGGEAQDKTGGTWSMPPSFICTSADVVHVHDCMSITFGISLSYITSWNELHWCRVERCPMLRSVFTAFSEGKENDVSSDSWLIFQNLTTFWASHLPMAKHIWNWSPRAYPSAYSFQQLQFLHLDYCPRVIFVLPLDSNMSLPQLETLEIICCGDLREIFRSWDPRLENQEEVVKHFPKLRRIHLHNLPTLRGICGRMMSSPMLETINVTGCPALRRLPAVGGRLAQPPTVVCEKDWWDGLEWDGLEAKHHPSLFRPKHSCHYRKPKLLRGSVLR

SEQ ID NO: 170726 - protein, 185 aa, Zea Mays
MAERWKSVSSVPKAENARPTGRWPAAKPKASDLLAHSLDCSLDRKDSILAAIHLLRRSMAFDSTTSLSSSDPAAPDLYASSDTDIVSSGSNSVASDPPRQGISVPARFWQKTNSRMLHASSRIAISGRSDFGSRSRCITLVSIESYLLKLLVVCLHQSLPTPAQEASCQIVYYELGYIVSYHLGL

SEQ ID NO: 170727 - protein, 408 aa, Zea Mays
MAGENDPRSGGGPVPVDACPLCGGANGPPSRVALARRAPPGDALALAVALSPADEASALREALARHRRGVADLQAELEAERGAAAGAASEAMSMILRLQREKSEAMMEARQYRRYAEERFAHDAAEADHPFSSSDGDDGYHSVHCLDDHLADEGTPRAPHGAPSPPDSDKPVVMFGSPRRSSRHVRTFSGDGGPYSCRVALADEFPLFTDRDAPGQDDEEEADRVYTVDAVHGVPVMAPDDDCCDFGTTWEGEVGARAGAAGWAEEDEIQELKARLHALEADRESMRHAIMAMGDEKAQVVLLREIAQQLCRDAAPFPAVPLKVQPRPQPFVMAQRKVVKRHSSFAKIFIVTVIKWVMSIFCWRRKSDRVRYPIGMCGSNVGLMLVLDRFPKQRQKKIPKRKLSASIL

SEQ ID NO: 170728 - protein, 102 aa, Zea Mays
MSRDRKQACIVETDSQVMQVEEEHIEPLREQSGTQQPPSFGQCGKNGEPLEHMVTTSILQGACLPDLDPGRGERIRRLAEILPAHQDIEKNLHTCAHPCMPI

SEQ ID NO: 170729 - protein, 74 aa, Zea Mays
MSRDRKQACIVETDSQVMQVEEEHIEPLREQSGTQQPPSFGQCGKNGEPLEHMVTTSILQGACLPDLDPGGSKF

SEQ ID NO: 170730 - protein, 65 aa, Zea Mays
MSRDRKQACIVETDSQVMQVEEEHIEPLREQSGTQQPPSFGQCGKNGEPLEHMVAANFDRQPCWI

SEQ ID NO: 170731 - protein, 96 aa, Zea Mays
MASSSPQQHTEVGSSSNLAQFRNSGIISMNMGDIICNIYDHETVNAAAASVSPGPVDPSQACIVETDSQVMQVEEEHIEPLREQVAANFDRQPCWI

SEQ ID NO: 170732 - protein, 155 aa, Zea Mays
MASSSPQQHTEVGSSSNLAQFRNSGIISMNMGDIICNIYDHETVNAAAASVSPGPVDPSQACIVETDSQVMQVEEEHIEPLREQSGTQQPPSFGQCGKNGEPLEHMVTTSILQGACLPDLDPGRGERIRRLAEILPAHQDIEKNLHTCAHPCMPI

SEQ ID NO: 170733 - protein, 127 aa, Zea Mays
MASSSPQQHTEVGSSSNLAQFRNSGIISMNMGDIICNIYDHETVNAAAASVSPGPVDPSQACIVETDSQVMQVEEEHIEPLREQSGTQQPPSFGQCGKNGEPLEHMVTTSILQGACLPDLDPGGSKF

SEQ ID NO: 170734 - protein, 159 aa, Zea Mays
MASSSPQQHTEVGSSSNLAQFRNSGIISMNMGDIICNIYDHETVNAAAASVSPGPVDPSQACIVETDSQVMQVEEEHIEPLREQSGTQQPPSFGQCGKNGEPLEHMQILIDNLVGYDTIPTNSLVISPGHGYLYNFEMKELYGLSYRHETPEGPTRFGD

SEQ ID NO: 170735 - protein, 111 aa, Zea Mays
MIIRWQKNVNSIFSMFSFFRWQQILIDNLVGYDTIPTNSLVISPGHGYLYNFEMKELYGLSYRHETPEGPTRFGEGMLTPLDPNPLFTPNLSHLEHLLFLRFISNLHRFKC

SEQ ID NO: 170736 - protein, 64 aa, Zea Mays
MASSSPQQHTEVGSSSNLAQFRNSGIISMNMGDIICNIYDHETVNAAAASVSPGPVDPSQGFLR

SEQ ID NO: 170737 - protein, 730 aa, Zea Mays
MRRHQAKTQTTTTTIYVVYMGEKKHDDPSLVVASHHATLASVLGSKDEALSSIVYSYKHGFSGFAAKLTQPQAEELKKYPGVVSVKPNTYHHVHTTRSWDFLGMSYGQQQSSSWSSSSRLLRKAKYGEDVIVGVIDSGIWPESRSFDDSGYGYGPVPKRWKGVCQTGQAFNASNCNRKVIGARWYAADVSEEDLKNEYRSPRDANGHGTHTASTIAGSPVRNASHHGGGLAAGIARGGAPRARLAIYKACHAVGGSASCGDASILAALDAAIGDGVDLVSLSLGGLGEIYQSLHAVAAGITVVLAAGNDGPVEQSLNNALPWGITVAAATMDRTFPTVVTLGDGEKLVGQSLYYHNRSAAASTSDDDDFAWRHLILFPSCDEKNLGSENITGKIVICRAPVFWSDYPPPRQLSRASRAAIAGGAKGIIFEQYSTNSLDTQVVCQGHLPCVVVDRESIFTIQSSDSNVAKISPAATMVGSQVASPRIATFSSRGPSAEFPSVLKPDIAAPGVSILAAMRDSYVLLSGTSMACPHVSAVVALLKSVHPDWSPAMIKSAIVTTASVTDRFGLPIQANSVQRKPADAFDMGGGLIAPDRAMDPGLVYDIQPEEYTRLDDRADRLNLPSIAVSDLKNSVTVSRTVTNVGPAEVATYRAVVEAPAGVTMDVEPPVIAFERGGARNATFRVTFVAKQRVQGGYAFGSLTWLDDAKRHSVRIPVAVRTVVRDLVADVA

SEQ ID NO: 170738 - protein, 757 aa, Zea Mays
MGWRPHVVSVSSSALLVLLQLLVLLMLPADASSSSQTTTTTIYVVYMGEKKHDDPSLVVASHHATLASVLGSKDEALSSIVYSYKHGFSGFAAKLTQPQAEELKKYPGVVSVKPNTYHHVHTTRSWDFLGMSYGQQQSSSWSSSSRLLRKAKYGEDVIVGVIDSGIWPESRSFDDSGYGYGPVPKRWKGVCQTGQAFNASNCNRKVIGARWYAADVSEEDLKNEYRSPRDANGHGTHTASTIAGSPVRNASHHGGGLAAGIARGGAPRARLAIYKACHAVGGSASCGDASILAALDAAIGDGVDLVSLSLGGLGEIYQSLHAVAAGITVVLAAGNDGPVEQSLNNALPWGITVAAATMDRTFPTVVTLGDGEKLVGQSLYYHNRSAAASTSDDDDFAWRHLILFPSCDEKNLGSENITGKIVICRAPVFWSDYPPPRQLSRASRAAIAGGAKGIIFEQYSTNSLDTQVVCQGHLPCVVVDRESIFTIQSSDSNVAKISPAATMVGSQVASPRIATFSSRGPSAEFPSVLKPDIAAPGVSILAAMRDSYVLLSGTSMACPHVSAVVALLKSVHPDWSPAMIKSAIVTTASVTDRFGLPIQANSVQRKPADAFDMGGGLIAPDRAMDPGLVYDIQPEEYTRLDDRADRLNLPSIAVSDLKNSVTVSRTVTNVGPAEVATYRAVVEAPAGVTMDVEPPVIAFERGGARNATFRVTFVAKQRVQGGYAFGSLTWLDDAKRHSVRIPVAVRTVVRDLVADVA

SEQ ID NO: 170739 - protein, 74 aa, Zea Mays
MHRTDLQVLFKSFNSRRKNLQTENTLNKVLYSVTVYGHLPNFHPGSCDLACSSDQLLVHEAQETVAICVCILSS

SEQ ID NO: 170740 - protein, 130 aa, Zea Mays
MLELMMGSPHVFQISDRTRILMDQHLGGWSEQTKELAYKLRSYMELCILVPGISSQHHGSGSLEQGQFGLASWKCSEESFAHQVKIRDPLKIGFPNLWALRLARQLLVWHPEDRLSVDEALNHPYFQEPM

SEQ ID NO: 170741 - protein, 406 aa, Zea Mays
MLDKAMIIFNEMRDHGVKPDVVTYRTVIAALCRIGKMDDAMEKFNQMIDQGVAPDKYAYNCLIQGFCTHGSLLKAKELISEIMNNGMHLDIVFFSSIINNLCKLGRVMDAQNIFDLTVNVGLHPDAVVYSMLMDGYCLVGKMEKALRVFDAMVSAGIEPNVVVYCTLVNGYCKIGRIDEGLSLFREMLQRGIKPSTILYSIIIDGLFQAGRTVPAKMKFHEMTESGIAMDICTYNIVLRGLFKNRCFDEAIFLFKELRAMNVKINIITLNTMIDGMFQTRRVEEAKDLFASISRSRLVPNVVTYSIMITNLIKEGLVEEAEDMFSSMQNAGCEPNSRLLNHVVRELLKKNEIVRAGAYLSKIDERNFSLEHLTAMLLVDLFSSKGTCREQIRFLPAKYHFLAEASP

SEQ ID NO: 170742 - protein, 57 aa, Zea Mays
MELAGNACRDLKVKRITPRHLQLAVRGDEELDTLIKATIAGGGVIPHIHRELIDKAA

SEQ ID NO: 170743 - protein, 722 aa, Zea Mays
MWELLRKFRCNEHGREDCTMTSSVESSFHSACLIWQDPGRILLHIVTDALNYPAMMMWFLTNPPTPSVIQIQSLDDLKWLPGDFSSRFKLKGVRDPRYTSALNHLRFYLPEVFPSLSKVLLLDHDVVVQNDLSGLWDLDMKGKVTGAVDTCTSSEGFRQLDSLIDFSNPSVFNELDPKACAFAFGMNIFDLNEWRKQGLSTTYHRWFQLGKSEKLWKAGSLPLGQVVFYNRTLPLDHRWHVLGLGHDSSIGRDELESASVIHYSGKLKPWLEISIPKYRGYWNRMDLANNATNSQAMSNNSTGQQFPTPPPLWPRGMMLQQPMDCSMMGNLNFPNPSQGPITTWAPIQTRNTSSESTMLPVSQSALYWNHYMNLVRNPLGSVQGNPFADSFPGSNTSTPLQGSNTIPSIPVNLESDAEHSIQDINSHVKTPALVNKPKKTKEQNFTAAEDLLLCTTWLQISSDPIVHTGQGKEGLWARIEKRYNEQRGEYPCRLNRALSSRWDKIRADVSKFSGCYTRVLREKQSGLTDDDKTSKAATLFAHEENKPFHFIHCWHKLKGEPKWESICQGPSFRGLHGKSFGSSGGPTIGGQESDSGSAGLTGKRSLGRDSSKSERKKAASSSSTEYLSRLQDLTGKQIQRCIENGEKKEKCNEQDMELENKRLDLEAKKLSIRERELKLEELRSAKEQLQMLQCTSEDDVDPEVWTMMKEHKKRLQQFIFSF

SEQ ID NO: 170744 - protein, 318 aa, Zea Mays
MRCSLTMCLQVLWLSTLQLLHQRRKFRCNEHGREDCTMTSSVESSFHSACLIWQDPGRILLHIVTDALNYPAMMMWFLTNPPTPSVIQIQSLDDLKWLPGDFSSRFKLKGVRDPRYTSALNHLRFYLPEVFPSLSKVLLLDHDVVVQNDLSGLWDLDMKGKVTGAVDTCTSSEGFRQLDSLIDFSNPSVFNELDPKACAFAFGMNIFDLNEWRKQGLSTTYHRWFQLGKSEKLWKAGSLPLGQVVFYNRTLPLDHRWHVLGLGHDSSIGRDELESASVIHYSGKLKPWLEISIPKYRGYWNRYLNYDNPHLQQCNIHG

SEQ ID NO: 170745 - protein, 297 aa, Zea Mays
MWELLRCNEHGREDCTMTSSVESSFHSACLIWQDPGRILLHIVTDALNYPAMMMWFLTNPPTPSVIQIQSLDDLKWLPGDFSSRFKLKGVRDPRYTSALNHLRFYLPEVFPSLSKVLLLDHDVVVQNDLSGLWDLDMKGKVTGAVDTCTSSEGFRQLDSLIDFSNPSVFNELDPKACAFAFGMNIFDLNEWRKQGLSTTYHRWFQLGKSEKLWKAGSLPLGQVVFYNRTLPLDHRWHVLGLGHDSSIGRDELESASVIHYSGKLKPWLEISIPKYRGYWNRYLNYDNPHLQQCNIHG

SEQ ID NO: 170746 - protein, 1493 aa, Zea Mays
MAAPLAPLTAAAVLRLGSRGLRHRILLASLRPCSSATPPHRSALPAAARRAPPPPRRFAHTLAASAATAISEGQADLVPGSTTSTKGRIYHETYGCQMNINDMEIVLSIMKNEGYDEIVPDPESAEIIFINTCAIRDNAEQKVWQRLNYFWFLKREWKANVAEGRAKSMRPPKIAVLGCMAERLKEKILDSDKMVDVVCGPDAYRDLPRLLQEVDYGHKGMNTLLSLEETYADITPVRISDNSITAFVSIMRGCNNMCSFCIVPFTRGRERSRPVSSIVREVGELWKVGVKEVMLLGQNVNSYNDTSEVEELEPGKNWQLSEGFSSMCKVKNMGLRFADLLDRLSLEYPEMRFRFTSPHPKDFPDELLYLMRDRYNICNLIHLPAQTGSTAALERMRRGYTREAYLELVHKIRDVIPDVGLSSDFITGFCGETEDEHAETLSLVRAVGYDMAYMFAYSMREKTHAHRNYEDDVPEGVKQRRLMELINTFRETTKKNYDSQVGTVQLVLVEGPNKRAPKTEVIGKTDRGHKVSFARVPVPHTFEGEEAREPAVGDFVEPNFCAVLVLPEQILCSVAKSSIRANSKPQIHSTTLQIKTKLNDSREPSTVDHLQPSIRGRTVQTRIKSNGRKYPQSPKPRSLPTNATLCHPPPSMAMASSPACHFRHPPRLRLLLPLSTSAPHPWLYSWSHPRQRGRLRAPPAALDLRPEPSPSSDSDDEDAVGASRSSGRSTMSLILSRLRRAGYSGEDPRAAAPPHPPRGSVEDVFRADDGVLPNARGGFDADDEERALGDARFPWERPMPPPEAAPRSARSPTWMAELTLPAAELRRLRHAAIRIKSRTKVGGAGVTREIVEKIKEKWKTEEVVRVKVSGTPALNMRLFHEILERKTGGLVIWRSGTSVSLYRGVDYDEPEPTKKSKKNSQSLAMDFPIKGSSNPSLLPTETANSVRDSNVALVSNAAKEELVVQAPEIKYEDEIDKLLDELGPRYTDWPGSDPLPVDADLLPANMPGYKPPFRVLPYGVRPSLSRRDTTNLRRLARGLPPHFALGRSRQLQGLANAMVKLWEKSSIAKIALKRGVQLTTSERMAEDIKKLTGGVMLSRNNEFIVFYRGKDFLSSELAEVLLERERLAKSLQDEEEARRKAASYFSSAETYAQPTVAGTLGETLEANSKYGTKHDENHADKMARTIEAARHADLVRKLEWKLSLAQKKMEKAERVLGKVETALRPTEDSRPPETITDEERFMFRKLGLRMKAFLLLGRRGVFDGTIENMHLHWKYRELVKILVKAKSFADVKRIALSLEAESGGILVSVDKVSKGYAIVVFRGKNYRRPSSLRPRNLLSKRKALARSIELQRHQALSRHFAKLNRKVERLKAELVQMEDVKEQGDEELYAKLDAAYSSDDEDMEDEDDEAYLKRFDNEVAGATADDDGSDDYTSAADEADYPDSDDEAGDCSEDEGEDDEDEAAAGVSDAGFHGEVVGFSSDTDRRNHDVNEY

SEQ ID NO: 170747 - protein, 1396 aa, Zea Mays
MNINDMEIVLSIMKNEGYDEIVPDPESAEIIFINTCAIRDNAEQKVWQRLNYFWFLKREWKANVAEGRAKSMRPPKIAVLGCMAERLKEKILDSDKMVDVVCGPDAYRDLPRLLQEVDYGHKGMNTLLSLEETYADITPVRISDNSITAFVSIMRGCNNMCSFCIVPFTRGRERSRPVSSIVREVGELWKVGVKEVMLLGQNVNSYNDTSEVEELEPGKNWQLSEGFSSMCKVKNMGLRFADLLDRLSLEYPEMRFRFTSPHPKDFPDELLYLMRDRYNICNLIHLPAQTGSTAALERMRRGYTREAYLELVHKIRDVIPDVGLSSDFITGFCGETEDEHAETLSLVRAVGYDMAYMFAYSMREKTHAHRNYEDDVPEGVKQRRLMELINTFRETTKKNYDSQVGTVQLVLVEGPNKRAPKTEVIGKTDRGHKVSFARVPVPHTFEGEEAREPAVGDFVEPNFCAVLVLPEQILCSVAKSSIRANSKPQIHSTTLQIKTKLNDSREPSTVDHLQPSIRGRTVQTRIKSNGRKYPQSPKPRSLPTNATLCHPPPSMAMASSPACHFRHPPRLRLLLPLSTSAPHPWLYSWSHPRQRGRLRAPPAALDLRPEPSPSSDSDDEDAVGASRSSGRSTMSLILSRLRRAGYSGEDPRAAAPPHPPRGSVEDVFRADDGVLPNARGGFDADDEERALGDARFPWERPMPPPEAAPRSARSPTWMAELTLPAAELRRLRHAAIRIKSRTKVGGAGVTREIVEKIKEKWKTEEVVRVKVSGTPALNMRLFHEILERKTGGLVIWRSGTSVSLYRGVDYDEPEPTKKSKKNSQSLAMDFPIKGSSNPSLLPTETANSVRDSNVALVSNAAKEELVVQAPEIKYEDEIDKLLDELGPRYTDWPGSDPLPVDADLLPANMPGYKPPFRVLPYGVRPSLSRRDTTNLRRLARGLPPHFALGRSRQLQGLANAMVKLWEKSSIAKIALKRGVQLTTSERMAEDIKKLTGGVMLSRNNEFIVFYRGKDFLSSELAEVLLERERLAKSLQDEEEARRKAASYFSSAETYAQPTVAGTLGETLEANSKYGTKHDENHADKMARTIEAARHADLVRKLEWKLSLAQKKMEKAERVLGKVETALRPTEDSRPPETITDEERFMFRKLGLRMKAFLLLGRRGVFDGTIENMHLHWKYRELVKILVKAKSFADVKRIALSLEAESGGILVSVDKVSKGYAIVVFRGKNYRRPSSLRPRNLLSKRKALARSIELQRHQALSRHFAKLNRKVERLKAELVQMEDVKEQGDEELYAKLDAAYSSDDEDMEDEDDEAYLKRFDNEVAGATADDDGSDDYTSAADEADYPDSDDEAGDCSEDEGEDDEDEAAAGVSDAGFHGEVVGFSSDTDRRNHDVNEY

SEQ ID NO: 170748 - protein, 129 aa, Zea Mays
MINMVKVRHNNVVPTMALGVQQLKKELGRSRKVPFEFDEIHEFLDRFYMSRIGIHMLIGQHVALHDPKPEPGVIGIINTRLSPIQVAQAACEDACSVCLREYVSTPDINIYGDPNFTFPTLSVRCKNGI

SEQ ID NO: 170749 - protein, 94 aa, Zea Mays
MPPLSTPKELVVTLEMCMTRLDKKRAYVFFKTSIDGYTSCAKDMTKPSVIVIAFYLLFLLNSSFKTKNIFKNLTRSQASTMSRLACMIWLVLVC

SEQ ID NO: 170750 - protein, 135 aa, Zea Mays
MPGRTEMINMVKVRHNNVVPTMALGVQQLKKELGRSRKVPFEFDEIHEFLDRFYMSRIGIHMLIGQHVALHDPKPEPGVIGIINTRLSPIQVAQAACEDACSVCLREYVSTPDINIYGDPNFTFPTLSVRCKNGI

SEQ ID NO: 170751 - protein, 115 aa, Zea Mays
MMLFCNKMSNNLSHLDTSNVYFISSLFPGLGFKKAHVMGLPFGASTHSATHTSVSSSLSLLGSNMLTPCFSFSLPFVSLNRLYCLLSLARLSWVIARCMTWFMSVKSCPSNFSLR

SEQ ID NO: 170752 - protein, 245 aa, Zea Mays
MVLAGLFEMMVLPALPAILAPNRRESCSPNLRWRRLHCRWRCQVCSGVCRWEGMVCSGSGQVVSLSLPFYGLTGTLSTAFGNLTFLRMLNLSSNSFRGEVLATIVRLAHLHALDLSYNAFSDAHDISQCNKISEKVLDGCVEEVGGYRVGYDIKLSGTESPRSVTGLEGVCVRVLFAWVLITGVEAADGEVTVHIGPIRKSFPAVGFKSSPWCIIGLATSARRLRGRGGRLPRRLRHQALQHRVP

SEQ ID NO: 170753 - protein, 230 aa, Zea Mays
MVAWKRWGATASATTSSSPAPSPLGRSRGSRASASVCYLPGCSSPASRRPMERSLSTSGQSGSRSPPLGSNPAPGASSDWRRVLDGCVEEVGGYHVGYDIKLSSTESPRSVTGLEGVRVRVLFAWVPITGVEAVDGEVTVHIGPIRKSFPAVGFKSSPRCIIRLEAWSLVMGWRLRIQANITDHNIKCMRQGKEANRCRVCRLLDDHTYQKGFSSIIVLLACFHIWGVLL

SEQ ID NO: 170754 - protein, 224 aa, Zea Mays
MVAWKRWGATASATTSSSPAPSPLGRSRGSRASASVCYLPGCSSPASRRPMERSLSTSGQSGSRSPPLGSNPAPGASSDWRRVLDGCVEEVGGYHVGYDIKLSSTESPRSVTGLEGVRVRVLFAWVPITGVEAVDGEVTVHIGPIRKSFPAVGFKSSPRCIIRLEAWSLVMGWRLRIQANITDHNIKCMRQGKEANRVCRLLDDHTYQKGFSSIIGKVSQLDIA

SEQ ID NO: 170755 - protein, 218 aa, Zea Mays
MVAWKRWGATASATTSSSPAPSPLGRSRGSRASASVCYLPGCSSPASRRPMERSLSTSGQSGSRSPPLGSNPAPGASSDWRRVLDGCVEEVGGYHVGYDIKLSSTESPRSVTGLEGVRVRVLFAWVPITGVEAVDGEVTVHIGPIRKSFPAVGFKSSPRCIIRLEAWSLVMGWRLRIQANITDHNIKCMRQGKEANRCRVCRLLDDHTYQKGFSSIIG

SEQ ID NO: 170756 - protein, 223 aa, Zea Mays
MLGMEKPQGGEVLLGEHNVLPNYFEQNQAEALDLEKTVLDTVAEAAEDWILDDIKGLLGRCNFRDDMLDRKVQFLSGGEKARLAFCKFMVTPSTLLILDEPTNHLDIPSKEMLEEAISEYTGTVITVSHDRYFIKQIVNRVIEVKDQTIQDYQGDYNYYLERNLEARERELAREEELEERAPKVKAKSKMSKAEKAVRKKQKMQAFQQSKQKSKSLKNSKRWN

SEQ ID NO: 170757 - protein, 600 aa, Zea Mays
MAAMDLLSGKLIRSLRLHSSLLPSAPSSSRAVPTSRRLRRRRHAPLYCRLTTTSSSSSASTTTTTGVEEDVKSQDLSSLLTSSDPSAAPAVGTKKKRSGGSSGASSIPSGVRLEGISKSYKGVTVLKDVSWERRSQDVDLDMVDVKVQKLMPELGFMPEDADRLVASFSGGWKMRMSLGKILLQDPDLLLLDEPTNHVDLDTIEWLEMYLKTQDVPMVIISHDRAFLDQLCTKIVETEFGVSKTYKGNYSEYILAKAVAVEAQYAAWEKQQKEIEQTKELINRLGAGVNAGRASSEQKKLEKLEKEGLIEKPFQRKQLKIRFPERGRSGRTVLTINNLQFGFENKTLFNNANLIVERGEKIAIIGPNGCGKSTLLKLMLGMEKPQGGEVLLGEHNVLPNYFEQNQAEALDLEKTVLDTVAEAAEDWILDDIKGLLGRCNFRDDMLDRKVQFLSGGEKARLAFCKFMVTPSTLLILDEPTNHLDIPSKEMLEEAISEYTGTVITVSHDRYFIKQIVNRVIEVKDQTIQDYQGDYNYYLERNLEARERELAREEELEERAPKVKAKSKMSKAEKAVRKKQKMQAFQQSKQKSKSLKNSKRWN

SEQ ID NO: 170758 - protein, 510 aa, Zea Mays
MRFTIPHLADRNVITRVAGADCRHCPDEEEGCHCQWHVNHFMQQFLASKSAEMGFYFTASSLKKYLLLAGAGANNNRTQRRLILHHPDPNLPSLLQQIDLSQTRSLAVSGAVSGIPMDKFVNLVVLDLEGWENLKDDDLLQICRSKMYFLTYLSVRNTPTSKIPPEIKELWSLQTLDASCTQISDELPLQVFKLTSLKHLDLRGTRVRRISKLPNKQQIVGSRVPLFTLLVGGGGGGGGPMETAARVTPDVRHLQDLEMLATVDLTENPVSFLRALGDLKWLKVLKITWSFCHSTDGECRAALLSSIGRWSHLQSLTIHCGLGCSMEFLGTLSYPPEHLRKLKITICSITADDLKVLADLAQLHTLVLGLDFVPTEAVVIEDGGFPLLRKFFVNCPVPWLAFEIGALPNLAYLQLEFAATLPTQTRAPSGIANIHRITDIALCYGEHYANSPSVKIIVEAVRKQIVEHCNPIDLYINGIEQDDVQAPDDLTEDANVTQSRTGSGSQSPRE

SEQ ID NO: 170759 - protein, 182 aa, Zea Mays
MGFLDFPFAPVPDSADARRFPQHQEVLRYIQAFARRFHLDGIIRLRTEVLAVSKDNNKGISGDWRVRWRRNAAGDESEQEQEEEDVLLIVFKWPAMAPVLTETDTKTSIKDLTISSDERFIAVNRSSGPCRVWDLQSSEVVASLPREAGEMFGFCRFCNKADNSHVLFITAMEGDIKVIMEK

SEQ ID NO: 170760 - protein, 336 aa, Zea Mays
MVLLGGGGGKGTDGVPNKLVMAALRAGEEARGPSPRYGVSMGITGREGYRLVLEPDQEALAELKEDGLQLAISFSQEGSILAIGGEDVLLIVFKWPAMAPVLTETDTKTSIKDLTISSDERFIAVNRSSGPCRVWDLQSSEVVASLPREAGEMFGFCRFCNKADNSHVLFITAMEGDYGKIVSWNTTSWTRTGSKKITREAISAFAVSPNGALLAIGTIEGSVVIVDSKDMRTLVTVKKAHLGVVTTLSFSQDSRTLLSTSFDSTARVTYVGSPKSNGLLNSMVSSLVTIPKTNTARVLSSEVHYSQTNLLSSECQKGQRRELNDLLKLFIDLTKF

SEQ ID NO: 170761 - protein, 66 aa, Zea Mays
MPYSALFPTQLYEYLSQSLQLVLNISYTSNDIQQQENVRMRHKANPAISNGNHNNSLILTIDDDNH

SEQ ID NO: 170762 - protein, 531 aa, Zea Mays
MAEYGERYQGNGDPATPEGGYAQTEYAAAGGSPPADRKPSVFSDHADGRSSQPQHETQSHGSGSSKSRERDRERDKGKDRERGRDRVREKERDRDRDKDRERGDRDRDRDRHHMDRRERSEIREHRDRSDDRDRHRDDRDRRRSHDSERRRDRDRDGHRRHRSRSPSMSRDRDRRSRSRSRSRSKSKRVSGFDQAPTQQALPIVAAGVIPGQLPGVTAPIPGVGVLPNLYNLAAGQPQAMTQQATRHARRVYVGGLPPTANEQTVAIFFNGVMAAIGGNTAGPGDAVLNVYINHDKKFAFVEMRSVEEASNAMVLDGIMFEGAPVKIRRPTDYNPSLAAALGPSQPNPNLNLSAVGLTPGSAGGLEGPDRIFVGGLQYYFTEAQVRELLESFGPLRGFDLVKDRETGNSKGYAFCVYQDLNVTDIACAALNGIKMGDKTLTVRRANQGASQPRPEQESILLQAQQQVQMQKFVYQVGGALPTKVVCLTQVVTEDELRDDEEYDDIVEDMREEGHKYGKPHETHRLLLPSLF

SEQ ID NO: 170763 - protein, 58 aa, Zea Mays
MTAKFQKNITRRGSVPETTVKKGNDYPVGPLVLGFFIFVVIGSSLFQIIRTATSGGVA

SEQ ID NO: 170764 - protein, 86 aa, Zea Mays
MLPPAHRVPLTPAWRVAGLHTSMSPHSLLRDCLARLLHHRSNQPRHLPLPPLPPPPPHHAAPPVFTTWSRSATPPPRRPTWRRDPI

SEQ ID NO: 170765 - protein, 247 aa, Zea Mays
MESVALEHIGRWCPRLLELSLIFCPRIENSAFLEIGSGCSLLRTLHLIDCSRITDDALCHIAQGCKNLTELSIRRGYEVGDRALVSIAENCKSLRELTLQFCERVSDAGLSAIAENCPLHRLNLCGCHLITDTGLTAVARGCPDLVFLDMSVLRIVGDIALAEIGDGCPKLREIALSHCPEVTNVGLGHLVRGCLQLESCQMVYCRRITSSGVATVVSGCGRLKKVLVEEWKIENVVPDVVSEVMTK

SEQ ID NO: 170766 - protein, 228 aa, Zea Mays
MASLGRLKSAIFDREERKMQYQSHIRGLNAYDRHKKFMKDYVQFYGHEKNVDSSLPIKTDKDTLREGYRFILSEEDEMDSTWEKRLVKRYYDKLFKEYCIADMTQYKKGKIGLRWRTEKEVISGKGQFICGNRHCDEKHGLGSYEVNFSYVEAEEQKQALVKLVACKRCAEKLAYKRQKEKENENELPGEKEIDLKDSDKRKRKHEESDHSSEDEKYRRKKKGCIYTR

SEQ ID NO: 170767 - protein, 220 aa, Zea Mays
MFYGHEKNVDSSLPIKTDKDTLREGYRFILSEEDEMDSTWEKRLVKRYYDKLFKEYCIADMTQYKKGKIGLRWRTEKEVISGKGQFICGNRHCDEKHGLGSYEVNFSYVEAEEQKQALVKLVACKRCAEKLAYKRQKEKENENELPGEKEIDLKDSDKRKRKHEESDHSSEDEKYRRKKKGFKDAKNSGSQRPADRCGASSKSSGNSDEAFEEYLEGMFP

SEQ ID NO: 170768 - protein, 225 aa, Zea Mays
MKDYVQFYGHEKNVDSSLPIKTDKDTLREGYRFILSEEDEMDSTWEKRLVKRYYDKLFKEYCIADMTQYKKGKIGLRWRTEKEVISGKGQFICGNRHCDEKHGLGSYEVNFSYVEAEEQKQALVKLVACKRCAEKLAYKRQKEKENENELPGEKEIDLKDSDKRKRKHEESDHSSEDEKYRRKKKGFKDAKNSGSQRPADRCGASSKSSGNSDEAFEEYLEGMFP

SEQ ID NO: 170769 - protein, 248 aa, Zea Mays
MASLGRLKSAIFDREERKMQYQSHIRGLNAYDRHKKFMKDYVQFYGHEKNVDSSLPIKTDKDTLREGYRFILSEEDEMDSTWEKRLVKRYYDKLFKEYCIADMTQYKKGKIGLRWRTEKEVISGKGQFICGNRHCDEKHGLGSYEVNFSYVEAEEQKQALVKLVACKRCAEKLAYKRQKEKENENELPGEKEIDLKDSDKRKRKHEESDHSSEDEKYRRKKKDRCGASSKSSGNSDEAFEEYLEGMFP

SEQ ID NO: 170770 - protein, 84 aa, Zea Mays
MSVIVIDMGSIPVLFPWLKVMVFILLVVTKVKTGWRLWSRLRVLNFFSKCRLRAHRGGVVTEEIVAEASLVGSAPISRYEAFNL

SEQ ID NO: 170771 - protein, 183 aa, Zea Mays
MESAVSRCESGARYLWKARRDEVTSSMPPPLDENIFSDLTLFAPPQEPLSLEKKLCLVMGLHDGSTKCLYPALEYSSKKNAKGNKPRKERNIIFEAFRTPREAIEERRRKYENNEYQVKIEILKINFHERKKNAWEDSSSDDISGVITRFDGVDLQVYETLTQSLSIISIYETDNLVLSPSDG

SEQ ID NO: 170772 - protein, 67 aa, Zea Mays
MALADEHDSLSLDHRQRQQSAAGRRLVVTRSGGPPSDSPHHDRADLHAPPAGGHLTKLPASTAGAAT

SEQ ID NO: 170773 - protein, 74 aa, Zea Mays
MSSYHPVCLSDSLQSIPIESVAAAMHIIGNQQKGRRVAAMAPPPLKGGNQRFCLFGRPKLMQEHGIAVQEKKGR

SEQ ID NO: 170774 - protein, 164 aa, Zea Mays
MVVQPEERNMYDQYCLVNHLKESYGVATIRKTLAQVEAQGQVLTDGTLVVDGRTVAVVYFRAGYAPTDYPSEAEWRARLLMEQSSAVKCPSIAYHLVGTKKIQQELAKPNVLERFLDNKDDIAKLRKSFAGLWSLDNEEIVRSAIQKPNLFVLKPQREGGGIFR

SEQ ID NO: 170775 - protein, 214 aa, Zea Mays
MPSSRTLLKQYGKVLGLDPKRIPQNWAATQFAEALGRAWAEYNNDSAVVLMVVQPEERNMYDQYCLVNHLKESYGVATIRKTLAQVEAQGQVLTDGTLVVDGRTVAVVYFRAGYAPTDYPSEAEWRARLLMEQSSAVKCPSIAYHLVGTKKIQQELAKPNVLERFLDNKDDIAKLRKSFAGLWSLDNEEIVRSAIQKPNLFVLKPQREGGGIFR

SEQ ID NO: 170776 - protein, 317 aa, Zea Mays
MPSSRTLLKQYGKVLGLDPKRIPQNWAATQFAEALGRAWAEYNNDSAVVLMVVQPEERNMYDQYCLVNHLKESYGVATIRKTLAQVEAQGQVLTDGTLVVDGRTVAVVYFRAGYAPTDYPSEAEWRARLLMEQSSAVKCPSIAYHLVGTKKIQQELAKPNVLERFLDNKDDIAKLRKSFAGLWSLDNEEIVRSAIQKPNLFVLKPQREGGGNNIYGQDLQDTLIKLQKEQGEALAAYILMQRIFPKASLTPLVRGGDCFEDLTISELGIYGAYLRNRDKVILNNQSGYLMRTKVSSSNEGGVAAGFAVLDSVLLTDE

SEQ ID NO: 170777 - protein, 531 aa, Zea Mays
MSSPCVSHQQQVRLRLRAASRLPAPDTASFAPPAPRRLRVAHAAMSAKAPLGVAPAEEGAGTPGQQAVLGQMVEDAAVWCAVHGLVVGDRANQRSGTVPGVGLVHAPFSLLPARFPASFFNQACELAPIFNELVDRVSLDGEFLQAALSRTKQVDEFTSRLLEIHDKMMSINKKEDIRLGLHRSDYMLDSETNSLLQIELNTIASSFPGLGSLVSELHRTLLKQYGKVLGLDPKRIPQNWAATQFAEALGRAWAEYNNDSAVVLMVVQPEERNMYDQYCLVNHLKESYGVATIRKTLAQVEAQGQVLTDGTLVVDGRTVAVVYFRAGYAPTDYPSEAEWRARLLMEQSSAVKCPSIAYHLVGTKKIQQELAKPNVLERFLDNKDDIAKLRKSFAGLWSLDNEEIVRSAIQKPNLFVLKPQREGGGNNIYGQDLQDTLIKLQKEQGEALAAYILMQRIFPKASLTPLVRGGDCFEDLTISELGIYGAYLRNRDKVILNNQSGYLMRTKVSSSNEGGVAAGFAVLDSVLLTDE

SEQ ID NO: 170778 - protein, 126 aa, Zea Mays
MTALSKGGSLLSPDSTEQTSQTELSPNTTMMVRPFTRSFSLEPGRLVSLVDNDGKEVGRGKIFQAPGKSTTKSCVCVVDVTELRTEKWRELPHPSEAFGWTFQEAEARNGGIIRVSWDAVRLFPVA

SEQ ID NO: 170779 - protein, 375 aa, Zea Mays
MLLYHGFKLYQMDVKSAFLNGPIKEEVYVEQPPSFEDSEYPNHVYKLSKALYGLKQAPRAWYECLRDFLITNGFKVGKADPTLFTKTIAKDLFVCQIYVDDIIFGSTNKSTCEEFSRIMIQKFEMSMMGELKYFLGFQVKQLQDGTFISQTKYIQDILTKFGMKDAKPIKTPMGTNGHLDLDTRGKSVYQNVYRSMIGSLLYLCASRPDIMLSVCMCARFQADPKEVHLRVVKRIMRYLVYTPKFVLWYPKGSTFDLIGYSNADWAGCKIDRKSTSGTCQFLRRSLVSWASKKQNSIALSTAEAEYIVAGHCCAQLLWMRQTLRDYGYKLSKVPLLCDNESAIRMADNPVEHSRTKHIDIRYHFLRYHQQRGISR

SEQ ID NO: 170780 - protein, 921 aa, Zea Mays
MIAMVSAVEELSWLTSKELGEMLRESDNFVLQSKIEDGGPKQVDMEKVVPSLPLHLLAVCLELGQGPDLTYVLRGIRFLHSLSDLASRHTRLEQVLLDDVKLSEQVMDLIFFLLSILAEQKENNNVGASPLVHASLVAGSLHLLTNYFSSQWHELVHILLAHPKVDIFMDVAFDSLHEDVRLLSIRLSSMGFGFFPVGSLESRLAHFICQQCEASLQFLLLLCQQKLFRDRILKNKELSRNGGILSLSHTILKLVVPECLKQSTDLVASISRLKAKILSILLQLCEAESVSYLDEVATNPNNMRLGQTLALEVLNLLKISFGRKINITSDSHDKGKIYPMGSVLISALRLVDVFSDDSNFRSFFLTNTVPFLIQILAAPHDEFVSSWCAVNLPTIEEDASLDYDPFGASEVALLASDNMLTEAKANYSCPFRPSVPSMAYAQTRTSCVVKIIANLHVFIPNICEEQERDLFLQNFQKHLASGSPKLSADLPASSDFKATKVCRNLGFLSDYAKTLVPNLLNGEDLVLLSDFADKLQSWCKSQVAVKVVQNDIPPESMDAMCPVQQLLPTRTSTPASKMNNLPKDAQNMEVSTPVPPINPEGNDEDETPKNTVSRNGGFLQNAVGQDLVHLGVARTTSGGPSAVASGVSTGHQHNRMDLDPASSSVDNFKTPELTKENGLEEDGKGESSMYDERQPKRRKRTLMNNEQIDELEKALVDEPEMHKNPVLLQSWSEKLSLQGPEITASQLKNWLNNRKAKLARIAKERAENADKPSTSHPGESSESAGEDNYLPPAGVMTVLSKGGSLLSPDCTEQTSQAELSPNTTMMVRPFTRSFSLEPGRLVSLVDSDGKEVGRGKIFQAPGKSTTESRVCVVDVTELRTEKWRELPHPSEAFGWTFQEAEARNGGIIRVSWDAVRLFPVA

SEQ ID NO: 170781 - protein, 565 aa, Zea Mays
MIAMVSAVEELSWLTSKELGEMLRESDNFVLQSKIEDGGPKQVLVDMEKVVPSLPLHLLAVCLELGQGPDLTYVLRGIRFLHSLSDLASRHTRLEQVLLDDVKLSEQVMDLIFFLLSILAEQKENNNVGASPLVHASLVAGSLHLLTNYFSSQWHELVHILLAHPKVDIFMDVAFDSLHEDVRLLSIRLSSMGFGFFPVGSLESRLAHFICQQCEASLQFLLLLCQQKLFRDRILKNKELSRNGGILSLSHTILKLVVPECLKQSTDLVASISRLKAKILSILLQLCEAESVSYLDEVATNPNNMRLGQTLALEVLNLLKISFGRKINITSDSHDKGKIYPMGSVLISALRLVDVFSDDSNFRSFFLTNTVPFLIQILAAPHDEFVSSWCAVNLPTIEEDASLDYDPFGASEVALLASDNMLTEAKANYSCPFRPSVPSMAYAQTRTSCVVKIIANLHVFIPNICEEQERDLFLQNFQKHLASGSPKLSADLPASSDFKATKVCRNLGFLSDYAKTLVPNLLNGEDLVLLSDFADKLQSWCKSQVAVKQNLIFIIITQLQSVHTK

SEQ ID NO: 170782 - protein, 395 aa, Zea Mays
MDVAFDSLHEDVRLLSIRLSSMGFGFFPVGSLESRLAHFICQQCEASLQFLLLLCQQKLFRDRILKNKELSRNGGILSLSHTILKLVVPECLKQSTDLVASISRLKAKILSILLQLCEAESVSYLDEVATNPNNMRLGQTLALEVLNLLKISFGRKINITSDSHDKGKIYPMGSVLISALRLVDVFSDDSNFRSFFLTNTVPFLIQILAAPHDEFVSSWCAVNLPTIEEDASLDYDPFGASEVALLASDNMLTEAKANYSCPFRPSVPSMAYAQTRTSCVVKIIANLHVFIPNICEEQERDLFLQNFQKHLASGSPKLSADLPASSDFKATKVCRNLGFLSDYAKTLVPNLLNGEDLVLLSDFADKLQSWCKSQVAVKQNLIFIIITQLQSVHTK

SEQ ID NO: 170783 - protein, 877 aa, Zea Mays
MEKVVPSLPLHLLAVCLELGQGPDLTYVLRGIRFLHSLSDLASRHTRLEQVLLDDVKLSEQVMDLIFFLLSILAEQKENNNVGASPLVHASLVAGSLHLLTNYFSSQWHELVHILLAHPKVDIFMDVAFDSLHEDVRLLSIRLSSMGFGFFPVGSLESRLAHFICQQCEASLQFLLLLCQQKLFRDRILKNKELSRNGGILSLSHTILKLVVPECLKQSTDLVASISRLKAKILSILLQLCEAESVSYLDEVATNPNNMRLGQTLALEVLNLLKISFGRKINITSDSHDKGKIYPMGSVLISALRLVDVFSDDSNFRSFFLTNTVPFLIQILAAPHDEFVSSWCAVNLPTIEEDASLDYDPFGASEVALLASDNMLTEAKANYSCPFRPSVPSMAYAQTRTSCVVKIIANLHVFIPNICEEQERDLFLQNFQKHLASGSPKLSADLPASSDFKATKVCRNLGFLSDYAKTLVPNLLNGEDLVLLSDFADKLQSWCKSQVAVKVVQNDIPPESMDAMCPVQQLLPTRTSTPASKMNNLPKDAQNMEVSTPVPPINPEGNDEDETPKNTVSRNGGFLQNAVGQDLVHLGVARTTSGGPSAVASGVSTGHQHNRMDLDPASSSVDNFKTPELTKENGLEEDGKGESSMYDERQPKRRKRTLMNNEQIDELEKALVDEPEMHKNPVLLQSWSEKLSLQGPEITASQLKNWLNNRKAKLARIAKERAENADKPSTSHPGESSESAGEDNYLPPAGVMTVLSKGGSLLSPDCTEQTSQAELSPNTTMMVRPFTRSFSLEPGRLVSLVDSDGKEVGRGKIFQAPGKSTTESRVCVVDVTELRTEKWRELPHPSEAFGWTFQEAEARNGGIIRVSWDAVRLFPVA

SEQ ID NO: 170784 - protein, 365 aa, Zea Mays
MDAMCPVQQLLPTRTSTPASKMNNLPKDAQNMEVSTPVPPINPEGNDEDETPKNTVSRNGGFLQNAVGQDLVHLGVARTTSGGPSAVASGVSTGHQHNRMDLDPASSSVDNFKTPELTKENGLEEDGKGESSMYDERQPKRRKRTLMNNEQIDELEKALVDEPEMHKNPVLLQSWSEKLSLQGPEITASQLKNWLNNRKAKLARIAKERAENADKPSTSHPGESSESAGEDNYLPPAGVMTVLSKGGSLLSPDCTEQTSQAELSPNTTMMVRPFTRSFSLEPGRLVSLVDSDGKEVGRGKIFQAPGKSTTESRVCVVDVTELRTEKWRELPHPSEAFGWTFQEAEARNGGIIRVSWDAVRLFPVA

SEQ ID NO: 170785 - protein, 852 aa, Zea Mays
MIAMVSAVEELSWLTSKELGEMLRESDNFVLQSKIEDGGPKQVLVDMEKVVPSLPLHLLAVCLELGQGPDLTYVLRGIRFLHSLSDLASRHTRLEQVLLDDVKLSEQVMDLIFFLLSILAEQKENNNVGASPLVHASLVAGSLHLLTNYFSSQWHELVHILLAHPKVDIFMDVAFDSLHEDVRLLSIRLSSMGFGFFPVGSLESRLAHFICQQCEASLQFLLLLCQQKLFRDRILKNKELSRNGGILSLSHTILKLVVPECLKQSTDLVASISRLKAKILSILLQLCEAESVSYLDEVATNPNNMRLGQTLALEVLNLLKISFGRKINITSDSHDKGKIYPMGSVLISALRLVDVFSDDSNFRSFFLTNTVPFLIQILAAPHDEFVSSWCAVNLPTIEEDASLDYDPFGASEVALLASDNMLTEAKANYSCPFRPSVPSMAYAQTRTSCVVKIIANLHVFIPNICEEQERDLFLQNFQKHLASGSPKLSADLPASSDFKATKVCRNLGFLSDYAKTLVPNLLNGEDLVLLSDFADKLQSWCKSQVAVKVVQNDIPPESMDAMCPVQQLLPTRTSTPASKMNNLPKDAQNMEVSTPVPPINPEGNDEDETPKNTVSRNGGFLQNAVGQDLVHLGVARTTSGGPSAVASGVSTGHQHNRMDLDPASSSVDNFKTPELTKENGLEEDGKGESSMYDERQPKRRKRTLMNNEQIDELEKALVDEPEMHKNPVLLQSWSEKLSLQGPEITASQLKNWLNNRKAKLARIAKERAENADKPSTSHPGESSESAGEDNYLPPAGRAIPEHDDDGPSIHEILLVGTRPPRFISRQRWEGGWQGQDLPSAREEHNGEPRLRG

SEQ ID NO: 170786 - protein, 99 aa, Zea Mays
MRFDDGIAIVSLESACVMRFSRAEAASDTPKQGGSASESTAEVPVLLNPGSLALMSGDARYLWMHEINRKPGRQLWDGRELEQRRRTSVTLRKLLPYTD

SEQ ID NO: 170787 - protein, 187 aa, Zea Mays
MNTAPICIWFPKAMRFGDLPSWAVELSALIREAICVGDASAGLGAEATNEDEDACPLPSDLLWREPFFDQMIANRYRPGEGICAHVDLMRFDDGIAIVSLESACVMRFSRAEAASDTPKQGGSASESTAEVPVLLNPGSLALMSGDARYLWMHEINRKPGRQLWDGRELEQRRRTSVTLRKLLPYTD

SEQ ID NO: 170788 - protein, 72 aa, Zea Mays
MHDMLVWSTIDMEFSACHNIVVLKSGSNSGALGRNLFCCFLCGCYINSVSFLCSSVCIYFRRNPTSFGMQVK

SEQ ID NO: 170789 - protein, 382 aa, Zea Mays
MLAFEDNGSSKIGVRFDKQIPDGNDLGGLCEEDHGFFCSAESLRPDFSAGEEVERLAMTELIEVISEENKSGPLIVLLKDVEKSFTGVTESLSSLRSKFESLPSGVLIIGSHTQMDSRKEKAHPGGFLFTKFASSSQTLFDLFPDSFGSRWLHERSKESPKAMKHLNKLFPNKISIQLPQDEALLTDWKQQLDRDVETLKAKSNIGSIRTFLSRNGIECNDIEELFIKDQSLSNENVDKIVGYAVSYHLKHNKIETSNSKDNKLVLTSESLKHGLNMLQSMQSDNKSSKKSLKDVVTENEFEKRLLVDVIPPNDIGVTFDDIGALENVKDTLKELVMLPLQRPELFCKGQLTKPCKGILLFGPPGTGKTMLAKAVATEAVVW

SEQ ID NO: 170790 - protein, 533 aa, Zea Mays
MLAFEDNGSSKIGVRFDKQIPDGNDLGGLCEEDHGFFCSAESLRPDFSAGEEVERLAMTELIEVISEENKSGPLIVLLKDVEKSFTGVTESLSSLRSKFESLPSGVLIIGSHTQMDSRKEKAHPGGFLFTKFASSSQTLFDLFPDSFGSRWLHERSKESPKAMKHLNKLFPNKISIQLPQDEALLTDWKQQLDRDVETLKAKSNIGSIRTFLSRNGIECNDIEELFIKDQSLSNENVDKIVGYAVSYHLKHNKIETSNSKDNKLVLTSESLKHGLNMLQSMQSDNKSSKKSLKDVVTENEFEKRLLVDVIPPNDIGVTFDDIGALENVKDTLKELVMLPLQRPELFCKGQLTKPCKGILLFGPPGTGKTMLAKAVATEAGANFINISMSSITSKWFGEGEKYVKAVFSLASKIAPSVIFIDEVDSMLGRRENPGEHEAMRKMKNEFMVNWDGLRTKDKERVLVLGATNRPFDLDEAVIRRFPRRLMVNLPDASNREKILKVILAKEELGSDVDLDSLANMTDGYSGSDLKICV

SEQ ID NO: 170791 - protein, 422 aa, Zea Mays
MVETRRSSAAAKRPSPSPSSSSVPPPKRPKAESPGSPTASAPARAEEDSVAGAAPARSDGSADDAAAAVAQKDQGADKPSSAAAESSKRRKEPEQQQPAAPWAKLLSQCSQTPHYPIIAAQFSVGQSKNCNLWLKDQPVSKVLCKLRRLEHGGPCELEVLGKKGMVQLNGRSISSGTKVPLTGGDEVIFNSCGKHAYIFQHPLSDKAPKTVPSSAVSLIEPPVASVKRIRTDKRTGDTSAIAGTEMLPSTSNQAKDVAAAPPAFAGENSQRVMLPMASSASDKSKGHTVSPDKEFENGENANEVNSNIEDSPMDAAAAPISPDAAANDACQQNGFLPDAHLGAEIALEDQRDLIRDLNASASVPPSRCQAFKDGMKQGIINPSDIDVTFEDFPYYVRMCSCHVHSYTWKRRSSSSSLLRFHQ

SEQ ID NO: 170792 - protein, 508 aa, Zea Mays
MDSRKEKAHPGGFLFTKFASSSQTLFDLFPDSFGSRWLHERSKESPKAMKHLNKLFPNKISIQLPQDEALLTDWKQQLDRDVETLKAKSNIGSIRTFLSRNGIECNDIEELFIKDQSLSNENVDKIVGYAVSYHLKHNKIETSNSKDNKLVLTSESLKHGLNMLQSMQSDNKSSKKSLKDVVTENEFEKRLLVDVIPPNDIGVTFDDIGALENVKDTLKELVMLPLQRPELFCKGQLTKPCKGILLFGPPGTGKTMLAKAVATEAGANFINISMSSITSKWFGEGEKYVKAVFSLASKIAPSVIFIDEVDSMLGRRENPGEHEAMRKMKNEFMVNWDGLRTKDKERVLVLGATNRPFDLDEAVIRRFPRRLMVNLPDASNREKILKVILAKEELGSDVDLDSLANMTDGYSGSDLKNLCVTAAHYPIREILEKEKKEKSLAKTEGRPEPALYGSEHIRPLSIDDFKSAHEQVCASVSSDSANMNELLQWNDLYGEGGSRKRKALSYFM

SEQ ID NO: 170793 - protein, 483 aa, Zea Mays
MVETRRSSAAAKRPSPSPSSSSVPPPKRPKAESPGSPTASAPARAEEDSVAGAAPARSDGSADDAAAAVAQKDQGADKPSSAAAESSKRRKEPEQQQPAAPWAKLLSQCSQTPHYPIIAAQFSVGQSKNCNLWLKDQPVSKVLCKLRRLEHGGPCELEVLGKKGMVQLNGRSISSGTKVPLTGGDEVIFNSCGKHAYIFQHPLSDKAPKTVPSSAVSLIEPPVASVKRIRTDKRTGDTSAIAGTEMLPSTSNQAKDVAAAPPAFAGENSQRVMLPMASSASDKSKGHTVSPDKEFENGENANEVNSNIEDSPMDAAAAPISPDAAANDACQQNGFLPDAHLGAEIALEDQRDLIRDLNASASVPPSRCQAFKDGMKQGIINPSDIDVTFEDFPYYVSENTKNVLLSCAFIHLEKKEFIKQFAEISSINQRILLSGPAGSEIYQETLVKALAKHFGARLLVVDSLLLPGAPLKDAESQKDVGKG

SEQ ID NO: 170794 - protein, 620 aa, Zea Mays
MLAFEDNGSSKIGVRFDKQIPDGNDLGGLCEEDHGFFCSAESLRPDFSAGEEVERLAMTELIEVISEENKSGPLIVLLKDVEKSFTGVTESLSSLRSKFESLPSGVLIIGSHTQMDSRKEKAHPGGFLFTKFASSSQTLFDLFPDSFGSRWLHERSKESPKAMKHLNKLFPNKISIQLPQDEALLTDWKQQLDRDVETLKAKSNIGSIRTFLSRNGIECNDIEELFIKDQSLSNENVDKIVGYAVSYHLKHNKIETSNSKDNKLVLTSESLKHGLNMLQSMQSDNKSSKKSLKDVVTENEFEKRLLVDVIPPNDIGVTFDDIGALENVKDTLKELVMLPLQRPELFCKGQLTKPCKGILLFGPPGTGKTMLAKAVATEAGANFINISMSSITSKWFGEGEKYVKAVFSLASKIAPSVIFIDEVDSMLGRRENPGEHEAMRKMKNEFMVNWDGLRTKDKERVLVLGATNRPFDLDEAVIRRFPRRLMVNLPDASNREKILKVILAKEELGSDVDLDSLANMTDGYSGSDLKNLCVTAAHYPIREILEKEKKSLAKTEGRPEPALYGSEHIRPLSIDDFKSAHEQVCASVSSDSANMNELLQWNDLYGEGGSRKRKALSYFM

SEQ ID NO: 170795 - protein, 388 aa, Zea Mays
MVETRRSSAAAKRPSPSPSSSSVPPPKRPKAESPGSPTASAPARAEEDSVAGAAPARSDGSADDAAAAVAQKDQGADKPSSAAAESSKRRKEPEQQQPAAPWAKLLSQCSQFSVGQSKNCNLWLKDQPVSKVLCKLRRLEHGGPCELEVLGKKGMVQLNGRSISSGTKVPLTGGDEVIFNSCGKHAYIFQHPLSDKAPKTVPSSAVSLIEPPVASVKRIRTDKRTGDTSAIAGTEMLPSTSNQAKDVAAAPPAFAGENSQRVMLPMASSASDKSKGHTVSPDKEFENGENANEVNSNIEDSPMDAAAAPISPDAAANDACQQNGFLPDAHLGAEIDQRDLIRDLNASASVPPSRCQAFKDGMKQGIINPSDIDVTFEDFPYYVSENTK

SEQ ID NO: 170796 - protein, 379 aa, Zea Mays
MIVVQYRGVEQQFAAEEISSMVLVKMREIAEAYLGTTVKDAVVTVPACSTDLQRQATWNAGVLANLNVIRIIPEPTAAALAYGLNRKAAQIMGEYDVLVFDLGGGTFDVSVLAIEQGIFEVRATAGAAHLGGEDFDNRMVNHFVEEFKRKKKKDISGNPRALRRLRTACERAKRTLSSYLEASIEIDCLYEDIDFYSAITRARFEELNMDLFRKCMAIVEDCLSDASYVRSIHDVVLVGGSSRIPKIQQLLQELFDGKELCNSINPDEAVAYGATMQAAILSREGGYEIQNYLLLDATPLSLGLETDGGLMTFFSLFAAACCGCNPAAAAASTVFFSLWIAAAAVQTAATVSACSQPNTPLDDSKEYHHSNQKGEGLID

SEQ ID NO: 170797 - protein, 1008 aa, Zea Mays
MASCGGGVCLKRDRREEEENDDDKGETSGRNKRPSSGAYYTGAGVDAQRTDDDDSAAADYMYEYDDGYEEEESAAEQPKGDDASARDTEQRYAVLTEDDVRARQEADTARVAEVLSIPAGFARALLRHFKWRVGRAQEEWFSDAQHQQRVRGAVGLVPAACPDGDALVPAARSPRPRVCGICFDAFPAGGTRSAGCAAHYYCDGCWCGYVAAAVGDGARCLALRCPDPSCAAAVVRELVDEVARDDDRARYARFWLRSYVEESGGRIRWCGGAGCTRSVELLGGCDAEAVASAVDVVCGCRHAFCWRCGEEAHRPVSCGTVRAWLAKNASDSETANWVVANTKRCPMCRRPIEKNHGCNHMTCGAPCHHQFCWLCLDPWDHHRGCTRYDSRRRRRHGPVDEVEDEEEQAQRTLAKASLDRYLYHYERWEGNGKSLRKALADADELERSELQRMARLLDLPAMDLGFVTEAYRQIADGRRVLRWAHAYDYFLSLDPERDAAKRGLFDDLQSQANRWLECLHGCAELERKHLFGAADADAEDEPTVAAAAFMAYKERLANLTGVTRRFIGNLVRAFKTNLPEVVVTLTPPASDLQHIVKSGPTTERQTTVGIGGILSTEATVTLPVSNVSSLQGTSALRPSSSSLVVSQETDIANDSVQERHSPTRNLAQAQHPVRPGGHGGFLSNPYPSFFGEATSTAGPLQLYMPNMVVSDMAAASSSQPDRMGMDQQAGTGSAMNLTIGLHPNAQQPPPKYVKIWEGDLYGQRQGQPVFISKLESWGGTVSRKVAEDWPETMQIVRLIAQEHMNKNQYVGNTDFLIFRALNQHGFLGQLQERKLCGVIQLPSQTLLLSMYDKTSRMVGMLFPKNMLMFRPEALTQPSPVQQEELIHHQQQQLQQQQRNIHRLQRQLIQKQQQQHMQKLLPQRLQYQEQLHLQQQMTQQIQQQQQSLYQQHQQMQHQQQLWQQIQQQKHQLQHMDPQQQQLLSQMVGTELGSDDDTREDWVTGAGPHA

SEQ ID NO: 170798 - protein, 651 aa, Zea Mays
MASCGGGVCLKRDRREEEENDDDKGETSGRNKRPSSGAYYTGAGVDAQRTDDDDSAAADYMYEYDDGYEEEESAAEQPKGDDASARDTEQRYAVLTEDDVRARQEADTARVAEVLSIPAGFARALLRHFKWRVGRAQEEWFSDAQHQQRVRGAVGLVPAACPDGDALVPAARSPRPRVCGICFDAFPAGGTRSAGCAAHYYCDGCWCGYVAAAVGDGARCLALRCPDPSCAAAVVRELVDEVARDDDRARYARFWLRSYVEESGGRIRWCGGAGCTRSVELLGGCDAEAVASAVDVVCGCRHAFCWRCGEEAHRPVSCGTVRAWLAKNASDSETANWVVANTKRCPMCRRPIEKNHGCNHMTCGAPCHHQFCWLCLDPWDHHRGCTRYDSRRRRRHGPVDEVEDEEEQAQRTLAKASLDRYLYHYERWEGNGKSLRKALADADELERSELQRMARLLDLPAMDLGFVTEAYRQIADGRRVLRWAHAYDYFLSLDPERDAAKRGLFDDLQSQANRWLECLHGCAELERKHLFGAADADAEDEPTVAAAAFMAYKERLANLTGVTRRFIGNLVRAFKTNLPEVVVTLTPPASDLQHIEWTNDGETNNGWHWRHPFYRSNCDTTCFQRVFFTRDISTATFIVVSSSLTGNGHCK

SEQ ID NO: 170799 - protein, 886 aa, Zea Mays
MASCGGGVCLKRDRREEEENDDDKGETSGRNKRPSSGAYYTGAGVDAQRTDDDDSAAADYMYEYDDGYEEEESAAEQPKGDDASARDTEQRYAVLTEDDVRARQEADTARVAEVLSIPAGFARALLRHFKWRVGRAQEEWFSDAQHQQRVRGAVGLVPAACPDGDALVPAARSPRPRVCGICFDAFPAGGTRSAGCAAHYYCDGCWCGYVAAAVGDGARCLALRCPDPSCAAAVVRELVDEVARDDDRARYARFWLRSYVEESGGRIRWCGGAGCTRSVELLGGCDAEAVASAVDVVCGCRHAFCWRCGEEAHRPVSCGTVRAWLAKNASDSETANWVVANTKRCPMCRRPIEKNHGCNHMTCGAPCHHQFCWLCLDPWDHHRGCTRYDSRRRRRHGPVDEVEDEEEQAQRTLAKASLDRYLYHYERWEGNGKSLRKALADADELERSELQRMARLLDLPAMDLGFVTEAYRQIADGRRVLRWAHAYDYFLSLDPERDAAKRGLFDDLQSQANRWLECLHGCAELERKHLFGAADADAEDEPTVAAAAFMAYKERLANLTGVTRRFIGNLVRAFKTNLPEVVVTLTPPASDLQHIVKSGPTTERQTTVGIGGILSTEATVTLPVSNVSSLQGTSALRPSSSSLVVSQETDIANDSVQERHSPTRNLAQAQHPVRPGGHGGFLSNPYPSFFGEATSTAGPLQLYMPNMVVSGGTTSTPSLAFSLSALGQPITSTALGGSFGSNTRTAWGNSDMAAASSSQPDRMGMDQQAGTGSAMNLTIGLHPNAQQPPPKYVKIWEGDLYGQRQGQPVFISKLESWGGTVSRKVAEDWPETMQIVRLIAQEHMNKKYSESQYVGNTDFLIFRALNQHGFLGQLQERKLFHRFSVV

SEQ ID NO: 170800 - protein, 824 aa, Zea Mays
MASCGGGVCLKRDRREEEENDDDKGETSGRNKRPSSGAYYTGAGVDAQRTDDDDSAAADYMYEYDDGYEEEESAAEQPKGDDASARDTEQRYAVLTEDDVRARQEADTARVAEVLSIPAGFARALLRHFKWRVGRAQEEWFSDAQHQQRVRGAVGLVPAACPDGDALVPAARSPRPRVCGICFDAFPAGGTRSAGCAAHYYCDGCWCGYVAAAVGDGARCLALRCPDPSCAAAVVRELVDEVARDDDRARYARFWLRSYVEESGGRIRWCGGAGCTRSVELLGGCDAEAVASAVDVVCGCRHAFCWRCGEEAHRPVSCGTVRAWLAKNASDSETANWVVANTKRCPMCRRPIEKNHGCNHMTCGAPCHHQFCWLCLDPWDHHRGCTRYDSRRRRRHGPVDEVEDEEEQAQRTLAKASLDRYLYHYERWEGNGKSLRKALADADELERSELQRMARLLDLPAMDLGFVTEAYRQIADGRRVLRWAHAYDYFLSLDPERDAAKRGLFDDLQSQANRWLECLHGCAELERKHLFGAADADAEDEPTVAAAAFMAYKERLANLTGVTRRFIGNLVRAFKTNLPEVVVTLTPPASDLQHIVKSGPTTERQTTVGIGGILSTEATVTLPVSNVSSLQGTSALRPSSSSLVVSQETDIANDSVQERHSPTRNLAQAQHPVRPGGHGGFLSNPYPSFFGEATSTAGPLQLYMPNMVVSGGTTSTPSLAFSLSALGQPITSTALGGSFGSNTRTAWGNSDMAAASSSQPDRMGMDQQAGTGSAMNLTIGLHPNAQQPPPKYVKIWEGDLYGQRQGQPVFISKLEYQDIYSCDS

SEQ ID NO: 170801 - protein, 1012 aa, Zea Mays
MASCGGGVCLKRDRREEEENDDDKGETSGRNKRPSSGAYYTGAGVDAQRTDDDDSAAADYMYEYDDGYEEEESAAEQPKGDDASARDTEQRYAVLTEDDVRARQEADTARVAEVLSIPAGFARALLRHFKWRVGRAQEEWFSDAQHQQRVRGAVGLVPAACPDGDALVPAARSPRPRVCGICFDAFPAGGTRSAGCAAHYYCDGCWCGYVAAAVGDGARCLALRCPDPSCAAAVVRELVDEVARDDDRARYARFWLRSYVEESGGRIRWCGGAGCTRSVELLGGCDAEAVASAVDVVCGCRHAFCWRCGEEAHRPVSCGTVRAWLAKNASDSETANWVVANTKRCPMCRRPIEKNHGCNHMTCGAPCHHQFCWLCLDPWDHHRGCTRYDSRRRRRHGPVDEVEDEEEQAQRTLAKASLDRYLYHYERWEGNGKSLRKALADADELERSELQRMARLLDLPAMDLGFVTEAYRQIADGRRVLRWAHAYDYFLSLDPERDAAKRGLFDDLQSQANRWLECLHGCAELERKHLFGAADADAEDEPTVAAAAFMAYKERLANLTGVTRRFIGNLVRAFKTNLPEVVVTLTPPASDLQHIVKSGPTTERQTTVGIGGILSTEATVTLPVSNVSSLQGTSALRPSSSSLVVSQETDIANDSVQERHSPTRNLAQAQHPVRPGGHGGFLSNPYPSFFGEATSTAGPLQLYMPNMVVSDMAAASSSQPDRMGMDQQAGTGSAMNLTIGLHPNAQQPPPKYVKIWEGDLYGQRQGQPVFISKLESWGGTVSRKVAEDWPETMQIVRLIAQEHMNKKYSESQYVGNTDFLIFRALNQHGFLGQLQERKLCGVIQLPSQTLLLSMYDKTSRMVGMLFPKNMLMFRPEALTQPSPVQQEELIHHQQQQLQQQQRNIHRLQRQLIQKQQQQHMQKLLPQRLQYQEQLHLQQQMTQQIQQQQQSLYQQHQQMQHQQQLWQQIQQQKHQLQHMDPQQQQLLSQMVGTELGSDDDTREDWVTGAGPHA

SEQ ID NO: 170802 - protein, 70 aa, Zea Mays
MAHKGKVTSNITYNLEDGPKAYNNLIVYSHLSEYAAMAKEVHELDYDPRIEDINRDVLMRLGGGKRHGRY

SEQ ID NO: 170803 - protein, 55 aa, Zea Mays
MGKRWSQTRPQWHPRPSVQGTLPWIVEYVGMTGPPYSFDHYAVALDAVDQDDREF

SEQ ID NO: 170804 - protein, 432 aa, Zea Mays
MGIDWTRVMPKEPIEDLESSVNFAALERYRWIVQRVRDYGMKVMLTLFHHSLPPWAGEYGGWRMEKTVKLVVDRVSDLVDYWVVFNEPHVFVMLTYCAGAWPGGDPNAIEVATSALPTGVYNQALHWMAIAHAEAYDYIHSKGESKRKPVVGVAHHVSFTRPYGLFDVAAVTLANSLTLFPYIDSICDKLDFIGINYYGQEVISGPGLKLVDNDEYSESGRGVYPDGLFRILIRFNERYKSLNIPFVVTENGVSDETDLIRKPYILEHLLAIYAAILMGVPVLGYLFWTTSDNWEWADGYGPKFGLVAVDRANNIARKPRPSYYLFSKIVTTGKITRHDRLAAWRELQQAAFQKKTRPFFRAVDKHGRMYAGGLDRPIQRSFILRDWRFGHYEMEGLQDPFSRFITSIISTILWKKKISYIEDEDISYSLSC

SEQ ID NO: 170805 - protein, 108 aa, Zea Mays
MHARPIRPHEFRQHNVAIAFYIGGISTFSLDMLLVVSYTYKFEVSVPAENFITAQFPMMQFTHDSLSQFILHILLYGGQLLIKRRATHRRRCHTLTIGQLIMVTHLLT

SEQ ID NO: 170806 - protein, 256 aa, Zea Mays
MGRDMPTAQRRPSPRTATARPTCFPCSTSERQSAVIQEVSSHPGTLITVAPPTTAAGMALHAAESTQGGSLNSTSAAKACKAESLHLSDLATRTPLARYDSLGPLYTLRPSTSGTSPPPALVSTTSSTTWHHRLGHPGPDIMTKITSSLDLSCSRGHFEGLCHACQLGRHTRLPFTTSSSQDEQAFDLVHCDLWTSPVLSLSGYKYYLVILDDFSHFLWTFPLRLKSDTLTTRTHFFAWVSTQFHRPVRALQCDNG

SEQ ID NO: 170807 - protein, 118 aa, Zea Mays
MMHKGINLSNKVQTTLSTQKREERRDKACEYICQFFYEASIAHNTVTLPSFALMLEAIGQFGKGLRGPSPYEMSGPFLQKRKQKVLDGFKNHKESWEQTGCTIMTDAWTDRKGRGVIF

SEQ ID NO: 170808 - protein, 89 aa, Zea Mays
MKRQSHTGSGEMARVTHTLLATDHLKGVVCSRVARTCSCGGGFVGMVDMCKRVKGSICRVVGDPQLGINRFGSPDFSDMKTGSLPCIVV

SEQ ID NO: 170809 - protein, 387 aa, Zea Mays
MMPREPNSPPEVGATTLTPSSSCPPTRCPLHMIQLSTSAPAAARSSLSLTRSGPSPTVTRTSMSTSQGLPAGMMKEFQETRRCAVMVRKSFLDLRDNFRRIVDPAVTTNLKDTRKQIVLDGPRSCGKSIALAMLVHWARTEGWLVFYVPQGKDWTHGGFFYRNTYSDFFDTPVQAANILQNFLKYNETRLQQLPCQIFERIPLGEGAGVGMMKGVDTMEMPEGSTLYDLIQTGITQTHASVGVMVRLRKELSLVKDVPVLFAIDQYNSWFTFSDFQEPVTVRSCRSIHAKELTMVNAYRSMLHNDMMVGAFSHSTAVGKLRQELPDVPSDARLIFPRYTLDEAETACHYYMRQKIIRRENFSEEKWKKIYYLSNGNGAEMRWLAAFV

SEQ ID NO: 170810 - protein, 302 aa, Zea Mays
MECHVTRRAASRDDERVSGDKTVCCDDTRKQIVLDGPRSCGKSIALAMLVHWARTEGWLVFYVPQGKDWTHGGFFYRNTYSDFFDTPVQAANILQNFLKYNETRLQQLPCQIFERIPLGEGAGVGMMKGVDTMEMPEGSTLYDLIQTGITQTHASVGVMVRLRKELSLVKDVPVLFAIDQYNSWFTFSDFQEPVTVRSCRSIHAKELTMVNAYRSMLHNDMMVGAFSHSTAVGKLRQELPDVPSDARLIFPRYTLDEAETACHYYMRQKIIRRENFSEEKWKKIYYLSNGNGAEMRWLAAFV

SEQ ID NO: 170811 - protein, 543 aa, Zea Mays
MAQPLVVKKDDDLDEEEYYSPFLGIEKGAVLQEARVFHDPQLDARRCCQVITKLLYLLNQGDTFTKVEATEVFFATTKLFQSKDVGLRRMVYLMIKELSPSADEVIIVTSSLMKDMNSKTDMYRANAIRVLCRIIDSTLLTQIERYLKQAIVDKNPVVASAALVSGIYLLQTSPEVVKRWSNEVQEAVQSRAALVQFHALALLHQIRQNDRLAVSKLVTSLTRGSVRSPLAQCLLIRYTSQVIRESGVNQGGDRPFFDFLESCLRNKAEMVILEAARAITELNGVTSRELTPAITVLQLFLSSSKPVLRFAAVRTLNKVASTHPLAVTNCNIDMESLISDQNRSIATLAITTLLKTGNESSVDRLMKQMTNFMSDIADEFKIVVVEAIRSLCLKFPLKYRSLMNFLSNILREEGGFEYKKAIVDSIIILIRDIPDAKESGLFHLCEFIEDCEFTYLSTQILHFLGNEGPKTSDPSKYIRYIYNRVILENATVRASAVSTLAKFGALVDSLKPRIFVLLRRCLFDGDDESNPLPQIVRWGSYSW

SEQ ID NO: 170812 - protein, 547 aa, Zea Mays
MAQPLVVKKDDDLDEEEYYSPFLGIEKGAVLQEARVFHDPQLDARRCCQVITKLLYLLNQGDTFTKVEATEVFFATTKLFQSKDVGLRRMVYLMIKELSPSADEVIIVTSSLMKDMNSKTDMYRANAIRVLCRIIDSTLLTQIERYLKQAIVDKNPVVASAALVSGIYLLQTSPEVVKRWSNEVQEAVQSRAALVQFHALALLHQIRQNDRLAVSKLVTSLTRGSVRSPLAQCLLIRYTSQVIRESGVNQGGDRPFFDFLESCLRNKAEMVILEAARAITELNGVTSRELTPAITVLQLFLSSSKPVLRFAAVRTLNKVASTHPLAVTNCNIDMESLISDQNRSIATLAITTLLKTGNESSVDRLMKQMTNFMSDIADEFKIVVVEAIRSLCLKFPLKYRSLMNFLSNILREEGGFEYKKAIVDSIIILIRDIPDAKESGLFHLCEFIEDCEFTYLSTQILHFLGNEGPKTSDPSKYIRYIYNRVILENATVRASAVSTLAKFGALVDSLKPRIFVLLRRCLFDGDDEVRDRATLYLKLLGTFGCTF

SEQ ID NO: 170813 - protein, 64 aa, Zea Mays
MRGEVAQWSSCVLPGDDWFMDVSQEVVSMISGRGRVANGDREVNSPTASVSAHSISSFKSHGSS

SEQ ID NO: 170814 - protein, 723 aa, Zea Mays
MLHSSRRRIFIMEIRHLCSYLQDLKKASAEEMRRSVYANYAAFIRTSKEISDLEGELLSIRNLLNTQAALIHGLSEGVQIDSLTSGPEGSAEDDISKVEDQEPSEIQKWSADFPDMLDVLLAERRVDEALDALDEAERVAVDAKRKQTLTAAEVSALKRSISDNRQRLADQLAEAACQSSTRGIELRAAASALKRLGDGPRAHSLLLSAHNQRLQCNMQTIHPSSTSYGGAYTAALAQQVFSVIAQALSDSVDVFGNESCYASELVTWATKQVMSFALLVKRHVLSSCAAAGGLRAAAECVQISLGHCFLLEARGLSVSSVLLKQFKPSLVQALDANLRRIEESTAALAAADNWILTYPLTGIRPLTRSSAANLALQPKLSSSAHRFNSMVQDFFEDIAPLLSLQLGGSSMDGITQIFNSYVNLLISALPGSMDDEANLDGLGNKIVRMAETEEQQLALLANASLLAEELLPRAAMKLSSINQSMDDLHKRGTDKQNRVPEQREWKRKLQRMVDRLRDNFCRQHALELIFTDEGDTHLSAEMYISMDNTVEEPEWVPSPIFQELYVKLNRMASIAAEMFVGRERFATLLMMRLTETVILWLSEDQAFWEEIEQGAKPLGPLGLQQFYLDMQFVIIFGQGRFLSRHVHQVILDVIDRAMAAFSATGMNPDSVLPGDDWFMDVSQEVVSMISGRGRVANGDREVNSPTASVSAHSISSFKSHGSS

SEQ ID NO: 170815 - protein, 170 aa, Zea Mays
MNVICCLLQELYVKLNRMASIAAEMFVGRERFATLLMMRLTETVILWLSEDQAFWEEIEQGAKPLGPLGLQQFYLDMQFVIIFGQGRFLSRHVHQVILDVIDRAMAAFSATGMNPDSVLPGDDWFMDVSQEVVSMISGRGRVANGDREVNSPTASVSAHSISSFKSHGSS

SEQ ID NO: 170816 - protein, 173 aa, Zea Mays
MDGITQIFNSYVNLLISALPGSMDDEANLDGLGNKIVRMAETEEQQLALLANASLLAEELLPRAAMKLSSINQSMDDLHKRGTDKQNRVPEQREWKRKLQRMVDRLRDNFCRQHALELIFTDEGDTHLSAEMYISMDNTVEEPEWVPSPIFQSYCGSQKTRPFGKRLNKEQSL

SEQ ID NO: 170817 - protein, 506 aa, Zea Mays
MQTIHPSSTSYGGAYTAALAQQVFSVIAQALSDSVDVFGNESCYASELVTWATKQVMSFALLVKRHVLSSCAAAGGLRAAAECVQISLGHCFLLEARGLSVSSVLLKQFKPSLVQALDANLRRIEESTAALAAADNWILTYPLTGIRPLTRSSAANLALQPKLSSSAHRFNSMVQDFFEDIAPLLSLQLGGSSMDGITQIFNSYVNLLISALPGSMDDEANLDGLGNKIVRMAETEEQQLALLANASLLAEELLPRAAMKLSSINQSMDDLHKRGTDKQNRVPEQREWKRKLQRMVDRLRDNFCRQHALELIFTDEGDTHLSAEMYISMDNTVEEPEWVPSPIFQELYVKLNRMASIAAEMFVGRERFATLLMMRLTETVILWLSEDQAFWEEIEQGAKPLGPLGLQQFYLDMQFVIIFGQGRFLSRHVHQVILDVIDRAMAAFSATGMNPDSVLPGDDWFMDVSQEVVSMISGRGRVANGDREVNSPTASVSAHSISSFKSHGSS

SEQ ID NO: 170818 - protein, 707 aa, Zea Mays
MASAKSSRSRPAGHSGVFPVGSAAAVGSGGGGGDGGVQLADKLKIFKTDNFDPDAYVQSKCQTMNEKEIRHLCSYLQDLKKASAEEMRRSVYANYAAFIRTSKEISDLEGELLSIRNLLNTQAALIHGLSEGVQIDSLTSGPEGSAEDDISKVEDQEPSEIQKWSADFPDMLDVLLAERRVDEALDALDEAERVAVDAKRKQTLTAAEVSALKRSISDNRQRLADQLAEAACQSSTRGIELRAAASALKRLGDGPRAHSLLLSAHNQRLQCNMQTIHPSSTSYGGAYTAALAQQVFSVIAQALSDSVDVFGNESCYASELVTWATKQVMSFALLVKRHVLSSCAAAGGLRAAAECVQISLGHCFLLEARGLSVSSVLLKQFKPSLVQALDANLRRIEESTAALAAADNWILTYPLTGIRPLTRSSAANLALQPKLSSSAHRFNSMVQDFFEDIAPLLSLQLGGSSMDGITQIFNSYVNLLISALPGSMDDEANLDGLGNKIVRMAETEEQQLALLANASLLAEELLPRAAMKLSSINQSMDDLHKRGTDKQNRVPEQREWKRKLQRMVDRLRDNFCRQHALELIFTDEGDTHLSAEMYISMDNTVEEPEWVPSPIFQELYVKLNRMASIAAEMFVGRERFATLLMMRLTETVILWLSEDQAFWEEIEQGAKPLGPLGLQQVVFSLDMYIKSFWMSLIEQWLHFLLLE

SEQ ID NO: 170819 - protein, 726 aa, Zea Mays
MASAKSSRSRPAGHSGVFPVGSAAAVGSGGGGGDGGVQLADKLKIFKTDNFDPDAYVQSKCQTMNEKEIRHLCSYLQDLKKASAEEMRRSVYANYAAFIRTSKEISDLEGELLSIRNLLNTQAALIHGLSEGVQIDSLTSEIQKWSADFPDMLDVLLAERRVDEALDALDEAERVAVDAKRKQTLTAAEVSALKRSISDNRQRLADQLAEAACQSSTRGIELRAAASALKRLGDGPRAHSLLLSAHNQRLQCNMQTIHPSSTSYGGAYTAALAQQVMSFALLVKRHVLSSCAAAGGLRAAAECVQISLGHCFLLEARGLSVSSVLLKQFKPSLVQALDANLRRIEESTAALAAADNWILTYPLTGIRPLTRSSAANLALQPKLSSSAHRFNSMVQDFFEDIAPLLSLQLGGSSMDGITQIFNSYVNLLISALPGSMDDEANLDGLGNKIVRMAETEEQQLALLANASLLAEELLPRAAMKLSSINQSMDDLHKRGTDKQNRVPEQREWKRKLQRMVDRLRDNFCRQHALELIFTDEGDTHLSAEMYISMDNTVEEPEWVPSPIFQELYVKLNRMASIAAEMFVGRERFATLLMMRLTETVILWLSEDQAFWEEIEQGAKPLGPLGLQQFYLDMQFVIIFGQGRFLSRHVHQVILDVIDRAMAAFSATGMNPDSVLPGDDWFMDVSQEVVSMISGRGRVANGDREVNSPTASVSAHSISSFKSHGSS

SEQ ID NO: 170820 - protein, 122 aa, Zea Mays
MINIVCFSAAYCVVAVESVGRQIPIAFLDRVKEDFTKKYGGGKAATAAANSLNREFGSKLKEHMQYCVDHPEEVSKLAKVKAQVSEVKGVMMENIEKVLDRGEKIELLVDKTENLRSQVTGC

SEQ ID NO: 170821 - protein, 367 aa, Zea Mays
MKTTKGGKAMNPTDAFRKEQRKKELKRNKKERKKVREVGILKKDPDAIREQIEKLEKMKADGALDKARKHKKRQLEDTYNLIVKKRKEYEQKMKEKGEQPIMFSHLAPPKRRPTADEDDRANPKPEDSVYYHPTLNPSGAPPPGKPPMYKSSIGPRIPLPSLSSTGASSSMSESEAGPSTLPPPPPPPPLPDTSESIDPSAPHFPLPPLPPPPPPPPPGFPPSQMPMPPYGVLPGPPPMLRPPFLPGPPMQLDEFAAFAPRPQLPQQPSYVKSAAPTVVKRPLAQHTPELTAMVPASVRVKRESALPKPKPKVQQQPQLSTVSISKPSVTLIRSDARPPSAAPKPPSIDDSYMAFLEDMKELGALDG

SEQ ID NO: 170822 - protein, 353 aa, Zea Mays
MSESEAGPSTLPPPPPPPPLPDTSESIDPSAPHFPLPPLPPPPPPPPKPNSDTALPGLPPPPGPPLREPVSGHTVLQPPPPPSQRSLNPPAASSANESKTDSVQLQPSVVLPPPPPPPGLPPKSNDMEAAGTSKDTPGLKEDTAARVLPPLPPPPSLPPLPPRPPMQSDMLAPGVMRFPPPPPPPDSRPSLMAAGVNRPPPPPPGFPPSQMPMPPYGVLPGPPPMLRPPFLPGPPMQLDEFAAFAPRPQLPQQPSYVKSAAPTVVKRPLAQHTPELTAMVPASVRVKRESALPKPKPKVQQQPQLSTVSISKPSVTLIRSDARPPSAAPKPPSIDDSYMAFLEDMKELGALDG

SEQ ID NO: 170823 - protein, 511 aa, Zea Mays
MKTTKGGKAMNPTDAFRKEQRKKELKRNKKERKKVREVGILKKDPDAIREQIEKLEKMKADGALDKARKHKKRQLEDTYNLIVKKRKEYEQKMKEKGEQPIMFSHLAPPKRRPTADEDDRANPKPEDSVYYHPTLNPSGAPPPGKPPMYKSSIGPRIPLPSLSSTGASSSMSESEAGPSTLPPPPPPPPLPDTSESIDPSAPHFPLPPLPPPPPPPPPPPGPPLREPVSGHTVLQPPPPPSQRSLNPPAASSANESKTDSVQLQPSVVLPPPPPPPGLPPKSNDMEAAGTSKDTPGLKEDTAARVLPPLPPPPSLPPLPPRPPMQSDMLAPGVMRFPPPPPPPDSRPSLMAAGVNRPPPPPPGFPPSQMPMPPYGVLPGPPPMLRPPFLPGPPMQLDEFAAFAPRPQLPQQPSYVKSAAPTVVKRPLAQHTPELTAMVPASVRVKRESALPKPKPKVQQQPQLSTVSISKPSVTLIRSDARPPSAAPKPPSIDDSYMAFLEDMKELGALDG

SEQ ID NO: 170824 - protein, 400 aa, Zea Mays
MGMDSVYYHPTLNPSGAPPPGKPPMYKSSIGPRIPLPSLSSTGASSSMSESEAGPSTLPPPPPPPPLPDTSESIDPSAPHFPLPPLPPPPPPPPKPNSDTALPGLPPPPGPPLREPVSGHTVLQPPPPPSQRSLNPPAASSANESKTDSVQLQPSVVLPPPPPPPGLPPKSNDMEAAGTSKDTPGLKEDTAARVLPPLPPPPSLPPLPPRPPMQSDMLAPGVMRFPPPPPPPDSRPSLMAAGVNRPPPPPPGFPPSQMPMPPYGVLPGPPPMLRPPFLPGPPMQLDEFAAFAPRPQLPQQPSYVKSAAPTVVKRPLAQHTPELTAMVPASVRVKRESALPKPKPKVQQQPQLSTVSISKPSVTLIRSDARPPSAAPKPPSIDDSYMAFLEDMKELGALDG

SEQ ID NO: 170825 - protein, 521 aa, Zea Mays
MKTTKGGKAMNPTDAFRKEQRKKELKRNKKERKKVREVGILKKDPDAIREQIEKLEKMKADGALDKARKHKKRQLEDTYNLIVKKRKEYEQKMKEKGEQPIMFSHLAPPKRRPTADEDDRANPKPEDSVYYHPTLNPSGAPPPGKPPMYKSSIGPRIPLPSLSSTGASSSMSESEAGPSTLPPPPPPPPLPDTSESIDPSAPHFPLPPLPPPPPPPPKPNSDTALPGLPPPPGPPLREPVSGHTVLQPPPPPSQRSLNPPAASSANESKTDSVQPSVVLPPPPPPPGLPPKSNDMEAAGTSKDTPGLKEDTAARVLPPLPPPPSLPPLPPRPPMQSDMLAPGVMRFPPPPPPPDSRPSLMAAGVNRPPPPPPGFPPSQMPMPPYGVLPGPPPMLRPPFLPGPPMQLDEFAAFAPRPQLPQQPSYVKSAAPTVVKRPLAQHTPELTAMVPASVRVKRESALPKPKPKVQQQPQLSTVSISKPSVTLIRSDARPPSAAPKPPSIDDSYMAFLEDMKELGALDG

SEQ ID NO: 170826 - protein, 1634 aa, Zea Mays
MDNMLGDLYKPDDGDDFYSKKYRDELENVSFQLLEEITDGFSESRELGRGSFGVVYRGLTKNGDYVAVKKLHANVTDLNHKQFQNELYNLAKLKHENIVRIYGYCYEIKKTFMEHDRRKILVEEPRIALCLEYLHNGSLQDHISDEFSGLDWDTRYRIMEGVCRGLYHIHRNLKKPLYHLDLKPANILLSKTMQPKLADFGLSRIFRNEELTRTTKSPLGTLGYQPPEYIERGEVSEKFDIFSLGVVMIHLVSGRGGFERYACMHSEEFINQVKTNWRKRFKQLQRNSLRKVKVYCHEVETCTRIALNCVEKDTQKRPDIDMVINNLKDRKTHRFKSTWTSSFRQDGRMYGSYMPYSNRYLNKLMSGSICTETKFYRREKLPNVGEEFIIGRKEEKQKIVASLLQSMTQHITILPIYGIGGIGKTTIAKLIYYDTNFNSYSRVWVYVSPKFDLKKVGNTVISQLSSEESQINETQMIHSCLMKLLSGKKVLIVLDDLWEDSLFQLNNLKDMLSYGDSINVIVIVTTRSKHVAENVSTNVEPHKIEPLTDSMCWDIMKQRSNFEAKNHKEHLAHIGMEIAVKCGGVALAAQSLGFMLKPMELCDEWIEVRDSDIWNKSISKDANSPNHVLASLMLSCTKMDRCLILCFIYCAIFPKGHHIVKEELIQQWISLGFIQPTKLHSNMQICEKYILQLIGLSFIQDTMSPKENIAIQEVFESLRCSPQGLSTEQAEQRLAIFGPNKLEEKQESKFLKFLGFMWNPLSWVMEAAAIMAIALANGGNKPPDWQDFVGIITLLIINSTISFIEENNAGNAAAALMARLAPKAKVLRNGRWAEEESAILVPGDIISVKLGDIIPADARLLEGDPLKIDQSALTGESLPVTKGPGDGVYSGSTCKQGEIEAVVIATGVHTFFGKAAHLVDSTNQVGHFQKVLTAIGNFCICSIAVGMLVEIIVMYPIQHRAYRSGIDNLLVLLIGGIPIAMPTVLSVTMAIGAHRLAQQGAITKRMTAIEELAGMDILCSDKTGTLTLNKLTVDKSLVEVFQRGVDQDTVILMAARASRTENQDAIDATIVGMLADPKEARAGVQEIHFLPFNPTDKRTALTYLDGEGRMHRVSKGAPEQILHLAHNKTDIETRVRAVIDNFAERGLRALGVAYQEVPDGRKESPGGPWEFMGLLPLFDPPRKDSADTISKALDLGVNVKMITGDQLAIGKETARRLGMGTNMYPSSALLEQNKDESIASLPIDELIETADGFAGVFPEHKYEIVKRLQARKHICGMTGDGVNDAPALKKADIGIAVADSTDAARSASDIVLTEVGLSVIISAVLTSRAIFQRMKNYTIYAVSITIRIVLGFMLLALIWKFDFPPFMVLIIAILNDGTIMTISKDRVKPSPQPDSWKLAEIFATGVVLGTYLAMMTVIFFWAAYKTDFFPRLFHVESLAHDDFQMLASAVYLQVSTISQALIFVTRSRSWSFVERPGFLLVSAFLVAQLIATLIAVYANWAFAAIKGIGWGWAGVIWLYNIVCYLPLDIIKFLIRYALSGRAWNLVLEQRIAFTSKKNFGAEERERRWAHAQRSLHGLELQPPEAASMFENKTSFSEVNQLAEEARRRAEMARSDCCLSSISTERGDQTLHCPV

SEQ ID NO: 170827 - protein, 796 aa, Zea Mays
MDNMLGDLYKPDDGDDFYSKKYRDELENVSFQLLEEITDGFSESRELGRGSFGVVYRVSMILLACMISFNKRSYVRSDQHTGLLPIIRIHMILPHCHKYSICIFLVFSVIKMISSHYIHRKVEVNVCLVLTTYPQQGLTKNGDYVAVKKLHANVTDLNHKQFQNELYNLAKLKHENIVRIYGYCYEIKKTFMEHDRRKILVEEPRIALCLEYLHNGSLQDHISDEFSGLDWDTRYRIMEGVCRGLYHIHRNLKKPLYHLDLKPANILLSKTMQPKLADFGLSRIFRNEELTRTTKSPLGTLGYQPPEYIERGEVSEKFDIFSLGVVMIHLVSGRGGFERYACMHSEEFINQVKTNWRKRFKQLQRNSLRKVKVYCHEVETCTRIALNCVEKDTQKRPDIDMVINNLKDRKTHRFKSTWTSSFRQDGRMYGSYMPYSNRYLNKLMSGSICTETKFYRREKLPNVGEEFIIGRKEEKQKIVASLLQSMTQHITILPIYGIGGIGKTTIAKLIYYDTNFNSYSRVWVYVSPKFDLKKVGNTVISQLSSEESQINETQMIHSCLMKLLSGKKVLIVLDDLWEDSLFQLNNLKDMLSYGDSINVIVIVTTRSKHVAENVSTNVEPHKIEPLTDSMCWDIMKQRSNFEAKNHKEHLAHIGMEIAVKCGGVALAAQSLGFMLKPMELCDEWIEVRDSDIWNKSISKDANSPNHVLASLMLSCTKMDRCLILCFIYCAIFPKGHHIVKEELIQQWISLGFIQPTKLHSNMQICEKYILQLIGLSFIQDTMSPKDGLATMLLSKY

SEQ ID NO: 170828 - protein, 1569 aa, Zea Mays
MDNMLGDLYKPDDGDDFYSKKYRDELENVSFQLLEEITDGFSESRELGRGSFGVVYRGLTKNGDYVAVKKLHANVTDLNHKQFQNELYNLAKLKHENIVRIYGYCYEIKKTFMEHDRRKILVEEPRIALCLEYLHNGSLQDHISDEFSGLDWDTRYRIMEGVCRGLYHIHRNLKKPLYHLDLKPANILLSKTMQPKLADFGLSRIFRNEELTRTTKSPLGTLGYQPPEYIERGEVSEKFDIFSLGVVMIHLVSGRGGFERYACMHSEEFINQVKTNWRKRFKQLQRNSLRKVKVYCHEVETCTRIALNCVEKDTQKRPDIDMVINNLKDRKTHRFKSTWTSSFRQDGRMYGSYMPYSNRYLNKLMSGSICTETKFYRREKLPNVGEEFIIGRKEEKQKIVASLLQSMTQHITILPIYGIGGIGKTTIAKLIYYDTNFNSYSRVWVYVSPKFDLKKVGNTVISQLSSEESQINETQMIHSCLMKLLSGKKVLIVLDDLWEDSLFQLNNLKDMLSYGDSINVIVIVTTRSKHVAENVSTNVEPHKIEPLTDSMCWDIMKQRSNFEAKNHKEHLAHIGMEIAVKCGGVALAAQSLGFMLKPMELCDEWIEVRDSDIWNKSISKDANSPNHVLASLMLSCTKMDRCLILCFIYCAIFPKGHHIVKEELIQQWISLGFIQPTKLHSNMQICEKYILQLIGLSFIQDTMSPKYSQAYKKGLTLFTMHDLVHDLARLLTAGEILDASNIGTMDARHVAREPATRSLFHGYMHAKSNFRSFIRTNSNIYTYRRRREPEGSGQQYKYALLTNCHKPLEVLTDSPNMIRALHFRDCHGSKGLKDYAFLPAKLSLKVLDLSGCNIAYLPASIGELAVLRYLNAPEIKNEMLPDSLSKLSKLIYLNLSGSNISALPDSIGDIEGLMHLDISNCVLLCELPESFVDLKNLVYLDLSHCQIKITARVFSGLTNIQHLNLSKSLIHGGDGLEGLQEAVGGLTELRYLNLSGCFENLRPDEVLSFVDRICRLTNLVHLDLSFNLGLVSVPESIGSLRKLHTLDLLCCRNLVTLPKCMFNMDSMKMLNVTCCPHLDQSTLPRYRYFTLPYFEVHADDGESTSNIGLLRYVNPTHELYISGLDNTISAEEVDSINLSQKQGIQSLSLSWTRDAQRSVEDMEVLGKLVPPDTLKCFELRGYDSMSFPTWVMGITLYLPRLTKVVLWELRKCNSLPPLGQLPTLQKLVIGGMDSTLTVDEGFCCAGPGAFPLLQELQLCQMENLEVWNTTYSCGQSNEDVQEFMFPNLRELLIRDCPKLRLKPCPPKTVGWKIENSDNVLSSWDEEGEIDLAALFPSRKEFKKLWEGKTKVPAACSAQFEKCRKPGASYNACPERVEVKSSKLPLGKWRLFRHLLPTYDLRISCCTYATSGSSQEIIQGLAFIESLCLEDDAQSELPNWLGELTSLETLEISKYPGLEAPLDGMKQLAHLRKLSLINCRSMSALPQWLGELISLKELIISEWPNLSDFPESMQLLTSLKMLRLERCPRITALPGWLGDLASLKILVISNCKGIVSLPDSIQKITRLVRV

SEQ ID NO: 170829 - protein, 1400 aa, Zea Mays
MEHDRRKILVEEPRIALCLEYLHNGSLQDHISDEFSGLDWDTRYRIMEGVCRGLYHIHRNLKKPLYHLDLKPANILLSKTMQPKLADFGLSRIFRNEELTRTTKSPLGTLGYQPPEYIERGEVSEKFDIFSLGVVMIHLVSGRGGFERYACMHSEEFINQVKTNWRKRFKQLQRNSLRKVKVYCHEVETCTRIALNCVEKDTQKRPDIDMVINNLKDRKTHRFKSTWTSSFRQDGRMYGSYMPYSNRYLNKLMSGSICTETKFYRREKLPNVGEEFIIGRKEEKQKIVASLLQSMTQHITILPIYGIGGIGKTTIAKLIYYDTNFNSYSRVWVYVSPKFDLKKVGNTVISQLSSEESQINETQMIHSCLMKLLSGKKVLIVLDDLWEDSLFQLNNLKDMLSYGDSINVIVIVTTRSKHVAENVSTNVEPHKIEPLTDSMCWDIMKQRSNFEAKNHKEHLAHIGMEIAVKCGGVALAAQSLGFMLKPMELCDEWIEVRDSDIWNKSISKDANSPNHICEKYILQLIGLSFIQDTMSPKYSQAYKKGLTLFTMHDLVHDLARLLTAGEILDASNIGTMDARHVAREPATRSLFHGYMHAKSNFRSFIRTNSNIYTYRRRREPEGSGQQYKYALLTNCHKPLEVLTDSPNMIRALHFRDCHGSKGLKDYAFLPAKLSLKVLDLSGCNIAYLPASIGELAVLRYLNAPEIKNEMLPDSLSKLSKLIYLNLSGSNISALPDSIGDIEGLMHLDISNCVLLCELPESFVDLKNLVYLDLSHCQIKITARVFSGLTNIQHLNLSKSLIHGGDGLEGLQEAVGGLTELRYLNLSGCFENLRPDEVLSFVDRICRLTNLVHLDLSFNLGLVSVPESIGSLRKLHTLDLLCCRNLVTLPKCMFNMDSMKMLNVTCCPHLDQSTLPRYRYFTLPYFEVHADDGESTSNIGLLRYVNPTHELYISGLDNTISAEEVDSINLSQKQGIQSLSLSWTRDAQRSVEDMEVLGKLVPPDTLKCFELRGYDSMSFPTWVMGITLYLPRLTKVVLWELRKCNSLPPLGQLPTLQKLVIGGMDSTLTVDEGFCCAGPGAFPLLQELQLCQMENLEVWNTTYSCGQSNEDVQEFMFPNLRELLIRDCPKLRLKPCPPKTVGWKIENSDNVLSSWDEEGEIDLAALFPSRKEFKKLWEGKTKVPAACSAQFEKCRKPGASYNACPERVEVKSSKLPLGKWRLFRHLLPTYDLRISCCTYATSGSSQEIIQGLAFIESLCLEDDAQSELPNWLGELTSLETLEISKYPGLEAPLDGMKQLAHLRKLSLINCRSMSALPQWLGELISLKELIISEWPNLSDFPESMQLLTSLKMLRLERCPRITALPGWLGDLASLKILVISNCKGIVSLPDSIQKITRLVRV

SEQ ID NO: 170830 - protein, 709 aa, Zea Mays
MDNMLGDLYKPDDGDDFYSKKYRDELENVSFQLLEEITDGFSESRELGRGSFGVVYRGLTKNGDYVAVKKLHANVTDLNHKQFQNELYNLAKLKHENIVRIYGYCYEIKKTFMEHDRRKILVEEPRIALCLEYLHNGSLQDHISDEFSGLDWDTRYRIMEGVCRGLYHIHRNLKKPLYHLDLKPANILLSKTMQPKLADFGLSRIFRNEELTRTTKSPLGTLGYQPPEYIERGEVSEKFDIFSLGVVMIHLVSGRGGFERYACMHSEEFINQVKTNWRKRFKQLQRNSLRKVKVYCHEVETCTRIALNCVEKDTQKRPDIDMVINNLKDRKTHRFKSTWTSSFRQDGRMYGSYMPYSNRYLNKLMSGSICTETKFYRREKLPNVGEEFIIGRKEEKQKIVASLLQSMTQHITILPIYGIGGIGKTTIAKLIYYDTNFNSYSRVWVYVSPKFDLKKVGNTVISQLSSEESQINETQMIHSCLMKLLSGKKVLIVLDDLWEDSLFQLNNLKDMLSYGDSINVIVIVTTRSKHVAENVSTNVEPHKIEPLTDSMCWDIMKQRSNFEAKNHKEHLAHIGMEIAVKCGGVALAAQSLGFMLKPMELCDEWIEVRDSDIWNKSISKDANSPNHVLASLMLSCTKMDRCLILCFIYCAIFPKGHHIVKEELIQQWISLGFIQPTKLHSNMQICEKYILQLIGLSFIQDTMSPKVLQ

SEQ ID NO: 170831 - protein, 412 aa, Zea Mays
MCDIWEEFRAALCISGGNRRPPPTLPPPNLAGGGDEDGGGVESGGGQEEGDIISALPDDVLLFILSRLPSAAAARTSVLSNRWRLLWAQLPVLWFPLPAEPARALPSPATAARTRDRSHRWRRRLLAHLPALRFPLPVGPARALPSLASARAALTQHSAPSLWILRIDANDADPVDAAAVLRLAAPRLTNALFLRNVVPEDRKKAVVMEVIELPCFDRAAHLFLDLGYLRLAFPPSGVFTKLTVLVLSHVRFQGALDIGDTLSSARCPSLRLLHLFDAQGVSNLGICSESLVSMVLHNLKGLQQLRVVSPMLRDLHMFNCFFKRQPVASITAPVADITAPILEKFGWLDEYDPRWVQLGELSQLQVLAISFFAGAWYGLVEHQYNRGSVKLLQRFREIRDLHITIFYPIAQT

SEQ ID NO: 170832 - protein, 800 aa, Zea Mays
MVEGWRDSMDRLALIPYSRVNDFVRGESNNKDCPSRFHVEARRRRPPTMNCKPKVDGILEYILYWCSFGPDDYRKGGNVRPSRPIAEKRKTPAGRPNTKRGCVCHFIVKRLIVEPSVALVIYNHNKHVDKKGMPCHGSMDKMAVGTKAMFAPYISDELRLQVMSLLYVGIPVETIMQRHTEMVEKQGGPSNRDDLLTHRYVRRLERKIRRSVYELDDDDAISIGLWVENNQDCVFFYEDFSDTDTFVLGIQTDWQLQQMIQFGSHSLMASDSKFGTNKLKYPVHSILVFDQHKNAIPVAWIITPNFAHGEIYKWVGALYDRAHTKDPTWQLGGFIIDGPLTDVRTIREVFHCPVLISLWRIRHAWHKNLVNKCSDIEKRSTMAKRLGDAISIICRGTGDVELFEAFLQDFVECAGFLDYFKAVWLPRLGAWITVLKATALASAQVASAIESYHHLLKLRLLNEADESVYWRADWLVDKLGTKVHSYYWLDEFSGKNSFSRYWRSEWSSGPNPWCQGMQIPDSDVVIEGNYASVVSQKNKEKSHVVLNPGSEFALCDCSWSMKGNLCKHVIKSAKVCRDRGLALPSLAMFHYYQALANLVHCPPSDTLISDHAMALAVSVKTQLDAVLCAVNGSSSIRPGFQDPQSTSKTREAEIEEANSENGVCTSQPQPGAGDDEDQAIRTGKRRKLGDASGDTEDGSIYQDSLARKKCKSGEASGDDEEASTEEGSRACESRKPGEASTNNEEVSIGQGSRDHEKRKSGEPPGNEGTSATQATEPSETETSQATNGLVRSLLPSSECT

SEQ ID NO: 170833 - protein, 668 aa, Zea Mays
MPCHGSMDKMAVGTKAMFAPYISDELRLQVMSLLYVGIPVETIMQRHTEMVEKQGGPSNRDDLLTHRYVRRLERKIRRSVYELDDDDAISIGLWVENNQDCVFFYEDFSDTDTFVLGIQTDWQLQQMIQFGSHSLMASDSKFGTNKLKYPVHSILVFDQHKNAIPVAWIITPNFAHGEIYKWVGALYDRAHTKDPTWQLGGFIIDGPLTDVRTIREVFHCPVLISLWRIRHAWHKNLVNKCSDIEKRSTMAKRLGDAISIICRGTGDVELFEAFLQDFVECAGFLDYFKAVWLPRLGAWITVLKATALASAQVASAIESYHHLLKLRLLNEADESVYWRADWLVDKLGTKVHSYYWLDEFSGKNSFSRYWRSEWSSGPNPWCQGMQIPDSDVVIEGNYASVVSQKNKEKSHVVLNPGSEFALCDCSWSMKGNLCKHVIKSAKVCRDRGLALPSLAMFHYYQALANLVHCPPSDTLISDHAMALAVSVKTQLDAVLCAVNGSSSIRPGFQDPQSTSKTREAEIEEANSENGVCTSQPQPGAGDDEDQAIRTGKRRKLGDASGDTEDGSIYQDSLARKKCKSGEASGDDEEASTEEGSRACESRKPGEASTNNEEVSIGQGSRDHEKRKSGEPPGNEGTSATQATEPSETETSQATNGLVRSLLPSSECT

SEQ ID NO: 170834 - protein, 818 aa, Zea Mays
MTRWDEILTLPVQNPPSLEFSAADISWSMVEGWRDSMDRLALIPYSRVNDFVRGESNNKDCPSRFHVEARRRRPPTMNCKPKVDGILEYILYWCSFGPDDYRKGGNVRPSRPIAEKRKTPAGRPNTKRGCVCHFIVKRLIVEPSVALVIYNHNKHVDKKGMPCHGSMDKMAVGTKAMFAPYISDELRLQVMSLLYVGIPVETIMQRHTEMVEKQGGPSNRDDLLTHRYVRRLERKIRRSVYELDDDDAISIGLWVENNQDCVFFYEDFSDTDTFVLGIQTDWQLQQMIQFGSHSLMASDSKFGTNKLKYPVHSILVFDQHKNAIPVAWIITPNFAHGEIYKWVGALYDRAHTKDPTWQLGGFIIDGPLTDVRTISLWRIRHAWHKNLVNKCSDIEKRSTMAKRLGDAISIICRGTGDVELFEAFLQDFVECAGFLDYFKAVWLPRLGAWITVLKATALASAQVASAIESYHHLLKLRLLNEADESVYWRADWLVDKLGTKVHSYYWLDEFSGKNSFSRYWRSEWSSGPNPWCQGMQIPDSDVVIEGNYASVVSQKNKEKSHVVLNPGSEFALCDCSWSMKGNLCKHVIKSAKVCRDRGLALPSLAMFHYYQALANLVHCPPSDTLISDHAMALAVSVKTQLDAVLCAVNGSSSIRPGFQDPQSTSKTREAEIEEANSENGVCTSQPQPGAGDDEDQAIRTGKRRKLGDASGDTEDGSIYQDSLARKKCKSGEASGDDEEASTEEGSRACESRKPGEASTNNEEVSIGQGSRDHEKRKSGEPPGNEGTSATQATEPSETETSQATNGLVRSLLPSSECT

SEQ ID NO: 170835 - protein, 586 aa, Zea Mays
MTTGSISLGGSASTTISAVGRPGQRVSAWSFKQVGDFSEDNRSGINHSLHRISAIRNRKAQIIGLTCRVGRAISGSAEMIRDLVVSGGSILVIGPPGVGKTTLIREIARILADEGKKRVIIVDTSNEIGGDGDVPHSGIGRARRMQVPKVTMQHNVMIEAVENHMPEVIVIDEIGTELEAMAATTIAQRGVQLVGTAHGVTIESIIKNPCLQMLVGGIESVTLGDEEAKKRKVQKTILERKGPPTFLCAVEMISKTECRVHHRLDATVDAILAGKPPKFEARKMHNKSTEFEMPLVIPDREYEIESLPLYQEVMVTRSLSSDGNFSDDFAASRQTKSKSMPSEDNFGDNFVYTRKAKGNKPVHGKSLVQVYTYQISEADILQVATMMGFDDELDVTDDIGAADVILASSSEMKQNPWIHNVAKYHKLPIFVVKTNTMAQIVKAIRMIVGRDNTSSSKQPEVMEGEIEIEDDAPKRKPSLEEIDALEEARLAIEYIVIPGGEPVELLPRCSEIVARQLELVESYQLLAETFGSDSNSRLQILPMKITKRGSSKDNGASKPTKQTGSDLIVSENGGGSSFSRLPFLPK

SEQ ID NO: 170836 - protein, 351 aa, Zea Mays
MLRALNPSPSQLRARPACRAAPRRRPRGAWARPRAAAVPQQPPVRRPSGDRLRAPSRGAAAADQLPAPDVGAAAPGARGELEAFLEIVPARMRRGLARHQELRDLVEVIMDLGRRPIARFPSGDWAISDQPVTADDLRQAVAKVGDFSEDNRSGINHSLHRISAIRNRKAQIIGLTCRVGRAISGSAEMIRDLVVSGGSILVIGPPGVGKTTLIREIARILADEGKKRVIIVDTSNEIGGDGDVPHSGIGRARRMQVPKVTMQHNVMIEAVENHMPEVIVIDEIGTELEAMAATTIAQRGVQLVGTAHGVTIESIIKNPCLQMLVGGIEVQFRPLLLFNQLICMLLDLATF

SEQ ID NO: 170837 - protein, 609 aa, Zea Mays
MLRALNPSPSQLRARPACRAAPRRRPRGAWARPRAAAVPQQPPVRRPSGDRLRAPSRGAAAADQLPAPDVGAAAPGARGELEAFLEIVPARMRRGLARHQELRDLVEVIMDLGRRPIARFPSGDWAISDQPVTADDLRQAVAKVGDFSEDNRSGINHSLHRISAIRNRKAQIIGLTCRVGRAISGSAEMIRDLVVSGGSILVIGPPGVGKTTLIREIARILADEGKKRVIIVDTSNEIGGDGDVPHSGIGRARRMQVPKVTMQHNVMIEAVENHMPEVIVIDEIGTELEAMAATTIAQRGVQLVGTAHGVTIESIIKNPCLQMLVGGIESVTLGDEEAKKRKVQKTILERKGPPTFLCAVEMISKTECRVHHRLDATVDAILAGKPPKFEARKMHNKSTEFEMPLVIPDREYEIESLPLYQEVMVTRSLSSDGNFSDDFAASRQTKSKSMPSEDNFGDNFVYTRKAKGNKPVHGKSLVQVYTYQISEADILQVATMMGFDDELDVTDDIGAADVILASSSEMKQNPWIHNVAKYHKLPIFVVKTNTMAQIVKAIRMIVGRDNTSSSKQPEVMEGEIEIEDDAPKRKPSLEEIDALEVITFTTYLPLKDN

SEQ ID NO: 170838 - protein, 403 aa, Zea Mays
MSDLLPEDVLVNIIGRLAPRYLAISRCVCKTWCTTIDAHNLLRMDLLPHSVSGLFINFNELSMSEFLSRPSKGPAISVNPATRQWALLPPRPSPNMPEHFCHGMYLVFDPTLSSHYEVFLIPQVSYNSNLDPAIEELEWPPSPCIVQVLSSRTKLWEERLFVREGEAAGNVADIRLDFQAVQENAVYWRGVLYVNYQSKFIMRISLSNDKYQVIKPPVDFEWFEFENESRLSKNLYLGKSEKGVYCALRYPSTVSFSIYILDESDGKTEWIMKPHYYLGSQGIDGPGPWTLQDINYNWDTQYEDSMEEKFEWDSDSDNVVENRSNGGYPCLPRIELLGFHPYKDVVFLSDTLRRGLAYHLDSSKIQDLGNLHPTYYGTEQGIQPFLLTAFPYTPWRGWFPEDT

SEQ ID NO: 170839 - protein, 231 aa, Zea Mays
MATFALHRTSVVIKDKVVGGEVVCSRRRGCRISLSNDKYQVIKPPVDFEWFEFENESRLSKNLYLGKSEKGVYCALRYPSTVSFSIYILDESDGKTEWIMKPHYYLGSQGIDGPGPWTLQDINYNWDTQYEDSMEEKFEWDSDSDNVVENRSNGGYPCLPRIELLGFHPYKDVVFLSDTLRRGLAYHLDSSKIQDLGNLHPTYYGTEQGIQPFLLTAFPYTPWRGWFPEDT

SEQ ID NO: 170840 - protein, 492 aa, Zea Mays
MILELKFISDLIEYVRLILAEIRGVERSFICNDTGALLQDAQTRFQMYNDTIVKFSVRELSEVKRVASHHLRLIGFKPLDCLKDYHNLRPSTFIYPSDERIFGSTCVFVALHSSMLRLGRFALAFYGNPTRPQLIALVAQEEVTSSGRQFEPPGMHMIYLPYSDDIRYPEEVHVTSDDAPRATDEQIKKASNIFKRIDLINFSACQFANPEIYLQSQGQLPGVANAIEEFKTSVYGENYDQEEAEAAAGKASRGNASKKRKEVTDAAAQISAAYDWAELADNGKLKEMTTVELRSYLTAHDLPVSGKKDVLISRILTHLGFMLRVLLHAAKWLWLQMSLETGEADEVMCWAILVIYRHCKMILLQSPSRFLLQILQDRVLSGEKGMDIDCHTVEFDDVRYHIQFSMRNPKVMVLSVALPLPPPEAILYDGLPLGAIEAIKAAYGPVVQILDPPKDGFDLTMKINLTKLPLDEGSRVPFSRAKEYYLDTNCIY

SEQ ID NO: 170841 - protein, 812 aa, Zea Mays
MTEYLPSAGDKLEDMTNQLRKRIMKKRRIKTLSFAITNDVCIEVNTYALVRPTTTGTITWLDSLSNLPLKVERSFICNDTGALLQDAQTRFQMYNDTIVKFSVRELSEVKRVASHHLRLIGFKPLDCLKDYHNLRPSTFIYPSDERIFGSTCVFVALHSSMLRLGRFALAFYGNPTRPQLIALVAQEEVTSSGRQFEPPGMHMIYLPYSDDIRYPEEVRTNVVFQLYDLCKLIFLLGLQVHVTSDDAPRATDEQIKKASNIFKRIDLINFSACQFANPALQRHYGILEALALGEDEMPDIKDETLPDEEGLSKPGVANAIEEFKTSVYGENYDQEEAEAAAGKASRGNASKKRKEVTDAAAQISAAYDWAELADNGKLKEMTTVELRSYLTAHDLPVSGKKDVLISRILTHLGFMLRVLLHAAKWLWLQMSLETGEADEVMCWAILVIYRVTSWALGTRFRFQPARPQPALEAAQPRLRPQTARPHSASAGDLLSAQPRLRQCDRPPAPSGEKGMDIDCHTVEFDDVRYHIQFSMRNPKVMVLSVALPLPPPEAILYDGLPLGAIEAIKAAYGPVVQILDPPKDGFDLTMKINLTKLPLDEEQRNTILTQIASIREVVLGAPLKLLLKHLASKTVAPNVNNLVALVHRPNESFFLAPQADKVTIVYPMRFQDSIDIVLATSFLQEFVEARRTAALNNVPSCMWSPVPPLELKGVSADALNANAGFVTFVVYPRHVEGKKLDRTVWNLLTFHAYVSYHVKCSEGFMHTRMRRRVESLIQALDRAKSDAEKLKKLVHGGSFKRLSLKNEGDSRF

SEQ ID NO: 170842 - protein, 928 aa, Zea Mays
MDLDPEGIFRDDSDEDEDSVQEREANKEMVVYLVDASPKMFTPATTQDNEKQETHFHTIVNCITESLKTQIIGRSYDEVAICFFNTKEKKNLQDSAGVYVYNVGDREQLDRPTAKLIKDFSLIEDSFMSTIGSRYGITAGSRENTLYNALWVAQALLRKGSVKTDAQDLGLSIELLPLSPPDDQFNMSLFYADLIGLDGDEMTEYLPSAGDKLEDMTNQLRKRIMKKRRIKTLSFAITNDVCIEVNTYALVRPTTTGTITWLDSLSNLPLKVERSFICNDTGALLQDAQTRFQMYNDTIVKFSVRELSEVKRVASHHLRLIGFKPLDCLKDYHNLRPSTFIYPSDERIFGSTCVFVALHSSMLRLGRFALAFYGNPTRPQLIALVAQEEVTSSGRQFEPPGMHMIYLPYSDDIRYPEEVHVTSDDAPRATDEQIKKASNIFKRIDLINFSACQFANPEIYLQSQGQLPGVANAIEEFKTSVYGENYDQEEAEAAAGKASRGNASKKRKEVTDAAAQISAAYDWAELADNGKLKEMTTVELRSYLTAHDLPVSGKKDVLISRILTHLGFMLRVLLHAAKWLWLQMSLETGEADEVMCWAILVIYRVTSWALGTRFRFQPARPQPALEAAQPRLRPQTARPHSASAGDLLSAQPRLRQCDRPPAPSGEKGMDIDCHTVEFDDVRYHIQFSMRNPKVMVLSVALPLPPPEAILYDGLPLGAIEAIKAAYGPVVQILDPPKDGFDLTMKINLTKLPLDEEQRNTILTQIASIREVVLGAPLKLLLKHLASKTVAPNVNNLVALVHRPNESFFLAPQADKVTIVYPMRFQDSIDIVLATSFLQLEKQRERWVPTALTRHGHDVTVLPKHVRVSEQDRGSNILSGLRRQCKGEAALQRVRCEGDTSWTKQRSVKCVDSVVPDVWTRRRPEEVAQ

SEQ ID NO: 170843 - protein, 346 aa, Zea Mays
MILELKFISDLIEYVRLILAEIRGVERSFICNDTGALLQDAQTRFQMYNDTIVKFSVRELSEVKRVASHHLRLIGFKPLDCLKDYHNLRPSTFIYPSDERIFGSTCVFVALHSSMLRLGRFALAFYGNPTRPQLIALVAQEEVTSSGRQFEPPGMHMIYLPYSDDIRYPEEVHVTSDDAPRATDEQIKKASNIFKRIDLINFSACQFANPALQRHYGILEALALGEDEMPDIKDETLPDEEGLSKPGVANAIEEFKTSVYGENYDQEEAEAAAGKASRGNASKKRKEVTDAAAQISAAYDWAELADNGKLKEMTTVELRSYLTAHDLPVSGKKDVLISRILTHLGK

SEQ ID NO: 170844 - protein, 547 aa, Zea Mays
MDLDPEGIFRDDSDEDEDSVQEREANKEMVVYLVDASPKMFTPATTQDNEKQETHFHTIVNCITESLKTQIIGRSYDEVAICFFNTKEKKNLQDSAGVYVYNVGDREQLDRPTAKLIKDFSLIEDSFMSTIGSRYGITAGSRENTLYNALWVAQALLRKGSVKTDAQDLGLSIELLPLSPPDDQFNMSLFYADLIGLDGDEMTEYLPSADLDGVYLMAHILVSSGTRLGIAKPHEYMILELKFISDLIEYVERSFICNDTGALLQDAQTRFQMYNDTIVKFSVRELSEVKRVASHHLRLIGFKPLDCLKDYHNLRPSTFIYPSDERIFGSTCVFVALHSSMLRLGRFALAFYGNPTRPQLIALVAQEEVTSSGRQFEPPGMHMIYLPYSDDIRYPEEVHVTSDDAPRATDEQIKKASNIFKRIDLINFSACQFANPEIYLQSQGQLPGVANAIEEFKTSVYGENYDQEEAEAAAGKASRGNASKKRKEVTDAAAQISAAYDWAELADNGKLKEMTTVELRSYLTAHDLPVSGKKDVLISRILTHLGK

SEQ ID NO: 170845 - protein, 336 aa, Zea Mays
MILELKFISDLIEYVERSFICNDTGALLQDAQTRFQMYNDTIVKFSVRELSEVKRVASHHLRLIGFKPLDCLKDYHNLRPSTFIYPSDERIFGSTCVFVALHSSMLRLGRFALAFYGNPTRPQLIALVAQEEVTSSGRQFEPPGMHMIYLPYSDDIRYPEEVHVTSDDAPRATDEQIKKASNIFKRIDLINFSACQFANPALQRHYGILEALALGEDEMPDIKDETLPDEEGLSKPGVANAIEEFKTSVYGENYDQEEAEAAAGKASRGNASKKRKEVTDAAAQISAAYDWAELADNGKLKEMTTVELRSYLTAHDLPVSGKKDVLISRILTHLGK

SEQ ID NO: 170846 - protein, 378 aa, Zea Mays
MTNQLRKRIMKKRRIKTLSFAITNDVCIEVNTYALVRPTTTGTITWLDSLSNLPLKVERSFICNDTGALLQDAQTRFQMYNDTIVKFSVRELSEVKRVASHHLRLIGFKPLDCLKDYHNLRPSTFIYPSDERIFGSTCVFVALHSSMLRLGRFALAFYGNPTRPQLIALVAQEEVTSSGRQFEPPGMHMIYLPYSDDIRYPEEVHVTSDDAPRATDEQIKKASNIFKRIDLINFSACQFANPALQRHYGILEALALGEDEMPDIKDETLPDEEGLSKPGVANAIEEFKTSVYGENYDQEEAEAAAGKASRGNASKKRKEVTDAAAQISAAYDWAELADNGKLKEMTTVELRSYLTAHDLPVSGKKDVLISRILTHLGK

SEQ ID NO: 170847 - protein, 90 aa, Zea Mays
MSKELGQEEFGIYNLGSPSTNSPSLPSLGSSNIVAMTSCGRENGSMHGLHSGLLTSMSPFREASFLGLSSTLPQSLSSPIGIASAATHSK

SEQ ID NO: 170848 - protein, 180 aa, Zea Mays
MSHCTTTCGSSKPTTSSTQHMSKELGQEEFGIYNLGSPSTNSPSLPSLGSSNIVAMTSCGRENGSMHGLHSGLLTSMSPFREASFLGLSSTLPQSLSSPIGIASAATHSLGAIHPHSLPDVHNGANNGTPYNLNTITPVGVNKNSRTAEAVDNRHLHKVGSGNLNGHSFDRAGEGVVKWW

SEQ ID NO: 170849 - protein, 61 aa, Zea Mays
MYAVGSLGAPVCVAVSMEQHGRRILPSHENSLGWSLASFHCCCCYNNNNNILRSENRLDII

SEQ ID NO: 170850 - protein, 374 aa, Zea Mays
MAASSRPLVSVKALEGDMVTDAPGIALPPVFGAPIRPDVVRFTHKLLSCNKRQPYAVSRRAGHQTSAESWGTGRAVSRIPRVPGGGTHRAGQGAFGNMCRGGRMFAPTKIWRKWHRRVNVNLRRVAVASALAATAVPALVQARGHRIETVPEMPLVISDSAESIEKTSQALKILKQVGAYADAEKAKDSVGIRPGKGKMRNRRYINRKGPLVVYGTEGSKVVKAFRNLPGVDVANVERLNLLDLAPGGHLGRFVIWTESAFKKLEEVYGSFDAPSQKKKGFVLPRPKMANADLGRIINSDEVQSVVKPLNKEVKRREKRKNPLKNMAAVLKLNPYLGTARKMATLAEAARVKARKEKLDSKRTKLTSNVTEINV

SEQ ID NO: 170851 - protein, 306 aa, Zea Mays
MTISEQGRTFQEADKDEQTVTTINRSQSHDGSKPSNKDGNRADERSGNYNSEDRNGPGGSSRNNPIQVDVNLTKPVNVDGNTGGDNAEAGMSRTGEGRHLPSNDSVSTNGKDLGVGSADNGQPQRIRKGRGFTQKYGYARRYRTPSPERPPVRPRYDGGRDDRWNNFNRYERNGPYSRRSPVRRYHGSPRANSPSRYPRRERMRSRSRSPVRRHDRGGYHRPSPRRSRSPAEPRQNVNDRPRSGHGGGDPDHSPPANRSRSKSRDPLGPRSPDAAPAKRESSRYNRRRSSSSRSSSPDGNKGLVSY

SEQ ID NO: 170852 - protein, 642 aa, Zea Mays
MPKVKNPHVFMDISISGGSAERITFELLANVVPKTAENFRALCESGLGASTQKPLYYKGTHIHRIVKGFVVQGGDFSRGDGKGGESIYGGKFPDENFRLLHNQPGVLSMANSGPDTNGSQFFITFKALPHLDGKHVVFGKVVSGIALLKKLEAVGSETGNPSYQVKIVDCGEVSNTNSPDLLKGEKEKKLRTADGNSTAEGRAKLKKTSGDHKQRKKRKHYSSDSYSSDTSDSLSYSSDSGSDSESDSSMDTSSSSDHRRKRRKGSKKDKRKPTKRKGKHTRSKRKSRGSKRRSRRSHGSSSDDSVSSKTDNSSSDSEKGGHHTKRSLPKDKESTKMTISEQGRTFQEADKDEQTVTTINRSQSHDGSKPSNKDGNRADERSGNYNSEDRNGPGGSSRNNPIQVDVNLTKPVNVDGNTGGDNAEAGMSRTGEGRHLPSNDSVSTNGKDLGVGSADNGQPQRIRKGRGFTQKYGYARRYRTPSPERPPVRPRYDGGRDDRWNNFNRYERNGPYSRRSPVRRYHGSPRANSPSRYPRRERMRSRSRSPVRRHDRGGYHRPSPRRSRSPAEPRQNVNDRPRSGHGGGDPDHSPPANRSRSKSRDPLGPRSPDAAPAKRESSRYNRRRSSSSRSSSPDGNKGLVSY

SEQ ID NO: 170853 - protein, 114 aa, Zea Mays
MDTSSSSDHRRKRRKGSKKDKRKPTKRKGKHTRSKRKSRGSKRRSRRSHGSSSDDSVSSKTDNSSSDSEKGGHHTKRSLPKGQFERIYFWPVSLPCLAKEGMLCWIFSAAIWFI

SEQ ID NO: 170854 - protein, 161 aa, Zea Mays
MPKVKNPHVFMDISISGGSAERITFELLANVVPKTAENFRALCTGESGLGASTQKPLYYKGTHIHRIVKGFVVQGGDFSRGDGKGGESIYGGKFPDENFRLLHNQPGVLSMANSGPDTNGSQFFITFKALPHLDGYCFLFFSHLALLDSQFSNHNQTLILS

SEQ ID NO: 170855 - protein, 595 aa, Zea Mays
MSLDFKLILDELNRRFDELEVRWDRRFSPSAYLDLPPTLLSVHQSSDTSASMPPTPTAAVGTVVIADNWGGCFDDDKEYYAAPSVVADNWGGLFEGCDADGDISSNLRDSDPDEAFVTSHSDKALFDNHHAGELIATGIEYGSYNSVHGSGGAALSQLAHSNTNFAMPTTCSTWGLTEHAMAEAVHCRALWLPRREPLPRLLRAFLTLERLDLSACASLDDASLAASVGDGPAAATTLWWCASATGDMESTLKGIRGSDAPFVMDLNDAATVAGGIEDTYGEDRAIEEQLATPLDTLLCARLDPVKSHIGCLLLQYLKLSPTLIGAKVVFEEMQQSTILRDAHTAICTTPDPAIDTHFANKWRMRCSRNSTSTAAAVLELDPGSCTTCDTSYYRHVVQRHGLLRFDASLTRAYVMQVAFGRFDGHFFHDFTIIKLKTDSSSSPLECSTKCLSHDIGHDSRNYAHKLQNAVTHGITAAGHDILQVGLASTPAMFNIILIEDERSHLPIDAICSPDELIKTSRLCALEMVHCRKPWMRSLGNTDRLGLFSEARAVLNAARQQAMKIALNMPQHQTFFFVSNLCFLCSYESLAIFLNP

SEQ ID NO: 170856 - protein, 802 aa, Zea Mays
MSLDFKLILDELNRRFDELEVRWDRRFSPSAYLDLPPTLLSVHQSSDTSASMPPTPTAAVGTVVIADNWGGCFDDDKEYYAAPSVVADNWGGLFEGCDADGDISSNLRDSDPDEAFVTSHSDKALFDNHHAGELIATGIEYGSYNSVHGSGGAALSQLAHSNTNFAMPTTCSTWGLTEHAMAEAVHCRALWLPRREPLPRLLRAFLTLERLDLSACASLDDASLAASVGDGPAAATTLWWCASATGDMESTLKGIRGSDAPFVMDLNDAATVAGGIEDTYGEDRAIEEQLATPLDTLLCARLDPVKSHIGCLLLQYLKLSPTLIGAKVVFEEMQQSTILRDAHTAICTTPDPAIDTHFANKWRMRCSRNSTSTAAAVLELDPGSCTTCDTSYYRHVVQRHGLLRFDASLTRAYVMQVAFGRFDGHFFHDFTIIKLKTDSSSSPLECSTKCLSHDIGHDSRNYAHKLQNAVTHGITAAGHDILQVGLASTPAMFNIILIEDERSHLPIDAICSPDELIKTSRLCALEMVHCRKPWMRSLGNTDRLGLFSEARAVLNAARQQAMKIALNMPQHQTCIDVMGEGILYGGRPGVLKEAIVCSIPGVMVFTWTVRNFSGVTHLYSQHDRGVVWLIVAPDCYFIQHNERMHMIFYGFDLLSLQHFHGHFIQADMFAPWDGQEITQFLFSELPIYWQQSHGMNSLLFFRKLKYSSSVEIFCGAQFSFPNILLPKSWSQELATNIERHLLSEMLEVANGYNFHELHLMLASIGVTQMISCGKYLIWIIGLLTPWDPGRMVFDLKFVMLLA

SEQ ID NO: 170857 - protein, 262 aa, Zea Mays
MPAMDSGSIPCSWLELRSSTVSSRSQPSSCGRQERRPELSATSSASVPAMRPTLRGMHPRRRRLASTSTDAGELPRLSGSSKSKALSLRKTASSGLSKSAGGTGPRSSLNRRSRILGRDSGSVPANRFELRCSSARSASRPSSSGSVPARSPWFRSTPATVCSRGSAAAVAGRRRPPTTTTGAAGPPSPPPARPPPPSSSWRGALCLWLALPLPLPLPFGVPLSCCLFVLRLCAFALIADASLRVRCLYTRTKTRFGFGCHL

SEQ ID NO: 170858 - protein, 186 aa, Zea Mays
MFFFITNKLGFTPEFLGRVKLVTSFASLLGVGLYNYFLKEVPLRKIFLVTTIIGSALGMTQVLLVTGLNRKFGISDEWFSIGDSLIITVLGQASFMPVLVLAAKLCPPGMEATLFATLMSISNAGSVTGGLVGAGLTRIFGVTRDTFGNLPLLIVVCNLSSLLPLPLLSLLPEESGDTDNGETKNI

SEQ ID NO: 170859 - protein, 270 aa, Zea Mays
MASGGSAARDAYDEEAAVRRPLELDSRDAAASSSDHWPGGNAMPRYQVGLTKDDSSSRHSEWRQPSTDDVRKSKLGPRYFTAFGVDLSPDNMAVAIVYFVQGVLGLARLAVSFYLKDDLHLDPAETAVVSGFSSLPWLIKPLYGFISDSIPLFGYRRRSYLFLSGLLGALSWSLMATVVSSKYSAASSILLGSLSVAFSDVVVDSMVVERARGESQSTSGSLQSLCWGSSAFGGIVSAYFSGSLVDTYGICLWCNSVFTPDDICCCSSCK

SEQ ID NO: 170860 - protein, 254 aa, Zea Mays
MASGGSAARDAYDEEAAVRRPLELDSRDAAASSSDHWPGGNAMPRYQVGLTKDDSSSRHSEWRQPSTDDVRKSKLGPRYFTAFGVDLSPDNMAVAIVYFVQGVLGLARLAVSFYLKDDLHLDPAETAVVSGFSSLPWLIKPLYGFISDSIPLFGYRRRSYLFLSGLLGALSWSLMATVVSSKYSAASSILLGSLSVAFSDVVVDSMVVERARGESQSTSGSLQSLCWGSSAFGGIVSAYFSGSLVDTYGVSSCK

SEQ ID NO: 170861 - protein, 706 aa, Zea Mays
MPELRSNTRQARLRSKKLDDLQPGEPLAKPVSPALPSARKRAPTRAARGRKGAAGRGVPPAPKPRRKGVDIVVLEADPACETPLKAFKGLEVAAAAPKNLPLKQVAEVGVPKMNGESGEKIVGAEDESTATPVPERVQVGNSPEYITDRKLGKGGFGQVYVGRRVSGGAARTGPDAYEVALKFEHRNSKGCNYGPPYEWQVYNTLNGCYGIPSVHYKGRQGEYYILVMDMLGPSLWDVWNSMGQAMTPNMAACIAVESISILEKLHSKGFVHGDVKPENFLLGQPGSPEDKKLYLIDLGLASKWRENNGHHVDYDQRPDIFRGTIRYASVHAHLGRTGSRRDDLESLAYTLIFLIRGRLPWQGYQGDTKSFLVCKKKMATSPEMLCCYCPAPFKQFLEIVTNMKFDEEPNYAKLISLFDGLIEAPASRQIRIDGALKVGQKRGRLVADLEEDEQPKKKVRLGSPAAQWISVYNARRPMKQRYHYNVADSRLSQHIEKGNDDGLYISSVASSANLWALIMDAGTGFCSQVYELSPVFLHKDWIMEQWEKSYYITAIAGSSNGSSLVVMSKGTPYTQQSYKVSESFPYKWINKKWKEGFHVTSMATAGNRWGVVMSRNSGFSTQVVELDFLYPSEGIHRRWESGYRITSTAATNDQAAFILSMPKRKPMDETQETLRTSAFPSSHVKVSLASGFPLIQTNSTNSISET

SEQ ID NO: 170862 - protein, 535 aa, Zea Mays
MLVEGFLVVLLALVLMHMSKGCNYGPPYEWQVYNTLNGCYGIPSVHYKGRQGEYYILVMDMLGPSLWDVWNSMGQAMTPNMAACIAVESISILEKLHSKGFVHGDVKPENFLLGQPGSPEDKKLYLIDLGLASKWRENNGHHVDYDQRPDIFRGTIRYASVHAHLGRTGSRRDDLESLAYTLIFLIRGRLPWQGYQGDTKSFLVCKKKMATSPEMLCCYCPAPFKQFLEIVTNMKFDEEPNYAKLISLFDGLIEAPASRQIRIDGALKVGQKRGRLVADLEEDEQPKKKVRLGSPAAQWISVYNARRPMKQRYHYNVADSRLSQHIEKGNDDGLYISSVASSANLWALIMDAGTGFCSQVYELSPVFLHKDWIMEQWEKSYYITAIAGSSNGSSLVVMSKGTPYTQQSYKVSESFPYKWINKKWKEGFHVTSMATAGNRWGVVMSRNSGFSTQVVELDFLYPSEGIHRRWESGYRITSTAATNDQAAFILSMPKRKPMDETQETLRTSAFPSSHVKEKWAKNLYIASICFGRTVC

SEQ ID NO: 170863 - protein, 477 aa, Zea Mays
MDMLGPSLWDVWNSMGQAMTPNMAACIAVESISILEKLHSKGFVHGDVKPENFLLGQPGSPEDKKLYLIDLGLASKWRENNGHHVDYDQRPDIFRGTIRYASVHAHLGRTGSRRDDLESLAYTLIFLIRGRLPWQGYQGDTKSFLVCKKKMATSPEMLCCYCPAPFKQFLEIVTNMKFDEEPNYAKLISLFDGLIEAPASRQIRIDGALKVGQKRGRLVADLEEDEQPKKKVRLGSPAAQWISVYNARRPMKQRYHYNVADSRLSQHIEKGNDDGLYISSVASSANLWALIMDAGTGFCSQVYELSPVFLHKDWIMEQWEKSYYITAIAGSSNGSSLVVMSKGTPYTQQSYKVSESFPYKWINKKWKEGFHVTSMATAGNRWGVVMSRNSGFSTQVVELDFLYPSEGIHRRWESGYRITSTAATNDQAAFILSMPKRKPMDETQETLRTSAFPSSHVKEKWAKNLYIASICFGRTVC

SEQ ID NO: 170864 - protein, 133 aa, Zea Mays
MEQPLSHLSVQNKREKQVLALLSKLDVQNVHFTESAPGDANQSVHIVADEGLEAYLPLADMVDVSEEVKRLSKRLSKMQSEYDALVARLNSPSFVEKAPEDIVRGVREKASEADEKISLTKNRLTFLQSTITT

SEQ ID NO: 170865 - protein, 196 aa, Zea Mays
MSKTLGNVIDPLDTIKEYGTDALRFTLSLGTAGQDLNLSTERLTSNKAFTNKLWNAGKFLLQNLPDKNDVSAWDVLLSNKFDSEASLQKLPLPECWVVTGLHELIDKVSRSYDKFFFGDAAREIYDYFWGDFADWYIEASKTRLYHSSDKIAAATAQSVLVYVFENILKLLHPFMPFVTEELWQKTSTYGYSLAYH

SEQ ID NO: 170866 - protein, 373 aa, Zea Mays
MSKTLGNVIDPLDTIKEYGTDALRFTLSLGTAGQDLNLSTERLTSNKAFTNKLWNAGKFLLQNLPDKNDVSAWDVLLSNKFDSEASLQKLPLPECWVVTGLHELIDKVSRSYDKFFFGDAAREIYDYFWGDFADWYIEASKTRLYHSSDKIAAATAQSVLVYVFENILKLLHPFMPFVTEELWQAFPYRKQALMVTPWPTTDLPKDLRSIKRFQNLQSLIRGIRNVRAEYSVEPAKRISASVVATADVLEYVSREKQVLALLSKLDVQNVHFTESAPGDANQSVHIVADEGLEAYLPLADMVDVSEEVKRLSKRLSKMQSEYDALVARLNSPSFVEKAPEDIVRGVREKASEADEKISLTKNRLTFLQSTITT

SEQ ID NO: 170867 - protein, 235 aa, Zea Mays
MVMMGIEFTGSVPFSYVYLHGLIRDAEGRKMSKTLGNVIDPLDTIKEYGTDALRFTLSLGTAGQDLNLSTERLTSNKAFTNKLWNAGKFLLQNLPDKNDVSAWDVLLSNKFDSEASLQKLPLPECWVVTGLHELIDKVSRSYDKFFFGDAAREIYDYFWGDFADWYIEASKTRLYHSSDKIAAATAQSVLVYVFENILKLLHPFMPFVTEELWHFHTENKHLWLLPGLPLTFLKI

SEQ ID NO: 170868 - protein, 369 aa, Zea Mays
MVMMGIEFTGSVPFSYVYLHGLIRDAEGRKMSKTLGNVIDPLDTIKEYGTDALRFTLSLGTAGQDLNLSTERLTSNKAFTNKLWNAGKFLLQNLPDKNDVSAWDVLLSNKFDSEASLQKLPLPECWVVTGLHELIDKVSRSYDKFFFGDAAREIYDYFWGDFADWYIEASKTRLYHSSDKIAAATAQSVLVYVFENILKLLHPFMPFVTEELWQAFPYRKQALMVTPWPTTDLPKDLRSIKRFQNLQSLREKQVLALLSKLDVQNVHFTESAPGDANQSVHIVADEGLEAYLPLADMVDVSEEVKRLSKRLSKMQSEYDALVARLNSPSFVEKAPEDIVRGVREKASEADEKISLTKNRLTFLQSTITT

SEQ ID NO: 170869 - protein, 226 aa, Zea Mays
MVMMGIEFTGSVPFSYVYLHGLIRDAEGRKMSKTLGNVIDPLDTIKEYGTDALRFTLSLGTAGQDLNLSTERLTSNKAFTNKLWNAGKFLLQNLPDKNDVSAWDVLLSNKFDSEASLQKLPLPECWVVTGLHELIDKVSRSYDKFFFGDAAREIYDYFWGDFADWYIEASKTRLYHSSDKIAAATAQSVLVYVFENILKLLHPFMPFVTEELWQKTSTYGYSLAYH

SEQ ID NO: 170870 - protein, 165 aa, Zea Mays
MMSLHGMSCCLISSTQKHHSRNCHCQNAGWLQDYMNSSIRYIEASKTRLYHSSDKIAAATAQSVLVYVFENILKLLHPFMPFVTEELWQAFPYRKQALMVTPWPTTDLPKDLRSIKRFQNLQSLENCASYIKERKKSHTKDGILLSKFPKDPTHNRRTLQTGTKT

SEQ ID NO: 170871 - protein, 128 aa, Zea Mays
MPFVTEELWQAFPYRKQALMVTPWPTTDLPKDLRSIKRFQNLQSLIRGIRNVRAEYSVEPAKRISASVVATADVLEYVSVSVQIHFVSDTFFLECAGELRILYKREEEKPYKRWHLAEQVPQGSYTQP

SEQ ID NO: 170872 - protein, 246 aa, Zea Mays
MDIMVRYFRMKGRPALWIPGTDHAGIATQLVVEKMLAAEGVKRTDMTREEFTKKVWEWKEKYGGTITNQIKRLGASCDWSRERFTLDEQLSRAVAEAFVRLHDKGLIYQGSYLVNWSPNLQTAVSDLEVEYSEEPGNLYFIKYRVAGGTRDDFMTIATTRPETIFGDVAIAVNPEDKRYAQYVGKLAIVPLTCGRHVPIIADRVSSKLNIFLLLSLFECRYGIHAGQTSLSLTRFEENISNMCISK

SEQ ID NO: 170873 - protein, 243 aa, Zea Mays
MVRYFRMKGRPALWIPGTDHAGIATQLVVEKMLAAEGVKRTDMTREEFTKKVWEWKEKYGGTITNQIKRLGASCDWSRERFTLDEQLSRAVAEAFVRLHDKGLIYQGSYLVNWSPNLQTAVSDLEVEYSEEPGNLYFIKYRVAGGTRDDFMTIATTRPETIFGDVAIAVNPEDKRYAQYVGKLAIVPLTCGRHVPIIADRVSSKLNIFLLLSLFECRYGIHAGQTSLSLTRFEENISNMCISK

SEQ ID NO: 170874 - protein, 269 aa, Zea Mays
MALARPSSALLSCSSSACLRRLNPLLLSAAACRRPAWAPRRVARRFSAAIASETDVFNSPEVAKSFDFTNEEKIYKWWESQGFFKPNFDRGGDPFVIPMPPPNVTGSLHMGHAMFVTLEDIMVRYFRMKGRPALWIPGTDHAGIATQLVVEKMLAAEGVKRTDMTREEFTKKVWEWKEKYGGTITNQIKRLGASCDWSRERFTLDEQLSRAVAEAFVRLHDKGLIYQGSYLVNWSPNLQTAVSDLEVEYSEEPGNLYFIKYRVAGGTRG

SEQ ID NO: 170875 - protein, 173 aa, Zea Mays
MVRYFRMKGRPALWIPGTDHAGIATQLVVEKMLAAEGVKRTDMTREEFTKKVWEWKEKYGGTITNQIKRLGASCDWSRERFTLDEQLSRAVAEAFVRLHDKGLIYQGSYLVNWSPNLQTAVSDLEVEYSEEPGNLYFIKYRVAGGTRDDFMTIATTRPETIFGDVAIAVNPEG

SEQ ID NO: 170876 - protein, 364 aa, Zea Mays
MALARPSSALLSCSSSACLRRLNPLLLSAAACRRPAWAPRRVARRFSAAIASETDVFNSPEVAKSFDFTNEEKIYKWWESQGFFKPNFDRGGDPFVIPMPPPNVTGSLHMGHAMFVTLEDIMVRYFRMKGRPALWIPGTDHAGIATQLVVEKMLAAEGVKRTDMTREEFTKKVWEWKEKYGGTITNQIKRLGASCDWSRERFTLDEQLSRAVAEAFVRLHDKGLIYQGSYLVNWSPNLQTAVSDLEVEYSEEPGNLYFIKYRVAGGTRDDFMTIATTRPETIFGDVAIAVNPEDKRYAQYVGKLAIVPLTCGRHVPIIADRVSSKLNIFLLLSLFECRYGIHAGQTSLSLTRFEENISNMCISK

SEQ ID NO: 170877 - protein, 261 aa, Zea Mays
MCHTCTYCLASKTGFQAFTRGAQDDCKWRRIPTFGDWNLRDDMPVTQYLQAGTSSSLCRRQRRTTTRICSRCPSVPAKPYNYKKVKYVVEVVSYINSSRNAGWGAFNSCRWQVNGSGQFCGVAEMIGPVDFDRSVDYWQQDKWSGQFPVKWHIIKDVPNNLLRHIILENNDNKPVTNSRDTQEVQLGWHDAGTYDKNIIEWPKCSGANGSLRFKVELKHGANADLVNAMKLIPPSTTSEPHPRSMSAAPSSPFHLSAPIRA

SEQ ID NO: 170878 - protein, 145 aa, Zea Mays
MGVLRSVAARRPSGRQRARRERRVTATTGPACRANQGNIYISSAPPLGFIRVLLLAQANSTPIQSWGGRLPPSLDLTCASSSSLALGRSHRPTTQATFLLLSGFRSQQKDASFQLTFRAAQRVLLCWCLANRRCCATIAEIRCSV

SEQ ID NO: 170879 - protein, 154 aa, Zea Mays
MGVLRSVAARRPSGRQRARRERRVTATTGPACRANQGNIYISSAPPLGFIRVLLLAQANSTPIQSWGGRLPPSLDLTCASSSSLALGRSHRPTTQATFLLLSGFRSQQKDASFQLTFRAAQRVLLCWCLANRSSSLTARDRQQVFFSLFSILPF

SEQ ID NO: 170880 - protein, 144 aa, Zea Mays
MSPLVRVLAPHATSTQAAQPRAVAMASKKDYPVKVSGVQILPDPVEPGKPATFKISASTDKTIEKGKLVIDVKYFFFYVHSETRDICGETSCPATGDFVLSHQQTLPGFTPPGSYTIYMKIVGDDNEELSCISFGFSIGFVASS

SEQ ID NO: 170881 - protein, 135 aa, Zea Mays
MLLSFEKMFIGVNGCSLKTNENLEVLRGIPVERLMIETDSPYCDIRNTHAGSQYVKSVWPSKKKEKYEPDSTVKGRNEPCLVRQVLEVVAGSKGISDIEGLSRTLYHNTCRLFFPQDLDASANAQLESGTAVQDC

SEQ ID NO: 170882 - protein, 190 aa, Zea Mays
MQKKYFEKQFELAEAVKLPMFLHMRAAGEDFCEIMTRNLHRFPGGVTHSFTDSAEDRDMLLSFEKMFIGVNGCSLKTNENLEVLRGIPVERLMIETDSPYCDIRNTHAGSQYVKSVWPSKKKEKYEPDSTVKGRNEPCLVRQVLEVVAGSKGISDIEGLSRTLYHNTCRLFFPQDLDASANAQLESVAAA

SEQ ID NO: 170883 - protein, 230 aa, Zea Mays
MQLGPLGFALFFQTRIGPPSLCSAGNGVHRRQAHRQVPPLPLPPHRPVSSPLYPGLTLCLHLALHPPPSPSAAVASTPPDIAVNFTDGMFKGIYHGKQCHAADIPAVLARAWAAGVDRIIVTGGSLKESREALQIAETDGRLFCTVGVHPTRCGEFEESGDPEGHFQALLALAKEGLDKVIQPCVRIGATESSRRSLLLVNVVWIMTDFSSVRQICKRSTSRNNLSWLKQ

SEQ ID NO: 170884 - protein, 184 aa, Zea Mays
MQLGPLGFALFFQTRIGPPSLCSAGNGVHRRQAHRQVPPLPLPPHRPVSSPLYPGLTLCLHLALHPPPSPSAAVASTPPDIAVNFTDGMFKGIYHGKQCHAADIPAVLARAWAAGVDRIIVTGGSLKESREALQIAETDGRLFCTVGVHPTRCGEFEESGDPEGHFQALLALAKEGLDKGRCCW

SEQ ID NO: 170885 - protein, 63 aa, Zea Mays
MIWILRGKGKPKSKSNPKDTCSWFDGGRKAMIQLAGELFWKMGEDLDSIAKDYTTSFHKWHVC

SEQ ID NO: 170886 - protein, 1477 aa, Zea Mays
MVFLQRSRPVNPRKRPAPPPELEPEPEPPRPGPDASSAVDAAAALLADAGCTLLVPPHQPPSLPSPHSFAARLSRKLSAGGDASSPSAPARRLLEGLAAFAASSPARLRQLLLPTAPHEPSLARALLSVPALQPGLLALLLEKLPEHFGGDGALDGSPLQDDVGRLIVSQFRWLDFLADADAFVDKLVEVLSVAPHRLKKEIIGSLPEIVGDKSHAAVVAALEKLLQEDSEIVVAVLDVLSDLNLNEELQEQAVTVAISCIRTIAPDQTPHLLRFLLLSATPVNAGRIISQIREQLKFVGVVDPRAARSKKLKGKASANSTDGAILDTLRSGLRFKNMLCEAFLKELKSVDHPRDHKVIDVWLIMLIYANGGALEKAAKKILKSKILHECIRETLFDQCIHGNTELVKEEKAREFAAYLFTALFEEFTDTYSRQELVGSLVTHIGSGVSYEVSSALDIMISLTSNNSEELIPISSHITGKNILSFVFSAFHFLNRHINLFNTGILDYLESFGEDNLRKVYDIFCRLALAAGFNTGSGGSSVANEVLMVVRKQVSNPDMKYRRMGIIGVLRIVSTIASTDVNAAVNCSSSQQPNCEEALELLKMSVNSCKFVTLLLIFLYDELAALLDSKVIHSSIHDWVGEHVAELFETPFLADLENGELPEKYLCDGIEGELWMKLDGNISPILMSQFSLLTTIERLGNEGSLGGIDALLGCPLHLPSTKHLDGANWGNLSGLQKKTVCYSLYYAINWIRELLNAFGTQVESRVDNVSQKARNETAVKLLKRLRNLILLEGLLNAFLKDYPLSLPELRYLGDCSGSASTSKFNIPKNMGEESINGASSKRQKGCKGKVSEKVNPDDKLKQPTILDAFKRAGVTVSQATNKASSQPSSSGMMSKDIEQDATDPGELGLIDLMAAPVKLDMQRYKFRTIRATCLSLLNYSECQGSSSYLQTELPTYLYLLRDLHNKLDNLNPSIKPFLSTSKAKYTPTHCHKSTQDFLDKIQPLFLVLRKHLDGAVSMIKDESESCSDDWSSHSSSAGNPDIPYVVVSKSSIVTAVCKEILGCYRKLLGIPDLLNQPNMSILKQLLQTLQPTENFDDVLSEFQPSLAPCNVDYLYCGACKILEDIMDSVSSFSYLLSSNVLITIQSIVNSVVVLLDKSGEPNGKNIHMGCSKAIIPFLRKRLGYSAHKLLSADFPSEDAGKGWQSKGDLIQKILQIYLRNSDSTSDLLAEIGRELPKEPSLKTKDNQDVSYGFPTLCSSTITSWYRVLHEENTGSLNKTIKQALKARGSVDTILQEIQKSVDAFVSLIGMCKSHEKVSMHAMAVKHGGKFIDTFLKAFNFLERHFEQHNDTIVKMLKQLQKGTRIIQSICSDAKGNKRTMITSKVPPAKRSMERFLFQVKALLHSCSAEKEFQMGNLKHKDLQGHVVSSQAYGNVDEEDEEQTEVDSDLPADEHDNGNAMEEDAVEGSNETPMEEEEE

SEQ ID NO: 170887 - protein, 691 aa, Zea Mays
MVFLQRSRPVNPRKRPAPPPELEPEPEPPRPGPDASSAVDAAAALLADAGCTLLVPPHQPPSLPSPHSFAARLSRKLSAGGDASSPSAPARRLLEGLAAFAASSPARLRQLLLPTAPHEPSLARALLSVPALQPGLLALLLEKLPEHFGGDGALDGSPLQDDVGRLIVSQFRWLDFLADADAFVDKLVEVLSVAPHRLKKEIIGSLPEIVGDKSHAAVVAALEKLLQEDSEIVVAVLDVLSDLNLNEELQEQAVTVAISCIRTIAPDQTPHLLRFLLLSATPVNAGRIISQIREQLKFVGVVDPRAARSKKLKGKASANSTDGAILDTLRSGLRFKNMLCEAFLKELKSVDHPRDHKVIDVWLIMLIYANGGALEKAAKKILKSKILHECIRETLFDQCIHGNTELVKEHFMSYLSVSDYLLACKEEKAREFAAYLFTALFEEFTDTYSRQELVGSLVTHIGSGVSYEVSSALDIMISLTSNNSEELIPISSHITGILDYLESFGEDNLRKVYDIFCRLALAAGFNTGSGGSSVANEVLMVVRKQVSNPDMKYRRMGIIGVLRIVSTIASTDVNAAVNCSSSQQPNCEEALELLKMSVNSCKFVTLLLIFLYDELAALLDSKVIHSSIHDWVGEHVAELFETPFLADLENGELPEKYLCDGIEGELWMKLDGNISPVCVNIMRLAPTSPQK

SEQ ID NO: 170888 - protein, 669 aa, Zea Mays
MVFLQRSRPVNPRKRPAPPPELEPEPEPPRPGPDASSAVDAAAALLADAGCTLLVPPHQPPSLPSPHSFAARLSRKLSAGGDASSPSAPARRLLEGLAAFAASSPARLRQLLLPTAPHEPSLARALLSVPALQPGLLALLLEKLPEHFGGDGALDGSPLQDDVGRLIVSQFRWLDFLADADAFVDKLVEVLSVAPHRLKKEIIGSLPEIVGDKSHAAVVAALEKLLQEDSEIVVAVLDVLSDLNLNEELQEQAVTVAISCIRTIAPDQTPHLLRFLLLSATPVNAGRIISQIREQLKFVGVVDPRAARSKKLKGKASANSTDGAILDTLRSGLRFKNMLCEAFLKELKSVDHPRDHKVIDVWLIMLIYANGGALEKAAKKILKSKILHECIRETLFDQCIHGNTELVKEHFMSYLSVSDYLLACKEEKAREFAAYLFTALFEEFTDTYSRQELVGSLVTHIGSGVSYEVSSALDIMISLTSNNSEELIPISSHITGILDYLESFGEDNLRKVYDIFCRLALAAGFNTGSGGSSVANEVLMVVRKQVSNPDMKYRRMGIIGVLRIVSTIASTDVNAAVNCSSSQQPNCEEALELLKMSVNSCKFVTLLLIFLYDELAALLDSKVIHSSIHDWVGEHVAELFETPFLADLENGELPEKYLCDGIEDYLKAC

SEQ ID NO: 170889 - protein, 1052 aa, Zea Mays
MVFLQRSRPVNPRKRPAPPPELEPEPEPPRPGPDASSAVDAAAALLADAGCTLLVPPHQPPSLPSPHSFAARLSRKLSAGGDASSPSAPARRLLEGLAAFAASSPARLRQLLLPTAPHEPSLARALLSVPALQPGLLALLLEKLPEHFGGDGALDGSPLQDDVGRLIVSQFRWLDFLADADAFVDKLVEVLSVAPHRLKKEIIGSLPEIVGDKSHAAVVAALEKLLQEDSEIVVAVLDVLSDLNLNEELQEQAVTVAISCIRTIAPDQTPHLLRFLLLSATPVNAGRIISQIREQLKFVGVVDPRAARSKKLKGKASANSTDGAILDTLRSGLRFKNMLCEAFLKELKSVDHPRDHKVIDVWLIMLIYANGGALEKAAKKILKSKILHECIRETLFDQCIHGNTELVKEHFMSYLSVSDYLLACKEEKAREFAAYLFTALFEEFTDTYSRQELVGSLVTHIGSGVSYEVSSALDIMISLTSNNSEELIPISSHITGILDYLESFGEDNLRKVYDIFCRLALAAGFNTGSGGSSVANEVLMVVRKQVSNPDMKYRRMGIIGVLRIVSTIASTDVNAAVNCSSSQQPNCEEALELLKMSVNSCKFVTLLLIFLYDELAALLDSKVIHSSIHDWVGEHVAELFETPFLADLENGELPEKYLCDGIEGELWMKLDGNISPVCVNIMRLAPTSPQKSQSCLQILMSQFSLLTTIERLGNEGSLGGIDALLGCPLHLPSTKHLDGANWGNLSGLQKKTVCYSLYYAINWIRELLNAFGTQVESRVDNVSQKARNETAVKLLKRLRNLILLEGLLNAFLKDYPLSLPELRYLGDCSGSASTSKFNIPKNMGEESINGASSKRQKGCKGKVSEKVNPDDKLKQPTILDAFKRAGVTVSQATNKASSQPSSSGMMSKDIEQDATDPGELGLIDLMAAPVKLDMQRYKFRTIRATCLSLLNYSECQGSSSYLQTELPTYLYLLRDLHNKLDNLNPSIKPFLSTSKAKYTPTHCHKSTQDFLDKIQPLFLVLRKHLDGAVSMIKDGNRLFHNFCFLLLLQCLN

SEQ ID NO: 170890 - protein, 1031 aa, Zea Mays
MVFLQRSRPVNPRKRPAPPPELEPEPEPPRPGPDASSAVDAAAALLADAGCTLLVPPHQPPSLPSPHSFAARLSRKLSAGGDASSPSAPARRLLEGLAAFAASSPARLRQLLLPTAPHEPSLARALLSVPALQPGLLALLLEKLPEHFGGDGALDGSPLQDDVGRLIVSQFRWLDFLADADAFVDKLVEVLSVAPHRLKKEIIGSLPEIVGDKSHAAVVAALEKLLQEDSEIVVAVLDVLSDLNLNEELQEQAVTVAISCIRTIAPDQTPHLLRFLLLSATPVNAGRIISQIREQLKFVGVVDPRAARSKKLKGKASANSTDGAILDTLRSGLRFKNMLCEAFLKELKSVDHPRDHKVIDVWLIMLIYANGGALEKAAKKILKSKILHECIRETLFDQCIHGNTELVKEHFMSYLSVSDYLLACKEEKAREFAAYLFTALFEEFTDTYSRQELVGSLVTHIGSGVSYEVSSALDIMISLTSNNSEELIPISSHITGILDYLESFGEDNLRKVYDIFCRLALAAGFNTGSGGSSVANEVLMVVRKQVSNPDMKYRRMGIIGVLRIVSTIASTDVNAAVNCSSSQQPNCEEALELLKMSVNSCKFVTLLLIFLYDELAALLDSKVIHSSIHDWVGEHVAELFETPFLADLENGELPEKYLCDGIEGELWMKLDGNISPILMSQFSLLTTIERLGNEGSLGGIDALLGCPLHLPSTKHLDGANWGNLSGLQKKTVCYSLYYAINWIRELLNAFGTQVESRVDNVSQKARNETAVKLLKRLRNLILLEGLLNAFLKDYPLSLPELRYLGDCSGSASTSKFNIPKNMGEESINGASSKRQKGCKGKVSEKVNPDDKLKQPTILDAFKRAGVTVSQATNKASSQPSSSGMMSKDIEQDATDPGELGLIDLMAAPVKLDMQRYKFRTIRATCLSLLNYSECQGSSSYLQTELPTYLYLLRDLHNKLDNLNPSIKPFLSTSKAKYTPTHCHKSTQDFLDKIQPLFLVLRKHLDGAVSMIKDGNRLFHNFCFLLLLQCLN

SEQ ID NO: 170891 - protein, 268 aa, Zea Mays
MSPMVERAVPERRGRMGPAPFKPPSGGSTSDVVEASGTAKPSENVTAMEGNAAPNVNSTVSRPMPQRPWQQTGYGNTYGGYGGSNMYSSYGGFGNTYGTGGLGNSMYSSYGGGYGGGMYGGGMYGGGMYGGMGGYGGYGMGGMGGMGMGPYGNQDPNSMGPPASPPGFWVSFLRVMHGVVNFFGRISFLVEQNTQASYFFMTAMLQLFDRSGMLYGELARFVLRLLGVRRKPKKGGSIQGPEALAFEGPSRQSTEAPKTNNWDNVWGN

SEQ ID NO: 170892 - protein, 274 aa, Zea Mays
MSVHFAGPPPKPWERSGTEGTSGPAPFKPPSGGSTSDVVEASGTAKPSENVTAMEGNAAPNVNSTVSRPMPQRPWQQTGYGNTYGGYGGSNMYSSYGGFGNTYGTGGLGNSMYSSYGGGYGGGMYGGGMYGGGMYGGMGGYGGYGMGGMGGMGMGPYGNQDPNSMGPPASPPGFWVSFLRVMHGVVNFFGRISFLVEQNTQASYFFMTAMLQLFDRSGMLYGELARFVLRLLGVRRKPKKGGSIQGPEALAFEGPSRQSTEAPKTNNWDNVWGN

SEQ ID NO: 170893 - protein, 249 aa, Zea Mays
MSGPPPKPWERSGTEGTSGPAPFKPPSGGSTSDVVEASGTAKPSENVTAMEGNAAPNVNSTVSRPMPQRPWQQTGYGNTYGGYGGSNMYSSYGGFGNTYGTGGLGNSMYSSYGGGYGGYGMGGMGGMGMGPYGNQDPNSMGPPASPPGFWVSFLRVMHGVVNFFGRISFLVEQNTQASYFFMTAMLQLFDRSGMLYGELARFVLRLLGVRRKPKKGGSIQGPEALAFEGPSRQSTEAPKTNNWDNVWGN

SEQ ID NO: 170894 - protein, 64 aa, Zea Mays
MQRPNAPSACATITFAEALRREMEYRKWVERTHPHLLVGICGAPEMQRVRISVQDQYLMRSREN

SEQ ID NO: 170895 - protein, 170 aa, Zea Mays
MWGYKRFYKRTLLEESDFLKNDCLVMNCTVGVVKNRIETPKDIQIHVPRSDMGRCFKELLSRCIGCDITFEVRDEKVRAHKWILAARSPVFKAQFFGPIGKPDLHTVVVEDVEPVVFKAMVNFIYADELPSIPELAGSASTWTSTVVVQHLLAAADRYGLPLLNSTIVLS

SEQ ID NO: 170896 - protein, 183 aa, Zea Mays
MHDVVTGSNPTAVQVIKGAGSSVVPGLAFGDTTVIDDALTETSSPTSAAVGRAQGFYMMSSQSGIVLMVCANLLLTAGDHNGSTLAVVGRDDVAADVRELSVVGGTGRFRMATGYVLWKTSSMNGPDATVELDVHVRTATTAATGSGTTGAFSGAAAKRVGAGWVIACAVAVVGAVVGSGVWW

SEQ ID NO: 170897 - protein, 213 aa, Zea Mays
MRSPSPALSSPPPSAVLAADDDGTTHLHFFMHDVVTGSNPTAVQVIKGAGSSVVPGLAFGDTTVIDDALTETSSPTSAAVGRAQGFYMMSSQSGIVLMVCANLLLTAGDHNGSTLAVVGRDDVAADVRELSVVGGTGRFRMATGYVLWKTSSMNGPDATVELDVHVRTATTAATGSGTTGAFSGAAAKRVGAGWVIACAVAVVGAVVGSGVWW

SEQ ID NO: 170898 - protein, 63 aa, Zea Mays
MSKQFSIRSCFRLLRSPLPRLGSMGMPSATLLALTFSLERSLRILFLLLTTVMFPMLIALSIS

SEQ ID NO: 170899 - protein, 240 aa, Zea Mays
MVFALPGEPGLAEVAGDFKIQFHDRQGDFYCWLNTTMMENRVTLNPTDLDDFDKRKLPSPGFQIEVVLVDYDGSQPAKPKPGAGPAADKSHADSSASTVAKENSAAPEESNKGTGSNNDRDEVFSDSDGEDGSSNGRKEKTAGGGQSSVNAAKPSQTGNMEEAAASAAASRLDKVAISSEQGTTKAPDGTSLKTEVSSKASSTTAPPPPAADSSSMSEFKAIAADASVFSFGDEDDYESE

SEQ ID NO: 170900 - protein, 338 aa, Zea Mays
MEEHQVKPSDLPPTSLHNQDSAATPVTSADPARPAASNDSPSQVASAAPAAVSAPTAAPAEDAAGREASASVFSASGLSSWAKNLKIPQPSPGQESPTGKNTFARLTSGLGLRLSPKAAQQDEGAEGSTSPTTGQPGVFGSLTKGIVDSSKNAVKAVQVKARHMVSQNKRRYQEGGFDLDMTYITENIIAMGFPAGDLSSGLFGYFEGFYRNHMEEVIRFFEMHHKGKYKVYNLCSERLYDASLFEGKVACFPFDDHNCPPIQLVISFCHSAYSWLKEDIENVVVVHCKAGKARTGLMISSLLLFLKFFPTAEESIEYYNQKRCVDGKGLILPSQIDM

SEQ ID NO: 170901 - protein, 421 aa, Zea Mays
MEEHQVKPSDLPPTSLHNQDSAATPVTSADPARPAASNDSPSQVASAAPAAVSAPTAAPAEDAAGREASASVFSASGLSSWAKNLKIPQPSPGQESPTGKNTFARLTSGLGLRLSPKAAQQDEGAEGSTSPTTGQPGVFGSLTKGIVDSSKNAVKAVQVKARHMVSQNKRRYQEGGFDLDMTYITENIIAMGFPAGDLSSGLFGYFEGFYRNHMEEVIRFFEMHHKGKYKVYNLCSERLYDASLFEGKVACFPFDDHNCPPIQLVISFCHSAYSWLKEDIENVVVVHCKAGKARTGLMISSLLLFLKFFPTAEESIEYYNQKRCVDGKGLILPSQIRYVKYFERILTYFNGENQPPRRCMLRGFRLHRCPYWIRPSITVSNHNGVLFSTKKHPRTKELMKISGLVHQRRGLWFLHCRENLA

SEQ ID NO: 170902 - protein, 1690 aa, Zea Mays
MVCHIRFLPSWRREKRRKRRSVLLIISRLRAGCSTVSKTSGPFGGPGYHNQEREKHFEHLTPNMSKTRNGSAFSQDEINSHREHFRNELTPDSVASKKPKVRKKEINNSVSTSPHSIPNNQEVIATFCEAVEDFCGKAEIPDDGDGGDWLSIPLDDVKVLVNEITSVRSKRILHEVPMDTVTRLLDVIDRQIRCSQGLSIDVKENSDAFDAEPLVFSALESSHAALAIMTHHDMPKQLYREELIERIIDFSRHQITDCMAASNPTFRALYKPAGNVANDGDDDEGDLENGQVSKRRRTATNLSMRKSSNRVSASVYSAVQKLCLILGFLKELLTTVRLSDSCILQLAKTCFTTFLVDNMQLLQLKAIGVICTVFSSYTQHRSYLVDETLHLLRKLQFSKNAVRTYHLADEDQKQIQMITALLVHLVQFSAIVPDSLKGTVDWTTIVDASSDADYYPIQCHEAATEACCRFWTDVLQRFTAAKSQDMSETKGIIDNLVQDFLTILNLPEYPAAASILEVLCVLLLQNAGLKSKDINARCFAIDLLGGIASRLKRDSVVCSEEKLWILQDFTDKGSDGSIFLKNKCCVCLGGRGINIACNECGRCFHSDCMGAGSQDNLQRDSVCPLCFCKQQLNVLQSYCQSQIKENGKKTAASASKKSAKPTEVSAVEIVQQILLSYLQEAGSQDDGNLFTRWFYLCIWNKDDQHSQEKIIYYLARLKSKEILRDSGNGLAISRDSAKKICLALGQKNSFCRGFDKILALLLASLRENSPVIRAKALRAVSCIVEADPEVLGDKRVQYAVEGRFCDSAISVREAALELVGRHIASHPDVGLKYIEKVAERIKDTGVSVRKRAIKIIRDLCASNPNTDTTHAFVEIISRVNDEESSVQDLVCKTFYELWFEEPTGSHKHLVADGSSVPMEIAKKTEQIVDMLRKMPNHQPLITIIKRNLTLDFLPQSTKAAGINSSMVASIRKRCELICKRLLERILQVEEGAANEMEIHTLPYIVALQAFCIVDPTLCIPVTDPSKFVVTLQPYLNIQVDNKSSAQLLESIIFVIDAVLPLIRKPPQNVVEELEKDLKHMIVRHSYLTVVHACIKCLCALSKSAGRGPGLVENLVNIFYKHLCGANSDSQLLGRSLFCLGLLLRYGYQLMLTSENQLDFPKIINLLQRKYLLKDDFSLKVRALQTLGYILIAKPEFMLQKDMLNLIETALSSEVDYRFKIQGLQNLYEYLRDAESQLTAESTAKPPGQCEINGRSEVPVAAGAGDTNICGGIIQLYWSSILERCLDTNDQVRQSALKIVEVVLRQGLVHPITCVPHLIALEMDPLEGNSKLAHHLLMNMNEKYPSFFESRLGDGLQLSFKFFESIVSNHKMSANIKSNPIAFVKPGISRIYRLIRSNRNSRNKFVHSIVRKFESDSRSRSTVSFLVYCAEVLASLPFTCSDEPLYLIYDINRAIHLRAGGVEGNLKRWTSMSQSQEMAGMPTLPGESHVVMQEEPGGYYDNMGDATERVNDNPCSTSDVDIAKVQGDCHDAIALQLLLKLKRHLKVVYGLDDARCQAFSLKEPPKSGETFSRQNVSFNIGNTNLSLPSCLQDAASVYQDFKTVLREDSMDFAVFVPSVQTRKRPTPRNTTSPTPRSMTRVRRTAAPSVTKARGGARGDDSDDTDDDDWTGGPRVLDFSGGGRVTRQRVQV

SEQ ID NO: 170903 - protein, 961 aa, Zea Mays
MVWQFPEIQQRKFAWHLVRRTHFVGVLIKFLPFFCLRENSPVIRAKALRAVSCIVEADPEVLGDKRVQYAVEGRFCDSAISVREAALELVGRHIASHPDVGLKYIEKVAERIKDTGVSVRKRAIKIIRDLCASNPNTDTTHAFVEIISRVNDEESSVQDLVCKTFYELWFEEPTGSHKHLVADGSSVPMEIAKKTEQIVDMLRKMPNHQPLITIIKRNLTLDFLPQSTKAAGINSSMVASIRKRCELICKRLLERILQVEEGAANEMEIHTLPYIVALQAFCIVDPTLCIPVTDPSKFVVTLQPYLNIQVDNKSSAQLLESIIFVIDAVLPLIRKPPQNVVEELEKDLKHMIVRHSYLTVVHACIKCLCALSKSAGRGPGLVENLVNIFYKHLCGANSDSQLLGRSLFCLGLLLRYGYQLMLTSENQLDFPKIINLLQRKYLLKDDFSLKVRALQTLGYILIAKPEFMLQKDMLNLIETALSSEVDYRFKIQGLQNLYEYLRDAESQLTAESTAKPPGQCEINGRSEVPVAAGAGDTNICGGIIQLYWSSILERCLDTNDQVRQSALKIVEVVLRQGLVHPITCVPHLIALEMDPLEGNSKLAHHLLMNMNEKYPSFFESRLGDGLQLSFKFFESIVSNHKMSANIKSNPIAFVKPGISRIYRLIRSNRNSRNKFVHSIVRKFESDSRSRSTVSFLVYCAEVLASLPFTCSDEPLYLIYDINRAIHLRAGGVEGNLKRWTSMSQSQEMAGMPTLPGESHVVMQEEPGGYYDNMGDATERVNDNPCSTSDVDIAKVQGDCHDAIALQLLLKLKRHLKVVYGLDDARCQAFSLKEPPKSGETFSRQNVSFNIGNTNLSLPSCLQDAASVYQDFKTVLREDSMDFAVFVPSVQTRKRPTPRNTTSPTPRSMTRVRRTAAPSVTKARGGARGDDSDDTDDDDWTGGPRVLDFSGGGRVTRQRVQV

SEQ ID NO: 170904 - protein, 809 aa, Zea Mays
MVCHIRFLPSWRREKRRKRRSVLLIISRLRAGCSTVSKTSGPFGGPGYHNQEREKHFEHLTPNMSKTRNGSAFSQDEINSHREHFRNELTPDSVASKKPKVRKKEINNSVSTSPHSIPNNQEVIATFCEAVEDFCGKAEIPDDGDGGDWLSIPLDDVKVLVNEITSVRSKRILHEVPMDTVTRLLDVIDRQIRCSQGLSIDVKENSDAFDAEPLVFSALESSHAALAIMTHHDMPKQLYREELIERIIDFSRHQITDCMAASNPTFRALYKPAGNVANDGDDDEGDLENGQVSKRRRTATNLSMRKSSNRVSASVYSAVQKLCLILGFLKELLTTVRLSDSCILQLAKTCFTTFLVDNMQLLQLKAIGVICTVFSSYTQHRSYLVDETLHLLRKLQFSKNAVRTYHLADEDQKQIQMITALLVHLVQFSAIVPDSLKGTVDWTTIVDASSDADYYPIQCHEAATEACCRFWTDVLQRFTAAKSQDMSETKGIIDNLVQDFLTILNLPEYPAAASILEVLCVLLLQNAGLKSKDINARCFAIDLLGGIASRLKRDSVVCSEEKLWILQDFTDKGSDGSIFLKNKCCVCLGGRGINIACNECGRCFHSDCMGAGSQDNLQRDSVCPLCFCKQQLNVLQSYCQSQIKENGKKTAASASKKSAKPTEVSAVEIVQQILLSYLQEAGSQDDGNLFTRWFYLCIWNKDDQHSQEKIIYYLARLKSKEILRDSGNGLAISRDSAKKICLALGQKNSFCRGFDKILALLLVCGCFQIVQFNVYVLELIPNSFQASLRENSPVIRAKALRAVSICLYS

SEQ ID NO: 170905 - protein, 877 aa, Zea Mays
MDPDAGGAGAGGRAGFERACRLPNTVHSEVLPSLPLPTLPRELGFDALRDDEPLAAPDRPDMIMQAANIARILADTDVSHLGFTAADNVEVDPSRCSWLWREVLKHNPDAFKVKAPGPSSQGPFGGPGYHNQEREKHFEHLTPNMSKTRNGSAFSQDEINSHREHFRNELTPDSVASKKPKVRKKEINNSVSTSPHSIPNNQEVIATFCEAVEDFCGKAEIPDDGDGGDWLSIPLDDVKVLVNEITSVRSKRILHEVPMDTVTRLLDVIDRQIRCSQGLSIDVKENSDAFDAEPLVFSALESSHAALAIMTHHDMPKQLYREELIERIIDFSRHQITDCMAASNPTFRALYKPAGNVANDGDDDEGDLENGQVSKRRRTATNLSMRKSSNRVSASVYSAVQKLCLILGFLKELLTTVRLSDSCILQLAKTCFTTFLVDNMQLLQLKAIGVICTVFSSYTQHRSYLVDETLHLLRKLQFSKNAVRTYHLADEDQKQIQMITALLVHLVQFSAIVPDSLKGTVDWTTIVDASSDADYYPIQCHEAATEACCRFWTDVLQRFTAAKSQDMSETKGIIDNLVQDFLTILNLPEYPAAASILEVLCVLLLQNAGLKSKDINARCFAIDLLGGIASRLKRDSVVCSEEKLWILQDFTDKGSDGSIFLKNKCCVCLGGRGINIACNECGRCFHSDCMGAGSQDNLQRDSVCPLCFCKQQLNVLQSYCQSQIKENGKKTAASASKKSAKPTEVSAVEIVQQILLSYLQEAGSQDDGNLFTRWFYLCIWNKDDQHSQEKIIYYLARLKSKEILRDSGNGLAISRDSAKKICLALGQKNSFCRGFDKILALLLASLRENSPVIRAKALRAVSICVTYETICFASLSF

SEQ ID NO: 170906 - protein, 185 aa, Zea Mays
MHRDVKPHNVMIDHELRKLRLIDWGLAEFYHPGKEYNVRVASRYFKGPELLVDLQDYDYSLDMWSLGCMFAGMIFRKEPFFYGHDNHDQLVKIAKVLGTDGLNVYLNKYRIELDPQLEALVGRHSRKPWLKFMNADNQHLVSPEAIDFLDKLLRYDHQERLTALEAMTHPYFQQVRAAENSRTRA

SEQ ID NO: 170907 - protein, 971 aa, Zea Mays
MHSLSACAKYLWSTSRATVIRNEVLVVLSAISLLFMTTFGPLRRRSRNSFVQNGFMVAYTLSSSLISYTLGSMYSSAVKSSMYPIWASSLYLLFCSADSITSYCLNGNNQQKEQLILFLLFQIYVSQITNGSDSNGSLVFSVAAFKFMERFWAYQLATGSWNLNKMVADYMYEEQSRSGSSYDPTSMKGYHYLVDWPLDESKLEARMSYAKELTVDDAQIIDIERIFMCSELSSELKDVCLSFSLFLLLRRRFFGFVCVEASQRKTHDFVFKGVLSKNQDGTLNYDRIFRLIEVELAFMYDFFFTKYAVLYYGSKKVSAIWSLASASFMSVTIYKLIESVLSNQNRSEFVGTTTSDVTTTSDVVVTILIVACIVLLEFIQVLLFFSTIWCRVSFVCHYVREQATNTRRGFCMKLFQKFCCMRFREIILNMAIGITRSRSSEYYYQNKLGQYSLLESVISCKYKQSPRKVWFHRFMHRYCSLIVAPDFGYLCNTNKDFIHAQRIRKKHVKPAAIKIPVEVKKAVVHSLQRTQGVLANGESSLVYNEVHDLLWACRHNMLSDPGTNCYLDKENQTHIILTWHIATCYCEVQTLKCLYPRVGGALKLHLDIATILSKYCAYLVVSAPKLLPGNYYDSSLVFDAVAVEAAQFLQKVEDKYEALRSLPVSTETSILQRGMKLARQLEEMECDKCWKVLADFWAEMLLYIAPSENVNEHFEALANGGEFITHWWALLTHAGILERAPRNVNNDIENQWEGSSSYGCPSTTQAAAAACATNQQPMAGDRTVQLIEMNVGDIEDAKTDRHYPGEISYGAALRLRRANSYISKCREAATLATSATIKPAIRGNCEQVRMMIRQQAYLGQNVELASPSASTAPSENKEIEIVIACSCQVGLQEEYIVCSNYRTWQNLIITGNSCTWVGYWRRLPEETTEAKLLMRYLVQLISCILCPCRLLYLTCVSNIFVNLKQLAHQQC

SEQ ID NO: 170908 - protein, 926 aa, Zea Mays
MMTIRVINLSVGNSRWLQGCRLVVAYCIALKAKDHHDLRDMHSLSACAKYLWSTSRATVIRNEVLVVLSAISLLFMTTFGPLRRRSRNSFVQNGFMVAYTLSSSLISYTLGSMYSSAVKSSMYPIWASSLYLLFCSADSITSYCLNGNNQQKEQLILFLLFQIYVSQITNGSDSNGSLVFSVAAFKFMERFWAYQLATGSWNLNKMVADYMYEEQSRSGSSYDPTSMKGYHYLVDWPLDESKLEARMSYAKELTVDDAQIIDIERIFMCSELSSELKDVCLSFSLFLLLRRRFFGFVCVEASQRKTHDFVFKGVLSKNQDGTLNYDRIFRLIEVELAFMYDFFFTKYAVLYYGSKKVSAIWSLASASFMSVTIYKLIESVLSNQNRSEFVGTTTSDVTTTSDVVVTILIVACIVLLEFIQVLLFFSTIWCRVSFVCHYVREQATNTRRGFCMKLFQKFCCMRFREIILNMAIGITRSRSSEYYYQNKLGQYSLLESVISCKYKQSPRKVWFHRFMHRYCSLIVAPDFGYLCNTNKDFIHAQRIRKKHVKPAAIKIPVEVKKAVVHSLQRTQGVLANGESSLVYNEVHDLLWACRHNMLSDPGTNCYLDKENQTHIILTWHIATCYCEVQTLKCLYPRVGGALKLHLDIATILSKYCAYLVVSAPKLLPGNYYDSSLVFDAVAVEAAQFLQKVEDKYEALRSLPVSTETSILQRGMKLARQLEEMECDKCWKVLADFWAEMLLYIAPSENVNEHFEALANGGEFITHWWALLTHAGILERAPRNVNNDIENQWEGSSSYGCPSTTQAAAAACATNQQPMAGDRTVQLIEMNVGDIEDAKTDRHYPGEISYGAALRLRRANSYISKCREAATLATSATIKPAIRGNCEQVRMMIRQQAYLGQNVELASPSASTAPSENKEIEIVIACE

SEQ ID NO: 170909 - protein, 178 aa, Zea Mays
MKLARQLEEMECDKCWKVLADFWAEMLLYIAPSENVNEHFEALANGGEFITHWWALLTHAGILERAPRNVNNDIENQWEGSSSYGCPSTTQAAAAACATNQQPMAGDRTVQLIEMNVGDIEDAKTDRHYPGEISYGAALRLRRANSYISKCREAATLATSATIKPAIRGNCEQGILFN

SEQ ID NO: 170910 - protein, 444 aa, Zea Mays
MALAFDEFGRPFIILREQEKKTRLRGLDAQKANIASAKAVARILRTSLGPKGMDKMLQSPDGDVIITNDGATILEQMDVDNQIAKLMVELSRSQDYEIGDGTTGVVVMAGALLEQAEKLLERGIHPIRVAEGYEMASKVAFDHLEHISEKFEFSADNIEPLVQTCMTTLSSKIVNRCKRALAEIAVKAVLAVADLERKDVNLDLIKVEGKVGGKLEDTELVYGIIVDKDMSHPQMPKRIEDAKIAILTCPFEPPKPKTKHKVDIDTVEKFQTLREQEQKYFDEMVQKCKDAGATLVICQWGFDDEANHLLMHRNLPAVRWVGGVELELIAIATGGRIVPRFQELSPEKLGKAGLVREKSFGTTKDRMLYIEKCANSRAVTIFIRGGNKMMIEETKRSLHDALCVARNLIRNNSIVYGGGSAEISCSIAVETAADRHPGVEQVIR

SEQ ID NO: 170911 - protein, 613 aa, Zea Mays
MCVCLKSSLTTRAPTIRGAKWSSQKSPTSEIRQNKTPPTSASPAPRSPLQSPPTSSPHRTAPPSPPLPSPRVRRRREIRGAMWRSCVSRGLSRAKASASRLLSTASSSYTVVDHTYDAVVVGAGGAGLRAAIGLSEHGFNTACITKLFPTRSHTVAAQGGINAALGNMSEDDWRWHMYDTVKGSDWLGDQDSIQYMCREAPKAVIELENYGLPFSRTEEGKIYQRAFGGQSLDFGKGGQAYRCACAADRTGHAMLHTLYGQAMKHNTQFFVEYFALDLLMDNDGKCQGVIALNMEDGTLHRFRASNTILATGGYGRAYFSATSAHTCTGDGNAMVARAGLPLQDLEFVQFHPTGIYGAGCLITEGSRGEGGILRNSEGERFMERYAPTAKDLASRDVVSRSMTMEIREGRGVGPLKDHIYLHLNHLPPEVLKERLPGISETAAIFAGVDVTKEPIPVLPTVHYNMGGIPTNYHGEVVDIKGNNPDAVIPGLMAAGEAACASVHGANRLGANSLLDIVVFGRACANRVADISKPGEKQKPLEKDAGEKTIAWLDKLRNANGSLPTSKIRLNMQRVMQNNAAVFRTQETLEEGCELISKTWESFHDVKLSDRSLI

SEQ ID NO: 170912 - protein, 505 aa, Zea Mays
MCREAPKAVIELENYGLPFSRTEEGKIYQRAFGGQSLDFGKGGQAYRCACAADRTGHAMLHTLYGQAMKHNTQFFVEYFALDLLMDNDGKCQGVIALNMEDGTLHRFRASNTILATGGYGRAYFSATSAHTCTGDGNAMVARAGLPLQDLEFVQFHPTGIYGAGCLITEGSRGEGGILRNSEGERFMERYAPTAKDLASRDVVSRSMTMEIREGRGVGPLKDHIYLHLNHLPPEVLKERLPGISETAAIFAGVDVTKEPIPVLPTVHYNMGGIPTNYHGEVVDIKGNNPDAVIPGLMAAGEAACASVHGANRLGANSLLDIVVFGRACANRVADISKPGEKQKPLEKDAGEKTIAWLDKLRNANGSLPTSKIRLNMQRVMQNNAAVFRTQETLEEGCELISKTWESFHDVKLSDRSLIWNSDLIETLELENLLINACITMYSAEARKESRGAHAREDFTTRDDEKWMKHSLGYWENEKVRLAYRPVHMKTLDDEVESFPPKARVY

SEQ ID NO: 170913 - protein, 485 aa, Zea Mays
MCVCLKSSLTTRAPTIRGAKWSSQKSPTSEIRQNKTPPTSASPAPRSPLQSPPTSSPHRTAPPSPPLPSPRVRRRREIRGAMWRSCVSRGLSRAKASASRLLSTASSSYTVVDHTYDAVVVGAGGAGLRAAIGLSEHGFNTACITKLFPTRSHTVAAQGGINAALGNMSEDDWRWHMYDTVKGSDWLGDQDSIQYMCREAPKAVIELENYGLPFSRTEEGKIYQRAFGGQSLDFGKGGQAYRCACAADRTGHAMLHTLYGQAMKHNTQFFVEYFALDLLMDNDGKCQGVIALNMEDGTLHRFRASNTILATGGYGRAYFSATSAHTCTGDGNAMVARAGLPLQDLEFVQFHPTGIYGAGCLITEGSRGEGGILRNSEGERFMERYAPTAKDLASRDVVSRSMTMEIREGRGVGPLKDHIYLHLNHLPPEVLKERLPGISETAAIFAGVDVTKEPIPVLPTVHYNMGGIPTNYHGESLCKQGSRYF

SEQ ID NO: 170914 - protein, 598 aa, Zea Mays
MGTLSMSDASPIPAKNWDASPVKLEAQGGDAILGMKEEERLLELVKDEQADGILDSLPIDLEAKNGDASLITEAMKKEEEQLEDTRIKVQEEEEARKREEAARLAFDPETQYNKLDELLTKTQLFSEFLLENMDRIADESVETQAEQPQVEEKKKGRGRKRKAKPQYNDKKAKTAVAAMLTRSREERLAEDSTLSEEERWEKEQANLVPLLTGGKLKSYQIKGVKWLISLWQNGLNGILADQMGLGKTIQTIGFLAHLKGKGMHGPYLIIAPLSTLSNWVNEISRFTPSLVSIIYHGGKAARAEIRRKFMPTNVGPDFPIVVTSYEMAMFDAKFLAAYKWKYVVVDEGHRLKNAKCLLLKQLKRIPMDNKLLLTGTPLQNNLAELWSLLNFILPDIFSSHQEFESWFDFSGGNEETDEKKRLHVVSKLHAILRPFLLRRMKEDVEQMLPRKKEIIIYANMTEQQKQIQHHLIEKTFDNYLHEESDIILKRPGIRARLHNLMIQLRKNCNHPDLLESPVDSTGLYPPVEKLLEQCGKFQLFDRLLNFLMAQKHKVLVFSQWTKVLDIIEYYLDSKGHAVCRIDGNVKLEERRRQQNSMT

SEQ ID NO: 170915 - protein, 772 aa, Zea Mays
MGTLSMSDASPIPAKNWDASPVKLEAQGGDAILGMKEEERLLELVKDEQADGILDSLPIDLEAKNGDASLITEAMKKEEEQLEDTRIKVQEEEEARKREEAARLAFDPETQYNKLDELLTKTQLFSEFLLENMDRIADESVETQAEQPQVEEKKKGRGRKRKAKPQYNDKKAKTAVAAMLTRSREERLAEDSTLSEEERWEKEQANLVPLLTGGKLKSYQIKGVKWLISLWQNGLNGILADQMGLGKTIQTIGFLAHLKGKGMHGPYLIIAPLSTLSNWVNEISRFTPSLVSIIYHGGKAARAEIRRKFMPTNVGPDFPIVVTSYEMAMFDAKFLAAYKWKYVVVDEGHRLKNAKCLLLKQLKRIPMDNKLLLTGTPLQNNLAELWSLLNFILPDIFSSHQEFESWFDFSGGNEETDEKKRLHVVSKLHAILRPFLLRRMKEDVEQMLPRKKEIIIYANMTEQQKQIQHHLIEKTFDNYLHEESDIILKRPGIRARLHNLMIQLRKNCNHPDLLESPVDSTGLYPPVEKLLEQCGKFQLFDRLLNFLMAQKHKVLVFSQWTKVLDIIEYYLDSKGHAVCRIDGNVKLEERRRQIAEFNDVNSSMRIFLLSTRAGGLGINLTAADTCILYDSDWAMDRCHRIGQTRPVHVYRLATSHSVEGRMMKRAFGKLKLEHVVIGKGQFEQDRAKPSALDEGELLALLKDEQTEEDRIVQTDISDEDLQRLMDRSDLMGPPPGAGGANAASPLVPLKGPGWEVVVPAKSGGGMLSSLTS

SEQ ID NO: 170916 - protein, 893 aa, Zea Mays
MHLVAGAIGNLAPKLLRLLRDEYSLQKGVRKQVQFLSEELESIHAALRKVAAVPPDQLDEQVKIWARQVRDASYDMEDALDTFLVRVEGRPEPNCGHGRLKGAAKRMGRLFKKANAHRHVASVIAGIKMQLQEVAERRARYRVDEVVATRPAAASAIDPRLEAMYKQATQLVGVDGAMGDLVLLLSLEAEEASNCKLKAVSILGVGGLGKTTLAKAVYDNLKSQFDCGAFVSVGRNPDLKKVFRDKNSKRLFYTRIFGRDGKFPGNQVDEVSDRIVQKCGGIPLSIITMASLLVDKPRAEWSELCSSTGFRDKDIEQVDRTMWILSLSYYDLPCHLRTCLLYLSTFPEDYIIDKYSLIWKWIAEDFVHKKPGTWLFEVGEGYFNDLVNRSMIQAVVSKRDGIIDGCRIHDMENFVTVLDSESDEGTSSMSRARRLAHQRSSMDAHWDNRHKGMQKIRSFIAYRCHDGKELPFLSFKLLRVLDLEAVYMESWHNAKHLGNLLHLRYLRLKGTNMPELPKEIGALRFLQTLDLVENFFKEELPSTIGMLTQLVCLRVCGWTQWGTSVPSGVIEKLTSLEELQLLVQCDVDELDDSLFDMNELGSLSELRALTIRAIEINQSMLSDLLQSVAKLHKVQSLKLENQSHLWNGLYDATFDAAALPRHLEHLLVSENCFRFSELPSCIDPSRLIRLSHLELYVIDMDEQGMRTLGRLPELRHLVLATESTVTVTNIATDGCFQKLRSCRFMHSMVLLALNADDCSVSFTLWNGRDDVPFGSRGEEDERRRAPPPPVMPTLEEISFQVHAEWCLTKREDGSYGSLGLEHIASLQRVVVTIVCEGYVFELDLTETEAELIHAINVHPNNPTLTWTVLNEGIIRSYTKMEFEEVILGLGITN

SEQ ID NO: 170917 - protein, 945 aa, Zea Mays
MHLVAGAIGNLAPKLLRLLRDEYSLQKGVRKQVQFLSEELESIHAALRKVAAVPPDQLDEQVKIWARQVRDASYDMEDALDTFLVRVEGRPEPNCGHGRLKGAAKRMGRLFKKANAHRHVASVIAGIKMQLQEVAERRARYRVDEVVATRPAAASAIDPRLEAMYKQATQLVGVDGAMGDLVLLLSLEAEEASNCKLKAVSILGVGGLGKTTLAKAVYDNLKSQFDCGAFVSVGRNPDLKKVFRDILIDLDKHKYTAEVNLSIFGETQLIDEIRELLESKRYFIVIDDVWEKQPWEIIQLALVENNRGSRIMSTTRNSEVTSGEVYRPRPLSDKNSKRLFYTRIFGRDGKFPGNQVDEVSDRIVQKCGGIPLSIITMASLLVDKPRAEWSELCSSTGFRDKDIEQWIAEDFVHKKPGTWLFEVGEGYFNDLVNRSMIQAVVSKRDGIIDGCRIHDMENFVTVLDSESDEGTSSMSRARRLAHQRSSMDAHWDNRHKGMQKIRSFIAYRCHDGKELPFLSFKLLRVLDLEAVYMESWHNAKHLGNLLHLRYLRLKGTNMPELPKEIGALRFLQTLDLVENFFKEELPSTIGMLTQLVCLRVCGWTQWGTSVPSGVIEKLTSLEELQLLVQCDVDELDDSLFDMNELGSLSELRALTIRAIEINQSMLSDLLQSVAKLHKVQSLKLENQSHLWNGLYDATFDAAALPRHLEHLLVSENCFRFSELPSCIDPSRLIRLSHLELYVIDMDEQGMRTLGRLPELRHLVLATESTVTVTNIATDGCFQKLRSCRFMHSMVLLALNADDCSVSFTLWNGRDDVPFGSRGEEDERRRAPPPPVMPTLEEISFQVHAEWCLTKREDGSYGSLGLEHIASLQRVVVTIVCEGYVFELDLTETEAELIHAINVHPNNPTLTWTVLNEGIIRSYTLGDTDDDLAIEEQESKAPFSSP

SEQ ID NO: 170918 - protein, 524 aa, Zea Mays
MITSTTLQVLNLSSNALFGDLPLLAGSCTVLDLSNNKFRGNLSVIAKWASDLEYVDLSQNNLTGPVPDASSQFLRLNYLNLSRNSLSETIPEAIAQYPKLTVLDLSSNQLRGPMPANLLTSSMLQELYIRDNMLFGGLSFPGSSSKNLSLQVLDISGNRFNGSLPDDIASLSGLRVLDISTNNFSGPLPAAVSKLGALTDIDISTNQFTGPLPEDLPDNLQSFNASYNDLSGVVPENLRKFPESSFHPGNSKLEYPASSSGSGSSPSGSAGGKSLSTGAKAAIVAASIVLLVILILIAIVCHYKRISRQFSSSEKVSDKSLHRTTKDSAVMQGKDNKGGLVSADELATPRKGSTSEALSQEEKSAAGGFSPSKGSRFSWSPDSGEAYGQEGLARLDVRSPDRLAGELHFLDETITLTPEELSRAPAEVLGRSSHGTSYRATLENGVFLTVKWLREGVARPKKEFAKEAKKFANIRHPNVVGLRGYYWGPTPHEKLILSDYVAPGSLASFLYGNAIIIFFFYYYC

SEQ ID NO: 170919 - protein, 123 aa, Zea Mays
MTLNNLRSEVIELRNEGLEKDKILNSLINKIKEDEATSKTQAEAQKCEIEDLRRQLTEAKLKCAIAEADRDAGDYWKNHWEKTTAELRSSKERCYEKSIECVGKIKTSFASVGAYSNEDNFVL

SEQ ID NO: 170920 - protein, 70 aa, Zea Mays
MSASNRATSYRPCTRYFRCRAPGHCIANCPSKVVPGHRLVLKGKCALGPFLSILVIECQLKCLNVNLCNG

SEQ ID NO: 170921 - protein, 173 aa, Zea Mays
MDLFGPVAYLSIGGSKYGLVIVDDFSRFTWMFFLQDKSETQGTLKRFLRRAQNEFELKVKKIRSDNGSEFKNLQVEEFLEEEGIKHEFSAPYTPQQNGVVERKNRTLIDMARTMLGEFKTPECFWTEAVNTACHAINRVYLHRLLKKTSYELLTGNKPNVSYFRVFGSKCYIL

SEQ ID NO: 170922 - protein, 111 aa, Zea Mays
MIKQGIVGHSDSAFSSPVLLVRKQDGSWRFCVAYRALNTLTIKDTFPILVVNELLDELHGAKFFTKLNLRLGYHQVRMRQADIHKATFRTHNGLYEFLVMSFGLCNASATF

SEQ ID NO: 170923 - protein, 65 aa, Zea Mays
MSDDDGSMVDADRFFFFFLCWPQSRFREFCVRTLDDRSINFYSGNCYRYLNCLGVISRYSIIPYK

SEQ ID NO: 170924 - protein, 52 aa, Zea Mays
MLQMCHTGSDLMGGKTDCIKKAVQKKNKNKKKTVESYQRLVRIPSPSKLIEL

SEQ ID NO: 170925 - protein, 71 aa, Zea Mays
MLWTLMNNPKENQYHNVFETSLDDGVFCRCSICTQTPGRKRRLAFSHLAVHKESSQVAGEEIACLMHSKQC

SEQ ID NO: 170926 - protein, 102 aa, Zea Mays
MGFLLLEKNFFFLESNLMPSLFSFFNILVVFLTIKAMFASRSSSFEDSSSTCIFAFPFLSRFALRAKSFLLEDDSSLLMCMYISWALIFPKICVGVVTERSI

SEQ ID NO: 170927 - protein, 438 aa, Zea Mays
MPRTKNPSASGGGDDEDPRRPFRQVKGKTVFLEQQEGRKKRRSDREARAAAAAAAAAAQASLGDQPDVPSDQIAFRARRLASRSRSSTHTSASTPPPTLPAPVPPIAPSTSTAIPPTSTTPASTASPAPAPASAPPVPPPRFRERDETEVRPLASDPRLFDLQRATAARVRRFRYVPVESWLPAQRDPAAGVLFSTRIQESFFRAQMSAQIALRVHRLLDLPAFLLAAGDESEAHLTYLPGLLSFLTISGRYVEEWVRVFYASVWIDPDHHWMRFRFEREDVTITASQIRQLFGFPESTTRLHSVCYGTSDPPRRPHGGVAPGTAHVAALFRPPFSDGSRRSPADFTTAAKYLYELVRRTLLPRMGYREATTHIQLWLLGALVSHSEFDVVDFLICEIEDTVLDGIRARRQLPYAHYLCHIFAQLIQPPRFQSTLEAH

SEQ ID NO: 170928 - protein, 165 aa, Zea Mays
MLSMFQNMQDRQDAFSSSLFRIGQRIGHSWPSCFSILVSQYLQFSLLRLLRFTLQWCIRSCLHPLLSPLRSGPVTLAFTSPVLSSICPQPPVPPASAVTTTAVAVSVTASVPVAPAALPASESVPAPASTADPGSETDSDPPSAFALLPRPRPDAPPPPPPASDV

SEQ ID NO: 170929 - protein, 187 aa, Zea Mays
MDGGSCLNIIYAETLRLLRVDLSSVRAGAAPFHGIIPGKRVQPLGRLDLPVCFGTPSNFRRETLTFEVVGFRGTYHAVLGRPCYAKFMAIPNYTYLKLKMPGPNGVITVGPTYKHAFECDVECVEYAAALAESEALIADLENLSKEVPDVKRHAGNFEPAETAKAVPLDPSGDASKQVRIGSGLDPK

SEQ ID NO: 170930 - protein, 65 aa, Zea Mays
MRPSRVDRRFQPSPSETRLPRLDAAFIADETRRGRTWLEDYKCWLPLPRRRRQLLPSCVLQNNVI

SEQ ID NO: 170931 - protein, 100 aa, Zea Mays
MNICLKEKEIKEKREKKKRKKKTLPSRLGRIRPKLPPLSRAPTLLPPSRSIPLAPLSPLTARPHPSAAPVLSPSRPPSLWQAAPTRQPLSPSPVIGHRRV

SEQ ID NO: 170932 - protein, 116 aa, Zea Mays
MSPKGRTLLLLYVDDMLITGDNSEHISHVKQHLSKEFQMSDLGPLSYFLGIEVQQTQKGFYLSQSKYIQDLLDRSGLTDTCIVATPMDIHLKLRPKDGTPLADPTRYRHIVGSLVY

SEQ ID NO: 170933 - protein, 89 aa, Zea Mays
MEEEHAALLANHTWDLVLCPPGTNVVTDKWLFRHKLTSDGSPSVLEWTMTRPSALSSSSPLFTPSSPSPSPGTRRSISSMSRMPSSMAP

SEQ ID NO: 170934 - protein, 97 aa, Zea Mays
MAFSFLRLEITSLQTFKSLALAINFSFSILRLESDSFNLSILEIKLPLSFLRLTRESSQTFNFSTLAINLTFSFLRLEIVSWQVLSSLVNFSHFSSF

SEQ ID NO: 170935 - protein, 58 aa, Zea Mays
MPIAMLEMRDASLAKLLPRQQPVVSSCNPAFVSTTPFRSATLSRSLCKSLSTSILLLP

SEQ ID NO: 170936 - protein, 81 aa, Zea Mays
MARTMLDEYKTPDRFWVEAVNTACYAINRLYLHRILKKTSYELLTGKKPNISYFRVFGSKCFILVKRGRKSKFAPKTVEGF

SEQ ID NO: 170937 - protein, 120 aa, Zea Mays
MSIGDVCPKESEEPPNAQDQPSSSMQASPPTQNEEEAQVDEGQNQEDEPPQDDSNDQGGDAIDQEKEDEDEPRPPHPRVHQAIQRDHPVDTILGDIHKGVTTRSRVAHFCEHYSFVSSIE

SEQ ID NO: 170938 - protein, 331 aa, Zea Mays
MGMGQPGRWTPKIKNKKVSFADPVITAIWPTDVSKGHISAENSISLGGMDLGTQAMEEYQCSAHPKVSVPIASYSVNALIHSWSTRGTDSAPVPIISGSHLANETIQGDLCIQNVQVESNFSNSEPNSQRNVVANEDRQCILPTNEVPPIGHESSTHSTPRPLENQLNSNDRLQIFIESITNTPEPPLILSPPNSNTLATSPVLGGSDNLDANVTINAGTPGKRSSSRLAAKQRLNVGGSRDAISKAQEILIAKLNNSAAIQYQGSSASISNNHVNSFEQIEGLFSRPLNKDQMEVIMELANQGKGKKGSKLRGCKVAPLKAPIIKAASGI

SEQ ID NO: 170939 - protein, 56 aa, Zea Mays
MPRDILALVADAGVSFAHKIAAGNDSKAISKHTEVLPESSSATQNEEHHFSKEDIM

SEQ ID NO: 170940 - protein, 57 aa, Zea Mays
MEKKKRKKKIKDKNLTWASDTYFSPSGDTLQPSVRAGTVSFPSHCSVGPHPGESSSF

SEQ ID NO: 170941 - protein, 61 aa, Zea Mays
MFQRPLQRLPIGQGVQDAVQTSGVGMIGGTILDPYEFFTYCFYMALTTLCNPCVNWFVLVF

SEQ ID NO: 170942 - protein, 90 aa, Zea Mays
MLLMLYAYILSTMLLSIRSLHYLVSVHMQLLWTMTSGFLVSHLFGRLVLGRIIESTNHHQLNKDNVFLIYIYSVFFLEHSGELRIIILRG

SEQ ID NO: 170943 - protein, 87 aa, Zea Mays
MHVESGDEGSVGRRRFDLIVKSSILLLARSVSCGGDASARTSGANLLTPSHVGCEGIEGPSPSNRPEPRPLLERERRGRGEGTCDSS

SEQ ID NO: 170944 - protein, 165 aa, Zea Mays
MTTDRPLELLHMDLFGLIAHISIGGSKYCLVIVDDYSHFTWVFFLQEKSQTQETLKGFLRQAQNEFELRIKKIRSDNGTEFKNSQIEGFLEEEGIKHEFSSPYTPQQNGVVERKNTTLLDMARTMLDEYKTPDRFWTKAINTACYSITRLYLHRILEDIIRTPHR

SEQ ID NO: 170945 - protein, 144 aa, Zea Mays
MQEELNNFIRNEVLHLVPRPNQNVVGTKWVFCNKQDELGVVTRNKARLVAKGYSQVDGLDFDETYAPVARLESIRILLAYATYHGFKLYQMDVKSAFLNGPIKEEVYVEQPPGFEDSEYPNHVYKLSKALYGLKQAPRAWYECL

SEQ ID NO: 170946 - protein, 52 aa, Zea Mays
MLDLVADFPWYLAPRLGCRLDVSRLDTSVYKRVVNSLREAASPRPGSVYSFS

SEQ ID NO: 170947 - protein, 67 aa, Zea Mays
MGHAGWGQNVVCWAGWQFGPNRGSFRFSFVFFSIFFSCFFLFLTILNSNLNFEYEFQHCVKCTNSSF

SEQ ID NO: 170948 - protein, 68 aa, Zea Mays
MPRRSHLNENYYTIFYYSMVSSFCHGYKHLIAVQNYGRNCNVHWVVSSSCRSWMACEHGKSLAKLCRL

SEQ ID NO: 170949 - protein, 66 aa, Zea Mays
MRWMATVHDRSPGHMTVLPCGGTDCSRPYCGSGSSLCRSEWSVLWTGWSAMTQGRLVPHRNLGLAP

SEQ ID NO: 170950 - protein, 80 aa, Zea Mays
MFLSLLLKVPNKSPNILSMFFGMSNEFNANIDHAPSENSHLTLKKDMICSFCMATPGTASTPPPPISDLQVHLWTGPYFS

SEQ ID NO: 170951 - protein, 94 aa, Zea Mays
MSSRSLMHRVFPSSKPPDGGSPPSFRLIVGETQLRGSWYLSAIVRLQGFSSHSPVAPLRWWSPKTVTSSSWMGRGNPGCDPDPALSIEGVRHPR

SEQ ID NO: 170952 - protein, 59 aa, Zea Mays
MFILCCSLFYAILQRGCCRNFIYGCRKCSAVAFRVVCGTMECYSKKTQKLLDYCCSPTT

SEQ ID NO: 170953 - protein, 102 aa, Zea Mays
MLKVCLGDSSMRLGDSSMHHRTATVACPVRISFHSWHSRPLDLRAGWRTGHCPVHTGQSGAPSRPLAGATRRARIAWSTVALAAVGSPDSPVNYSRMSLKIS

SEQ ID NO: 170954 - protein, 65 aa, Zea Mays
MFSFSFLFWYSNFKSGFKVQVHMHNHNKTLAYKCKFYFTYINYSFKQMLKIHNTYIICFYSSFKL

SEQ ID NO: 170955 - protein, 152 aa, Zea Mays
MGRRYTIHGNKEIDVGETDSRTGTAHTDDALDQHIHSGAGRRNARPDAASREKTGGRRSATLGRTRTGERAREFQGAAGEEKLENAQDELGHGEQGSTTAQGMGETPASSASCARREQREKTREGGERSRDGRPWGWGADGTQLHGADAKPS

SEQ ID NO: 170956 - protein, 50 aa, Zea Mays
MQNHTYLKLYGGHYGFPILKLKHCVSYVGGVSCFKILLQILATHLNFFVS

SEQ ID NO: 170957 - protein, 111 aa, Zea Mays
MAAIGGGGGQPRGRKGVAAKRGGEGKKRSGHLGFLWEKETTPQMTSIFASNGPQPFTSSTHQRLTFGQHFFGILHSTPLKKNSTSNSATPSKTPKVPHIAPPFKTWVHYWS

SEQ ID NO: 170958 - protein, 62 aa, Zea Mays
MGSLFLPVIMCFWRWWIMGIKGLEVVLDVGLGFDLEFSFLQNGRFDSFCSCQFSVVLVASKK

SEQ ID NO: 170959 - protein, 84 aa, Zea Mays
MARGNKSIPSSSDESSSDDEGEGKPSVDELAEAVEFFQDVCTKQKAQLKTLKNKLVSSQNDYKGLLKKFETFANLNSELSTKIK

SEQ ID NO: 170960 - protein, 59 aa, Zea Mays
MKIQCRAKWIPGVVVHGSSQHATRRRFLVLSQIHARRRFPAIWLVVLSRTPWRRDSIFF

SEQ ID NO: 170961 - protein, 186 aa, Zea Mays
MITSAGIQNPHAIRNKHRCYLLSEMNLGRLLFDVACCHHQSATVVTAADGHVRLRLRHLLLLLLRAFVVLRPVTVDATISASAFPSWRPHGCQSYLTRGAAVRARYCLALGGDTAATASSSLVAGVKTMLVLLQPNFLGQQQPPCLVHDLIDLVIKTLFHRPQPTDQLFNCQGLEVDEHLDGHHNL

SEQ ID NO: 170962 - protein, 55 aa, Zea Mays
MSIILQFQAVREMVHTNPQILQLLYSLFGITFYGLLCSTCLNILLVARYSLCWLN

SEQ ID NO: 170963 - protein, 96 aa, Zea Mays
MCNNDSFHCFRSTLRCFFQWIDGYDKFDPRYLLFANWLCGRTSHERFKRWVPPPPNPPPMTDAEKEVATERKMDLPPRCDCGDRAVIDEEYVLTQY

SEQ ID NO: 170964 - protein, 76 aa, Zea Mays
MHEFFKYHMHFRLDQPNPYLCYGRLSKQVIVDCRTLEDEDRLRFIAKNQNKLQIEYLQGLADAVEKRRSTRRSNWK

SEQ ID NO: 170965 - protein, 54 aa, Zea Mays
MRRGWHAGGPRPLRDRGGCSASLRCPNERGRGRSPAVPLTDVALASGCGNSIFP

SEQ ID NO: 170966 - protein, 165 aa, Zea Mays
MAHLKRVWHVRIFPVDGHAVPGTLADHACTWAKKKTGPKRRTRSLPPTGTDCPARVLATCSATVQVGSGHNFLVSTLQNSTERNERSPRPSPRGGTHQPHTSADQIKILARAAAGSARGPEAPLVHTGTQPSPVRGPPPTPTRVPGRNGPEAGVMRAARFIRANP

SEQ ID NO: 170967 - protein, 87 aa, Zea Mays
MKHLSKLIVLTRYLNHIELINILKESQSRSEILVDIELSSHNITNTISFPRTTTIGCITLPCINNTCKYHFNVCIGMQCVGPLSSYL

SEQ ID NO: 170968 - protein, 55 aa, Zea Mays
MRTAVIIAKQSTRLQVSITAGTAPCRSLNFQQQVSAYKFQHSLQHYGRNCTLPVP

SEQ ID NO: 170969 - protein, 69 aa, Zea Mays
MTGLFQSFTSLNRSLIPVECSSQFKGHEVPIRIPGSPHTQSLFLAFIKNENRNGMRVRMNNTKQKSTRN

SEQ ID NO: 170970 - protein, 67 aa, Zea Mays
MVKETHHIFIPLFLVQDRGGVGVTSLLQQLYRLYNLQGARKPGKFLSKKSWVSHVASSSECWFHCIL

SEQ ID NO: 170971 - protein, 66 aa, Zea Mays
MIPGQKGNHDSWVKCATSAEGMKLIYQPCSRLRAALGSSLIRDTDDMRHNGFIYGFGSMLILVFPR

SEQ ID NO: 170972 - protein, 102 aa, Zea Mays
MYETLRVSAAHVRVLGKSDSWFIAERESKLSFRLNRIDNYMCQCMGVLGWSPMDPALGSYKMNQALTQITCLKLTEYHCYPIEESVVQLTSPILAKGVHMGE

SEQ ID NO: 170973 - protein, 97 aa, Zea Mays
MQHYFSFWMSMILVISQANGTPWKYFFYQFCNRHNPNRNSQLSQKLLWDTKGQRLGVLEIPKNSFNSAKMSFLRILLKSSTHTDTKHDIGPRCGKIQ

SEQ ID NO: 170974 - protein, 71 aa, Zea Mays
MNMCELTLAVSHPPTGQEQVPLDEAHDGCCAVFVSGLGHRLRVDFLAPRMDFRSCCIYLYFVRLPLCNNTL

SEQ ID NO: 170975 - protein, 65 aa, Zea Mays
MDAPHPPNKNSTIGISPLLLKILPSMLLLHHISLIHTRIDTHMMLLYMDCMVLLPRSLPCLVLLP

SEQ ID NO: 170976 - protein, 90 aa, Zea Mays
MLSYSHNELVDDHIMLNVAHEVVIANLNSCEPHSCTRAHLDNISSCANPCCSKESQFFNEHQVAGSKEKLLINKERNKKAKQLRRRRIAQ

SEQ ID NO: 170977 - protein, 55 aa, Zea Mays
MKWTMHAGVLLINNTPIPVVGVDLANAATELLMCHAGVTTPAACPLDHYIAFALC

SEQ ID NO: 170978 - protein, 68 aa, Zea Mays
MITDLLKRDKPIKVAINFKSWSTTRDISSEWAEAARYTQRSKSAVQQPQARLGTFVTLTRSPFLKNNK

SEQ ID NO: 170979 - protein, 55 aa, Zea Mays
MNVCELTLAVSHPPTGQEQVPQDEAHGGCCDEFVRDLGRRLLVNFGLLDRCLLIM

SEQ ID NO: 170980 - protein, 77 aa, Zea Mays
MRRREISGSSVVVHARRGHIYARQDPATLLNHSTGPESRPQDRSLAVASALSLPCSYELAARRRLGTESMGGEDVAE

SEQ ID NO: 170981 - protein, 75 aa, Zea Mays
MYAYECNAYVLFLHTSKGMKPHRTPPRATYDAKLYRYGRTICHDKTSDANESCNVYGMLHLSINFTSFRYNTNLK

SEQ ID NO: 170982 - protein, 75 aa, Zea Mays
MTSDGCARVPGNLTRLSSLSTGTHHPKDLPHNRYITVITFDTHTLKIERKTFTKYTLHSRTQVLHGRKRCIYYKS

SEQ ID NO: 170983 - protein, 63 aa, Zea Mays
MQESCNTPLVTHNGYYQKPHPPNLLNTRGVIKTGNIAKSGSTSFETNITRRGKHEVHTGYKDL

SEQ ID NO: 170984 - protein, 58 aa, Zea Mays
MLRSRVRTQRCLGIERRSRCFYRWEGIARRCSAAAGGENSGKSNKEGKALHVRDAHAL

SEQ ID NO: 170985 - protein, 50 aa, Zea Mays
MAAGRGNQGSDARLEGGAAAGPNGPNSLGFCFFSYFFSFFPFVNSSYIFK

SEQ ID NO: 170986 - protein, 100 aa, Zea Mays
MLSMSPSVVSRLGSSAVSVSAPVASVSVAAPVASAPVAAVSAVPALLINCGRTSKLLGPHAPVLVPKTSDGYACAPDNLIGSVRLPQGYRINHFQPEPRD

SEQ ID NO: 170987 - protein, 64 aa, Zea Mays
MRESGWGFFFQGCAARTGDEIARKKIKDHERLKKIRTLGYFSFFCFVFCFFVLPKMADILEPDF

SEQ ID NO: 170988 - protein, 98 aa, Zea Mays
MRESGWGFFFQGCAARTGDEIARKKIKDHERLKKIRTLGYFSFFCFVFCFFLFYQKWQIFWNQIFRSGQDIIKSNRNVVNNSILDCVLFDSMNISHIR

SEQ ID NO: 170989 - protein, 50 aa, Zea Mays
MIDLIKSRKDKIQARSSKESRATIFDRVFSYPTLSYPKPITALKYLLSCI

SEQ ID NO: 170990 - protein, 80 aa, Zea Mays
MNFFYLYLCLYVYADVIVDITPQLITLNQRSKLDMYHKNKHSSIQIFTKILLILFLRVGLLSLKVTLGTEFQSVKSTFAF

SEQ ID NO: 170991 - protein, 207 aa, Zea Mays
MARTMLDEYKTSDRFWGEAVNTACYAINRLYLHRILKKTSYELLTGKKPNVSYFRVFGSKCFILVKRGRKSKFAPKTVEGFLLGYDSNTRAYRVFNKSTGLVEVSCDVVFDDTNGSQVEQVDLDEIGDEEAPCIALRNMSIGDVCPKESEEPPKAQDQPSSSTQASPPTHDEDKAQVDEGEDQKDEPPQDNGNDQGGDANNEDQEDE

SEQ ID NO: 170992 - protein, 74 aa, Zea Mays
MLQATISSPARTKAWKFSIKDAIVSMLPNGPRDQEDEGVQAILNRTAHRANSLLRKKKSTIAGQWQQGPISAAG

SEQ ID NO: 170993 - protein, 53 aa, Zea Mays
MFHLTLALLNAGAFCSSRGVGSSSTSTFTLIIMLPRHSHDLIRNFWSKDVCFN

SEQ ID NO: 170994 - protein, 68 aa, Zea Mays
MDLDTVVSLALLQEVLTGHKTHSMPSKVAEPSLSRTVSHPTPLSSSQPAATTSELRRGVDGTKSSLKK

SEQ ID NO: 170995 - protein, 212 aa, Zea Mays
MHVVVVSAEGVKKRGELAKVLLELLLPLTDLMHAVICREVVKLTRQSSHVILKTLLHIVKSGHDRISDISLNVITKFRILSIERIPVTVKTGLHDIQTMIHMCHHSLKASIKMSLKPLLHILKIWVKVAWTRLPILLRLRRRWRRRHLLCLSIMSCCCIITRVFLIIWEGSEWPGEEPNFILKGSERCMNYLAGPLKSCLCFDESHNIRCIG

SEQ ID NO: 170996 - protein, 58 aa, Zea Mays
MKHIYEITNITWVVRWNLDVNLIWASRGDSLLVGDSIASDGALWSGTTVATATVAGPN

SEQ ID NO: 170997 - protein, 65 aa, Zea Mays
MNYAAQDVIGFFWLYCSISSIDFLPFGGVQSMLDYMIIFSLWQEQCLGRLGVLFQQNYLFRGAMR

SEQ ID NO: 170998 - protein, 80 aa, Zea Mays
MQESVIQPIVVVRGNEMALVILGLLSSISTSISDLNCDPFKMLINSIFFWFKYLVETIHLLRCFISLLHYSMQVLDSCWE

SEQ ID NO: 170999 - protein, 69 aa, Zea Mays
MIGALEKNHLLDPSNIIFLCCFWLDSWVIRQKKKEQRMVVLGSKLIRKTASEAFGRALGWCPLDRRISG

SEQ ID NO: 171000 - protein, 59 aa, Zea Mays
MGRISPPLAQSGALSDYHALAGESLTSWANPSALSSPSRTPTDRVIPGNKNIPDAAAIP

SEQ ID NO: 171001 - protein, 59 aa, Zea Mays
MTNMTCGLMCLLVFMFIVHRMKHGLKELREQHLKEDISRLIEDLPTSSKVQDTRQEKPK

SEQ ID NO: 171002 - protein, 328 aa, Zea Mays
MARTMLDEYKTSDRFWAEAVNTACYAINRLYLHRILKKTSYELLTGKKPNISYFRVFGSKCFILVKRGRRSKFAPKTVEGFLLGYDSNTRAYRVFNKSTGLVEVSCDVVFDETNGSQVEQVDLDEIGDEEAPCITLRNMSIGDVCPKESEEPPKAQDQPSSSMQASPPTQNEEEAQVDEEEDQSNEPPQDDGIDQGGDANDQNKEDEEQRPPHPRVHQAIQRDHPVDTILGDIHKGVTTRSRVAHFCEHYSFVSSIEPHKVEEALQDSDWVVAMQEELNNFTRNEVWHLVPRPNQNVVGTKWVFRNKQNEHGVVTRNKARLVAKGVTP

SEQ ID NO: 171003 - protein, 97 aa, Zea Mays
MAGRCCSIGSSSPHLHGRARCSLSHFSLSLDARTLRLPLSRPRRGVPMHARPNFCSLGLKLRRLAELSGRRRASGSCLSPSCARPSSFHAQAKLPAR

SEQ ID NO: 171004 - protein, 84 aa, Zea Mays
MNCWAPSNPNLLGLGQPHLGWVYHLKPKQGRSSRSRSCILLRAILHKFQSMWATSSPQHRLLRQVTLRLHGPHYHHHHHPWHQL

SEQ ID NO: 171005 - protein, 86 aa, Zea Mays
MYIWFNKNQERNLVREIIKSGAKDLSLLVFGAPDSVRCIKAILLQTSHSREFEDALRYNAPDCPVSQRSNSSLRTNGRLVRRNSDE

SEQ ID NO: 171006 - protein, 89 aa, Zea Mays
MHRDSSWIIDSGCTNHMTGEKRMFSSYEKNDDSQRAITFGDRNQGLVKGLGKIAISPDHSISNVCLVDSLDYNLLSVSQLCKMGYNCLF

SEQ ID NO: 171007 - protein, 112 aa, Zea Mays
MPSRKASWSPSSTHDRSLEVLHMDLFGPIAYISISGSKYYLVIVDDYSRFTWVFFLQEKSQTQETLKRFLRRTQNEFELRIKKIRSDNGKDFLRRRVSSMSSLLPTHLNKMV

SEQ ID NO: 171008 - protein, 75 aa, Zea Mays
MQASPLIQDEDQAQEDENEDQEDEPPQEEDMDQGGDKDDQDKENDQEIRDQRPPHPRVHQPIQRDHPVNSILSDM

SEQ ID NO: 171009 - protein, 82 aa, Zea Mays
MSCTSHHPSCMLKLCRDLMVRPYRYTFSIVRCPRRGTMRLHILRGMKAEVILAFADICTHEVYMKCDIIVLLLWFLPARCGN

SEQ ID NO: 171010 - protein, 91 aa, Zea Mays
MWERVVGRWMQRQKSSGASVLFSHKTLGGHPFSLHPPSLGRHPPPFFPWLVVPSPPMAAAHHFFLLHRSPPPPRSKDREEEEQDGLKRKRG

SEQ ID NO: 171011 - protein, 63 aa, Zea Mays
MFSRISNNVFISPRKEFRKRKGFEKNKKNKKENLFPRTTHCSNWPSQSISCVRALFTLSLGTD

SEQ ID NO: 171012 - protein, 50 aa, Zea Mays
MAAILHCFLPQDLPLRSKDREKEGHVELKGKRGSRRCSSPSPLEDFLGKP

SEQ ID NO: 171013 - protein, 183 aa, Zea Mays
MKYITHGSDEDVVKGCPKAAGSEESSSNDACYRSGVRLVGAQRIVGGRRASPSHAHQGVPLLVHASGRHHRSRLLRPSPRSPLGSSCCACLENRCLRVPRGATATAWPSGSRRAPWNHLHHVLRGATATTRPSRTAPMHLENCHHRAPLGNRLRLCIRVVRQNRTLATWGSFIDAWNLVRLNQ

SEQ ID NO: 171014 - protein, 68 aa, Zea Mays
MLAILLPFRGVPSRVVFGFNFGFGPSAGYKLAKGTSSWMDSSITSFISIFSSCVGNKSILKYFKNKPA

SEQ ID NO: 171015 - protein, 65 aa, Zea Mays
MKKEKKKTWRLGRFTSFWPTREFHHTTHTSLRTRAPTTMAHWSAAIYPFGRVPTCGASASAAPCR

SEQ ID NO: 171016 - protein, 53 aa, Zea Mays
MYITLLKKIYYVHDNMPTKIIANKNILRINKNHSIVNLTTTYCFLKTNQKTSI

SEQ ID NO: 171017 - protein, 116 aa, Zea Mays
MENKKQIKKVHTGHFAECNTRQRGSLPSVWVITLGKEHRPGHRLRFFAECYVAGTRQRGRRCRVPHRTLGKEPDMETLPGGLFAECPNWHSAKKASLPSAARRTLGKDIFVAECHR

SEQ ID NO: 171018 - protein, 119 aa, Zea Mays
MEELDNQRCRLQESADEVTRLKQLISAKDATIKELRASKKSTAQELETARLAAKVAEETSVTLKAQRDRAMDKAIWAGRILMRRPGVVVPEDIRADVNAAPDSSSRPSSSVAPEKDIAK

SEQ ID NO: 171019 - protein, 56 aa, Zea Mays
MVRSSVRPIVQSFIRSFVQIIFVQPLCCRNSDRSFVRSIDRSSFVHSSYSSFIVRS

SEQ ID NO: 171020 - protein, 156 aa, Zea Mays
MEAYLVTHNQCRALRIQEPTSSNPVQPKRVEDPQILEGHPVSTRGEKKAWELPEGAIVLEGMPVFPQAMNKQEHPESSQDPPSELFEPLTMKKIPAPSREIKEEVASTLPAPPPSEELQEPVPLEEEFNPVLPSQSPPEEVINISSLLTHLGDFLD

SEQ ID NO: 171021 - protein, 117 aa, Zea Mays
MDHHDKCLFCDQHEETVQYILLSCVFSRNIWWQVWCKVGLQYLAPGPEDMIFQDWWSNAEGQVSKEKRKGFNTLVILVAWWLWKHRNTCVFEGASPNTRDILQHIPGGCYAVGYGRG

SEQ ID NO: 171022 - protein, 67 aa, Zea Mays
MILFYQGSVPKNIVPTEEVTKTGSISTLSLSQTSLRPSEPSSLISWVTKTPQGPPHTWCLLLRLQIT

SEQ ID NO: 171023 - protein, 127 aa, Zea Mays
MKSKEVVQLAHHRHLEFLHHYPVKLFTRLLISRTKYYVIDIYLAYKQIIITSLSKKSRIRFPNLESIRNEKISKAFIPCSWSLVKSIERLRELINMVGIPIILEARGCSTSTSSLIGPLRKVLFTSI

SEQ ID NO: 171024 - protein, 91 aa, Zea Mays
MPRIRSSSEAPGHFRKSEGLLPSLAKVIVSTNVLVHLLEQLLQGLRRLPSKVLSWLGSSGCRAAAPVAEVFFSAIARVYSFRRCSKKKKKK

SEQ ID NO: 171025 - protein, 114 aa, Zea Mays
MSEPILVEEIDTATPEAPSKICDYIVRHASGKKLSEEEIFEANHYARELKYPKGALVFNGTDEDDFLYCLPDNKELSVCREMARSMGFPKLEAGLCAMTKDDLAGSLAYNSLKV

SEQ ID NO: 171026 - protein, 109 aa, Zea Mays
MSPGAPVNRTSVAHCSSSQTAPSAKHAPTPALFHLLPPLSLVSPSPVPLGDLASLAQWLAARARRPAVWPSQLPLLHPRRGQPTRQHARRGQPARVALLGTASAVASQR

SEQ ID NO: 171027 - protein, 56 aa, Zea Mays
MNPQRGSVPGSPQEPRREISRLGCVSTPVGASEFLAEPGCRRWSRSALWTGFNSWS

SEQ ID NO: 171028 - protein, 66 aa, Zea Mays
MKKIPAPSLEVKEEAASTPLALPPSEELQEPVQTEEEFDPVLPSQLPPEEVINISSLLTHQGDVSD

SEQ ID NO: 171029 - protein, 54 aa, Zea Mays
MVKHLKIEFDFLDEVDPLLLALWCLHPSFRRFRYVDGCETGYRLNMVYFAYELG

SEQ ID NO: 171030 - protein, 111 aa, Zea Mays
MLIQSSLMERVRAAQQQDCLLQEARLRVDVSKYVAACEVCQRVKAEHKRPAGLLKPLEIPEWKWEHITMDFVVGLPRSPRGRDAIWVVVDRLTKSAHFIPMKTTNSASELV

SEQ ID NO: 171031 - protein, 135 aa, Zea Mays
MAGYYQRFIEGFSKIVRPMTALLAKKVEFKWTLACQKSFETLKKKLTMAPVLIIPDVHRPFSVYCDASYTGLGCVLMQEGRVVAYSSRQLKIHEKNYPTHDLELAAVVHALKTWRHYLYGQKCDIYTDHKSLKYI

SEQ ID NO: 171032 - protein, 218 aa, Zea Mays
MDGKGKDFCEDAEGVVWFKDRLCVPDIKSIRELILKEAHETAYSIHPASEKMYQDLKKRFWWYGMKREIAEYVAVCDNCQGIKAEHQRPVGWLQPLQIPQWKWDEIEMDFIVGLPRTLTGYDSIWVVVDHLTKATHFIPVKTTYNSAVLAKLYMSRIVCLHGVPKKIVSDRGTHFTSHFLQQLHEALGTHLKFSSAYHLQTDGQTERTNQILEDMLRA

SEQ ID NO: 171033 - protein, 68 aa, Zea Mays
MGKLCLDQTNTRKATTQWEWRDGESSVYPPWQEAGRWSICALGWREPILVFEKLRCELIYARVKCYIC

SEQ ID NO: 171034 - protein, 148 aa, Zea Mays
MCAARHRLHVLASPGVRSRSPSPGRPRRRASPCRSSFLAQQASLADTHPLCRVCSSMLSTCTDTESRLSRAVVDATWGWLFAQPSSSSPRNLDARHSRCSTSSCCHSCVVTPLAPRRQSTLLLVVNPCCVHDVLVDSDDLSSNCVLPT

SEQ ID NO: 171035 - protein, 70 aa, Zea Mays
MSDYFDPSPYSHTEHSVRRPLIISYSTRLNIPCLNRTQNPVSATILKCHNLISPTKNPKPIRSLRETFIF

SEQ ID NO: 171036 - protein, 57 aa, Zea Mays
MIKDYLNWPHALDMGQGKLEPVYSIREKTTAHWAWEMVGVACTLLARDWMEEYCALG

SEQ ID NO: 171037 - protein, 73 aa, Zea Mays
MAAILHCFLPQDLPLRSKDREEEEHVELKRKRGSRRCSSPSLLAYFLGETLDMDGILVPPCNYVLLEVVDHGD

SEQ ID NO: 171038 - protein, 52 aa, Zea Mays
MFHLTLASLNAGACCSSRGVGSSSTSTFTLIIMLPRHSHDLIRNFLSKDVCF

SEQ ID NO: 171039 - protein, 92 aa, Zea Mays
MAHPAAPLSICLATSFPAPMVIEALGAHIRTEAFGVRDDVVESRSVVARVPRQRDSGAGGRRTAPRTRSALGFFSVELSSAPDSCSSNLHPR

SEQ ID NO: 171040 - protein, 57 aa, Zea Mays
MAKFIIYSIVLKKGNNRNNGAVTQRQRGQQTSCCLLVSSVKRISEALGQALGSRLAE

SEQ ID NO: 171041 - protein, 185 aa, Zea Mays
MLEGREGVVHQLIMERINQSSQEAVLPFGICVDILWVITRQLQKLVPIFADGQGTLLQGEKLLLPYYHQSLGHMVAMEVIPELLPSNGFRVGMSGEVGLPPRLCCSPQLSGTIQHLLAVVALGSVQLTLHGTQPIFRIHGICRVGKDRGMAPHEFCLLVLGYLWYLDLHWMLRWWWLLLSLLHRC

SEQ ID NO: 171042 - protein, 58 aa, Zea Mays
MERLWWRRTPRSASFQLARLAELRKEETKPRISIVMHKFGGQVYPGPAYMDHVYMENS

SEQ ID NO: 171043 - protein, 63 aa, Zea Mays
MGRKLRKEKAHSQFYFFLFFFLFCFKFQIQGFDSNSSLYGTFIFTLNVQFEHSLNFINLCFVF

SEQ ID NO: 171044 - protein, 68 aa, Zea Mays
MLLKWLLCGMGGSICLAHFIWEELLLLPCIMHSSSIALKFHRDLMVRPYRYIEHHMLPEKGYDAASYP

SEQ ID NO: 171045 - protein, 81 aa, Zea Mays
MLPRFFFLFFFRNRRRKTRKRPLTRFVFSVFFDVTEGEKQGNNVDSVCGVIKGEMVAALGFEWWKNTMQPATNDAKAHKFN

SEQ ID NO: 171046 - protein, 137 aa, Zea Mays
MSLFFFPSARPRTPSRSATLVPASSSPRAMELPVSSSFPAPASARRFPGSDLPRRCASLSLLAASGRAFQRATISCSMPPALCTSQTWAAVCPAALALCSNFCSAELLMARVLPPCSILSAVLSSAELPVRPARAQP

SEQ ID NO: 171047 - protein, 51 aa, Zea Mays
MVVLWRSNVVCVAAAVLARSSRCRIVRPNVTSIYSSCRCSSSPRHLRARLS

SEQ ID NO: 171048 - protein, 52 aa, Zea Mays
MFHLTFALLNAGACCSSRGVGSSSTYTFTLIITLPRRSHDLIRNFLSKDVCF

SEQ ID NO: 171049 - protein, 118 aa, Zea Mays
MVGSGGRHRHPVCPRQALRPTMLQLYGIASSCAFLRACHSLPRRHPARGRLCRDCCALLDTLPSCLQLCLPSSSSSFCGCLACVCVGVRMELWLKKKVKFESDARHGPRRPTLCPRRA

SEQ ID NO: 171050 - protein, 51 aa, Zea Mays
MAAPLHGFFLPLDLPPRSKDQEEKEHIELKRERGSRRCSSPSLLEDILGET

SEQ ID NO: 171051 - protein, 52 aa, Zea Mays
MFHLTLALLNVGACCSSREVGSSSTSTFTLIITLPRRSHDLIRNFFSKDVCF

SEQ ID NO: 171052 - protein, 90 aa, Zea Mays
MTELEKISYEVVMASHKLRHYFEAFKVRVTSDRGLGELFRNPEASARIAKWAAELSGYHITFEPRTTIKSQVLADFIVDWTGPAWPQEES

SEQ ID NO: 171053 - protein, 82 aa, Zea Mays
MTCSSHHPSCILKLCRDLMVRPYRYIFSIVRCPRRGTMRLHTLRGMKAEVILAFADIYTHEVYMKCDITMLLLWFLPARCGD

SEQ ID NO: 171054 - protein, 120 aa, Zea Mays
MDFVLGLPRTKKGRDSIFVVVDRFSKMAHFIPCHKTDDASIVAELFFIEIIRLHGIPKTIVFDRDAKFLSHFWRSLWNKLGTKLLFSTTCHPQTDGQTEVVNRTLSTMLRAILDKKFTRI

SEQ ID NO: 171055 - protein, 51 aa, Zea Mays
MVRSQFLHLHLLGDFALIELKKRKLHVVAPLKTFLPLQKGKGCHERKNKKK

SEQ ID NO: 171056 - protein, 65 aa, Zea Mays
MHPRRRARGPFSSVRRFHGARPGRRSSSPSSSSPWPRQALPHSSWPVVVLLFLTMLSCSSSLVNK

SEQ ID NO: 171057 - protein, 146 aa, Zea Mays
MDLSVATPTQILERSMLMRCICTSMSRMSHLPRERILALKANQERKRQAKVQIEEEYSSDDDLDANIALMVRKTIKMLKKLNREGIKFDSRKKKFFSSKRKPISEMYCYNCGELGYLDHQCNKLKKTSSRARKKMTVMMRKRKRDF

SEQ ID NO: 171058 - protein, 103 aa, Zea Mays
MKKRCKTLTYLFHQVYHKMMKNMRGMQIKIHLSLINKQGYKPKMLMLQDLLSKWLTEETHHYFKHTHKTKSLGVLHKWLLLDHINMLILLNITPLFLVLSLHV

SEQ ID NO: 171059 - protein, 88 aa, Zea Mays
MSGLISFFAYYVLAGTLFSFGSNSAIILKNTLKPASDILYLAFNIYSFSTHRSIVNSLAQLLDSSYKCSFVAFFRDSIPFMKNIDGSV

SEQ ID NO: 171060 - protein, 142 aa, Zea Mays
MSEVLFSSIPGCWWTPGCYNPEGPMEWISHEAEAFEEILNSRGDICAFSGARGIATVLEKKGCEHVKSLAQSEATLSTEDIKDPSPEASMVGGKFFTDIWDNGGRELAQEIIQRSEKGIHDARKVAEAAKKSIEPEGHIGIN

SEQ ID NO: 171061 - protein, 52 aa, Zea Mays
MFHLTLALLNAGACCSSREVGSSSKSTFTLIITLLKRSHDLIRSFLSKDVCF

SEQ ID NO: 171062 - protein, 80 aa, Zea Mays
MITKITLSSSFPPSFLPSSSLQTPMEDSHPHDGHQAGRLHLGEEEVGAARVEGWSCNHLGKKERDWGGCKSGREEERGGA

SEQ ID NO: 171063 - protein, 78 aa, Zea Mays
MGGVRPSAVFFSFFVLCFPFSFYFQIYNLNSHSNSNFVVNLFSHHMFNLNMAWVHLFIFNIYFVKSSALFSPISSIPN

SEQ ID NO: 171064 - protein, 60 aa, Zea Mays
MSHPVLEGKLNANHARARIRTHIHSDYIIGHHHTMLELNSGKVLSYIKMSETSTESITQP

SEQ ID NO: 171065 - protein, 76 aa, Zea Mays
MSGRAGSRRGGHGEQRTRIGRGERGRAWGLGAGREERAEGRARWRAEHQREREREQRRQWMREIAVQGGEEKQKPS

SEQ ID NO: 171066 - protein, 52 aa, Zea Mays
MCSAITLNSTSASWHGDPSCILHIGRVMPKFNFKGLITMVMSFSLFFSSAFT

SEQ ID NO: 171067 - protein, 57 aa, Zea Mays
MVRRCPIMVSKSRASETNPNPYPNPNTSVGASGGKLGVSGSVAAGELDVDVADFFAF

SEQ ID NO: 171068 - protein, 946 aa, Zea Mays
MYGVLHPNLLAEKKYYVSFIDDYSKFTWVYLIKYKSEVFQKFHEFQSLVERLFDKKILAVQTDWGGEYQRLNTFFNKIGISHLVSCPHAHQQNGSAERKHRLIVEVGLSLLAHASMPLKFWDEAFLAAAYLINRTPTKILNLDTPFERLFHKQPDYSVLRIFGCVCWPNLRPYNSHKLQFRSKQCVFLGYSSLHKGFKCLDVSTGRVYVSRDVTFDENVFPFASLHSNAGARLRSEIQLLTPDLLNPATFNSGVDSLIDHAADMSTDPNQISGDNSVQDQAEHTPNMDVLAPSVPNTAPEADVVQIPGSASHSRSAPAAPSTAAPSPTCRGDSRVATHPSASHDYVASVDMSRGIAGREESFLTAPTTATSPASSEPSGSLPATAADAQVPEPILGGVSSMDPASTRPRTRLQQGVRKPKVYTDGTIRYGCFTSSGEPYDLNEALGDVNWKDAMDIEYSALMKNKTWHLVPPKKGRNVIGCKWVYKIKRKADGSLDRYKARLVAKGYKQQYGIDYDDTFSPVVKHATIRIILSIAVSRGWSLRQLDVQNAFLHGVLEEEVYMQQPPGYEDSTKLNYVCKLDKALYGLKQAPRAWYSRLSNKLLSLGFQASKADTSLFFYNKGSVTIFVLVYVDDIIVASSTQKATEALLSDLNKEFALKDLGDLNYFLGIEVNKVRDGIILTQDKYASDLLKKVGMSDCKPISTPLSTSEKLSIHEGSPLGEKDITQYRSIVGALQYLTLTRPDIAFSVNKVCQFLHAPTTLHWAAVKRILRYIKQCTNLGLHIHRSDSTLVSAFSDADWAGSVDDRKSTGGFAVFLGSNLVSWSARKQPTVSRSSTESEYKALANATAELIWVQILLTEISIKSPRAAKLWCDNLGAKYLSANPIFHARTKHIEVDYHFVRDQVVKKLLDIEYVPTGDQVADGFTKPLSVRLLENFKVNLNLTRL

SEQ ID NO: 171069 - protein, 65 aa, Zea Mays
MHPDSDCNGLDMVGKIRRLSNQPNWFHPKIRPESTGIVETSQRQSVLVLRHRLLGRWAVYRVGAH

SEQ ID NO: 171070 - protein, 55 aa, Zea Mays
MKVKLNWKFEFGIKKKNNRKEKRKKKKTENPLLGQIPLTWPISTKSLPCARLPAR

SEQ ID NO: 171071 - protein, 54 aa, Zea Mays
MNITLFYDLVDRVFLIESHHAYKSINIFFTSFIPQTYPPRHHFDQTNQIHDKQY

SEQ ID NO: 171072 - protein, 171 aa, Zea Mays
MNWLTKYQASLSCDKRIVKLVSLSGEEVLVELVLSGSRKGSCHQVTTHIEEIKPSEAIRVVSDFPDVFPEELPGMPPERKVEFAIELIPGTAPISKRAYRVSRPELVELKKQIDELLEKGYIRPSISPWAALVLFMEKDVTKRMCIDYKSLNEVTLRTSTLCLELKTYSIS

SEQ ID NO: 171073 - protein, 65 aa, Zea Mays
MGPLDEPHTSLALSGKEQTLTKRTHLSSLRSARQPTTRDPRRAPFPDFRRQLATSPTSPVLEDKG

SEQ ID NO: 171074 - protein, 110 aa, Zea Mays
MEWRVPTTVIEIRSFLGLVGYYRRFIEGFSKVAKPMTSLLEKGREFKWDEKCQESFDQLKKRLMSPPVLVMPDLQKGFDIYCDACGQGLGCVLMQEGHVIAYASRQLRKH

SEQ ID NO: 171075 - protein, 103 aa, Zea Mays
MDFIVGLPRTPAGYDSIWVIVDRLTKVAHFIPVRANYTGAKLAELYMTRIVCLHGVPKKIVSDRGSQFTSRFWKKLHESLDTKLNFSSAYHPQTDGQTERTNQ

SEQ ID NO: 171076 - protein, 173 aa, Zea Mays
MARIVCLHGVPKKIVSDRGTQFTSHFRQQLREALGTHLKFSSAYHPQTDGQTKRTNQILEDMLRAYALQDKIGWDKRLPYAEFSYNNSYQASLKTLPFEALYGRNCRTPLHWDQLGERQVFRPDILLEAKENIRMVRENLKAAHSRQRSYADTRRRELSFEVGDYVYLKVSPI

SEQ ID NO: 171077 - protein, 115 aa, Zea Mays
MSFLRPEIAYIWRSVAPSRPIGLICIAPPNTIGKEEPERGSVWERGRRIGEGRRGKKRSAPYRFRNRVRKTHPIPAEASVESLGGLGHLLRLNCLPEYQTRCGATVRRGLLVWID

SEQ ID NO: 171078 - protein, 67 aa, Zea Mays
MGAGDAHRPYAERLLLVRRSARGVDRCRPRRRPKPGGPRRPRQPSSARTVSARLWRAPRGAALQRPA

SEQ ID NO: 171079 - protein, 72 aa, Zea Mays
MMPPSGGCCLETNGCEPSSPRSGRLRQPGPSFASDILAASAPTTWWRWFQGTETERKCRRRRGIHCQPVYSG

SEQ ID NO: 171080 - protein, 51 aa, Zea Mays
MYPFQTERIPLTITIFITRTIILVTTCKPYISDQVSLITGAPLAAHNHEHG

SEQ ID NO: 171081 - protein, 72 aa, Zea Mays
MFVSLSSKTLGTFPKIVKSLKCSSHQPCADLGWRCMWYLFLLLFFLFLCSPLIHAAVLRYMFLILSWGLHHR

SEQ ID NO: 171082 - protein, 83 aa, Zea Mays
MDWTLGTHKRSLNHIIPSASSRKSLPLPSRISCRISLIFSSFFCASLISRSRVGSNSTVTPRILFINPRLNLSNSLANSKGIG

SEQ ID NO: 171083 - protein, 53 aa, Zea Mays
MKLCALACLCLRGRCVLCLVWLVMLCWCDYSRSWRGWFDAVVSAFVVLVRLRP

SEQ ID NO: 171084 - protein, 133 aa, Zea Mays
MSFLAGSSSCGCKFRLENWWEEGRRKGGTQGDFVINSCLFVLQFNRLDVYVCELVEVLSRNFVGARTAVVLADSGNFSWVISGNQWENHVELFHTFPTSTYALDLELYFRRYRCLNPGMLLSKKTDLQVGKQQ

SEQ ID NO: 171085 - protein, 64 aa, Zea Mays
MVKSIHDSSYIIHFGLTNPLNHFNLYSNHMYVVISQVLSIYIFKPIQRPYYIHLHCLIGYLTLC

SEQ ID NO: 171086 - protein, 171 aa, Zea Mays
MRGGMKGLCPVGGRERRLKEKAADHVGGGANHALGPAVLSRGVGTRETQLDAVSEEERAGGVVVELAAIVALQGTDRAPELGGYPGEKVSEGGKRVGLQPKGESPKEMGVVIQNDQVVFVAGEAKDRRCPEITVDKIKGLNNLGRGSRKRKTGVTAELTGMTEVLRRAPSI

SEQ ID NO: 171087 - protein, 88 aa, Zea Mays
MLCSLCSVPAASSPALPLFPWSCVSSYSTSSCHPSPRSALFSCAVGCSWSCAVNLPCELAPPRLLVFLSVVRYCCVGHPWPQAITCSA

SEQ ID NO: 171088 - protein, 68 aa, Zea Mays
MSICSHGSLDGFGILHSKLFENILNVLCLANEGAFLELLDLESKEIHQLPHHGHLEFLYHNSTKLFTR

SEQ ID NO: 171089 - protein, 133 aa, Zea Mays
MYLLLFAILGHETLVADVGEEKTFVDGDVGGVLVGGVDGALVGVPFSSYVRLATLLLVVVFLLFHLLLPFLVIVPVTITCLWTFSNVVTRLTTPVANPLGAGFVLLPLPLLEDLLEALNDKSHFVVVKLEGIN

SEQ ID NO: 171090 - protein, 86 aa, Zea Mays
MGSSYCGLAVPDPLHRRRGFTAVTRVGVLHHDRATPQAFNHVATSRTSSPITVVAPQPVSATVKRAGDSPLLSGHRVSSPNSLATA

SEQ ID NO: 171091 - protein, 88 aa, Zea Mays
MIHCSKQIVLTRYFKPQIELNNILKESQLRSEILVDIELNSPNITNTISFPRTTTIGCITLPCVNNTYRYHFIVCIGMQCVGPLTSYL

SEQ ID NO: 171092 - protein, 75 aa, Zea Mays
MNAYKCNAYVLCLHTSKGMKPHRTPPRATYDAKLYRYGRTIGHDQTSDANESCNAYGMLHLSIYFTSFRYNTNLK

SEQ ID NO: 171093 - protein, 90 aa, Zea Mays
MYCNVCVTGKTLLGKVRNSETEFVKWSGAPAGLSEFRWTSTTIGGPNDLGGSVTAGIGAKPISADVMRHFQKEFSKTYLEIFFPSYLSTF

SEQ ID NO: 171094 - protein, 142 aa, Zea Mays
MTARNRTRRRRSARTGGARSASMASRGGTRPTTRRRPWEKQRPGSQPREGRRGAETRAAACAQGGRRSGRAQRGATGTVEQATRGAGSWAWARRWRANRARPMNGTGGSSASWRPTRVGEARRAMGGREALGERERRREEAR

SEQ ID NO: 171095 - protein, 62 aa, Zea Mays
MIFTKCSTKKLEQVVDRHPHLRQDPRRLDAEENKSVRGRRILDADKDEARFDVALTLFPVKC

SEQ ID NO: 171096 - protein, 59 aa, Zea Mays
MSRRSRGGIYSPIGFVRLRPGVAVAMRRRSKCRSVPSNRSSSFLCSPIGSTGGRGTPPV

SEQ ID NO: 171097 - protein, 56 aa, Zea Mays
MLSTTGRSHMRLGTGHSFAFANVWRRPCREPSLGSSSLATWDPTTSPRSSMTWLFG

SEQ ID NO: 171098 - protein, 62 aa, Zea Mays
MCKSTTKLKFKFEIQKEERKIKRKRKKGKKKKKWRLIQFLAIGPSSSSAAAQLLLLAPTGGA

SEQ ID NO: 171099 - protein, 86 aa, Zea Mays
MESNKFQKYTSKFWVVFNLGFVRVTGRDRQISIWWRRAGVRSSDGGCVAPAMNDELRRRTASSGDNDELRRRTTSERVRGNESELG

SEQ ID NO: 171100 - protein, 50 aa, Zea Mays
MHRGLPGINTMLVFVRWHPLGDQLLFRYLLRLSIFRLVHQLHLLEKLTRS

SEQ ID NO: 171101 - protein, 63 aa, Zea Mays
MKLPAAPLAPPMQPRRHSFLPLGPILLLCLALHPFPTPRPPKAPTCPPADAHSLATQRPRPDA

SEQ ID NO: 171102 - protein, 117 aa, Zea Mays
MVSNILSINIFCQINTFPLVTQCSSMDQAVSLAARSRRFESSFKTLQGKPKHTTWRGTPSPHTSTVPSIPWQQKGAHRLSVQCLTDPDCRRAVTALVPTITGMGDHVSGRVRRAICA

SEQ ID NO: 171103 - protein, 111 aa, Zea Mays
MLSCELSTCHDSIASLKSINDDLNAKLEKSSKSTSCVEHVEICTRCKDFDVDACSDHLVSISKLNDEVASLNTQLKASKNDFDKLKFARDAYTIGRHPSIKDGLGFKREAK

SEQ ID NO: 171104 - protein, 112 aa, Zea Mays
MERQKSLLLIKAAIVVGHSAFCHFLFCSFRVLPFRFPPPRAQSIPMLCHQYSRRLAKIKKVHMAPKGFKPTTSQANASGSYHYTTCVFMSISITKHIYYISPQAHLLPLHNA

SEQ ID NO: 171105 - protein, 55 aa, Zea Mays
MRKNKTEVREDSVLHLGSFAYSLSGGVCASHGLYNITTLHSLLALVCNKITQACF

SEQ ID NO: 171106 - protein, 102 aa, Zea Mays
MQCVGHLPSYLLEYKTTSSANITSMNAYKCNAYKCNAYVLCLHTSKGMKPHRTPPRATYDAKLYRYGRTIGHDQTSDANESFNAYGMLHLSIHFTSFRYKTN

SEQ ID NO: 171107 - protein, 59 aa, Zea Mays
MQKKKKKMHSPTRLPSAQPAHLLSLCPYDAWTCCLDSLQSPIIALHVCCLFVVRYVSHP

SEQ ID NO: 171108 - protein, 59 aa, Zea Mays
MRNQKSFQMHINNKHLKENFYYHNFINNQMYYFYLMIFIVSHIVNKSWCLSIQVALLVF

SEQ ID NO: 171109 - protein, 69 aa, Zea Mays
MTSDAASNGPQPFSHIHSPKINFWVNIFLRILHSTPLKKNSSSNSTTPTKTSKVPHIAPPFKTWVHYWS

SEQ ID NO: 171110 - protein, 63 aa, Zea Mays
MCSLVALLGCLWIPGCYKKKRDRFRRGLSTKLRDRLNTVRANSYNELVNMAISQEDCITAQQA

SEQ ID NO: 171111 - protein, 54 aa, Zea Mays
MSRVALSRLVLRPATTPTRVLRGSSLASHGITLVRLLPRRRRGRCMYIVSCSCC

SEQ ID NO: 171112 - protein, 154 aa, Zea Mays
MAHPFSRAPGSRFLNLGAPCARRSQLGLALCHGAGRQVVFSTSLMALVSAHLHGCVRTSLLPISPSSSRPPSSLCPARSKLPAPCRTPCVAPCSLFLCRSLLPTHALLQLGPAMELARDARRSAYLWSLLALSCIAHPNPWSTGCPAVTSLVAL

SEQ ID NO: 171113 - protein, 56 aa, Zea Mays
MGKNISLILSSPSTQCAPPLLDPCCAGGRSRGRRKSWRGAAMGGEGSQPKAKGERG

SEQ ID NO: 171114 - protein, 119 aa, Zea Mays
MVSGMSLHNQGATTIQTDYTQLRISNHTAYVPLNPCICQPFSRCPPLHEQVRANREHITLPGVLLCQEGTCYSHHLSTPSARLSLHVWNSRVQAYPIPYQGMLLFAKSQPQQASQRYDP

SEQ ID NO: 171115 - protein, 74 aa, Zea Mays
MSTIPMDPPLHEQVRATREHTTPFRRSVARRVRATLAISPLLVCDCLFMYGIAGFKLTLSHIQGMWLVKIVLDQ

SEQ ID NO: 171116 - protein, 62 aa, Zea Mays
MRSLFLPVIIGFWRLWIMGIKGLEVGFDVGLGFDPEFSFLQNGRFDSFCSCQFSVVLVTSKK

SEQ ID NO: 171117 - protein, 96 aa, Zea Mays
MFRPRVNQLVLEEVSAQLSMHCRGLHRIHTLVRLPPLAPRWDPQDRVQSPHATSVVRLGIMPMFIAEDCQYPHPKQATNSRFWQGIQHCQSQSSQC

SEQ ID NO: 171118 - protein, 56 aa, Zea Mays
MDNTRLVLLDVNHLTIILVLALDQAGSSISITMRSSPRLGSTWLVFRIMRLINVPE

SEQ ID NO: 171119 - protein, 105 aa, Zea Mays
MDAQATEKSRGEQGAWGTAARGRWPSLRERRLSLSQRARGSRLGAGRKKIELGAVEKVQGAALRRGGRGRRWTRAASTGEQRGRGLAMEELGRAPWGRAESSERS

SEQ ID NO: 171120 - protein, 147 aa, Zea Mays
MGKNISLILSSPSTQCAPPLLDPCCVGGDLEGGGSRGEGLPWEERAASPREKERGAAKCWRGGKGWRPSRGKRGKRPPLGFSLREKRSDATDDSDLASNGPQPFSHIHAPKINPLATFFWDITLYPPLKRIRPRFRPLQTKHPWYPI

SEQ ID NO: 171121 - protein, 63 aa, Zea Mays
MLQFWLYRILPKSLLLKLMQAELELELCYNRRGTRLLSLVKHWDKKIWDYQLMRRNALLFCLQ

SEQ ID NO: 171122 - protein, 56 aa, Zea Mays
MYRYALGSLGYEIDGRGSSMSTTRPSPQIYNLRLGFYLKSGTRFSNLVRTSRSNGQ

SEQ ID NO: 171123 - protein, 118 aa, Zea Mays
MPGSPVRAPPRPWPPVESLCPCSDGARPSLSAPSSYFPWALSSRGSRSSSSGGRGAPPPKPNRAAETTLPWRHRPAVVCPCSTPLSSPHRPTVAQLGVSSVHLQLIEFPCFSLPVLCS

SEQ ID NO: 171124 - protein, 82 aa, Zea Mays
MSCTSHHPYCILKLCRDLMVRPYRYTFSIVRCPRRGTMRLHILRGMKAEVILAFADICTHEVYMKCDITMLLLWFLPARCGN

SEQ ID NO: 171125 - protein, 57 aa, Zea Mays
MGLERATPSTAGGYVEGSSTTTSPAARQRRHCPTSARVANAMAAHRPPWPRSHGGSA

SEQ ID NO: 171126 - protein, 92 aa, Zea Mays
MDWGRTEQALNDGVEGPCGGSGHGWQTALAPRYTIIMNDRFYAMNMTRRTTGAGSYQLLGRTDTHRRWMVAGLSSPSPASNCHRFLATKAQR

SEQ ID NO: 171127 - protein, 113 aa, Zea Mays
MATGIPISMDCAASHLRHAVLATDVPISMGCVVCHLRHAILATDVPISMGSIVYQFCHHILDTGVPISRDNAKFRHIIFVDDVSIPMGDATRGNHDSAITSSIDGGLVDQHKG

SEQ ID NO: 171128 - protein, 103 aa, Zea Mays
MVHTKTNKTLRELNTLISQLNSPTKLGNLASITNQVLHLRLKQGSNLHELQVIVSKNKPQFIEPAFSSLNSSSIAPFLSPLFNAFYLINSHDKRPTYLTKSIP

SEQ ID NO: 171129 - protein, 170 aa, Zea Mays
MAFQAEKGLTSWGALARVLTLTLKARNVLGGCRPWYPKNPTAFLTRRVGEENADTLLWTMPCSIMGTRCRSNSYLWDVGYRYGRIATSCALGLRTMLWSWAHEGGSPLGSVKTSLKQSSSLSKRHSLVVVVWTLGVATPDQHTTPIGAGMTFPCFKVPKHLAQGRQPLCS

SEQ ID NO: 171130 - protein, 83 aa, Zea Mays
MIGSRSGAVNFSLEADSDRRRATTRSRAAPRHRETVAHGRSRDADDDDGGLQCPPVGSSHVSAAQPNRRVDECDALTVTKIYL

SEQ ID NO: 171131 - protein, 52 aa, Zea Mays
MMGQWGIESRDGPSKWGRNGPRGRRIGPGRGCLALSLFFFFFSFLFFQTEFN

SEQ ID NO: 171132 - protein, 59 aa, Zea Mays
MLPTMEGVDGGIGPHNRGAEGRRCCLRRRSVGRICVDDGETSRTKFVDAYGTLLRSSNR

SEQ ID NO: 171133 - protein, 109 aa, Zea Mays
MKVKQVLIRVPHMLKNWRPLFKTKGLVKLDSYVRIGHHQLAQRPTAPLISCLDQGSPAQDDADWPLLCIPINEDEGATSKCVGFAIFYSPLNPRLIYRGGMLAMEVHYL

SEQ ID NO: 171134 - protein, 71 aa, Zea Mays
MSSAGSYARPGGGRSRARAGGAEEMDARAQKLEQKHHAREKLGWRLKKRLHAYKKESRGGRKIPGRGGWAA

SEQ ID NO: 171135 - protein, 60 aa, Zea Mays
MIYTNPETKKSRLEKERSTSTRKDKIVKVNLEVNQDLNIMDKVFSCYNLSYPNLSSLYPT

SEQ ID NO: 171136 - protein, 151 aa, Zea Mays
MDSGCSFHMTGSSKWFSSLDPVIGKEYITFRDKSRGKVVSHGTIRVNESFILKDVALVSNLHFNLLLVSQLLEDDYEVRFKKGLYQVLDARGDLICQISPFCRVFSVDFSHSFGPSRCLLVGSSSSVWKWHRRLGHLSFGLLCRLSSLDLI

SEQ ID NO: 171137 - protein, 60 aa, Zea Mays
MAPTGGPAWSVAHARVWIRWRVEPADQSHQPLLTRSLLSVLSSPRKSRAGCWDLTRSLPA

SEQ ID NO: 171138 - protein, 68 aa, Zea Mays
MFLMLSILVVLYHIVWIYNNNLTLTYLGISCCSGVGRSTAAKANTMTVGWSLGCPWTCNAWCTSCLIG

SEQ ID NO: 171139 - protein, 74 aa, Zea Mays
MEPSTMRSTLRRPMLHSSPVSACIRGPYPRDLVNPNRLHIEGSGLPVEIKVHKPHSYPQTPWCLGPLVREPFPY

SEQ ID NO: 171140 - protein, 50 aa, Zea Mays
MHLAPPLLDPCCVGGDLEGGGSSGGWLQGEGGGAAKGGEKGGLAAKKREK

SEQ ID NO: 171141 - protein, 85 aa, Zea Mays
MRGARLRVTRDGEPGRSDSGPLMADRGVSFWDFIFLLFIYFKILFFFFFLHVSYSRYMNKCMFFKIFQNYSTFKQNNIYKQNSIN

SEQ ID NO: 171142 - protein, 51 aa, Zea Mays
MRALILTVQSNRTVPSSSSHTPIRATAQGPQCGDAFVGEQPMSQHVQIRGP

SEQ ID NO: 171143 - protein, 73 aa, Zea Mays
MKGGSTSPVITWGGQQRFGEEFILPDRPASPNRAPHDPHSTVKLLFPRPTVGVIDDVRLLLSLSISDDMQLLA

SEQ ID NO: 171144 - protein, 56 aa, Zea Mays
MGSLFLLIIMCFWRLWIMLIEGLEFGLDVGLGFDLEFNFCRMADSTVSVHAIFPWS

SEQ ID NO: 171145 - protein, 62 aa, Zea Mays
MGRRGRGRRRLQQLGRGRGGRLGLGRRGGGSHPSDRDQWLELALPFELPTPVEKMPKDLLFP

SEQ ID NO: 171146 - protein, 54 aa, Zea Mays
MGRRHGQDPRRHRPMQARPRPPLCCLEKLVNGVALEFIEPVNGEEGMIVFSISG

SEQ ID NO: 171147 - protein, 72 aa, Zea Mays
MDYDQGSSCGRTRCNLVLMKLEPKIPNRAVIISYWFGLVPDLIWVVAFKSNDSRSSIPLRPERLLMIPSTLL

SEQ ID NO: 171148 - protein, 104 aa, Zea Mays
MEEWFYVKNDLIEREDIKEIIQRPIWSRFGLRRPKVAIDQNDEACQKAFSNVCAFIGTRDIVQEHIAYRIWPLVENWDMPKDTRGVNGYLFGYQFFGLFSLIMN

SEQ ID NO: 171149 - protein, 66 aa, Zea Mays
MGEFGCSSFAGAMGVSAHAQENRGEEKELSPSLKGARWRGKSGRWEVEASWLLACSLRASEKEGRK

SEQ ID NO: 171150 - protein, 117 aa, Zea Mays
MGVEHLLDPLFLFNPSCSSSSRSLLRGGGGDLEGGGSSGGWLQGEGGGAAKGGEKGGWRPRKGENRGATTRVLWEKETTPQMSLDFASNCPQLFPHIHAPKINLWQHFFWDITLYPP

SEQ ID NO: 171151 - protein, 114 aa, Zea Mays
MTLIIKRFKTALKGRKGQPSKTKTKGKRSCFKCDKLGHFIANCPDNDSDQEKGNKKEKKKNYKKAKGEAHIGKEWDSDCSSSDSDNEGLAATAFNKSSLFPNEHHTCLMAKEKK

SEQ ID NO: 171152 - protein, 62 aa, Zea Mays
MDLFIDKHGVIGTIKLHPIFYYLPYTWMKRKQVATHFVTPKSVVLSIKVWGFTKWNGKQMSI

SEQ ID NO: 171153 - protein, 98 aa, Zea Mays
MAAMGRELVEEGAAACRSSAHRGIRAEAEHAPWGTRRQGRESWRRGLLGDGEKETSSAGWGWGSAGEPPWEQAKGEQDAPRESWKEQRRPRKMTRQDI

SEQ ID NO: 171154 - protein, 82 aa, Zea Mays
MVCPSCASIASNLVDEGLEPVVGLCWLLSPDHRKSPQFAFHQLHFVDHGGVVSLMRYLEGVPYLLDIFQATHLVVFILAQGC

SEQ ID NO: 171155 - protein, 151 aa, Zea Mays
MADRVTVVPPRDPWPFSTVTVDDLEALVADGLLRPLSGDPQPEWMVPPSGAAPTPPAGYVLSFVSFHEWGFGVPASRFMRALLHYYGVELHNLNPNSIAQAAIFAVVCEGFLGIDPHWDLWTHLFSMEPFALTTGKGGSAWRCGPVAASSS

SEQ ID NO: 171156 - protein, 83 aa, Zea Mays
MVASARREKRKGKISMKESFGEKENVVFYEGELRKKGKCCFLCFVAYEKKGRCFFAFGSKKEISSTSKHFSYISERLRIYYKV

SEQ ID NO: 171157 - protein, 184 aa, Zea Mays
MSVSSFGNPMLLDRVLITLAPVWSRIHSNFSSSTPPKRSAPGLYPQDWAYSLSSSISAFVRCSPTKFWNAKASFSEASSAISFPFFDAAVTVSSAAVAASSAAMSSSIWSICSIVLSKFKSSAEVTSAAAASEGAISISAPSKAARVFWAEALGGVLSITSVTVMILCFLALIVFFDFSGSLSF

SEQ ID NO: 171158 - protein, 67 aa, Zea Mays
MATEIDQTASAAVFTVDDLAPRSSPPLRFALAGNRITSRGEGIFVAGELDSIPVNPRAFPLPCGLCR

SEQ ID NO: 171159 - protein, 295 aa, Zea Mays
MEVGGNRHGFCNQTAPDAKGNESIWVIIDRLTKVAHFIPVKITFGGATLARIYLKEIVCLHGIPRKIVSDRGTQFTSKYWMSLQQAIGTKLDFSTAYHPYSDGQIERVNKVLEDLLRAYVLTFDRNWESSLPYAEFSYNNSHQASIKISPFEALYGRKCQTPLMWSNVGEKKLEGSAFVKEAEEKVALIRKRLLEPQSRQKSYADNRRRELKFEEGDFVYLKVSPMCGVKRFQVKGKLAPRFVGPYPIIGRVGPAAYRLELPESMSDIHNVFHVSQLRKCLQVPEIHIKEETIQI

SEQ ID NO: 171160 - protein, 131 aa, Zea Mays
MGSVGSLPVTRRAGRWVRETRRLMVSSTTSLAPREADGGARSSHAGVNRSTATLTVRLRRPLGLGKWRLRFITRRGRQCEAWFGWRRAKGAQPWSLARAVHGECAATRVEESVRASRGEQGECGRGRRREC

SEQ ID NO: 171161 - protein, 124 aa, Zea Mays
MGRATYPSGSYSSESSVLWLVLPLLLSLSGSPPVAEVPCGGAGTPSAGAQRRGTSQTPPPAEAGRKSPAAPSPKVSVPAPRAGGGATSLSVSSVWTPCDKADVLQGERARKGSPDLHSVCLRRA

SEQ ID NO: 171162 - protein, 55 aa, Zea Mays
MLLAGAPCRSFPVDIPCPDYHSCPHQRSPAATSNVVDSSLHNTGSLHPCYCCGPR

SEQ ID NO: 171163 - protein, 80 aa, Zea Mays
MDLKAVVSSLPGAPLSSSPSPIKSVFTSLHSPPACSLATHAHCTADRCHCRAYVPVAGCCSSWSENSWLLLCHVVICASR

SEQ ID NO: 171164 - protein, 135 aa, Zea Mays
MKKVIVMFDERPSFGQIFARSCEEISYNLNDPSISIESLLSHVTSEIVARRLISIASEDDWVKYVRIVKTIVPPCLDVVVRKLLFSHCDAPVELSPQMPNASRSEAPLPELPEEVVVPDAQSALNEFEISRPVRG

SEQ ID NO: 171165 - protein, 57 aa, Zea Mays
MYVGPWHPTQGQPSSVPSFIANVHTISPNYLVKTRVIIVLVVILFVPDGHWMNRSLE

SEQ ID NO: 171166 - protein, 107 aa, Zea Mays
MLSVCMCARFQSDPKESHLTAVKRILRYLAYTPKFGLWYTRGSTFDLIGYSDADWAGCKINRKSTSGTCQFLGRSLVSCASKKQNSVALSTAEAEYIAAGHCCAQLL

SEQ ID NO: 171167 - protein, 86 aa, Zea Mays
MCVGVRIELWLKIKIKSESDARQGPRRRQLWFSVAGSVFQIAPTLMSSCSLQLCLYVLAFDHRCNFRSLSEEVELAGRLPGTRQKT

SEQ ID NO: 171168 - protein, 76 aa, Zea Mays
MVALFQIQMLDPPGPVSFIGGLFCAMGLSCLGLAFRPLPPLRRLVRLVRFPQRFSATIVKLRGIWNWTDSFKSGFF

SEQ ID NO: 171169 - protein, 83 aa, Zea Mays
MQSISSISILTISSNFDDIHDPDSMRPRLEKEKINLVKKKREVKLDLPMHYHPTRSSFSPEIFLSQAIIALTYPSLRSYIISG

SEQ ID NO: 171170 - protein, 53 aa, Zea Mays
MPSPNTPCRVRRLPVHTAACVGVGVGVAGPDREASQLLVADGTAADGLIASRL

SEQ ID NO: 171171 - protein, 53 aa, Zea Mays
MRARASWDGNRPSRGRGRSFSFSFSFSNSNPFLLLFLFLFLFYSFSLETKNIF

SEQ ID NO: 171172 - protein, 80 aa, Zea Mays
MMITIFYLKLCSIFSSYIVTFKFHPHVFKWYPQMVIPYTRASLSRERETCGGEETKKMKGVKRYVKCKLRDPIFHKDVVN

SEQ ID NO: 171173 - protein, 213 aa, Zea Mays
MAGSKDSSEVSTSNIITPTWETLSAEEQLLFEERQEQLIQEAKAKFLTNFKVDRNNKVVRHRATDPASFRPTPDIPNVSSTNELQSLKAYIDEQREQLQRIVGDIQNDHKRLVRALDKSTTTNLSSHEVEWREYTHNSSATGWHDQSQPLYGMPMDMYPRQRQPPTHIGDKFADLRMSKPSAHGRGPSGPAAADPIFRSELPRPAPKPPHAVQ

SEQ ID NO: 171174 - protein, 87 aa, Zea Mays
MEYTSCLPFKPPLCSLPLLTMSINSFIAIGMLARQHIDLTRGALYMVMVLIPKGQCFSYFHSPKAVCSDQEMCTSGTSFYAKIILHT

SEQ ID NO: 171175 - protein, 140 aa, Zea Mays
MAVPCSSSPSSLTSRSSELAPAPNRRAPCLISPMLHAHASACFLRASFCTPGSSPSSSSSIATQPSSLSLWCRAPAARSSFSSQPPKLSARVTYQHQNLRSRAPLPGALHLHLSRSIHYIQSWGLQEFKPVPVGTAAVRS

SEQ ID NO: 171176 - protein, 110 aa, Zea Mays
MDGVVSHNISASTGARRRSDSSSTGRSGRACAPLVSSCLAVTSIYPLFFFFFFWCCGASWKLLLLRIGSIIFAPVTVKIISIQLLWRQCMHCPWRGDWYLTCGLYRPFRW

SEQ ID NO: 171177 - protein, 74 aa, Zea Mays
MMVTGMSLHNRGATTIRTDYTQLGISNHTTYVALNPCICQPFPRSPPLHEQVRATREHITLPSVLLCQEGTCYS

SEQ ID NO: 171178 - protein, 55 aa, Zea Mays
MAMQEELNNFIRNEVWYLVPRPNQNVVGTKWVFRNKQDEHGVVTRNKARLVAKGY

SEQ ID NO: 171179 - protein, 168 aa, Zea Mays
MNLGLGEGLIFGIVSWSEWSSSYIEYDLQKTWMPINEVAWVILGLGEGLIFGIVSWSECSSSCIEYDLQKTWMPMNEVVGVNLGLGEGLIFGIVSWSECSSSCIEYDLQKTWMPMNEVVGGIYSPNHFLAIGKRCWRWVHRTVRCATGQYCALSGARHVSAPVRVRSS

SEQ ID NO: 171180 - protein, 66 aa, Zea Mays
MFVHVWRDVYLYFPNVLNACSLYLDNKQSEVPECVVGDLPEQQLGEGKCPLTHYVLSTYNSLYRIT

SEQ ID NO: 171181 - protein, 80 aa, Zea Mays
MYVQTSAAISWESSESSDDVGGETGVGDPSDSEENSSSEYSESPKSSDGGVGSRLRLLLLPMAEADGREEKDAVKNSEEM

SEQ ID NO: 171182 - protein, 74 aa, Zea Mays
MSGFACSSSGWARARVPAYDSAACSLACGAVPWPLCPRARLRARRCSGCCFRVLEQHLNRGATAALRVRNLESR

SEQ ID NO: 171183 - protein, 81 aa, Zea Mays
MLALSTCAYLPIPSRPAPTKARRRRRYERAEREKARSGRRGGGGPCCGVCLLLRLLADSLASAAPQSGCVGVRCRGPWGGG

SEQ ID NO: 171184 - protein, 438 aa, Zea Mays
MKQTIKDLVDACSVCHQAKPDRSRYPGLLQPLPVPQHAWQAISLDFIEGLPRSGVYNTILVVVDRLSKYAHFVAMHHPFTALKVAKIFMTSVYRLHGMPESIVSDRDRIFTSALWKELFQLSGTCLHMSSSYHPQTDGQTERVNQCVETYLRCFVQSCPSKWSSWLPMAEYWYNCCFHTSLGRSPFEVLYGHSPRHFGLSVDDSVNHADLKLWLSQRELMLRAVQQHLLRAQQRMKNQADKRRSEREYQVGDMVYLKLQPYVQTSVAVRANHKLVYKYFGPFEILQRVGNVAYKLKLPESAAVHPVFHVSQLKPSLHPRHLVSSSLPVVPDAIRFPVQVIQRRVIARGGAQVPQVLIRWSGCDAALDTWEDEFDVRRRFPRAAAWGQAANQDQGNVSIQTDEADDGAKKTDIQKAKEVVLGQRVRRPNVRYPKEMWSS

SEQ ID NO: 171185 - protein, 91 aa, Zea Mays
MLTHRTSYSTCPVRHRTSRRAQKSELQRSISNGTGDVAGAPDCPVCTGLSGVPSNRRPPPTVMFGGWGYKYPNHPTIHCIQVFHFSTTYKS

SEQ ID NO: 171186 - protein, 97 aa, Zea Mays
MWVDDGFIFPHGAATRIVLEATKEGGGGSSWRTKGSSFIARARSPASFATTPDRYGVRMVGDPVNTADLVVSVWEGYGLDAGFTGEKETTGCVDMIE

SEQ ID NO: 171187 - protein, 64 aa, Zea Mays
MGEQGRDPCWEHCRPLGEFSGSRFPLPVFQKSRTRKGNNMDPIWAIDLVVLGVQRGSSVRAGLC

SEQ ID NO: 171188 - protein, 64 aa, Zea Mays
MRARLIYFLHDFNVFLFGGWCQRGRSLGTNAMKNVSNTKHHQFKILKSASGFSSGFGYLVQNRK

SEQ ID NO: 171189 - protein, 59 aa, Zea Mays
MRPPSSYAHTSVLGSPTALDILPPHKVPEKRPLKQIKANLTRERSPIFTMVWCSKNKQK

SEQ ID NO: 171190 - protein, 68 aa, Zea Mays
MRPPSSYAHIFVLGSPTALNILPPHKVPKKCPKSPFFEKQTKKQKKTNATRGLPRRSLILILLSPKHT

SEQ ID NO: 171191 - protein, 70 aa, Zea Mays
MGDLLGSPRVAFLFFWFYFCLFFEHQTIVKMGDRSRVKLPFICFKGRFSGTLCGGRMSSAVGEPSTEVWA

SEQ ID NO: 171192 - protein, 99 aa, Zea Mays
MPQPNAGAQAAERATCKQPSAAPCLRARAGRACSPRARAPGSSEHPSRLPRVPSRARRPFVYARGYFIVLMEIDFYSFFLPSFLLPLRAGNGSTIEDHQ

SEQ ID NO: 171193 - protein, 55 aa, Zea Mays
MLLLCFMSVLSAIKCSCKCYQVFIHAKMVTKRTHVACRDLPYLKWSPSDFASVSF

SEQ ID NO: 171194 - protein, 54 aa, Zea Mays
MPIHIHGVLNPQKNNYSTSQPSYIHMGNMYIIKRFLYSPLDRRLFGHALTSHLT

SEQ ID NO: 171195 - protein, 52 aa, Zea Mays
MSAERRAGMRRPWKMAGRAAMGAGEKHRGELEGEKQRVSATRKKEARRASRK

SEQ ID NO: 171196 - protein, 63 aa, Zea Mays
MADGWRCSPCPRWRSGLARYMPRWRSTRPRMLGVACGCGVAAGLIGATTVAATNVVHGARACY

SEQ ID NO: 171197 - protein, 54 aa, Zea Mays
MCVRECVCVLFFFSFSFRIYFYGNNIYTYIYTVEKNSQNNINTNKYLFCRRILF

SEQ ID NO: 171198 - protein, 102 aa, Zea Mays
MPSQREQYGSTVHLFIGAGHNPYKITFMPFTVDNNSIVICRGLNSLFIFKSVSLSAVTPKLPCSHLRRCINLRIILVYCGADLSPKIPVHTLYSRNTVKSCF

SEQ ID NO: 171199 - protein, 56 aa, Zea Mays
MGIYSPQPPNNRWGGAAVDGRTGQSGAPPDTVGCASHVTQLTVRVRAQTTVGGFVF

SEQ ID NO: 171200 - protein, 59 aa, Zea Mays
MSVDTSDATSGQIVWLGIGISSSSGGETTTLNFTRRFGLGTVDRGEFGAQGKLAHAQTR

SEQ ID NO: 171201 - protein, 110 aa, Zea Mays
MRQNGRYITNPSQVLLVIVMYVFMSFKMQMCYRLQIYYVYKLSLYNFQRGKPENMAKGALYGIIEDLYTFILKEVIPVEGKYHDATSTLARSVFRVLTEISRLYISQDSY

SEQ ID NO: 171202 - protein, 72 aa, Zea Mays
MFKFYFESEDKFGIRFEIKFEFKVERKKREEKKKNKKRGTRHVLPGPLHPSRPIPLDSAQPTSFHFASCAGP

SEQ ID NO: 171203 - protein, 142 aa, Zea Mays
MRVCLCDVHIWSRELNVRSRGTLFIYLFIYLLIYLFDSLLRTSSIVYILLGAALKPMSIWILDTSMVLLLGKKKKRKKIRCMRTLWSPLDNTFTYSNDIVCMYSACKYNICIDDTQCKTHKPFILVLCGTQKPNTLDCLQQR

SEQ ID NO: 171204 - protein, 88 aa, Zea Mays
MTHLIEDAHRKPTVEGAPSMDLITTLNPEMDGAEGFFFHQSTTAANAEQRQRHYWQHPSPRFPWCSPTRALFYGQIRARQTRQCGTYR

SEQ ID NO: 171205 - protein, 85 aa, Zea Mays
MEVGKRTRVWCKLKERRRCRVSVSDSRYQTLGNRGTETGGRCSKISSDWKHEEGGSCGCMYCVTIFCDQSKGLDEHIPKGHTPWG

SEQ ID NO: 171206 - protein, 67 aa, Zea Mays
MMISETDPNNFIVWLRPAHCSPSPSSGLLRDRESVSWEVGTEEKRRHEDDEMGVTVSHGSTRPTRGL

SEQ ID NO: 171207 - protein, 318 aa, Zea Mays
MATIQDIGLSAAINIMGAVVFLVAFAFLRLQPINDRVYFPKWYLKGARESPSHGGTFVRKFVNLDMRSYLKFLSWVPAALKMPEDELISHAGLDSAVYLRIYLVGLKIFAPISVLAFIVLVPVNWTNDTLQFSKLEHSNVDKLSISNIPVGSKRFIAHLAMAYVFTFWTCYVLLREYEVVAKMRLRFLSSEKRRPDQFTVLVRNIPPDPDESISELVEHFFLVNHPGHYLTHQVVYNANKLAKLVKEKAKMHNWLDYYQLRFERNASKRPTTKTGFLGCFGTKVDAIEYYTSEIERIESEFFSDIKCGGSHIREAGCF

SEQ ID NO: 171208 - protein, 244 aa, Zea Mays
MHFFLLGASSTCFPALLQAYDATVQKKRPLLAIQALVAGALRSIFIFLPFFAFQAYGYLNICVHGSSDELRPWCKAKVPLLYGFIQSHYWGVGFLRYFQVKQLPNFLLASPVLSLAVYSIVHYAKLLHRCFQRTSVHKQIITALEKRPVVSYRRSDDATILSEPPAGLTKKAQGSSKAKQRKPVATEIAPATFHDSTTPANQNIEEDQDACSILLLPFVLHLGLHGIHSLVRDARPGVHTVPIR

SEQ ID NO: 171209 - protein, 53 aa, Zea Mays
MAAAAAAVTVFMCGGASGATTLVVVPTLLILSDVDDDDMCRPENLDEAWWVAL

SEQ ID NO: 171210 - protein, 237 aa, Zea Mays
MASDAPAEQPATQQKPTRVSLSYEEISKLFSLPIAEAASILGVCTSVLKRICRTHGIVRWPYRKLVSGKAGDDTKGPDSDKANELLEVSKIAKQKAPSASGPSVVSSSTSQGAAKSQQGNSKAGQFSVSPPTDYVPTKDGSHEPHESTTHEPSKGMTDDDELDWGADEAEAEADGTVTAEASAQLCSLRRKAVDDGRKLLNGHNRRGQEFSRLNKRQKTALAQVFGASLPECCITRV

SEQ ID NO: 171211 - protein, 132 aa, Zea Mays
MDDFKYGFPSSGLSCETMKWWGTSSDTDYVPTKDGSHEPHESTTHEPSKGMTDDDELDWGADEAEAEADGTVTAEASAQLCSLRRKAVDDGRKLLNGHNRRGQEFSRLNKRQKTALAQVFGASLPECCITRV

SEQ ID NO: 171212 - protein, 60 aa, Zea Mays
MELKHEHMVGCLGLKPESLCGAHECGMTVQQAMQSNAECHLFKSSPHPRSIPVSVVPFPL

SEQ ID NO: 171213 - protein, 125 aa, Zea Mays
MSEVKDSNVPAALDGNPQPMDQTEDNSMPSAQQQEEAIKKKFGGLMPKKPPLISKDHERAYFDSADWALGKQGVAKPKGPLEALRPKLQPTRQQQQQRARRPIYTSSENEGMYFYLAFWLWSLCT

SEQ ID NO: 171214 - protein, 418 aa, Zea Mays
MVDDNLLDYIDFSCDVPFFDADGDILPDLEVDTTELLAEFSSTPPADDLLAVAVFGADDQPAAAVAQEKPSSSLEQTCGDDKGVAVAAARRKLQTTTTTTTTEEEDSSPAGSGANKSSASAEGHSSKKKSAGKNSNGGKRKVKVDWTPELHRRFVQAVEQLGIDKAVPSRILEIMGTDCLTRHNIASHLQKYRSHRKHLMAREAEAATWAQKRHMYAPPAPRTTTTTDAARPPWVVPTTIGFPPPRFCRPLHVWGHPPPHAAAAEAAAATPMLPVWPRHLAPPRHLAPWAHPTPVDPAFWHQQYSAARKWGPQAAAVTQGTPCVPLPRFPVPHPIYSRPAMVPPPPSTTKLAQLHLELQAHPSKESIDAAIGDVLVKPWLPLPLGLKPPSLDSVMSELHKQGVPKIPPAAATTTGATG

SEQ ID NO: 171215 - protein, 517 aa, Zea Mays
MVMKMELEDDGALGGTAGTWTEEDRGLGAAVLGADAFAYLTKGGGAISEGLVSASLPDDLQNKLQELVESESPGTGWNYAIFWQLSRTKSGDLVLGWGDGCCREPRVGEVGAAASAGSDDTKQRMRKRVLQRLHIAFGVADEEDYAHGTRGNKAAVQRHEGNGPAPPERSPSLAKIFGKDLNLGRPSVGVPKVDERIWEQRSAGGGTSLLPSVQKGLQNFTWSQARGLNSHQQKFGNGVLIVSNEAGHRNNGAVDSPSTAQFQLQKVPQLQKLQLQKLPVVQKTPQLGNQQPMQTQVPRQIDFSAGSSSKPGVLVTRAAVLDGESAEVDGLCKEEGAPPVIEDRRPRKRGRKPANGREEPLNHVEAERQRREKLNQRFYALRAVVPNISKMDKASLLGDAITYITDLQKKLKEMETERERLLESGMVDPRERAPRPEVDIQVVQDEVLVRVMSPMENHPVKKVFQAFEEAEVRLGESKVTGNNNNGTVVHSFIIKCPGTEQQTREKVIAAMSRAMSS

SEQ ID NO: 171216 - protein, 318 aa, Zea Mays
MATPSLPTQIVEFNYKAIEDKLKRLALEVSHHENNIRFLKSQLNTVEEACVDLGIKLGNYHSSVAAVVNNDTSAQEAEQRTIRSILDQGKTAAGIICQLKVRHHELASKMPLMKDILGFVATLGKVNNDNLSRLLTEYLGMDNMLALVCKTYDGVKGLEKYDKDGIIDNTSGIHGLGRSVGKFLDGRFTVFCLENLRPFSGDVIIDDPQRKLILHRPRLPGGESPPGFLDFAVNMIHLDRAHLRFLTASGHGLRETLFYTLFSHLQVYKTRTDIQSALPLIKDGAVSLDGGLLRPNGSFCLGHSFLALVWTITYANLL

SEQ ID NO: 171217 - protein, 174 aa, Zea Mays
MVKLTMIARVTDGLPLSEGLDDSRDLKDADFYKQQAKLLFKNLSRGQHEASRMSIETGPYLFHYIIEGRVCYLTLCDRSYPKKLAFQYLEDLKNEFEKVNGSQIETAARPYAFIKFDAFIQKTKKLYLDTRTQRNLAKLNDELYEVHQIMTRNVQEVLGVGEKLDHFIIKRIDS

SEQ ID NO: 171218 - protein, 120 aa, Zea Mays
MTENDFSKIVVDSAITDRNRLGPARMKALCGFSFRSKRIPLPSRLPQALIRLAARHSLPLPVLVLVLVLSALPLRHFARNGTQAAADPATARRLGDRAAWWRFYTTYASLPDATFPRWLS

SEQ ID NO: 171219 - protein, 234 aa, Zea Mays
MVKLTMIARVTDGLPLSEGLDDSRDLKDADFYKQQAKLLFKNLSRGQHEASRMSIETGPYLFHYIIEGRVCYLTLCDRSYPKKLAFQYLEDLKNEFEKVNGSQIETAARPYAFIKFDAFIQKTKKLYLDTRTQRNLAKLNDELYEVHQIMTRNVQEVLGVGEKLDQVSEMSSRLTSDTRIYAEKAKDLNRQLSCWNQLSCLVFPRATICLIVVPKRKERWLDGLSRICRFKRLL

SEQ ID NO: 171220 - protein, 72 aa, Zea Mays
MYIERDRPTWRHARTALIGLQDRPLPTGGLTATRSWKTARYLLESKGRYLPRWDSPTPTPTKTNDFIPVHFV

SEQ ID NO: 171221 - protein, 175 aa, Zea Mays
MTSVWKTKVLPGLNKIFDKDGKKAAAAGFLKSFNKEEFDKEIEDKKTELEPKVVEAYEASPPEVKALFKDKKPVKVSKKNSAAVTKFLDELAKIDFPGAKVVSEAVAKSGTSPLLPAITFILDKVAPFIPKEEPKEEPAAVVEEKKEEEKKEEEDKPAAEEAAPPAAAAAAAEEK

SEQ ID NO: 171222 - protein, 196 aa, Zea Mays
MASTLARFLSSVKNSRLCSEYPWFQVSVKTAASSDNIMSSPNEAPSSVAGEYDPKSDPTRKPQKSTDPGWNSALMEYYIGPEGRGTVEEISTKLKEGCPSYFNESNYKYYLAVECLERASMINNPDERDILARDAFNLLTKIPESTDLSVICKRFENLRLVTSSDNKYCIWLVRCRLGAPPKSPRRSGGGWTPSSA

SEQ ID NO: 171223 - protein, 201 aa, Zea Mays
MMFLSPTSPGFRFLSSVKNSRLCSEYPWFQVSVKTAASSDNIMSSPNEAPSSVAGEYDPKSDPTRKPQKSTDPGWNSALMEYYIGPEGRGTVEEISTKLKEGCPSYFNESNYKYYLAVECLERASMINNPDERDILARDAFNLLTKIPESTDLSVICKRFENLRLVTSSDNKYCIWLVRCRLGAPPKSPRRSGGGWTPSSA

SEQ ID NO: 171224 - protein, 209 aa, Zea Mays
MGGEFRSSLMQQMVWSSSGGGTDSKNMMSSSLMPCAEEQEEEGSNKMPPLSSPSMLLLPQHHLQIFSGLPLPLPPEVLNDSSATSDLHDGRESSMPESWSQLLLGGLVGDHERYNAATALLSKGLEERPAAYNCYDPGHGGGEEIQTSGTNIRSHQGNSAGSGSAPKKARVQTSSSAQSTLKVRKERLGDRITALHQIVSPFGKVYIHG

SEQ ID NO: 171225 - protein, 76 aa, Zea Mays
MVQVQGPPMTNQEGEVYGNGIEEGSRKDLRSRGLCLVPVSCTSHLADDNGPSDFWAVSAAPSPPPPPPPFAGIIWR

SEQ ID NO: 171226 - protein, 256 aa, Zea Mays
MITQILEKEKEGLEQFTATDGYDYEGGSNVLKVLGYYSMIGLLRIHCLLGDYHTGLKCLTPIDLNQQGVYTIVIGSHISAIYHYGFANLMMRRYVEATREFNKILLYILKYKQYHQNSPQYDQILKKNEQMYALLAICLSLCPQNKLIDENVSTQLKEKYNDKMTKMQRYDDEAYAAYDELFSYACPKFITPSPPILDQPLTNYNQDAYRLQLKLFLYEVKQQQLLSGIRSYLKLYSTITISKLAQYMEVDEATLS

SEQ ID NO: 171227 - protein, 301 aa, Zea Mays
MAAAHYDREDGLPPSAPPHAAADAYDPNYVPDSVKTFVVHLYRHIRDKNVYEIHQMYEGGFQRLSDRLFRDVFWPSAEAVSPYCDGDHVFLLLYRELWYRHAHARLSPLTAAHRAESWTNYCDLFSVVLHGVVNMQLPNQWLWDMVDEFVYQFQSFCQYRAKLKTKTEDELNQLKQFDKAWNVYGVLNYLQALVEKSMITQILEKEKEGLEQFTATDGYDYEGGSNVLKVLGYYSMIGLLRIHCLLGDYHTGLKCLTPIDLNQQGVYTIVIGSHISAIYHYGFANLMMRRTSSLMKMLAPS

SEQ ID NO: 171228 - protein, 195 aa, Zea Mays
MYALLAICLSLCPQNKLIDENVSTQLKEKYNDKMTKMQRYDDEAYAAYDELFSYACPKFITPSPPILDQPLTNYNQDAYRLQLKLFLYEVKQQQLLSGIRSYLKLYSTITISKLAQYMEVDEATLRSILMTYKHKMHAVDSEGKIVSSADFDFYIVEDVIHVVESKPTKRHGDYFLRQILKFEEMIGELEKVQLD

SEQ ID NO: 171229 - protein, 475 aa, Zea Mays
MERKSVVMSALGIGIGVGVGLGLASAPWAGGASASASARAAGVTVERVEQDLRRLLADGADSKVTFDEFPYYLSEQTRVVLTSAAYVHLKQAEISKYTRNLAPASRAILLSGPAELYQQMLARALAHYFQAKLLLLDPTDFLIKIHNKYGTGGGTEKTFKRSISETTLERVSGLFGSLSILPQKEQPKGTIRRQSSMTDVKLRSSESTSNLPKLRRNASSSSDMSSMASQGPSTNTAPLRRTSSWTFDDKILVQALYKVLLSVSKSYPIVLYIRDVEKFLHKSPKMYLLFEKLLNKLDGPVLVLGSRIVDMESDEELDYRLTVLFPYNIEIKPPENENHLVSWKSQLEEDMKMIQFQDNRNHIMEVLAENDLECDDLGSICLSDTMCLSKYIEEIVVSAVSYHLMNNKDPDYRNGKLVLSTKSLSHASEIFQGNKMTDKDSMKLEVTDGTLKDFSFHLSRKHLQMYVFTYHTPNT

SEQ ID NO: 171230 - protein, 427 aa, Zea Mays
MERKSVVMSALGIGIGVGVGLGLASAPWAGGASASASARAAGVTVERVEQDLRRLLADGADSKVTFDEFPYYLSEQTRVVLTSAAYVHLKQAEISKYTRNLAPASRAILLSGPAELYQQMLARALAHYFQAKLLLLDPTDFLIKIHNKYGTGGGTEKTFKRSISETTLERVSGLFGSLSILPQKEQPKGTIRRQSSMTDVKLRSSESTSNLPKLRRNASSSSDMSSMASQGPSTNTAPLRRTSSWTFDDKILVQALYKVLLSVSKSYPIVLYIRDVEKFLHKSPKMYLLFEKLLNKLDGPVLVLGSRIVDMESDEELDYRLTVLFPYNIEIKPPENENHLVSWKSQLEEDMKMIQFQDNRNHIMEVLAENDLECDDLGSICLSDTMCLSKYIEEIVVSAVSYHLMNNKDPDYRNGKLVLSTKRQQDD

SEQ ID NO: 171231 - protein, 402 aa, Zea Mays
MLARALAHYFQAKLLLLDPTDFLIKIHNKYGTGGGTEKTFKRSISETTLERVSGLFGSLSILPQKEQPKGTIRRQSSMTDVKLRSSESTSNLPKLRRNASSSSDMSSMASQGPSTNTAPLRRTSSWTFDDKILVQALYKVLLSVSKSYPIVLYIRDVEKFLHKSPKMYLLFEKLLNKLDGPVLVLGSRIVDMESDEELDYRLTVLFPYNIEIKPPENENHLVSWKSQLEEDMKMIQFQDNRNHIMEVLAENDLECDDLGSICLSDTMCLSKYIEEIVVSAVSYHLMNNKDPDYRNGKLVLSTKSLSHASEIFQGNKMTDKDSMKLEVTDGTLKASEKAIAPTTAKSETKPASSLPPVRPPAAGAPAPRVESKTELEKKDNPPPSAKVPGQQIMSLKSVLDQK

SEQ ID NO: 171232 - protein, 150 aa, Zea Mays
MMDHGRMAVEASQPKPGAGQKGTMAKRGRGGEFPVSFLKGDEHRSPLLSSSSPSHMLLYRRPGAAKRQTSGLLACQGKGSQPAHQTPALSWRYTYLCYCHKCSTMETDLGWREYVLATEEAYWNGLWTVILFADSLIDGQEREKPLTGRK

SEQ ID NO: 171233 - protein, 136 aa, Zea Mays
MMDHGRMAVEASQPKPGAGQKGTMAKRGRGGEFPVSFLKGDEHRSPLLSSSSPSHMLLYRRPGAAKRQTSGLLACQGKGSQPAHQTPALTMETDLGWREYVLATEEAYWNGLWTVILFADSLIDGQEREKPLTGRK

SEQ ID NO: 171234 - protein, 190 aa, Zea Mays
MEDVIKKIYREMEFDLFDDDDGVDYSDSLPSSSNQDDGRCRSQRGSDSASASALHLLQRDARSSRQREDDDRHDKLTARARERRDRQRRLSSFTSWVPDLRRVWALKHPGKEPCAWVPRSRSRSCAKRRRAACTDVVLETPVTSGKRHMSGSESDDARQVAARRSAALGAVSKTLFDDEVVETDVSSSST

SEQ ID NO: 171235 - protein, 704 aa, Zea Mays
MRERDACWEYCDKLDGNKVRCRFCHKVLNGGISRLKFHLSQIPSKGVNPCTKVKEDVVDRVKAVISAKEEYKEFQLLKRQRVADLSSAAAPAKWAPEAPPSLSTSPGRVASPAAVITRAAEQSRLLAPEASAPVPRPSAAAANNKPRAAAASEWETERCIAEFFFENKLDYSIADSVSYQQMLEALGGPGFRGPPADVLRDKWLQRLKSEILQKTKEIEKDWATTGCTILADSWTDNKLKALINFSVASPMGTFFLKTVDASSHFKTHRGLYDLFDEVIQEVGPENVVQIIADRNINYGSTDKLVAQNYGGAIFWSPCASFCVNAMLDDFSKIDWVNQCICQAQTVTRFIYNSRWVLDLARKCVAGQELVCSGITKSVSDFLTLKSLLRHRPKLKQMFHSAEFSSSSYASRSIPCVEILDDDELWRAVEEIAAVSEPLLRVMRDVSGGRQAIGYIYESMTKVTDSIRTYYIMDEGKCKSFLDIVEQRWQTELHSPLHSAAAFLSPGIQYNPEVKFFRTIKEEFYQVLDKVLTTPDQRHDITAQLHAFRKAQGLFGSNIAKEARNNTPPGMWWEQYGDSAPSLQRAAVRITSQVCSTLTFQRDWGVILQNHYEKRNKLDKEALADQAYVHYNLTLHSEPKARRRPDADPIALDAVDMTSAWVEDSDGPILTQWLDRFPSALDGGDLNTRQFGGSIFGTNDNLFGL

SEQ ID NO: 171236 - protein, 98 aa, Zea Mays
MAASSLHSCHAFFSLMLSACFKLGSRTHGPGSCGGHSFSSHTLISERRTPFFPWMVGWFQCVATCDLPTMRRSQKTPHTRVSPGKRERDGVCHQGVKP

SEQ ID NO: 171237 - protein, 802 aa, Zea Mays
MSRRGRLARSELDCAEASLFPVTCIAIRNQNFSTPTPPPTSITHNATTFADIVRFGRTRMDGEGQRRGGFRAPGVIGRSGGGFGFGNRVEGFTSGGFGQAYGPNGAGRISGQHLGPQFGFGAVGHNNRVPQNSQQTIVFGHGQQQPASFSVGGAQHGTQQVGVGGQKHDYHNQRYKDNSGSGRQVERGFWPKQHANRGRAPFSKGPSFNHIAASGSEGLQKGLGRHLQHNSDGGSSGIGDNMILMDKTASKRSFQEVEENRPPSKKVEVLVETKKEASKPQGELFEVAEVSAKGRGKWCFRCRTKGHVSVECTTILFCQLCESDDHVAAICPIKKKPRLMAYSVGYAMDGLGFYHIPHGPISMSKKDNTLALITFMGGELKEAELVAHMERLIPGKHGWDVQLHAPNTWVANFPSKAELKRTVTFGSADLKNGLLLKFEEFEEEEYCGEELPRVWMRVLNLPKGLRTYEVLWAIGTMFGATTKVVIGTRWFELVFEIEGEIGEAMEPITHRENGNEGDHGNADRRDTTMEENNSKAKDTNGNSWAAPSFASNRRDVGKGVQMDDGALDDFDEDDLLEDEVMEQSPAVSPKYAVLSAVLDAGLGEQAKQPSGQHDCEMQEGCNSKPGLVEHSKVPRDDCSKMKEATATLGHQLKCDGQQSDASFSSEVALPVIPKPVKVLNKISAALPKRRSKRREAEVDEDMLERAKRVVAKKNLDGPEGNSFKNSVLSFTDELVINNLRSLGISLGASENSVQNSVDHLKILEKERIKESSVKIGQDNHVELGESDVEDDDLYTLGDLSGC

SEQ ID NO: 171238 - protein, 73 aa, Zea Mays
MKTFSSSAREGATGRRARRASGGCGDCGRDGVKDTRCFTPASISSDGHFLVGNLYPPCLLYRVRVLDLVLALL

SEQ ID NO: 171239 - protein, 1058 aa, Zea Mays
MNKIDAYTQTKQDPQVLLALTKINFGHVRVAAMRDRVRCMAGPPPPSHVHDGSLCPQGQRPCIDQRCAKEEMERYEFFSEFSKLGAQKVWNAVDSYWQTPTTALRDIGDPAKDLRVTGSLSRFWANGGDDDECDIDQDSGVYPSALTANRLANKTAFTVEQLVQKIEGLPDQKFQEQATVIDTYKKEVKNFLAFDQTVPPSSKLKPWHGPLPPKRISPSLTLADCPVLTDLRHKKKGHRRLRDLGGALRRSWGRNGEFQILNRDPRFPGRVSDAVQRKGVVTDNGPLLGSKGTSPRIHFIPKQALGRLMSRRGRLARSELDCAEASLFPVTCIAIRNQNFSTPTPPPTSITHNATTFADIVRFGRTRMDGEGQRRGGFRAPGVIGRSGGGFGFGNRVEGFTSGGFGQAYGPNGAGRISGQHLGPQFGFGAVGHNNRVPQNSQQTIVFGHGQQQPASFSVGGAQHGTQQVGVGGQKHDYHNQRYKDNSGSGRQVERGFWPKQHANRGRAPFSKGPSFNHIAASGSEGLQKGLGRHLQHNSDGGSSGIGDNMILMDKTASKRSFQEVEENRPPSKKVEVLVETKKEASKPQGELFEVAEVSAKGRGKWCFRCRTKGHVSVECTTILFCQLCESDDHVAAICPIKKKPRLMAYSVGYAMDGLGFYHIPHGPISMSKKDNTLALITFMGGELKEAELVAHMERLIPGKHGWDVQLHAPNTWVANFPSKAELKRTVTFGSADLKNGLLLKFEEFEEEEYCGEELPRVWMRVLNLPKGLRTYEVLWAIGTMFGATTKVVIGTRWFELVFEIEGEIGEAMEPITHRENGNEGDHGNADRRDTTMEENNSKAKDTNGNSWAAPSFASNRRDVGKGVQMDDGALDDFDEDDLLEDEVMEQSPAVSPKYAVLSAVLDAGLGEQAKQPSGQHDCEMQEGCNSKPGLVEHSKVPRDDCSKMKEATATLGHQLKCDGQQSDASFSSEVALPVIPKPVKVLNKISAALPKRRSKRREAEVDEDMLERAKRVVAKKNLDGPEGHFQRDTLDKVLDTVAEGGGQTSSKMGLSCA

SEQ ID NO: 171240 - protein, 97 aa, Zea Mays
MNKIDAYTQTKQDPQVLLALTKINFGHVRVAAMRDRVRCMAGPPPPSHVHDGSLCPQGQRPCIDQRCAKEEMERSLSEGHIGQGSGHCCRRRRTDLK

SEQ ID NO: 171241 - protein, 655 aa, Zea Mays
MATAAKLPSLYAELAAKSSRVAELEVRISALETENAGLREALAVARRESMGSTGKEEDPISRQLAARLRGIEHGAVEKPGWGVARRDAIEVSDDEEGAAAVGANKGESPDEGVGAVPALRKRVVAGESVGEADAEDAEGGGGNNGESSAGLEDDDVSVTPRGKKRGRRSAVAQVVTSDSEDDGVNGGGGVEDQFGSAKDGSGDQEGLMSSRKRAFRGVSDSEDEDAYEGVAPRHTESGEEDVDDMVPIDELLKRVPKERASEDDGESEGHSTPVTRRSARLVKNQSKSYRMFRGVSDSEDEDDNEGTAAPQGKSGDKEEEDMVPVYKLLKRMPNERASEDDDESDLAKGHSAPATRRSARLAKNQSKSYRVFCGVSDSEDKDGDEGTTAPQTENRDEDEEDMVPIYKSLKRMPKERVSEDGDESDVAKGHSAPASRRSARLVKNQSIRPRAACPGLHFVEPPKDVEGSEDDMEEDDDMNEFINDESSDNASDSAEKSCDESDVPSVMNEKSSPGLEVSDGEVDYKDVMACIGRKKKAKEWDYEADMLAAFGEHPELCLKAVCALYRKQTEDEQVEKASLVHNKQGFSHKDAPRGSRIAEFLLDGDLVGPLKKTVSDLDETRRTLTFIHSPGRRHHARDGEDAGCLLRRGGTRWIL

SEQ ID NO: 171242 - protein, 203 aa, Zea Mays
MKDSQDIQSTTELQSPVQGTNEVQSQQPNSMAADAPAGNSGSLSVASNDNKKVQNLIERCLQLYMNKGEVVRTLSTRARIEPGFTTLVWQKLEEENSEFFRAYYIRLKLKRQIILFNHLLQHQYNLMKYPAPPNIPLAPIQNGIHHMPVSNLPMGYPVLQQPIMPAPGQPHMDPMACGLSSGHVVNGIPAPGGYHPMRMNSGN

SEQ ID NO: 171243 - protein, 62 aa, Zea Mays
MPNCYARIMTVSDDRSEIILIAKRDVSAGEELTYDYLFDPDESEDCRVPCLCKAPNCRGYMN

SEQ ID NO: 171244 - protein, 940 aa, Zea Mays
MPATRIPLKRCTAVVPGVEDPGPAASMPPAKRRRERVVPSRFRGSMPPPAPVGEEVEVEDRDGDVYNVEVRMAEPKGDTFGPVETAVWTPVLPAPMDADLYRACRNINKSGSCGGAASGSVLTSVSNAASDGGAGGNGTTVRLSNAGSGGGGGGNGGLEGRPVVVECKPKREVSGRKEDFYWPQDFVLGDVVWARSGKKSPTWPALVIDPLLHAPEVVLNSCVPGALCVMFFGYSANGHGRDYGWVKQGMIFPFVDYLDRFQGQPLYKLRPSKFRAAIEEAFLAERGFFDLETDGVCSPRKSVNKQSDPIGFQEEAASNNEQECQSESQVVGKSALCCDSCGNRLPSKVSKKRKQAGEQMLCMHCEKLLQSKQYCGICKKIWHHTDGGNWVCCDECQIWVHVECDLTCNNVEDLENADYFCPDCKSKSKTVPATENLNTSTSECASTSKGKLTAMIAVCCNGEDALYVPEKHMILCQCKSCKERMMSLNEWEKHTGSRKKNWKMSIRQKSTGELLINLLDDIPCGTSKYSNPGIKKEELLQLQANPYSPVCAKWTTERCAVCRWVEDWDYNKIIICNRCQIAVHQECYGACAVQDLTTWLCRACESPQQKRECCLCPVKGGALKPTDIDGLWVHVTCAWFQPKVSFPVDETMEPAMGIMSIPVEYFKKTCVICKQMHGACTQCYKCSTYYHAICASRAGYCMELQCSERSGRHITKMVSYCDFHSTPDPDNVLIVKTPEGVFSTKFFLQNGEKQTAARLVRKENHQEKVLPPIISDCLVAKCLTYEMSKYKKQPGEAIAHRIMGPRHHSQDFIDGLNACMDRKDDQSFSTFKERLRYLQKTENLRVSCGRSGIHGWGLFAARNIQEGQMVIEYRGEQVRRCVADLREAQYHREKKDCYVSYHLLCLLILLLPVTGAKVDTYTQFSDCYTLLQVLSFPIQI

SEQ ID NO: 171245 - protein, 697 aa, Zea Mays
MPATRIPLKRCTAVVPGVEDPGPAASMPPAKRRRERVVPSRFRGSMPPPAPVGEEVEVEDRDGDVYNVEVRMAEPKGDTFGPVETAVWTPVLPAPMDADLYRACRNINKSGSCGGAASGSVLTSVSNAASDGGAGGNGTTVRLSNAGSGGGGGGNGGLEGRPVVVECKPKREVSGRKEDFYWPQDFVLGDVVWARSGKKSPTWPALVIDPLLHAPEVVLNSCVPGALCVMFFGYSANGHGRDYGWVKQGMIFPFVDYLDRFQGQPLYKLRPSKFRAAIEEAFLAERGFFDLETDGVCSPRKSVNKQSDPIGFQEEAASNNEQECQSESQVVGKSALCCDSCGNRLPSKVSKKRKQAGEQMLCMHCEKLLQSKQYCGICKKIWHHTDGGNWVCCDECQIWVHVECDLTCNNVEDLENADYFCPDCKSKSKTVPATENLNTSTSECASTSKGKLTAMIAVCCNGEDALYVPEKHMILCQCKSCKERMMSLNEWEKHTGSRKKNWKMSIRQKSTGELLINLLDDIPCGTSKYSNPGIKKEELLQLQANPYSPVCAKWTTERCAVCRWVEDWDYNKIIICNRCQIAVHQECYGACAVQDLTTWLCRACESPQQKRECCLCPVKGGALKPTDIDGLWVHVTCAWFQPKVSFPVDETMEPAMGIMSIPVEYFKKTCVICKQMHGACTQCYKCSTYYHAIFAML

SEQ ID NO: 171246 - protein, 574 aa, Zea Mays
MQQRRDYFCPDCKSKSKTVPATENLNTSTSECASTSKGKLTAMIAVCCNGEDALYVPEKHMILCQCKSCKERMMSLNEWEKHTGSRKKNWKMSIRQKSTGELLINLLDDIPCGTSKYSNPGIKKEELLQLQANPYSPVCAKWTTERCAVCRWVEDWDYNKIIICNRCQIAVHQECYGACAVQDLTTWLCRACESPQQKRECCLCPVKGGALKPTDIDGLWVHVTCAWFQPKVSFPVDETMEPAMGIMSIPVEYFKKTCVICKQMHGACTQCYKCSTYYHAICASRAGYCMELQCSERSGRHITKMVSYCDFHSTPDPDNVLIVKTPEGVFSTKFFLQNGEKQTAARLVRKENHQEKVLPPIISDCLVAKCLTYEMSKYKKQPGEAIAHRIMGPRHHSQDFIDGLNACMDRKDDQSFSTFKERLRYLQKTENLRVSCGRSGIHGWGLFAARNIQEGQMVIEYRGEQVRRCVADLREAQYHREKKDCYLFKISEDVVIDATDKGNIARLINHSCMPNCYARIMTVSDDRSEIILIAKRDVSAGEELTYDYLFDPDESEDCRVPCLCKAPNCRGYMN

SEQ ID NO: 171247 - protein, 530 aa, Zea Mays
MARMHCMYLRSTFIVGRILCQCKSCKERMMSLNEWEKHTGSRKKNWKMSIRQKSTGELLINLLDDIPCGTSKYSNPGIKKEELLQLQANPYSPVCAKWTTERCAVCRWVEDWDYNKIIICNRCQIAVHQECYGACAVQDLTTWLCRACESPQQKRECCLCPVKGGALKPTDIDGLWVHVTCAWFQPKVSFPVDETMEPAMGIMSIPVEYFKKTCVICKQMHGACTQCYKCSTYYHAICASRAGYCMELQCSERSGRHITKMVSYCDFHSTPDPDNVLIVKTPEGVFSTKFFLQNGEKQTAARLVRKENHQEKVLPPIISDCLVAKCLTYEMSKYKKQPGEAIAHRIMGPRHHSQDFIDGLNACMDRKDDQSFSTFKERLRYLQKTENLRVSCGRSGIHGWGLFAARNIQEGQMVIEYRGEQVRRCVADLREAQYHREKKDCYLFKISEDVVIDATDKGNIARLINHSCMPNCYARIMTVSDDRSEIILIAKRDVSAGEELTYDYLFDPDESEDCRVPCLCKAPNCRGYMN

SEQ ID NO: 171248 - protein, 377 aa, Zea Mays
MKSQSTPLPQTPTPTAAPGGGGGGHEQPVAPGGRLAALLPRGTMARRRAALAALLVLLLLAACTAAAAAVTVSRKQRQRHHPGGASASAARSCDPFAAAGAWVEDGSYPLYDSARCPFIRDEFACARFGRPDTAYLRYRWRLDAPCAQPAFDGAALLRMWRGKTAMFVGDSLALNQYESLLCMLHAAAGPAARTTLSPPSGKIDPSSTVRFEGPGLGRVAEEDVHGGDAAAQRHGALPGRPDPAAGDPARRAGGHGQARLPARLHLPLAAAQGRAPHQVRRRHLRRRLHALVRRRPPRHLERPLLRRAHRRAGAQLMDEYYVFSFFPFSFYRHAVLRSSISKGKEKDSRLISYSYEGAFKRFFNLNELIEEYQKRIL

SEQ ID NO: 171249 - protein, 429 aa, Zea Mays
MKSQSTPLPQTPTPTAAPGGGGGGHEQPVAPGGRLAALLPRGTMARRRAALAALLVLLLLAACTAAAAAVTVSRKQRQRHHPGGASASAARSCDPFAAAGAWVEDGSYPLYDSARCPFIRDEFACARFGRPDTAYLRYRWRLDAPCAQPAFDGAALLRMWRGKTAMFVGDSLALNQYESLLCMLHAAAGPAARTTLSPPSGKIDPSSTVRFEDYNVTVVYYLTHYLVDLVTEPHTGRRVLKLDAIDQARDWLAADVLVFDSWHWWPRTGATQPWDYIQVGDTVVKDMDRTQAFAKALHTWARWVDANLVQTDTKVFFQGISPSHYRGQDWGASPKKTCMGETRPLNATGPYPGGPIPQQAILRGVLAAMAKPVYLLDFTYLSQLRKDAHPTKYDGGIFGGDCTHWCVAGLPDTWNVLFYAALTAGQGHN

SEQ ID NO: 171250 - protein, 202 aa, Zea Mays
MRPRLVLFGDSITELSFASGGWGAALTDRFARQADVVLRGLSGYNTRWALKHVPLKEYQSNLRAICAYFKERWPSTAVILITPPPIYEPARIRDMYGDDEPSRQPERSNEAAGAYAQACIDVATELNHPVIDIWTKMQEFPDWQTSALSDGLHFTPVGNKILFEEVVKTLETSIGFSQERLPSDLPLFHEIDPKDPMKAFGA

SEQ ID NO: 171251 - protein, 128 aa, Zea Mays
MMSSNPTTWLDVMTSSIIEDMYGDDEPSRQPERSNEAAGAYAQACIDVATELNHPVIDIWTKMQEFPDWQTSALSDGLHFTPVGNKILFEEVVKTLETSIGFSQERLPSDLPLFHEIDPKDPMKAFGA

SEQ ID NO: 171252 - protein, 379 aa, Zea Mays
MQREMVHGHGDGNHHQHQQLPRYSAAAAATGVARASKKSKPKKIPQRGLGVAQLEKLRIEEQKMEGSMPVSGPTHLGVGVGGFGHLLPMHPPPHAPLPLLPRPGADGGVHCGYPSVLWDPASASAVADPMKHPFYKRSLCPLPPLPTVSVGLSLTAASSSHPTEPPSNQMYSSGGGGAETAAAEDDEDREAAGVDRPWPLVFEGLNTTAFRTTAAGKAPLAVAARTTREAAAAAAGLPDACAAADLSRYEFSRATTNYYSPASACSLNASFPDWSSPELGHCKSSKEKEPAPAYLTLSAQPAPRGKQPPPALPSIKLPELGHWGVMQPPQHGSASASSSASASRPFYSFMPAGPVRIDRPRIGIKADDASDGVDLELKL

SEQ ID NO: 171253 - protein, 363 aa, Zea Mays
MQREMVHGHGDGNHHQHQQLPRYSAAAAATGVARASKKSKPKKIPQRGLGVAQLEKLRIEEQKMEGSMPVSGPTHLGVGVGGFGHLLPMHPPPHAPLPLLPRPGADGGVHCGYPSVLWDPASASAVADPMKHPFYKRSLCPLPPLPTVSVGLSLTAASSSHPTEPPSNQMYSSGGGGAETAAAEDDEDRVHAVVEEAAGVDRPWPLVFEGLNTTAFRTTAAGKAPLAVAARTTREAAAAAAGLPDACAAADLSRYEFSRATTNYYRLVIAGVGALQEQQGEGACPCLPHLERAACATREAASSCAPLDQTPGVGSLGRHAASSARERFGVVVRVGVAAVLQLHAGWSGSHRQTPDRDQGRRRL

SEQ ID NO: 171254 - protein, 379 aa, Zea Mays
MQREMVHGHGDGNHHQHQQLPRYSAAAAATGVARASKKSKPKKIPQRGLGVAQLEKLRIEEQKMEGSMPVSGPTHLGVGVGGFGHLLPMHPPPHAPLPLLPRPGADGGVHCGYPSVLWDPASASAVADPMKHPFYKRSLCPLPPLPTVSVGLSLTAASSSHPTEPPSNQMYSSGGGGAETAAAEDDEDRVHAVVEEAAGVDRPWPLVFEGLNTTAFRTTAAGKAPLAVAARTTREAAAAAAGLPDACAAADLSRYEFSRATTNYYSLNASFPDWSSPELGHCKSSKEKEPAPAYLTLSAQPAPRGKQPPPALPSIKLPELGHWGVMQPPQHGSASASSSASASRPFYSFMPAGPVRIDRPRIGIKADDASDGVDLELKL

SEQ ID NO: 171255 - protein, 230 aa, Zea Mays
MMQRDTIHAASQFASRNQLPEYIRDEMLSHICLRYKTESLKQKETLDSLPKGIRSGIAYHLFFPVIEKVYLFRGVSYTCMLQLVTAMEAEYFPPRELVILQNEAPTDVYILVSGAVEERFVIDGVENVQGVMYAGEIFGEIGALCSVPQPFTICTTKISQLLRVSTTVLKNIIEENKDDEQIVLNNIFQVFIVLYKMIFCYIMYLLYVERGTNFSINYLAENSPRSKILY

SEQ ID NO: 171256 - protein, 272 aa, Zea Mays
MEDISNIFHNDLLPSLGAKANESIKLRKFIISPYDSCYRTWETFLLVLVVYSAWICPFELAFLRHLSWVLFLVENIVNSFFAIDIILTFFLAYLDKKSYLLVDNPKRIAASMYADISPLGSFLTFAQQFHIKRLVYYLKSMQMASLTEFLTCYGYGAFVASVIYLPGCFNYLIADRYPNPARTWIGAARPDYRSESLWVRYVTSIYWSITTLTTTGYGDLHAENPREMLFSICYMLFNLGLTAYLIGNMTNLVVQGSCRTRNFVSSLPNTRS

SEQ ID NO: 171257 - protein, 103 aa, Zea Mays
MQIHRDANGSTLLKGFRKPSPNNNLLECTQHAYDICTVDQGSLLKQLANKSISGGVAAVLAERDKEEMEMDIAKLEVGSMETSVICRSDGPLILAYLRKPRQT

SEQ ID NO: 171258 - protein, 607 aa, Zea Mays
MGMSTKCLQHRSGRTLPPPCDCSSRNTTASGISKDICINDDRLLPNGAIKYTSLPSVTTPRDSSLSSGSPPSPASIVLHQRNDHERLHNNQQNLSDLKPQRYIPPGGRNCSSEMTTSVKHMQPIEGAWLHSSSNEHLGSNNDKSQASSQLGNDNSNPKQITSAENGTSDTVQQKPQYADVVSQGQVAPVRRLTVLNRPSIASSDTRPKATGQVVNGTSTSFTKLTLVQKAQGSCITIPRNHPVPQIPEEPAHLFASASVKSHAGVEIMNECSDIKEKIVLGGYKQLPESTVSHRLTASQNMSSGTLPSNLSASYAKTQGSAGSHNLSDLNMKLVAKNRSQLVNQQNAPVSVSNTGIARASFCCSTLNKNASLSDGDSSHNRRWDTIRSGHIVSSHSSDSTMLSRPASAVSSTDVASLHRKERRQACPPGFEKPHLYSGSGKACSGHCSAPDALVQDCGIPDQQDFTSLTTDCLKDDGDVTQNLSMNISSPPSLTDTNRNWSQSHRQFPGTLFGWSNDPQYSFYPGGSSHPRQEAENWDGTSTSYMATATGGYKVFSQGTTSDMRGGMAGTLLQQPIMSTHDRWTDGSSDSGRNCPQVDISYRMYSLF

SEQ ID NO: 171259 - protein, 884 aa, Zea Mays
MNDQTNEKCPLCLNKMDLTDKQLKPCKCGYEICLWCWHRIIDESGGRCPGCRSVYNKDKILETSARNQILKELCADKSNYQKEQVKSHKQTSAKVQLGQSEPKDPNSIRVIQRKLVYIVGMPTEFASEKLLRQKSFLGQYGKIENIIIDNVGANQQVPDSGRVYVTFAKEVEAIRCIQAVDGYSLDGRPLKATFGVTRYCHIWLSNKDCYKPNCSYVHYKAPAEEICTKDDVSVVCARSSFCAVAMAAAVSNRLVVAIARKADETGEGFEVVRLQHSMGMSTKCLQHRSGRTLPPPCDCSSRNTTASGISKDICINDDRLLPNGAIKYTSLPSVTTPRDSSLSSGSPPSPASIVLHQRNDHERLHNNQQNLSDLKPQRYIPPGGRNCSSEMTTSVKHMQPIEGAWLHSSSNEHLGSNNDKSQASSQLGNDNSNPKQITSAENGTSDTVQQKPQYADVVSQGQVAPVRRLTVLNRPSIASSDTRPKATGQVVNGTSTSFTKLTLVQKAQGSCITIPRNHPVPQIPEEPAHLFASASVKSHAGVEIMNECSDIKEKIVLGGYKQLPESTVSHRLTASQNMSSGTLPSNLSASYAKTQGSAGSHNLSDLNMKLVAKNRSQLVNQQNAPVSVSNTGIARASFCCSTLNKNASLSDGDSSHNRRWDTIRSGHIVSSHSSDSTMLSRPASAVSSTDVASLHRKERRQACPPGFEKPHLYSGSGKACSGHCSAPDALVQDCGIPDQQDFTSLTTDCLKDDGDVTQNLSMNISSPPSLTDTNRNWSQSHRQFPGTLFGWSNDPQYSFYPGGSSHPRQEAENWDGTSTSYMATATGGYKVFSQGTTSDMRGGMAGTLLQQPIMSTHDRWTDGSSDSGRNCPQVDISYRMYSLF

SEQ ID NO: 171260 - protein, 626 aa, Zea Mays
MKMSSPAEPVALMTWLQHSMGMSTKCLQHRSGRTLPPPCDCSSRNTTASGISKDICINDDRLLPNGAIKYTSLPSVTTPRDSSLSSGSPPSPASIVLHQRNDHERLHNNQQNLSDLKPQRYIPPGGRNCSSEMTTSVKHMQPIEGAWLHSSSNEHLGSNNDKSQASSQLGNDNSNPKQITSAENGTSDTVQQKPQYADVVSQGQVAPVRRLTVLNRPSIASSDTRPKATGQVVNGTSTSFTKLTLVQKAQGSCITIPRNHPVPQIPEEPAHLFASASVKSHAGVEIMNECSDIKEKIVLGGYKQLPESTVSHRLTASQNMSSGTLPSNLSASYAKTQGSAGSHNLSDLNMKLVAKNRSQLVNQQNAPVSVSNTGIARASFCCSTLNKNASLSDGDSSHNRRWDTIRSGHIVSSHSSDSTMLSRPASAVSSTDVASLHRKERRQACPPGFEKPHLYSGSGKACSGHCSAPDALVQDCGIPDQQDFTSLTTDCLKDDGDVTQNLSMNISSPPSLTDTNRNWSQSHRQFPGTLFGWSNDPQYSFYPGGSSHPRQEAENWDGTSTSYMATATGGYKVFSQGTTSDMRGGMAGTLLQQPIMSTHDRWTDGSSDSGRNCPQVDISYRMYSLF

SEQ ID NO: 171261 - protein, 312 aa, Zea Mays
MAAAVAEGSASSAAKEVEYQAGVQKLVDLLSNLNPAAKEFVPSAAASPPKKALSADAPVFDYHSIGGGNGATDAAFYVGFGHQPRTRGNGYINQGRRRTNGRVRRADREDSIRRTVYVSELDHTVTEERLADIFTTCGQVVDCRICGDPHSVLRFAFIEFSDEEGARTALNLGGTIFGFYPVRVLPSKTAILPVNPKFLPRTDDEKEMVMRTVYCTNIDKMVTQLDVKKFFEELCGEVSRLRLLGDNVHSTRIAFVEFVHAEGAIMALNCSGMILGTLPVRHDLPSSHILHFSLFGEPFQDSGEAPCKSSGI

SEQ ID NO: 171262 - protein, 286 aa, Zea Mays
MAAAVAEGSASSAAKEVEYQAGVQKLVDLLSNLNPAAKEFVPSAAASPPKKALSADAPVFDYHSIGGGNGATDAAFYVGFGHQPRTRGNGYINQGRRRTNGRVRRADREDSIRRTVYVSELDHTVTEERLADIFTTCGQVVDCRICGDPHSVLRFAFIEFSDEEGARTALNLGGTIFGFYPVRVLPSKTAILPVNPKFLPRTDDEKEMVMRTVYCTNIDKMVTQLDVKKFFEELCGEVSRLRLLGDNVHSTRIAFVEFVHVRTKLFFPHWLVLFILLNNVLMPTCI

SEQ ID NO: 171263 - protein, 215 aa, Zea Mays
MAAAVAEGSASSAAKEVEYQAGVQKLVDLLSNLNPAAKEFVPSAAASPPKKALSADAPVFDYHSIGGGNGATDAAFYVGFGHQPRTRGNGYINQGRRRTNGRVRRADREDSIRRTVYVSELDHTRRDLLISLPPVGKLLIAEFVVIPTQFLGLHSLSSLMKRAPELRLTWEAQFLVSTLLEFCRQRQLSYLLIQSFFPGRMTRRKWSCELSIVQT

SEQ ID NO: 171264 - protein, 92 aa, Zea Mays
MVMRTVYCTNIDKMVTQLDVKKFFEELCGEVSRLRLLGDNVHSTRIAFVEFVHAEGAIMALNCSGMILGTLPVRVSPSKTPVKPRVNRVGSN

SEQ ID NO: 171265 - protein, 245 aa, Zea Mays
MATRNRTPLYRKYRDALRHVRAPPGAPSSSGGGGGGGGPVIEMASLLRSDRPYAPLSTDDPSASSRGAATVGLPPAWVDVSEEISANMQRARTKMAELAKAHAKALMPSFGDGRDDQRAIEVLTHEVTDLLKRSEKRLQKLSMKDSSEDSNVRKNVQRSLATDLQNLSMEFRKKQSSYLKQLRQQKEGQDGVDLEMNINGAKSTFEDDEFDDVGFTEVQMSKLKKSEAFTREREREIEQSVYYCC

SEQ ID NO: 171266 - protein, 236 aa, Zea Mays
MQRARTKMAELAKAHAKALMPSFGDGRDDQRAIEVLTHEVTDLLKRSEKRLQKLSMKDSSEDSNVRKNVQRSLATDLQNLSMEFRKKQSSYLKQLRQQKEGQDGVDLEMNINGAKSTFEDDEFDDVGFTEVQMSKLKKSEAFTREREREIEQVVESVNELAQIMKDLSVLVIDQGTIIDRIDYNIQNVAASVEEGYKQLQKAERTQKKGGMVMCATVLVILIFIMIVLLILKEIIF

SEQ ID NO: 171267 - protein, 522 aa, Zea Mays
MGYATAQTTLQEGVQAIADDQAGCLSRKLGCWSLLYKWDFKDWISLGGLREKDNTNVPNFSEADVMHNLQSFASVMRRRLLSENDNLAALLGNDDKSSDLQNLKEIQRSVDVNSVGSGSFSAFPGIYGQALAPLLPEDIDATTVQQLSTDVTQTTNVEMSGTTYSKWAYIITIPAAILLISLIVLILVLRKRGRAPVAPWKTGLSGPIQKALVTGAQKLNRAELEVACEDFSNIINTFPTCTVFKGILSSGVEIGVVSTTISSSKDWSRSAESCFKKKIDRLSRVNHKNFINLLGYCLENEPFTRMMVFEFAPHGSLSQHLHVKEFEHLDWAARMRVIMGVAYCLQYMHHELSPPMAIHDVRSDTTFISDDYAAKIADVGVWNELAAKAKAGKEDGSSRAEAPPDLPSNAYCFGALMIETISGRVPDPYDHKPICSWASEHLKDKNYGKLVDASLKEHKESELEAVCEVIQECIDPDPTRRPSMRDVVGKLRDALGISPEAAAPRLSPLWWAELELLSVKST

SEQ ID NO: 171268 - protein, 248 aa, Zea Mays
MLQEKDRLSRVNHKNFINLLGYCLENEPFTRMMVFEFAPHGSLSQHLHVKEFEHLDWAARMRVIMGVAYCLQYMHHELSPPMAIHDVRSDTTFISDDYAAKIADVGVWNELAAKAKAGKEDGSSRAEAPPDLPSNAYCFGALMIETISGRVPDPYDHKPICSWASEHLKDKNYGKLVDASLKEHKESELEAVCEVIQECIDPDPTRRPSMRDVVGKLRDALGISPEAAAPRLSPLWWAELELLSVKST

SEQ ID NO: 171269 - protein, 296 aa, Zea Mays
MGYATAQTTLQEGVQAIADDQAGCLSRKLGCWSLLYKWDFKDWISLGGLREKDNTNVPNFSEADVMHNLQSFASVMRRRLLSENDNLAALLGNDDKSSDLQNLKEIQRSVDVNSVGSGSFSAFPGIYGQALAPLLPEDIDATTVQQLSTDVTQTTNVEMSGTTYSKWAYIITIPAAILLISLIVLILVLRKRGRAPVAPWKTGLSGPIQKALVTGAQKLNRAELEVACEDFSNIINTFPTCTVFKGILSSGVEIGVVSTTISSSKDWSRSAESCFKKKIDCQGSTTRTSSTSLAIA

SEQ ID NO: 171270 - protein, 617 aa, Zea Mays
MAYSRIGTPWTAAHAAGLACDALTIKNLTGRQLAGTLAPEIGSLRGLKSLLLPKNNFRGQIPREFGGLSALEVLDLSSNNLDGTVPEELWAMPLLKQLSLHDNQLQEGVQAIADDQAGCLSRKLGCWSLLYKWDFKDWISLGGLREKDNTNVPNFSEADVMHNLQSFASVMRRRLLSENDNLAALLGNDDKSSDLQNLKEIQRSVDVNSVGSGSFSAFPGIYGQALAPLLPEDIDATTVQQLSTDVTQTTNVEMSGTTYSKWAYIITIPAAILLISLIVLILVLRKRGRAPVAPWKTGLSGPIQKALVTGAQKLNRAELEVACEDFSNIINTFPTCTVFKGILSSGVEIGVVSTTISSSKDWSRSAESCFKKKIDRLSRVNHKNFINLLGYCLENEPFTRMMVFEFAPHGSLSQHLHVKEFEHLDWAARMRVIMGVAYCLQYMHHELSPPMAIHDVRSDTTFISDDYAAKIADVGVWNELAAKAKAGKEDGSSRAEAPPDLPSNAYCFGALMIETISGRVPDPYDHKPICSWASEHLKDKNYGKLVDASLKEHKESELEAVCEVIQECIDPDPTRRPSMRDVVGKLRDALGISPEAAAPRLSPLWWAELELLSVKST

SEQ ID NO: 171271 - protein, 406 aa, Zea Mays
MEAPPGPGPMELDAPPPAAAAAAIPPAGSDKHKDGEGGDAVTGHIISTTIGGKNGEPKRTISYMAERVVGTGSFGIVFQAKCLETGETFAIKKVLQDRRYKNRELQLMRAMEHPNVICLKHCFFSTTSRDELFLNLVMEFVPETLYRVLKHYSNANQRMPLIYVKLYMYQLFRGLAYIHNVPGVCHRDVKPQNVLVDPLTHQVKLCDFGSAKVLIPGEPNISYICSRYYRAPELIFGATEYTSSIDIWSAGCVLAELLLGQPLFPGESAVDQLVEIIKVLGTPTREEIRCMNPNYTEFRFPQIKAHPWHKIFHKRMPPEAIDLASRLLQYSPSLRCSALDACAHPFFDELRTPNARLPNGRPFPPLFNFKHELANASPDLVSRRCDGRSFRSWFPLLESGRGSSST

SEQ ID NO: 171272 - protein, 224 aa, Zea Mays
MEAPPGPGPMELDAPPPAAAAAAIPPAGSDKHKDGEGGDAVTGHIISTTIGGKNGEPKRTISYMAERVVGTGSFGIVFQAKCLETGETFAIKKVLQDRRYKNRELQLMRAMEHPNVICLKHCFFSTTSRDELFLNLVMEFVPETLYRVLKHYSNANQRMPLIYVKLYMYQLFRGLAYIHNVPGVCHRDVKPQNVLVDPLTHQVKLCDFGSAKVLVCCFSFLEDL

SEQ ID NO: 171273 - protein, 244 aa, Zea Mays
MRTRGCLLSTSSSTCIRGLAYIHNVPGVCHRDVKPQNVLVDPLTHQVKLCDFGSAKVLIPGEPNISYICSRYYRAPELIFGATEYTSSIDIWSAGCVLAELLLGQPLFPGESAVDQLVEIIKVLGTPTREEIRCMNPNYTEFRFPQIKAHPWHKIFHKRMPPEAIDLASRLLQYSPSLRCSALDACAHPFFDELRTPNARLPNGRPFPPLFNFKHELANASPDLVSRLVPEHIRRQIGVNFGSS

SEQ ID NO: 171274 - protein, 176 aa, Zea Mays
MEAPPGPGPMELDAPPPAAAAAAIPPAGSDKHKDGEGGDAVTGHIISTTIGGKNGEPKRTISYMAERVVGTGSFGIVFQAKCLETGETFAIKKVLQDRRYKNRELQLMRAMEHPNVICLKHCFFSTTSRDELFLNLVMEFVPETLYRVLKHYSNANQRMPLIYVKLYMYQESAIGM

SEQ ID NO: 171275 - protein, 64 aa, Zea Mays
MTPTTPPASFPFITALRSKIHCCSCPLPQIDHATADRGLQKAQNPSMPHRLSDALKTMITKERC

SEQ ID NO: 171276 - protein, 160 aa, Zea Mays
MPRPAAHACAVGVPQHPHRVACLQSRPHPLLLAQRDHQRLDVHRPARVHAVLRPHPGAPRPVLHQGVWYDWAPLLLRRPSSNQGRLALAPRTHDPLLLYPQRRAPPSCFWQRKPSPCGKLPTRWNAQPLVGSTQPLRDVTNSGETSLPLLLSSPLCLIKC

SEQ ID NO: 171277 - protein, 205 aa, Zea Mays
MYFFYLEKHSRDLCLEDGDLNLTDLHWWINMQKKRRPSPKKQRYMLKWFFLKDCNVIRVSEIQKVLDIADERSLIDTIFFCYLGCNARFLQENPEYVAQGVTLAQFSFQIPIPLRQDYVKKKPKLINASDEASTITSKSSEPDEVNPIAWAVPTKHEGDASEEASLADETLASEVVLTRKRKIGSSLSVEPNHLSDELEPKLEDA

SEQ ID NO: 171278 - protein, 169 aa, Zea Mays
MPRPAAHACAVGVPQHPHRVACLQSRPHPLLLAQRDHQRLDVHRPARVHAVLRPHPGAPRPVLHQGVWYDWAPLLPLLPSSPAPATELQPGTSSASAQDARPPAPLSSAPSPSVLFLAAKAQPLRQATYSMECPAACRIYAAPARRHKLRQSGGITSRGLVCWRKMASC

SEQ ID NO: 171279 - protein, 203 aa, Zea Mays
MYDSIFYVGTAYIYVGAAPTSAPGRRLGGTCTQGSSSDVVAVRRASAVACPAPPRMPARSVSRSTHTEWPVFKVVLILSSWLNETINVWMFIDLLGFMLFFDLTLVHLGQYFTKVSGMIGHLSCHCSLRPQLRRPSSNQGRLALAPRTHDPLLLYPQRRAPPSCFWQRKPSPCGKLPTRWNAQPLVGSTQPLRDVTNSGSQAG

SEQ ID NO: 171280 - protein, 190 aa, Zea Mays
MVSRAIPFYRNRTPAWRYLHTRVELGRRSGAEGLGRSMPRPAAHACAVGVPQHPHRVACLQSRPHPLLLAQRDHQRLDVHRPARVHAVLRPHPGAPRPVLHQGVWYDWAPLLLRRPSSNQGRLALAPRTHDPLLLYPQRRAPPSCFWQRKPSPCGKLPTRWNAQPLVGSTQPLRDVTNSERLYAPHTSMR

SEQ ID NO: 171281 - protein, 512 aa, Zea Mays
MHARFLSAPSPASAAPSPYVRLAFTGALPRRACWKPRGPASASAPPPRPLHSLCARASMQPASPAHDGHGGPPVHGVSNTVIGVLGGGQLGKMLCHAASQMGIRIVILDPLPGCPASSVCDEHVIGSFNDGDTVREFAKRCGVLTVEIEHVDAATLEKLEKQGVDCEPKASTITIIQDKYRQKKHFSRYEIPLPDFMEVDTLRSIEEAGEKFGYPLMVKSKRLAYDGRGNAVAKNKEELSSVVASLGGFERGLYVERWTPFVKELSVIVARSRDNSTVCYPVVETVHKENICHVVEAPADVSNKIKKLATSVAEKAIKSLEGAGVFAVELFLTEDDQILLNEVAPRPHNSGHHTIESCYTSQYEQHIRAILGLPLGDPSMKAPAAIMYNILGEDEGEAGFFLAHQLISRALTIPGTSVHWYAKPEMRKQRKMGHITIVGPSKISVKSRLDNLLQRNSSDPKEVSPRVAIIMGSQSDLPVMKDAERVLKEFDIPCESGCMIMRSLLKTGVSRS

SEQ ID NO: 171282 - protein, 208 aa, Zea Mays
MHARFLSAPSPASAAPSPYVRLAFTGALPRRACWKPRGPASASAPPPRPLHSLCARASMQPASPAHDGHGGPPVHGVSNTVIGVLGGGQLGKMLCHAASQMGIRIVILDPLPGCPASSVCDEHVIGSFNDGDTVREFAKRCGVLTVEIEHVDAATLEKLEKQGVDCEPKASTITIIQDKYRQKKHFSRYEIPLPDFMERRLGKSLAIP

SEQ ID NO: 171283 - protein, 479 aa, Zea Mays
MLMPPHWRSWKNRALTASLKPPQSRLFRTSTGRKSISQDTRSHCLTSWNIEEAGEKFGYPLMVKSKRLAYDGRGNAVAKNKEELSSVVASLGGFERGLYVERWTPFVKELSVIVARSRDNSTVCYPVVETVHKENICHVVEAPADVSNKIKKLATSVAEKAIKSLEGAGVFAVELFLTEDDQILLNEVAPRPHNSGHHTIESCYTSQYEQHIRAILGLPLGDPSMKAPAAIMYNILGEDEGEAGFFLAHQLISRALTIPGTSVHWYAKPEMRKQRKMGHITIVGPSKISVKSRLDNLLQRNSSDPKEVSPRVAIIMGSQSDLPVMKDAERVLKEFDIPCELTIVSAHRTPERMYDYAKSAKDRGFEVIIAGAGGAAHLPGMVASLTPLPVIGVPIKTSTLSGFDSLLSIVQMPKGIPVATVAIGIAENAGLLAARILAARDPELQDRVTKYQDDLRDMVLETAERLEDQGPEEFLKGMD

SEQ ID NO: 171284 - protein, 357 aa, Zea Mays
MLMPPHWRSWKNRALTASLKPPQSRLFRTSTGRKSISQDTRSHCLTSWNIEEAGEKFGYPLMVKSKRLAYDGRGNAVAKNKEELSSVVASLGGFERGLYVERWTPFVKELSVIVARSRDNSTVCYPVVETVHKENICHVVEAPADVSNKIKKLATSVAEKAIKSLEGAGVFAVELFLTEDDQILLNEVAPRPHNSGHHTIESCYTSQYEQHIRAILGLPLGDPSMKAPAAIMYNILGEDEGEAGFFLAHQLISRALTIPGTSVHWYAKPEMRKQRKMGHITIVGPSKISVKSRLDNLLQRNSSDPKEVSPRVAIIMGSQSDLPVMKDAERVLKEFDIPCESGCMIMRSLLKTGVSRS

SEQ ID NO: 171285 - protein, 699 aa, Zea Mays
MGCVCGRPSAFDDGQCRATPPPAAKLSAAVRSKEEARKQQQLQLQQHVRAGSGREEALERRRAMMAMAAVCQVRSPVPRAVEAEHVAVGWPPWLVAVAPEAVRGWVPRRAESFEKLDKIGQGTYSNVYRARDLEKEKIVALKKVRFDNLEPESVKFMAREILILRRLDHPNVIKLEGLVTSRMSCSLYLVFEYMEHDLAGLASFPGVKFTESQVKCYMQQLLRGLEHCHSRHILHRDIKGSNLLIDNRGILKIADFGLASFFDPEQRHPLTSRVVTLWYRPPELLLGATNYGVAVDLWSAGCILAELYAGKPIMPGRTEVEQLHKIFKLCGSPSEDYWRKSKLPHATIFKPQHPYARRVPETFKEFPVPALALVDVLLSVDPADRGTASSALQSEFFTTKPYACNPSSLPRYPPSKEFDAKRREEEARSHALFRQGVTGGKQHKHDPERRTRESRAVPAPEANAELVSSLQKRQAQANTRSRSEMFNPCKEDSASGFRIEPPRPTPVTESSEDPQRAYPTRIFHSGPLVNQSQPSKAGGGKNGEPQVPGVANHPVVLSTRSGPRADDSGRTMVAQAEAFAHGRRLSESINEHFSNSGKYDQVFPKKDDRNIRADGAIGYGSKGSKIHHSGPLTCPSGSNVDEMLKENDRQIQEVFRRTRVEKSRARRDHGHHQGGIRPGDFGAIPVFPSSRSSYQAVQQ

SEQ ID NO: 171286 - protein, 438 aa, Zea Mays
MGCVCGRPSAFDDGQCRATPPPAAKLSAAVRSKEEARKQQQLQLQQHVRAGSGREEALERRRAMMAMAAVCQVRSPVPRAVEAEHVAVGWPPWLVAVAPEAVRGWVPRRAESFEKLDKIGQGTYSNVYRARDLEKEKIVALKKVRFDNLEPESVKFMAREILILRRLDHPNVIKLEGLVTSRMSCSLYLVFEYMEHDLAGLASFPGVKFTESQVKCYMQQLLRGLEHCHSRHILHRDIKGSNLLIDNRGILKIADFGLASFFDPEQRHPLTSRVVTLWYRPPELLLGATNYGVAVDLWSAGCILAELYAGKPIMPGRTEVEQLHKIFKLCGSPSEDYWRKSKLPHATIFKPQHPYARRVPETFKEFPVPALALVDVLLSVDPADRGTASSALQSEFFTTKPYACNPSSLPRYPPSKEFDAKRREEEARRGQQLLSFLP

SEQ ID NO: 171287 - protein, 679 aa, Zea Mays
MGCVCGRPSAFDDGQCRATPPPAAKLSAAVRSKEEARKQQQLQLQQHVRAGSGREEALERRRAMMAMAAVCQVRSPVPRAVEAEHVAVGWPPWLVAVAPEAVRGWVPRRAESFEKLDKIGQGTYSNVYRARDLEKEKIVALKKVRFDNLEPESVKFMAREILILRRLDHPNVIKLEGLVTSRMSCSLYLVFEYMEHDLAGLASFPGVKFTESQVKCYMQQLLRGLEHCHSRHILHRDIKGSNLLIDNRGILKIADFGLASFFDPEQRHPLTSRVVTLWYRPPELLLGATNYGVAVDLWSAGCILAELYAGKPIMPGRTEVEQLHKIFKLCGSPSEDYWRKSKLPHATIFKPQHPYARRVPETFKEFPVPALALVDVLLSVDPADRGTASSALQSEFFTTKPYACNPSSLPRYPPSKEFDAKRREEEARRQGVTGGKQHKHDPERRTRESRAVPAPEANAELVSSLQKRQAQANTRSRSEMFNPCKEDSASGFRIEPPRPTPVTESSEDPQRAYPTRIFHSGPLVNQSQPSKAGGGKNGEPQVPGVANHPVVLSTRSGPRADDSGRTMVAQAEAFAHGRRLSESINEHFSNSGKYDQVFPKKDDRNIRADGAIVSNVLPEMQKGEKLDCPVSAMVTAMLVQNCILTCIAKLKKNYRLANPGIRSMKHEKGGKTETNPIYS

SEQ ID NO: 171288 - protein, 137 aa, Zea Mays
MAATPDRVNADLRRCLTVDTPPPPQLFDPCQRFRICEAFWRVFDVATPVGFHAVIAGAGVRGWAIDAWWRQVFRCFKGGGVLALCCGTTSMADLVAAAIHQMPRSSSGLRRWSKREADGGAGSPQGTGFGRAPLVSR

SEQ ID NO: 171289 - protein, 463 aa, Zea Mays
MSRYDGRAADAGSYRDRRSEGAFGGGSRAFSAPSKADASAAASELDGLPRFEKNFYVESPAVAGMTEEEVEAYRRRREITVDGRDVPKPVREFRDVGFPEYVLQEITKAGFVEPTPIQSQGWPMALRGRDLIGIAETGSGKTLAYLLPAIVHVNAQPILSPGDGPIVLVLAPTRELAVQIQQEATKFGASSKIKSTCIYGGVPKGPQVRDLQKDEADRMLDMGFEPQIKKIVSQIRPDRQTLYWSATWPKEVEQLARNFLFDPYKVTIGSEDLKANHAIVQHVEILSESQKYNKLVNLLEDIMDGSRILIFMDTKKGCDQTTRQLRMDGWPALSIHGDKSQAERDWVLSEFKSGKSPIMTATDVAARGLDVKDVKYVINYDFPGSLEDYVHRIGRTGRAGAKGTAYTFFTAANARFAKELINILEEAGQKVSSELAAMGRGAPPPSSGYRDRYRGYGGGRSWS

SEQ ID NO: 171290 - protein, 184 aa, Zea Mays
MSKYGTIPTSSSAGGGPVPLGGASPLDFISRAKARGASALATRRPWRELVDVHAVGLPPSLGDAYLRVRANLAHFAMNYAIVVLVVVFLSLLWHPVSLIVFLVCMLAWLVLYFLRDEPLVLFGRVVADGYVLAVLAVVTLVLLLLTDATANILSSLLIGLVLVLVHAALHKAEDNAADEADRWI

SEQ ID NO: 171291 - protein, 652 aa, Zea Mays
MRHLALLALLLAPVLGSTGTTLSPSPAATDSPANQGQASSPPQSAFALGPVAVPTAPTTPSASPSPEKAAAVSPAAPTEPRIAPAPVAPPKEYSAPPPVEVAPTDPTDEVPPPVAPPQAAVGNPTPILPGTPALLPYVQAPAPSVVLKPNPPVVVSPPPANNQPSRPVGSVPPYPPPASPPPANGIPPYPPSGRFPAIPPATSAVPPPATSPVIAQAPQRRADPPSRDYKNGNAVPPANTYPPTNLKKHHVPHASPPKGSTGQTVPGHKSPVTGSAPATSPLPQNTNMPSIPKNASSVPHAHPSPPSIAPELAPTGRSHAQGWKSSNPNNKTNRLHAPSYPPPRAQGPEVSRTPRQTGTKNYTHHAPPPFPQGHPSFPVHSPSPSPASSRGPANAKKRNHISPTLPSIPPLPEPKAPSAHPIWTLPPPPPNSDCNSLSCPEPLTDPPAGAPCACVLPIRVGIRLSVDLYSFFPLVSDFAEEVASGVNMAQRQVRVMGANVAGDQPDKTMVLVDLVPVQVKFDNATAFSAFESLWSKKVSLKPSVFGNYEILYVVYPGLPPSPPSGQGVGDGAFGNNRNARAVKPLGVDVRSPKRKVNGSLIAIVVLSTVIALIICCLAAWSLILRFRGPSHTARGFPHTALPKFSRSSGTCN

SEQ ID NO: 171292 - protein, 624 aa, Zea Mays
MRHLALLALLLAPVLGSTGTTLSPSPAATDSPANQGQASSPPQSAFALGPVAVPTAPTTPSASPSPEKAAAVSPAAPTEPRIAPAPVAPPKEYSAPPPVEVAPTDPTDEVPPPVAPPQAAVGNPTPILPGTPALLPYVQAPAPSVVLKPNPPVVVSPPPANNQPSRPVGSVPPYPPPASPPPANGIPPYPPSGRFPAIPPATSGNAVPPANTYPPTNLKKHHVPHASPPKGSTGQTVPGHKSPVTGSAPATSPLPQNTNMPSIPKNASSVPHAHPSPPSIAPELAPTGRSHAQGWKSSNPNNKTNRLHAPSYPPPRAQGPEVSRTPRQTGTKNYTHHAPPPFPQGHPSFPVHSPSPSPASSRGPANAKKRNHISPTLPSIPPLPEPKAPSAHPIWTLPPPPPNSDCNSLSCPEPLTDPPAGAPCACVLPIRVGIRLSVDLYSFFPLVSDFAEEVASGVNMAQRQVRVMGANVAGDQPDKTMVLVDLVPVQVKFDNATAFSAFESLWSKKVSLKPSVFGNYEILYVVYPGLPPSPPSGQGVGDGAFGNNRNARAVKPLGVDVRSPKRKVNGSLIAIVVLSTVIALIICCLAAWSLILRFRGPSHTARGFPHTALPKFSRSSGTCN

SEQ ID NO: 171293 - protein, 585 aa, Zea Mays
MRHLALLALLLAPVLGSTGTTLSPSPAATDSPANQGQASSPPQSAFALGPVAVPTAPTTPSASPSPEKAAAVSPAAPTEPRIAPAPVAPPKEYSAPPPVEVAPTDPTDEVPPPVAPPQAAVGNPTPILPGTPALLPYVQAPAPSVVLKPNPPVVVSPPPANNQPIPPYPPPASPPPANGIPPYPPSGRFPAIPPATSVPPPATSPVIAQAPQRRADPPSRDYKNGNAVPPANTYPPTNLKKHHVPHASPPKGSTGQTVPGHKSPVTGSAPATSPLPQNTNMPSIPKNASSVPHAHPSPPSIAPELAPTGRSHAQGWKSSNPNNKTNRLHAPSYPPPRAQGPEVSRTPRQTGTKNYTHHAPPPFPQGHPSFPVHSPSPSPASSRGPANAKKRNHISPTLPSIPPLPEPKAPSAHPIWTLPPPPPNSDCNSLSCPEPLTDPPAGAPCACVLPIRVGIRLSVDLYSFFPLVSDFAEEVASGVNMAQRQVRVMGANVAGDQPDKTMVLVDLVPVQVKFDNATAFSAFESLWSKKVSLKPSVFGNYEILYVVYPGLPPSPPSGQGVGDGAFGNNRNARAVKPLGVDLFDS

SEQ ID NO: 171294 - protein, 651 aa, Zea Mays
MRHLALLALLLAPVLGSTGTTLSPSPAATDSPANQGQASSPPQSAFALGPVAVPTAPTTPSASPSPEKAAAVSPAAPTEPRIAPAPVAPPKEYSAPPPVEVAPTDPTDEVPPPVAPPQAAVGNPTPILPGTPALLPYVQAPAPSVVLKPNPPVVVSPPPANNQPSRPVGSVPPYPPPASPPPANGIPPYPPSGRFPAIPPATSVPPPATSPVIAQAPQRRADPPSRDYKNGNAVPPANTYPPTNLKKHHVPHASPPKGSTGQTVPGHKSPVTGSAPATSPLPQNTNMPSIPKNASSVPHAHPSPPSIAPELAPTGRSHAQGWKSSNPNNKTNRLHAPSYPPPRAQGPEVSRTPRQTGTKNYTHHAPPPFPQGHPSFPVHSPSPSPASSRGPANAKKRNHISPTLPSIPPLPEPKAPSAHPIWTLPPPPPNSDCNSLSCPEPLTDPPAGAPCACVLPIRVGIRLSVDLYSFFPLVSDFAEEVASGVNMAQRQVRVMGANVAGDQPDKTMVLVDLVPVQVKFDNATAFSAFESLWSKKVSLKPSVFGNYEILYVVYPGLPPSPPSGQGVGDGAFGNNRNARAVKPLGVDVRSPKRKVNGSLIAIVVLSTVIALIICCLAAWSLILRFRGPSHTARGFPHTALPKFSRSSGTCN

SEQ ID NO: 171295 - protein, 632 aa, Zea Mays
MRHLALLALLLAPVLGSTGTTLSPSPAATDSPANQGQASSPPQSAFALGPVAVPTAPTTPSASPSPEKAAAVSPAAPTEPRIAPAPVAPPKEYSAPPPVEVAPTDPTDEVPPPVAPPQAAVGNPTPILPGTPALLPYVQAPAPSVVLKPNPPVVVSPPPANNQPSRPVGSVPPYPPPASPPPANGIPPYPPSGRFPAIPPATSVPPPATSPVIAQAPQRRADPPSRDYKNGNAVPPANTYPPTNLKKHHVPHASPPKGSTGQTVPGHKSPVTGSAPATSPLPQNTNMPSIPKNASSVPHAHPSPPSIAPELAPTGRSHAQGWKSSNPNNKTNRLHAPSYPPPRAQGPEVSRTPRQTGTKNYTHHAPPPFPQELLDSTGNHISPTLPSIPPLPEPKAPSAHPIWTLPPPPPNSDCNSLSCPEPLTDPPAGAPCACVLPIRVGIRLSVDLYSFFPLVSDFAEEVASGVNMAQRQVRVMGANVAGDQPDKTMVLVDLVPVQVKFDNATAFSAFESLWSKKVSLKPSVFGNYEILYVVYPGLPPSPPSGQGVGDGAFGNNRNARAVKPLGVDVRSPKRKVNGSLIAIVVLSTVIALIICCLAAWSLILRFRGPSHTARGFPHTALPKFSRSSGTCN

SEQ ID NO: 171296 - protein, 507 aa, Zea Mays
MRHLALLALLLAPVLGSTAPTTPSASPSPEKAAAVSPAAPTEPRIAPAPVAPPKEYSAPPPVEVAPTDPTDEVPPPVAPPQAAVGNPTPILPGTPALLPYVQAPAPSVVLKPNPPVVVSPPPANNQPSRPVGSVPPYPPPASPPPANGIPPYPPSGRFPAIPPATSAVPPPATSPVIAQAPQRRADPPSRDYKNGNAVPPANTYPPTNLKKHHVPHASPPKGSTGQTVPGHKSPVTGSAPATSPLPQNTNMPSIPKNASSVPHAHPSPPSIAPELAPTGRSHAQGWKSSNPNNKTNRLHAPSYPPPRAQGPEVSRTPRQTGTKNYTHHAPPPFPQGHPSFPVHSPSPSPASSRGPANAKKRNHISPTLPSIPPLPEPKAPSAHPIWTLPPPPPNSEVASGVNMAQRQVRVMGANVAGDQPDKTMVLVDLVPVQVKFDNATAFSAFESLWSKKVSLKPSVFGNYEILYVVYPGLPPSPPSGQGVGDGAFGNNRNARAVKPLGVDLFDS

SEQ ID NO: 171297 - protein, 646 aa, Zea Mays
MRHLALLALLLAPVLGSTGTTLSPSPAATDSPANQGQASSPPQSAFALGPVAVPTAPTTPSASPSPEKAAAVSPAAPTEPRIAPAPVAPPKEYSAPPPVEVAPTDPTDEVPPPVAPPQAAVGNPTPILPGTPALLPYVQAPAPSVVLKPNPPVVVSPPPANNQPIPPYPPPASPPPANGIPPYPPSGRFPAIPPATSAVPPPATSPVIAQAPQRRADPPSRDYKNGNAVPPANTYPPTNLKKHHVPHASPPKGSTGQTVPGHKSPVTGSAPATSPLPQNTNMPSIPKNASSVPHAHPSPPSIAPELAPTGRSHAQGWKSSNPNNKTNRLHAPSYPPPRAQGPEVSRTPRQTGTKNYTHHAPPPFPQGHPSFPVHSPSPSPASSRGPANAKKRNHISPTLPSIPPLPEPKAPSAHPIWTLPPPPPNSDCNSLSCPEPLTDPPAGAPCACVLPIRVGIRLSVDLYSFFPLVSDFAEEVASGVNMAQRQVRVMGANVAGDQPDKTMVLVDLVPVQVKFDNATAFSAFESLWSKKVSLKPSVFGNYEILYVVYPGLPPSPPSGQGVGDGAFGNNRNARAVKPLGVDVRSPKRKVNGSLIAIVVLSTVIALIICCLAAWSLILRFRGPSHTARGFPHTALPKFSRSSGTCN

SEQ ID NO: 171298 - protein, 393 aa, Zea Mays
MRHLALLALLLAPVLGSTAPTTPSASPSPEKAAAVSPAAPTEPRIAPAPVAPPKEYSAPPPVEVAPTDPTDEVPPPVAPPQAAVGNPTPILPGTPALLPYVQAPAPSVVLKPNPPVVVSPPPANNQPIPPYPPPASPPPANGIPPYPPSGRFPAIPPATSAVPPPATSPVIAQAPQRRADPPSRDYKNVPPANTYPPTNLKKHHVPHASPPKGSTGQTVPGHKSPVTGSAPATSPLPQNTNMPSIPKNASSVPHAHPSPPSIAPELAPTGRSHAQGWKSSNPNNKTNRLHAPSYPPPRAQGPEVSRTPRQTGTKNYTHHAPPPFPQGHPSFPVHSPSPSPASSRGPANAKKRNHISPTLPSIPPLPEPKAPSAHPIWTLPPPPPNSGKVFCTF

SEQ ID NO: 171299 - protein, 305 aa, Zea Mays
MPSIPKNASSVPHAHPSPPSIAPELAPTGRSHAQGWKSSNPNNKTNRLHAPSYPPPRAQGPEVSRTPRQTGTKNYTHHAPPPFPQGHPSFPVHSPSPSPASSRGPANAKKRNHISPTLPSIPPLPEPKAPSAHPIWTLPPPPPNSDCNSLSCPEPLTDPPAGAPCACVLPIRVGIRLSVDLYSFFPLVSDFAEEVASGVNMAQRQVRVMGANVAGDQPDKTMVLVDLVPVQVKFDNATAFSAFESLWSKKVSLKPSVFGNYEILYVVYPGLPPSPPSGQGVGDGAFGNNRNARAVKPLGVDLFDS

SEQ ID NO: 171300 - protein, 122 aa, Zea Mays
MSAGAARSVLVVVFFALPLLVSMTHVLPTCYAGGHQQPAHVGADPRSPPIDGGEHAEQRQQLSRLGSRPPCCDRKCGACAPCKAVQVRAGAGAAAERRLRPRCANYEPVGWKCRCGAAVFDP

SEQ ID NO: 171301 - protein, 486 aa, Zea Mays
MATPPASDTVRQWPPKASLAALVYEQRFRACPGQAAAPISPRRRIARQGPQVEAVADLLRRPGLHVARLQRRQPALGGVGGLGRRVLGGRRPRRPVHGRRRHRRPRPGQGLHGRPPGVGRHPRPDRVPRVLGSAGAPGAQGAGAAPGDRARAAGAEAGGRDAAVHAGAGAGAGAHPGAPRAHVHRGPGRAEAARGAPHPDGYPQGSRGLNCLLLFYKMILAWFSNASGRRRTDPHCCCNLSLSQEGWCDSQGTLEQVRVKLQKRQEGAIKRERAIAYAYSQQADGAAKCNPPKLTSNGLVNHSGMLLKHQNLDKGNGNWSWLERWMAARPWENRLMEEHNSSSPDFRSSKNCEDSFGVLGDFSEPNSVKVRKNNVSKRVCAKPPGPTHAHGHHQRLKAQSISSLSTELHNDESSASSSSCFASTPISFTLVASEKTEDSVRTRPNYMSMTESIKAKQKACSAQRTVALKQCDDRKAMSAELKVAQV

SEQ ID NO: 171302 - protein, 560 aa, Zea Mays
MLVLDVLNSLVNAPSKMSELEINIPSGSLGKTDSVLREEGHPTIDLSKQGKPVRKSSASKTRKKKHKKILGAEVPAEAQKKCDDNLVLPETLRVGITDDSSLCTDSGRARTPEASEDISAEVPNTQTEAKPEFIMSGRTRLKSQMHCKTKPMSCNEGSDNFQAKKLLHCLSSEPLRRWCTYEWFYSAVDYPWFSNNEFVHYLDHAKLSHLSRLTRSEWSAIRSSLGKPRRFSNHFLAVEKEKLEDYREKVRKIYAQLNDGSRDSLPADLARPFSIGQQVIVRHPSSRELCDGKVVMMGPDCYKVHFDDPDLGVDTVKDTDCMPVNWLHNRPDNMRRNYLSNDVYNILEMDHIPDLTPSENRNHAINGTTVFEELKSLRLTSDRQPKAESIIHSERPPYRSTSDGPTSSSGFSCPDNNAGHNGELESYVAAFFENSLSQARQMVDEAIQANSGGSDDEKVCMLNQVTGCLGSDSRGVQLPSDLISNCIATVISIKRLSDSRHPFGNVAGVLEHALSMLRPSCPQNLGVYTEIKRDLCTIANQIFALVPTASGNCSPPVSPM

SEQ ID NO: 171303 - protein, 628 aa, Zea Mays
MGPAKGSRTINKTIVKGYEDQQQHDDPSSSSKAKQKKRKISDLDPKWSKDELTRFYEAYRQHGKDWKKISIAIGGKSSDMVRSLYSAHRTFLSLPEHQATAMGFIALVTGHHNASEKTTSHRGYDHIARASGKARKHGEQQKSIDGPDLHNCHEGEITGFSASFKKRYYGELVRNSRNHAVQRRTPLIPVIAPADRSTIDEPTPGIENVINFNSTKRKYEAANHGCAVAPTNKYSSDRVSGFAETCKADQDFKKTRIQQTVEESQTGIVEHETTMASKEGNKLVSSVNNNQILIDSISEDDMLVLDVLNSLVNAPSKMSELEINIPSGSLGKTDSVLREEGHPTIDLSKQGKPVRKSSASKTRKKKHKKILGAEVPAEAQKKCDDNLVLPETLRVGITDDSSLCTDSGRARTPEASEDISAEVPNTQTEAKPEFIMSGRTRLKSQMHCKTKPMSCNEGSDNFQAKKLLHCLSSEPLRRWCTYEWFYSAVDYPWFSNNEFVHYLDHAKLSHLSRLTRSEWSAIRSSLGKPRRFSNHFLAVEKEKLEDYREKVRKIYAQLNDGSRDSLPADLARPFSIGQQVIVRHPSSRELCDGKVVMMGPDCYKVHFDDPDLGVDTVKVCSFCFSCFH

SEQ ID NO: 171304 - protein, 575 aa, Zea Mays
MKIFGCLCPVMAADDMLVLDVLNSLVNAPSKMSELEINIPSGSLGKTDSVLREEGHPTIDLSKQGKPVRKSSASKTRKKKHKKILGAEVPAEAQKKCDDNLVLPETLRVGITDDSSLCTDSGRARTPEASEDISAEVPNTQTEAKPEFIMSGRTRLKSQMHCKTKPMSCNEGSDNFQAKKLLHCLSSEPLRRWCTYEWFYSAVDYPWFSNNEFVHYLDHAKLSHLSRLTRSEWSAIRSSLGKPRRFSNHFLAVEKEKLEDYREKVRKIYAQLNDGSRDSLPADLARPFSIGQQVIVRHPSSRELCDGKVVMMGPDCYKVHFDDPDLGVDTVKDTDCMPVNWLHNRPDNMRRNYLSNDVYNILEMDHIPDLTPSENRNHAINGTTVFEELKSLRLTSDRQPKAESIIHSERPPYRSTSDGPTSSSGFSCPDNNAGHNGELESYVAAFFENSLSQARQMVDEAIQANSGGSDDEKVCMLNQVTGCLGSDSRGVQLPSDLISNCIATVISIKRLSDSRHPFGNVAGVLEHALSMLRPSCPQNLGVYTEIKRDLCTIANQIFALVPTASGNCSPPVSPM

SEQ ID NO: 171305 - protein, 393 aa, Zea Mays
MGPAKGSRTINKTIVKGYEDQQQHDDPSSSSKAKQKKRKISDLDPKWSKDELTRFYEAYRQHGKDWKKISIAIGGKSSDMVRSLYSAHRTFLSLPEHQATAMGFIALVTGHHNASEKTTSHRGYDHIARASGKARKHGEQQKSIDGPDLHNCHEGEITGFSASFKKRYYGELVRNSRNHAVQRRTPLIPVIAPADRSTIDEPTPGIENVINFNSTKRKYEAANHGCAVAPTNKYSSDRVSGFAETCKADQDFKKTRIQQTVEESQTGIVEHETTMASKEGNKLVSSVNNNQILIDSISEGIFSNWFILFTSIVNILFLKVFLAIGSSFSLLLSTYSCFIQTLFSALLPVPFSVLKYFIIMHYYGIYSSSDMLTFCILDFQAMFWNVEPEHTPH

SEQ ID NO: 171306 - protein, 272 aa, Zea Mays
MSASGDPLDVLPAAVLADVLGRVADAGDIAACRLASRTLLAASYICPRVRLCAADRARRRREGGGGSPAFRATTANLASLLGPHLRSLSLDTAGGQGSPDDAMWVEEGEFDEADGLHLTCGEAVAAWATTSAGTVLRELDIADYWPQACWRKAEALPLISHYCQNLVKLCLKNAWLSVDRLKKMPNLTYLTLEFIRLDDEDLNQLNECFPCLHTLNLIGVGGLKDPKIHLLQLKACCWEHSWTIKLSGHWSSSYLSLQVNMNFLKQLTRIIF

SEQ ID NO: 171307 - protein, 82 aa, Zea Mays
MIGGKHKKYHCFACSLYEQIKNNFITDSQYNTILQYEQILSANKLEKYHTKYVYASVALFLVYLLWNMDDGHTRVQDYCKKK

SEQ ID NO: 171308 - protein, 398 aa, Zea Mays
MYARSSGAEPAKDKTRQARPAAEERERERESTRQEAGGRGGACRGLRKATAMGDSSGSVSVDVERIFFGGKEHRVRTRHGSLSVSVYGDEDKPALVTYPDVALNHMSCFQGLFFCPEAASLLLHSFCVYHITPQGHELGAAPISADVPVPSVDDLADQVADVLDFFSLGSVMCLGVTAGAYVLTLFATKYRERVLGLMLVSPVCKAPSWSEWLYNKVLSNLLYYYGTRGLVKESLLQRYFSMDVRGNGQDPESEIVQACRSLLDERQGANVWRFLQAISRRHDLTESLKKLKCRTLIFVGENSQFHADAVHMTTKLDRRYCALVEVQACGSLVTEEQPHAMVIPMEYFLMGYGLYRPSQQESSPRSTLSPFCISPELLSPESMGVKLKPIKTRISLNV

SEQ ID NO: 171309 - protein, 378 aa, Zea Mays
MYARSSGAEPAKDKTRQARPAAEERERERESTRQEAGGRGGACRGLRKATAMGDSSGSVSVDVERIFFGGKEHRVRTRHGSLSVSVYGDEDKPALVTYPDVALNRSQPLTILFMLGQLGAAPISADVPVPSVDDLADQVADVLDFFSLGSVMCLGVTAGAYVLTLFATKYRERVLGLMLVSPVCKAPSWSEWLYNKVLSNLLYYYGTRGLVKESLLQRYFSMDVRGNGQDPESEIVQACRSLLDERQGANVWRFLQAISRRHDLTESLKKLKCRTLIFVGENSQFHADAVHMTTKLDRRYCALVEVQACGSLVTEEQPHAMVIPMEYFLMGYGLYRPSQQESSPRSTLSPFCISPELLSPESMGVKLKPIKTRISLNV

SEQ ID NO: 171310 - protein, 206 aa, Zea Mays
MGDSSGSVSVDVERIFFGGKEHRVRTRHGSLSVSVYGDEDKPALVTYPDVALNHMSCFQGLFFCPEAASLLLHSFCVYHITPQGHELGAAPISADVPVPSVDDLADQVADVLDFFSLGSVMCLGVTAGAYVLTLFATKYRERVLGLMLVSPVCKAPSWSEWLYNKVLSNLLYYYGTRGLVKESLLQRYFSMVLLMPPSAFLKLSGL

SEQ ID NO: 171311 - protein, 255 aa, Zea Mays
MVSRQLYKRAALRPGVPRPQPAHCPRSLSLNTPISPVHRISRSPETELKEGSHDDDGRRREHAAVVPPRPCERRRRRRSRATSPRASCARRRPAPSCRRPSRPRRSPRHCRPTSAVGAGRAPGPPSTTCSPRSASSASAGPTRPRRAAGAATLHPRSRTDRLRGARSTACPPPRGPPPHPATWPTWTLSTSASAATTSPWRGWSPAAPSARRCSSGLAGRALFPATPVAPTSVGSPTSSTERGGGSGNNNGHGER

SEQ ID NO: 171312 - protein, 264 aa, Zea Mays
MGRTPCCDRAAVKRGPWSPEEDEALRSYVQRHGSGGNWITMPKKAGALTTGGSLPVGVACRAQEVRQELQAALAQLPPPGHPPRRLHRRGGRRHHVPLRPAREQMVADSLADGGEDGQRREEPLEHQAQEAPPGRSGRVLRPAASARARASFQHHAHVLAVPVARHTDREDRGVHLRRLPGAGARPRGPVRRRRRRRRRLHLGRLRGVVGLQQLVGGGERRRRSVPLPAGLLRGPRPRRRRPAPPPRRLLLPSRPDLAVVASSV

SEQ ID NO: 171313 - protein, 71 aa, Zea Mays
MYYIDSGGRSGFRETAAQVFLRGTVGVQLLHPSIAALGSPETEARGVLVVPLHLACTTPTRYYCSSRRGHR

SEQ ID NO: 171314 - protein, 587 aa, Zea Mays
MPDFFSLYPPKLHTCHRDSQTETWQDSLWQYCLLVASIICHAPVPQLWHAHIIFYVLYPLYTHQLVVLPVFELLGSIKCCTAPFALGRKQALGFTPLSVQLQHHALSWQKGPSFEHKGLLHMPIAARRRNKNHPSPYRCYSCTRALPPGAAAYDPDMNRAHSSSSKLINEKLVEHRISTAKHCPHCGEKIDSKPDWVGLPAGVKFDPTDQELIEHLEAKVKDEGSRSHPLIDEFIPTIDGEDGICYTHPEKLPGVTRDGLSKHFFHRPSKAYTTGTRKRRKIQTECDVHKGETRWHKTGKTRPVMVNGRQKGCKKILVLYTNFGKHRKPEKTNWVMHQYHLGDLEEEKEGELVVCKIFYQTQPRQCSWSSDRGAAATALAATAAAAAAQEQHRRDSGSGSCSSRDHEVSATSFPAGYTVTTAVEMQQHMKQPADHFSFAPFRKTFDQEVGIGGDQVPSNQLGRSEPHHAGLGQQPHGPVLATKTAVPATAFLISRPSNPVSTIVPPAMQHASVVLDHDQFHVPAILLHHHDKFQPQQKLDRRSAGLEELIMGCTSSTSTKGDASIAHPQETEWPYTYWPPDNQDHHG

SEQ ID NO: 171315 - protein, 403 aa, Zea Mays
MNRAHSSSSKLINEKLVEHRISTAKHCPHCGEKIDSKPDWVGLPAGVKFDPTDQELIEHLEAKVKDEGSRSHPLIDEFIPTIDGEDGICYTHPEKLPGVTRDGLSKHFFHRPSKAYTTGTRKRRKIQTECDVHKGETRWHKTGKTRPVMVNGRQKGCKKILVLYTNFGKHRKPEKTNWVMHQYHLGDLEEEKEGELVVCKIFYQTQPRQCSWSSDRGAAATALAATAAAAAAQEQHRRDSGSGSCSSRDHEVSATSFPAGYTVTTAVEMQQHMKQPADHFSFAPFRKTFDQEVGIGGDQVPSNQLGRSEPHHAGLGQQPHGPVLATKTAVPATAFLISRPSNPVSTIVPPAMQHASVVLDHDQFHVPAILLHHHDKFQNTALVIVPFQHYYNKEHAPTATTKA

SEQ ID NO: 171316 - protein, 417 aa, Zea Mays
MNRAHSSSSKLINEKLVEHRISTAKHCPHCGEKIDSKPKDWVGLPAGVKFDPTDQELIEHLEAKVKDEGSRSHPLIDEFIPTIDGEDGICYTHPEKLPGVTRDGLSKHFFHRPSKAYTTGTRKRRKIQTECDVHKGETRWHKTGKTRPVMVNGRQKGCKKILVLYTNFGKHRKPEKTNWVMHQYHLGDLEEEKEGELVVCKIFYQTQPRQCSWSSDRGAAATALAATAAAAAAQEQHRRDSGSGSCSSRDHEVSATSFPAGYTVTTAVEMQQHMKQPADHFSFAPFRKTFDQEVGIGGDQVPSNQLGRSEPHHAGLGQQPHGPVLATKTAVPATAFLISRPSNPVSTIVPPAMQHASVVLDHDQFHVPAILLHHHDKFQICRLGRTDNGLHVVHKHKRRCFHCSPPRDRMALHVLAT

SEQ ID NO: 171317 - protein, 279 aa, Zea Mays
MVNGRQKGCKKILVLYTNFGKHRKPEKTNWVMHQYHLGDLEEEKEGELVVCKIFYQTQPRQCSWSSDRGAAATALAATAAAAAAQEQHRRDSGSGSCSSRDHEVSATSFPAGYTVTTAVEMQQHMKQPADHFSFAPFRKTFDQEVGIGGDQVPSNQLGRSEPHHAGLGQQPHGPVLATKTAVPATAFLISRPSNPVSTIVPPAMQHASVVLDHDQFHVPAILLHHHDKFQLDRRSAGLEELIMGCTSSTSTKGDASIAHPQETEWPYTYWPPDNQDHHG

SEQ ID NO: 171318 - protein, 470 aa, Zea Mays
MCPLSPSLLSLSPLHCSSDLLFDSCTRALPPGAAAYDPDMNRAHSSSSKLINEKLVEHRISTAKHCPHCGEKIDSKPDWVGLPAGVKFDPTDQELIEHLEAKVKDEGSRSHPLIDEFIPTIDGEDGICYTHPEKLPGVTRDGLSKHFFHRPSKAYTTGTRKRRKIQTECDVHKGETRWHKTGKTRPVMVNGRQKGCKKILVLYTNFGKHRKPEKTNWVMHQYHLGDLEEEKEGELVVCKIFYQTQPRQCSWSSDRGAAATALAATAAAAAAQEQHRRDSGSGSCSSRDHEVSATSFPAGYTVTTAVEMQQHMKQPADHFSFAPFRKTFDQEVGIGGDQVPSNQLGRSEPHHAGLGQQPHGPVLATKTAVPATAFLISRPSNPVSTIVPPAMQHASVVLDHDQFHVPAILLHHHDKFQPQQKLDRRSAGLEELIMGCTSSTSTKGDASIAHPQETEWPYTYWPPDNQDHHG

SEQ ID NO: 171319 - protein, 388 aa, Zea Mays
MAAAALAMAEQVVAELRVRCETPPSMLREVAVEMAREMGAGLEKDGGSRVKMLLSYVDKLPTGREEGLFYGLDLGGTNFRVLKVQLGGNAKHVVDRDSREVGIPPHLMSGSSSELFGFIASELAKFVDDDEKCANISNGKKREIGFTFSFPVKQRSVASGTLVKWTKAFSINDAVGEDVVAELQTAMEKQGLDMHVAALINDAVGTLAGARYYDKDVVAGVIFGTGTNAAYVEKANAIPKWEGELPHSGDMVINMEWGNFFSSHLPITEYDQELDKESLNPGEQIYEKLTSGMYLGEIVRRVLLKISLQSAIFGDIDHTKLQTHFLLRTPHISAMHHDETSDLKIVAENFEENLEAHPWRLVSWSLKSVTLWRQEQPGWLLRGLQGSS

SEQ ID NO: 171320 - protein, 159 aa, Zea Mays
MSSFNERPIIFSLSNPTSHSECTAEQAYTWSQGRSIFASGSPFAPVEYEGKTFVPGQSNNAYIFPGLGLGLVISGAVRVHEDMLLAASKALADQATQDNFEKGSIFPPFTSIRKISAHIAAAVAAKAYELGLATRLPPPSDLVKYAENCMYTPVYRNYR

SEQ ID NO: 171321 - protein, 374 aa, Zea Mays
MSSQKKTVDEERVRLLNEQRQREQDRIRREIEEKNKAEAKKMLEDLNKAGKKHVVVEGELTKEAIMELARNEQLKERHEMEKKLQKFAKTMDYLERAKRQEEAPLIEQAFQKRLEEEKILHEQEQLREIELSKQHHASDLQEKNRLSRMLEHKNALQERIIQERAAEFGRLKKERDERMNRLISSRKHERETVRKLMFYLNLEEQRIEMLREEEEARKREAEERRKREEAERKAKLDAIAEKQRLREIELEEKAKATREKLLKGSEAVRAPDSAPVAQPPRESAAAPAAAAAAAAPAPAPSKYIPKFKRGGDSSSIPSGSRDEDRWGSRGPLRQDGPPARLDAPSSRQDTDRWRGSRFPSNSTSSSSTWSRSRN

SEQ ID NO: 171322 - protein, 460 aa, Zea Mays
MKDLERKETEYMRLKRHKICVDDFELLTIIGRGAFGEVRLCRERTSGNIYAMKKLKKSDMVVRGQVEHVRAERNLLAEVASHHCIVKLYYSFQDTEYLYLIMEYLPGGDIMTLLMREDTLTEHVARFYVAETILAIESIHKHNYIHRDIKPDNLLLDKNGHMKLSDFGLCKPIDCSKLSTLNEDEPMSDDNLRESMDIDSSLSDTANGRRWRSQHEQLQHWQMNRRKLAFSTVGTPDYIAPEVLLKKGYGMECDWWSLGAIMYEMLVGYPPFYADDPITTCRKIVHWRNHLKFPEDAKLSNEARDLISRLLCDVDHRIGSAGADQIKAHPWFRGVAWDKLYEMEAAFKPQVNDELDTQNFMKFEELMNLVSPTSLFSVAVGKSSSQNRLWTFKEEVQSSRALERTSITAVSAVCPRQISELNQHANAWMMWLQLDNLLIFSQVSAFSIVGKRFVEIHQSF

SEQ ID NO: 171323 - protein, 509 aa, Zea Mays
MERVAAAKKFIESHYRSQMKNIQERKERRFRLERQLASSQVPKEQQINLMKDLERKETEYMRLKRHKICVDDFELLTIIGRGAFGEVRLCRERTSGNIYAMKKLKKSDMVVRGQVEHVRAERNLLAEVASHHCIVKLYYSFQDTEYLYLIMEYLPGGDIMTLLMREDTLTEHVARFYVAETILAIESIHKHNYIHRDIKPDNLLLDKNGHMKLSDFGLCKPIDCSKLSTLNEDEPMSDDNLRESMDIDSSLSDTANGRRWRSQHEQLQHWQMNRRKLAFSTVGTPDYIAPEVLLKKGYGMECDWWSLGAIMYEMLVGYPPFYADDPITTCRKIVHWRNHLKFPEDAKLSNEARDLISRLLCDVDHRIGSAGADQIKAHPWFRGVAWDKLYEMEAAFKPQVNDELDTQNFMKFEELMNLVSPTSLFSVAVGKSSSQNRLWTFKEEVQSSRALERTSITAVSAVCPRQISELNQHANAWMMWLQLDNLLIFSQVSAFSIVGKRFVEIHQSF

SEQ ID NO: 171324 - protein, 541 aa, Zea Mays
MEREMADAPAAAIPAAEPLAAVAEEGEGEAAAEAVGSTLTMERVAAAKKFIESHYRSQMKNIQERKERRFRLERQLASSQVPKEQQINLMKDLERKETEYMRLKRHKICVDDFELLTIIGRGAFGEVRLCRERTSGNIYAMKKLKKSDMVVRGQVEHVRAERNLLAEVASHHCIVKLYYSFQDTEYLYLIMEYLPGGDIMTLLMREDTLTEHVARFYVAETILAIESIHKHNYIHRDIKPDNLLLDKNGHMKLSDFGLSNGRRWRSQHEQLQHWQMNRRKLAFSTVGTPDYIAPEVLLKKGYGMECDWWSLGAIMYEMLVGYPPFYADDPITTCRKGSLLSYHQNKAKSAQKAALSLFLADIIVHWRNHLKFPEDAKLSNEARDLISRLLCDVDHRIGSAGADQIKAHPWFRGVAWDKLYEMEAAFKPQVNDELDTQNFMKFEELMNLVSPTSLFSVAVGKSSSQNRLWTFKEDDAELQRSELCGVYVQKLRCGESNKNFRSAKEFISNKAFHWFNIRSTRHGFSHGTKREGHTYAHSFIW

SEQ ID NO: 171325 - protein, 568 aa, Zea Mays
MEREMADAPAAAIPAAEPLAAVAEEGEGEAAAEAVGSTLTMERVAAAKKFIESHYRSQMKNIQERKERRFRLERQLASSQVPKEQQINLMKDLERKETEYMRLKRHKICVDDFELLTIIGRGAFGEVRLCRERTSGNIYAMKKLKKSDMVVRGQVEHVRAERNLLAEVASHHCIVKLYYSFQDTEYLYLIMEYLPGGDIMTLLMREDTLTEHVARFYVAETILAIESIHKHNYIHRDIKPDNLLLDKNGHMKLSDFGLCKPIDCSKLSTLNEDEPMSDDNLRESMDIDSSLSDTANGRRWRSQHEQLQHWQMNRRKLAFSTVGTPDYIAPEVLLKKGYGMECDWWSLGAIMYEMLVGYPPFYADDPITTCRKGSLLSYHQNKAKSAQKAALSLFLADIIVHWRNHLKFPEDAKLSNEARDLISRLLCDVDHRIGSAGADQIKAHPWFRGVAWDKLYEMEAAFKPQVNDELDTQNFMKFEELENPPAKTGSGPSRKTMLNSKDLSFVGYTYKNFDAVKAIKISDLQRNSSLTRPSIGSIFGPPGMDSPMEPNGRGTHMHTVSSGDPMIP

SEQ ID NO: 171326 - protein, 395 aa, Zea Mays
MMSLYWFFLMKLYISLMDSLLQKMGLFAIVRASRRFTRRFSTVSCDSYTLIGRSMNIGIPARHCTPLEDWFKARPVMELIPTQRLITTMLADRKYQMLDDNRHVLWTGLIQIEFAKSRKISLKGLLSYDNLGVINGLNMLCLKNLSLSTSSPSEDSSSSPLQESLFEDFMEMVLQKELSCSISSLPEYRDSLFETLKNPAHKLHDAIYHSAFLSDEEFSNLCIHIHRLVRHEMLMRNQGTESCSICAHLNVAYYDQDVIFTCQGHFMLSNFLGVHSKLVKGKPIAGQYHSNPSLNILPYRPHSVLHPIGSALVDTMRIGCMHSIENKLINDICKASFKGVKDPLLDTYTRKEVIRLLRYTFPNYAQYALEGFKTEGLLHKLGLNRLKPIPSILNI

SEQ ID NO: 171327 - protein, 90 aa, Zea Mays
MSMRVERASLEQVQKRFEALKKRKDPSAFTEEDLDERIMKQQQDEEERKRQRKEKKKEKKREQATQHEPEDVDPDIAAMMGFGGFGSSKK

SEQ ID NO: 171328 - protein, 416 aa, Zea Mays
MNSPWRDRPIEESLNLFEDMRRGLIAEGAATLRMKQDMQNENKNMSDLIAYRIKFTPHPHAGDNWCIYPSYDYAHCMVDSLENITHSLCTLEFDIRRPSYYWLLVALGLYQPYVWEYSRLNISNTVMSKRKLNRLVTENWVDGWDDPRLLTLAGLRRRGVSSTAINSFIRGIGITRSDNSLIRVDRLEYHIREELNKTAPRTMVVLRPLKVVITNLEEGKVLDLDGKMWPDASDTDASSHYKLPFSRTVYIEKTDFRLKDSKDYYGLAPGKSVMLRYAFPIKCTDVIYGDTPDDIVEIRAEYDPLKTSKLKGVLHWVAEPAPGVEPLKVEVRLFEKLFMSENPAELEDWLGDLNPHSKEVIKDAYAVPSLATAVLGDKFQFERLGYFAVDTDSTPEKLVFNRTVTLRDSFGKAGPK

SEQ ID NO: 171329 - protein, 53 aa, Zea Mays
MNIETSGVLFQQRYGTKIPDLLFALKSPSAAPIYHPRSECAVISAFYSLHKLW

SEQ ID NO: 171330 - protein, 57 aa, Zea Mays
MERDYSSMGSEMPGKKARKPYTITKPHERWSTEEHARFVDALLMFGRDWKKIEEHVG

SEQ ID NO: 171331 - protein, 140 aa, Zea Mays
MADYHFVYKDVEGASTQWDDIQRRLGNLPPKPEPFKPPPFAPKVDAGEQPKSKEWLDEREAEELEELEDDLDDDRFLEQYRKMRLAELREAAKAARFGSIVPITGSDFVREVSQAPSEVWVVVFLYKDGRFWVPLSYLIF

SEQ ID NO: 171332 - protein, 206 aa, Zea Mays
MADYHFVYKDVEGASTQWDDIQRRLGNLPPKPEPFKPPPFAPKVDAGEQPKSKEWLDEREAEELEELEDDLDDDRFLEQYRKMRLAELREAAKAARFGSIVPITGSDFVREVSQAPSEVWVVVFLYKDGIPECGLLQNCLEELATRYPATKFVKIISTDCIPNYPDRNVPTILVYNNSAVKGTYVGLQKFGGKRCTPESIHLGTMS

SEQ ID NO: 171333 - protein, 2598 aa, Zea Mays
MATPSYAAVKCLNTSSSSRKRFSFKSFSQRVEEIDIDVYRSLHTLKAEPSSGSSFFLDAIVEWRELNTAEDFISFYEEMIPLVQTLPQIVLHRDKLFSALLQRVNMSARLSLEPILMLIAAFSRDILEDFLPFLGRHASALLSLLNDGGDRDPEILEQVFTSWSYIMMYLQKYLVKDTVQILRITAALRYFPKDYVREFMAESVSFLLRNAPNNQLTQGLLKVLLEAAKQPSPARIDGVVSLLWHVMKGTSTKLHSKAGQVLKFLLSKSIVSTLRDKFPDDKVKMIKLVEDVPTILGNLSIISPFYAPVFKLKNPRVIVFIKKLLVKGPQVAQHFESQILSAMDNFIVSSPEDVIFILLNFFKGSKKQIFLCSTDGNHLDSVEKTCKFFESKFSLWIELLDDTAGTGNRSSNQVSEKEAAILWGSFFCYPNMKGVHQDSLSLLRKLIINFDRLLEVGEGNMNGLPMTTWRGLLGAALSSYHKLLLVNTSRNSEFSFFLSLAKSHSTCPQVLSAVAEYLDSLQGVSSMEVTKEFDPQNLLELFSIFAFNLSSPTKDVRILTLRILSYFVKMDQRLITDEERPHKRQRTEVSGEEAVAKYANVVDILLIIESMPISVSTSRKIAIFISRIQMSLSSKMVHDDYIPPLLHGIIGILYNRFSDLWPQTLDCLAVLIRKHKELVWGQFVPFIAIHQSKGLTVKNQEKLEAATQPQSIFDCFNLYLAMDFDCTPAVTVATLLLQSLQRIPDVAESRSRQLIPLFLNFMGYDDSSIFSADSYMPEKCKGKQWKAILKEWLNLLRLMHNARSLYQGNFLQEVLTKRVLDDSDPEIQAKALDCLLNWKDEFLIPYSQNLKNLIDVKTLREELTTWAVSHDSLSILKDHRSRVVPLVIRVLAPKVRKLKLLGSRKHTGASHRKAILRFLLQFDSNELELFFSLLLRSLIPGSLQLKMFGSQPDNLLGSFSDIVGTSTEICVENFTWKKANGFIHLVEEIFGTFDMPHISPFLNVLLIIVARLLESCMRNLRNESDGKYPCNQTNDHGNGCSINSEVGNSVNVDECFKEMHLEGHMEQPHSITQTSVSIKQLKDLRSSCIRVVSSALSHYESHEFGENFWGVFFSSVKPLIDCFTQEASSSEKPSSLFACFMAMSRSPKLAPLLGSNNLVPAIFSILTVKTASGSITTYALEFIENLLRLDIDLQQQDEHLVKKVLLQHMDVLIHSLHDFVNHRKELNRRSGTWLGQRELRLFKLLLNYITDPSAADNFIDLILPFFSKKDLNSDDCLEALCVVRGIIQNLRCKVSEKVLNALNPLLAIVGLELRLCICDIYAGLSLNDPSMLFLAGLIGDLNAVSASELGELDYDTRLNTYDKVRPQLFLGLTEEHVGAILSHCVYDMSSEELILRQSASRALQSFLDFSASVMNNDVSKYSIDDKFRENNTRSICTMGCIQKILEKTYLHNMGVAMTKDVSIQKEWIILLREMVSNFNHLASLSSFRPLCKVDIEEDFFHNITHLQAGKRSKALLLFRQGIKENNFSEDITMKVFVPLFFNMFSDVKAGKGEQVRDICLDTLSAVAAKVQWEHYRTILKRCFRELNLRPDKQKIILRLICSILDAFHFMKPANDASGNSDALSEDIDSSLTFSLVTVSSDKQQYMQKVVFPQVQKLLGSDPEKVNVNINLVALKILKLLPVDYFESQLSSIIHRICNFLKNRLESIRDEARSALAASVKELGIGYLQFVVKILRAILKRGFELHVLGYTLHYLLSKNITADMYGRLDYCLEDLLAVVDSDLLGDVAEQKEVEKLASKMKETKKRMSFETLKLIAQSITFKTDLLKKIISPVSLHLQKQLTPKLKTRLEMMLHNIALGIECNSSTETSNLFIFVYCLIEDTITGSRSECKENTQSSPDQDSTVRKTFLGLGESGSQNSYILTKFALDLLRNRLKSIKLDKEDEQLVKMLDPFVDLLRKCMSSKHASVLSATFRCFALLVKLPLPSLRDNAITIKNVLMEILQRAGNSNGHLVTSCFKLLADLLRGFRISLSDNELQMLVHTPMFVDLQTNPSPVALSLLKTIVRLKLVSHEIYDIVVKIGELMVTTLTESIQQQCIQIMLQFFLNYPLSEKRLQQHIDFFLANLSYEHPSGREAVLEMLHDILTRFPQRIIDEQGQTFFLHLVVALANEQHQNVSSMILRAIQKLLGRIGGQGKSYIYEYSLSWYTGEKKSLWSASAQVIGLLVGDHTLQMGKHLKSILAVVKKIMESSIIASGAIQLGLSDEAALPLWKETYYSVAMMERLLLRFPELYFEKNMEDIWIILCKLLIHPHSMLRSISSSLVASYFATVEKRKHEQKLDAPSWLLVQPSRLFIIAVSLLKQLRSELSDTTANNLIVQNVAYSVCNLHMLIRQSTSTHQFWSSISSDRGAFLEGFELLGSRKAKNIFLLCTSTSSDVSGSSLDTNEEPTSLLVSSILKKMGRIAMQMQDTQIKNVFNCFNMISSALGPDESLTYADHLLAPLYKVSEGFAGKVVSDEVKQLAQGVQNKLRDLIGSEKFVEVYKSVRMGLKQKRDGRKQAQKIVAAVDPERNAKRKQRMAAKHREHKRRKIMAMKIGRWMR

SEQ ID NO: 171334 - protein, 1372 aa, Zea Mays
MATPSYAAVKCLNTSSSSRKRFSFKSFSQRVEEIDIDVYRSLHTLKAEPSSGSSFFLDAIVEWRELNTAEDFISFYEEMIPLVQTLPQIVLHRDKLFSALLQRVNMSARLSLEPILMLIAAFSRDILEDFLPFLGRHASALLSLLNDGGDRDPEILEQVFTSWSYIMMYLQKYLVKDTVQILRITAALRYFPKDYVREFMAESVSFLLRNAPNNQLTQGLLKVLLEAAKQPSPARIDGVVSLLWHVMKGTSTKLHSKAGQVLKFLLSKSIVSTLRDKFPDDKVKMIKLVELLVSRYVFPGSNITGSSSIEVLGSILDFMLSVLDVPTILGNLSIISPFYAPVFKLKNPRVIVFIKKLLVKGPQVAQHFESQILSAMDNFIVSSPEDVIFILLNFFKGSKKQIFLCSTDGNHLDSVEKTCKFFESKFSLWIELLDDTAGTGNRSSNQLVFLNGINSKDLHAGNMNGLPMTTWRGLLGAALSSYHKLLLVNTSRNSEFSFFLSLAKSHSTCPQVLSAVAEYLDSLQGVSSMEVTKEFDPQNLLELFSIFAFNLSSPTKDVRILTLRILSYFVKMDQRLITDEERPHKRQRTEVSGEEAVAKYANVVDILLIIESMPISVSTSRKIAIFISRIQMSLSSKMVHDDYIPPLLHGIIGILYNRFSDLWPQTLDCLAVLIRKHKELVWGQFVPFIAIHQSKGLTVKNQEKLEAATQPQSIFDCFNLYLAMDFDCTPAVTVATLLLQSLQRIPDVAESRSRQLIPLFLNFMGYDDSSIFSADSYMPEKCKGKQWKAILKEWLNLLRLMHNARSLYQGNFLQEVLTKRVLDDSDPEIQAKALDCLLNWKDEFLIPYSQNLKNLIDVKTLREELTTWAVSHDSLSILKDHRSRVVPLVIRVLAPKVRKLKLLGSRKHTGASHRKAILRFLLQFDSNELELFFSLLLRSLIPGSLQLKMFGSQPDNLLGSFSDIVGTSTEICVENFTWKKANGFIHLVEEIFGTFDMPHISPFLNVLLIIVARLLESCMRNLRNESDGKYPCNQTNDHGNGCSINSEVGNSVNVDECFKEMHLEGHMETSVSIKQLKDLRSSCIRVVSSALSHYESHEFGENFWGVFFSSVKPLIDCFTQEASSSEKPSSLFACFMAMSRSPKLAPLLGSNNLVPAIFSILTVKTASGSITTYALEFIENLLRLDIDLQQQDEHLVKKVLLQHMDVLIHSLHDFVNHRKELNRRSGTWLGQRELRLFKLLLNYITDPSAADNFIDLILPFFSKKDLNSDDCLEALCVVRGIIQNLRCKVSEKVLNALNPLLAIVGLELRLCICDIYAGLSLNDPSMLFLAGLIGDLNAVSASELGELDYDTRLNTYDKGSAVVPGLFRLSYE

SEQ ID NO: 171335 - protein, 2591 aa, Zea Mays
MATPSYAAVKCLNTSSSSRKRFSFKSFSQRVEEIDIDVYRSLHTLKAEPSSGSSFFLDAIVEWRELNTAEDFISFYEEMIPLVQTLPQIVLHRDKLFSALLQRVNMSARLSLEPILMLIAAFSRDILEDFLPFLGRHASALLSLLNDGGDRDPEILEQVFTSWSYIMMYLQKYLVKDTVQILRITAALRYFPKDYVREFMAESVSFLLRNAPNNQLTQGLLKVLLEAAKQPSPARIDGVVSLLWHVMKGTSTKLHSKAGQVLKFLLSKSIVSTLRDKFPDDKVKMIKLVEDVPTILGNLSIISPFYAPVFKLKNPRVIVFIKKLLVKGPQVAQHFESQILSAMDNFIVSSPEDVIFILLNFFKGSKKQIFLCSTDGNHLDSVEKTCKFFESKFSLWIELLDDTAGTGNRSSNQVSEKEAAILWGSFFCYPNMKGVHQDSLSLLRKLIINFDRLLEVGEGNMNGLPMTTWRGLLGAALSSYHKLLLVNTSRNSEFSFFLSLAKSHSTCPQVLSAVAEYLDSLQGVSSMEVTKEFDPQNLLELFSIFAFNLSSPTKDVRILTLRILSYFVKMDQRLITDEERPHKRQRTEVSGEEAVAKYANVVDILLIIESMPISVSTSRKIAIFISRIQMSLSSKMVHDDYIPPLLHGIIGILYNRFSDLWPQTLDCLAVLIRKHKELVWGQFVPFIAIHQSKGLTVKNQEKLEAATQPQSIFDCFNLYLAMDFDCTPAVTVATLLLQSLQRIPDVAESRSRQLIPLFLNFMGYDDSSIFSADSYMPEKCKGKQWKAILKEWLNLLRLMHNARSLYQGNFLQEVLTKRVLDDSDPEIQAKALDCLLNWKDEFLIPYSQNLKNLIDVKTLREELTTWAVSHDSLSILKDHRSRVVPLVIRVLAPKVRKLKLLGSRKHTGASHRKAILRFLLQFDSNELELFFSLLLRSLIPGSLQLKMFGSQPDNLLGSFSDIVGTSTEICVENFTWKKANGFIHLVEEIFGTFDMPHISPFLNVLLIIVARLLESCMRNLRNESDGKYPCNQTNDHGNGCSINSEVGNSVNVDECFKEMHLEGHMETSVSIKQLKDLRSSCIRVVSSALSHYESHEFGENFWGVFFSSVKPLIDCFTQEASSSEKPSSLFACFMAMSRSPKLAPLLGSNNLVPAIFSILTVKTASGSITTYALEFIENLLRLDIDLQQQDEHLVKKVLLQHMDVLIHSLHDFVNHRKELNRRSGTWLGQRELRLFKLLLNYITDPSAADNFIDLILPFFSKKDLNSDDCLEALCVVRGIIQNLRCKVSEKVLNALNPLLAIVGLELRLCICDIYAGLSLNDPSMLFLAGLIGDLNAVSASELGELDYDTRLNTYDKVRPQLFLGLTEEHVGAILSHCVYDMSSEELILRQSASRALQSFLDFSASVMNNDVSKYSIDDKFRENNTRSICTMGCIQKILEKTYLHNMGVAMTKDVSIQKEWIILLREMVSNFNHLASLSSFRPLCKVDIEEDFFHNITHLQAGKRSKALLLFRQGIKENNFSEDITMKVFVPLFFNMFSDVKAGKGEQVRDICLDTLSAVAAKVQWEHYRTILKRCFRELNLRPDKQKIILRLICSILDAFHFMKPANDASGNSDALSEDIDSSLTFSLVTVSSDKQQYMQKVVFPQVQKLLGSDPEKVNVNINLVALKILKLLPVDYFESQLSSIIHRICNFLKNRLESIRDEARSALAASVKELGIGYLQFVVKILRAILKRGFELHVLGYTLHYLLSKNITADMYGRLDYCLEDLLAVVDSDLLGDVAEQKEVEKLASKMKETKKRMSFETLKLIAQSITFKTDLLKKIISPVSLHLQKQLTPKLKTRLEMMLHNIALGIECNSSTETSNLFIFVYCLIEDTITGSRSECKENTQSSPDQDSTVRKTFLGLGESGSQNSYILTKFALDLLRNRLKSIKLDKEDEQLVKMLDPFVDLLRKCMSSKHASVLSATFRCFALLVKLPLPSLRDNAITIKNVLMEILQRAGNSNGHLVTSCFKLLADLLRGFRISLSDNELQMLVHTPMFVDLQTNPSPVALSLLKTIVRLKLVSHEIYDIVVKIGELMVTTLTESIQQQCIQIMLQFFLNYPLSEKRLQQHIDFFLANLSYEHPSGREAVLEMLHDILTRFPQRIIDEQGQTFFLHLVVALANEQHQNVSSMILRAIQKLLGRIGGQGKSYIYEYSLSWYTGEKKSLWSASAQVIGLLVGDHTLQMGKHLKSILAVVKKIMESSIIASGAIQLGLSDEAALPLWKETYYSVAMMERLLLRFPELYFEKNMEDIWIILCKLLIHPHSMLRSISSSLVASYFATVEKRKHEQKLDAPSWLLVQPSRLFIIAVSLLKQLRSELSDTTANNLIVQNVAYSVCNLHMLIRQSTSTHQFWSSISSDRGAFLEGFELLGSRKAKNIFLLCTSTSSDVSGSSLDTNEEPTSLLVSSILKKMGRIAMQMQDTQIKNVFNCFNMISSALGPDESLTYADHLLAPLYKVSEGFAGKVVSDEVKQLAQGVQNKLRDLIGSEKFVEVYKSVRMGLKQKRDGRKQAQKIVAAVDPERNAKRKQRMAAKHREHKRRKIMAMKIGRWMR

SEQ ID NO: 171336 - protein, 2691 aa, Zea Mays
MATPSYAAVKCLNTSSSSRKRFSFKSFSQRVEEIDIDVYRSLHTLKAEPSSGSSFFLDAIVEWRELNTAEDFISFYEEMIPLVQTLPQIVLHRDKLFSALLQRVNMSARLSLEPILMLIAAFSRDILEDFLPFLGRHASALLSLLNDGGDRDPEILEQVFTSWSYIMMYLQKYLVKDTVQILRITAALRYFPKDYVREFMAESVSFLLRNAPNNQLTQGLLKVLLEAAKQPSPARIDGVVSLLWHVMKGTSTKLHSKAGQVLKFLLSKSIVSTLRDKFPDGSSTVHAVMTGLIQRLCDEVDPKELPLMYTCLCEEINCCLEDGCLEHLKCLIVFLAFALQKKQNNAFDKVKMIKLVELLVSRYVFPGSNITGSSSIEVLGSILDFMLSVLDVPTILGNLSIISPFYAPVFKLKNPRVIVFIKKLLVKGPQVAQHFESQILSAMDNFIVSSPEDVIFILLNFFKGSKKQIFLCSTDGNHLDSVEKTCKFFESKFSLWIELLDDTAGTGNRSSNQVSEKEAAILWGSFFCYPNMKGVHQDSLSLLRKLIINFDRLLEVGEGNMNGLPMTTWRGLLGAALSSYHKLLLVNTSRNSEFSFFLSLAKSHSTCPQVLSAVAEYLDSLQGVSSMEVTKEFDPQNLLELFSIFAFNLSSPTKDVRILTLRILSYFVKMDQRLITDEERPHKRQRTEVSGEEAVAKYANVVDILLIIESMPISVSTSRKIAIFISRIQMSLSSKMVHDDYIPPLLHGIIGILYNRFSDLWPQTLDCLAVLIRKHKELVWGQFVPFIAIHQSKGLTVKNQEKLEAATQPQSIFDCFNLYLAMDFDCTPAVTVATLLLQSLQRIPDVAESRSRQLIPLFLNFMGYDDSSIFSADSYMPEKCKGKQWKAILKEWLNLLRLMHNARSLYQGNFLQEVLTKRVLDDSDPEIQAKALDCLLNWKDEFLIPYSQNLKNLIDVKTLREELTTWAVSHDSLSILKDHRSRVVPLVIRVLAPKVRKLKLLGSRKHTGASHRKAILRFLLQFDSNELELFFSLLLRSLIPGSLQLKMFGSQPDNLLGSFSDIVGTSTEICVENFTWKKANGFIHLVEEIFGTFDMPHISPFLNVLLIIVARLLESCMRNLRNESDGKYPCNQTNDHGNGCSINSEVGNSVNVDECFKEMHLEGHMETSVSIKQLKDLRSSCIRVVSSALSHYESHEFGENFWGVFFSSVKPLIDCFTQEASSSEKPSSLFACFMAMSRSPKLAPLLGSNNLVPAIFSILTVKTASGSITTYALEFIENLLRLDIDLQQQDEHLVKKVLLQHMDVLIHSLHDFVNHRKELNRRSGTWLGQRELRLFKLLLNYITDPSAADNFIDLILPFFSKKDLNSDDCLEALCVVRGIIQNLRCKVSEKVLNALNPLLAIVGLELRLCICDIYAGLSLNDPSMLFLAGLIGDLNAVSASELGELDYDTRLNTYDKVRPQLFLGLTEEHVGAILSHCVYDMSSEELILRQSASRALQSFLDFSASVMNNDVSKYSIDDKFRENNTRSICTMGCIQKILEKTYLHNMGVAMTKDVSIQKEWIILLREMVSNFNHLASLSSFRPLCKVDIEEDFFHNITHLQAGKRSKALLLFRQGIKENNFSEDITMKVFVPLFFNMFSDVKAGKGEQVRDICLDTLSAVAAKVQWEHYRTILKRCFRELNLRPDKQKIILRLICSILDAFHFMKPANDASGNSDALSEDIDSSLTFSLVTVSSDKQQYMQKVVFPQVQKLLGSDPEKVNVNINLVALKILKLLPVDYFESQLSSIIHRICNFLKNRLESIRDEARSALAASVKELGIGYLQFVVKILRAILKRGFELHVLGYTLHYLLSKNITADMYGRLDYCLEDLLAVVDSDLLGDVAEQKEVEKLASKMKETKKRMSFETLKLIAQSITFKTDLLKKIISPVSLHLQKQLTPKLKTRLEMMLHNIALGIECNSSTETSNLFIFVYCLIEDTITGSRSECKENTQSSPDQDSTVRKTFLGLGESGSQNSYILTKFALDLLRNRLKSIKLDKEDEQLVKMLDPFVDLLRKCMSSKHASVLSATFRCFALLVKLPLPSLRDNAITIKNVLMEILQRAGNSNGHLVTSCFKLLADLLRGFRISLSDNELQMLVHTPMFVDLQTNPSPVALSLLKTIVRLKLVSHEIYDIVVKIGELMVTTLTESIQQQCIQIMLQFFLNYPLSEKRLQQHIDFFLANLSYEHPSGREAVLEMLHDILTRFPQRIIDEQGQTFFLHLVVALANEQHQNVSSMILRAIQKLLGRIGGQGKSYIYEYSLSWYTGEKKSLWSASAQVIGLLVGDHTLQMGKHLKSILAVVKKIMESSIIASGAIQLGLSDEAALPLWKETYYSVAMMERLLLRFPELYFEKNMEDIWIILCKLLIHPHSMLRSISSSLVASYFATVEKRKHEQKLDAPSWLLVQPSRLFIIAVSLLKQLRSELSDTTANNLIVQNVAYSVCNLHMLIRQSTSTHQFWSSISSDRGAFLEGFELLGSRKAKNIFLLCTSTSSDVSGSSLDTNEEPTSLLVSSILKKMGRIAMQMQDTQIKNVFNCFNMISSALGPDESLTYADHLLAPLYKVSEGFAGKVVSDEVKQLAQGVQNKLRDLIGSEKFVEVYKSVRMGLKQKRDGRKQAQKIVAAVDPERNAKRKQRMAAKHREHKRRKIMAMKIGRWMR

SEQ ID NO: 171337 - protein, 2595 aa, Zea Mays
MATPSYAAVKCLNTSSSSRKRFSFKSFSQRVEEIDIDVYRSLHTLKAEPSSGSSFFLDAIVEWRELNTAEDFISFYEEMIPLVQTLPQIVLHRDKLFSALLQRVNMSARLSLEPILMLIAAFSRDILEDFLPFLGRHASALLSLLNDGGDRDPEILEQVFTSWSYIMMYLQKYLVKDTVQILRITAALRYFPKDYVREFMAESVSFLLRNAPNNQLTQGLLKVLLEAAKQPSPARIDGVVSLLWHVMKGTSTKLHSKAGQVLKFLLSKSIVSTLRDKFPDGSSTVHAVMTGLIQRLCDEVDPKELPLMYTCLCEEINCCLEDGCLEHLKCLIVFLAFALQKKQNNAFDKVKMIKLVELLVSRYVFPGSNITGSSSIEVLGSILDFMLSVLDVPTILGNLSIISPFYAPVFKLKNPRVIVFIKKLLVKGPQVAQHFESQILSAMDNFIVSSPEDVIFILLNFFKGSKKQIFLCSTDGNHLDSVEKTCKFFESKFSLWIELLDDTAGTGNRSSNQVSEKEAAILWGSFFCYPNMKGVHQDSLSLLRKLIINFDRLLEVGEGNMNGLPMTTWRGLLGAALSSYHKLLLVNTSRNSEFSFFLSLAKSHSTCPQVLSAVAEYLDSLQGVSSMEVTKEFDPQNLLELFSIFAFNLSSPTKDVRILTLRILSYFVKMDQRLITDEERPHKRQRTEVSGEEAVAKYANVVDILLIIESMPISVSTSRKIAIFISRIQMSLSSKMVHDDYIPPLLHGIIGILYNRFSDLWPQTLDCLAVLIRKHKELVWGQFVPFIAIHQSKGLTVKNQEKLEAATQPQSIFDCFNLYLAMDFDCTPAVTVATLLLQSLQRIPDVAESRSRQLIPLFLNFMGYDDSSIFSADSYMPEKCKGKQWKAILKEWLNLLRLMHNARSLYQGNFLQEVLTKRVLDDSDPEIQAKALDCLLNWKDEFLIPYSQNLKNLIDVKTLREELTTWAVSHDSLSILKDHRSRVVPLVIRVLAPKVRKLKLLGSRKHTGASHRKAILRFLLQFDSNELELFFSLLLRSLIPGSLQLKMFGSQPDNLLGSFSDIVGTSTEICVENFTWKKANGFIHLVEEIFGTFDMPHISPFLNVLLIIVARLLESCMRNLRNESDGKYPCNQTNDHGNGCSINSEVGNSVNVDECFKEMHLEGHMETASGSITTYALEFIENLLRLDIDLQQQDEHLVKKVLLQHMDVLIHSLHDFVNHRKELNRRSGTWLGQRELRLFKLLLNYITDPSAADNFIDLILPFFSKKDLNSDDCLEALCVVRGIIQNLRCKVSEKVLNALNPLLAIVGLELRLCICDIYAGLSLNDPSMLFLAGLIGDLNAVSASELGELDYDTRLNTYDKVRPQLFLGLTEEHVGAILSHCVYDMSSEELILRQSASRALQSFLDFSASVMNNDVSKYSIDDKFRENNTRSICTMGCIQKILEKTYLHNMGVAMTKDVSIQKEWIILLREMVSNFNHLASLSSFRPLCKVDIEEDFFHNITHLQAGKRSKALLLFRQGIKENNFSEDITMKVFVPLFFNMFSDVKAGKGEQVRDICLDTLSAVAAKVQWEHYRTILKRCFRELNLRPDKQKIILRLICSILDAFHFMKPANDASGNSDALSEDIDSSLTFSLVTVSSDKQQYMQKVVFPQVQKLLGSDPEKVNVNINLVALKILKLLPVDYFESQLSSIIHRICNFLKNRLESIRDEARSALAASVKELGIGYLQFVVKILRAILKRGFELHVLGYTLHYLLSKNITADMYGRLDYCLEDLLAVVDSDLLGDVAEQKEVEKLASKMKETKKRMSFETLKLIAQSITFKTDLLKKIISPVSLHLQKQLTPKLKTRLEMMLHNIALGIECNSSTETSNLFIFVYCLIEDTITGSRSECKENTQSSPDQDSTVRKTFLGLGESGSQNSYILTKFALDLLRNRLKSIKLDKEDEQLVKMLDPFVDLLRKCMSSKHASVLSATFRCFALLVKLPLPSLRDNAITIKNVLMEILQRAGNSNGHLVTSCFKLLADLLRGFRISLSDNELQMLVHTPMFVDLQTNPSPVALSLLKTIVRLKLVSHEIYDIVVKIGELMVTTLTESIQQQCIQIMLQFFLNYPLSEKRLQQHIDFFLANLSYEHPSGREAVLEMLHDILTRFPQRIIDEQGQTFFLHLVVALANEQHQNVSSMILRAIQKLLGRIGGQGKSYIYEYSLSWYTGEKKSLWSASAQVIGLLVGDHTLQMGKHLKSILAVVKKIMESSIIASGAIQLGLSDEAALPLWKETYYSVAMMERLLLRFPELYFEKNMEDIWIILCKLLIHPHSMLRSISSSLVASYFATVEKRKHEQKLDAPSWLLVQPSRLFIIAVSLLKQLRSELSDTTANNLIVQNVAYSVCNLHMLIRQSTSTHQFWSSISSDRGAFLEGFELLGSRKAKNIFLLCTSTSSDVSGSSLDTNEEPTSLLVSSILKKMGRIAMQMQDTQIKNVFNCFNMISSALGPDESLTYADHLLAPLYKVSEGFAGKVVSDEVKQLAQGVQNKLRDLIGSEKFVEVYKSVRMGLKQKRDGRKQAQKIVAAVDPERNAKRKQRMAAKHREHKRRKIMAMKIGRWMR

SEQ ID NO: 171338 - protein, 2532 aa, Zea Mays
MMYLQKYLVKDTVQILRITAALRYFPKDYVREFMAESVSFLLRNAPNNQLTQGLLKVLLEAAKQPSPARIDGVVSLLWHVMKGTSTKLHSKAGQVLKFLLSKSIVSTLRDKFPDGSSTVHAVMTGLIQRLCDEVDPKELPLMYTCLCEEINCCLEDGCLEHLKCLIVFLAFALQKKQNNAFDKVKMIKLVELLVSRYVFPGSNITGSSSIEVLGSILDFMLSVLDVPTILGNLSIISPFYAPVFKLKNPRVIVFIKKLLVKGPQVAQHFESQILSAMDNFIVSSPEDVIFILLNFFKGSKKQIFLCSTDGNHLDSVEKTCKFFESKFSLWIELLDDTAGTGNRSSNQVSEKEAAILWGSFFCYPNMKGVHQDSLSLLRKLIINFDRLLEVGEGNMNGLPMTTWRGLLGAALSSYHKLLLVNTSRNSEFSFFLSLAKSHSTCPQVLSAVAEYLDSLQGVSSMEVTKEFDPQNLLELFSIFAFNLSSPTKDVRILTLRILSYFVKMDQRLITDEERPHKRQRTEVSGEEAVAKYANVVDILLIIESMPISVSTSRKIAIFISRIQMSLSSKMVHDDYIPPLLHGIIGILYNRFSDLWPQTLDCLAVLIRKHKELVWGQFVPFIAIHQSKGLTVKNQEKLEAATQPQSIFDCFNLYLAMDFDCTPAVTVATLLLQSLQRIPDVAESRSRQLIPLFLNFMGYDDSSIFSADSYMPEKCKGKQWKAILKEWLNLLRLMHNARSLYQGNFLQEVLTKRVLDDSDPEIQAKALDCLLNWKDEFLIPYSQNLKNLIDVKTLREELTTWAVSHDSLSILKDHRSRVVPLVIRVLAPKVRKLKLLGSRKHTGASHRKAILRFLLQFDSNELELFFSLLLRSLIPGSLQLKMFGSQPDNLLGSFSDIVGTSTEICVENFTWKKANGFIHLVEEIFGTFDMPHISPFLNVLLIIVARLLESCMRNLRNESDGKYPCNQTNDHGNGCSINSEVGNSVNVDECFKEMHLEGHMEQPHSITQTSVSIKQLKDLRSSCIRVVSSALSHYESHEFGENFWGVFFSSVKPLIDCFTQEASSSEKPSSLFACFMAMSRSPKLAPLLGSNNLVPAIFSILTVKTASGSITTYALEFIENLLRLDIDLQQQDEHLVKKVLLQHMDVLIHSLHDFVNHRKELNRRSGTWLGQRELRLFKLLLNYITDPSAADNFIDLILPFFSKKDLNSDDCLEALCVVRGIIQNLRCKVSEKVLNALNPLLAIVGLELRLCICDIYAGLSLNDPSMLFLAGLIGDLNAVSASELGELDYDTRLNTYDKVRPQLFLGLTEEHVGAILSHCVYDMSSEELILRQSASRALQSFLDFSASVMNNDVSKYSIDDKFRENNTRSICTMGCIQKILEKTYLHNMGVAMTKDVSIQKEWIILLREMVSNFNHLASLSSFRPLCKVDIEEDFFHNITHLQAGKRSKALLLFRQGIKENNFSEDITMKVFVPLFFNMFSDVKAGKGEQVRDICLDTLSAVAAKVQWEHYRTILKRCFRELNLRPDKQKIILRLICSILDAFHFMKPANDASGNSDALSEDIDSSLTFSLVTVSSDKQQYMQKVVFPQVQKLLGSDPEKVNVNINLVALKILKLLPVDYFESQLSSIIHRICNFLKNRLESIRDEARSALAASVKELGIGYLQFVVKILRAILKRGFELHVLGYTLHYLLSKNITADMYGRLDYCLEDLLAVVDSDLLGDVAEQKEVEKLASKMKETKKRMSFETLKLIAQSITFKTDLLKKIISPVSLHLQKQLTPKLKTRLEMMLHNIALGIECNSSTETSNLFIFVYCLIEDTITGSRSECKENTQSSPDQDSTVRKTFLGLGESGSQNSYILTKFALDLLRNRLKSIKLDKEDEQLVKMLDPFVDLLRKCMSSKHASVLSATFRCFALLVKLPLPSLRDNAITIKNVLMEILQRAGNSNGHLVTSCFKLLADLLRGFRISLSDNELQMLVHTPMFVDLQTNPSPVALSLLKTIVRLKLVSHEIYDIVVKIGELMVTTLTESIQQQCIQIMLQFFLNYPLSEKRLQQHIDFFLANLSYEHPSGREAVLEMLHDILTRFPQRIIDEQGQTFFLHLVVALANEQHQNVSSMILRAIQKLLGRIGGQGKSYIYEYSLSWYTGEKKSLWSASAQVIGLLVGDHTLQMGKHLKSILAVVKKIMESSIIASGAIQLGLSDEAALPLWKETYYSVAMMERLLLRFPELYFEKNMEDIWIILCKLLIHPHSMLRSISSSLVASYFATVEKRKHEQKLDAPSWLLVQPSRLFIIAVSLLKQLRSELSDTTANNLIVQNVAYSVCNLHMLIRQSTSTHQFWSSISSDRGAFLEGFELLGSRKAKNIFLLCTSTSSDVSGSSLDTNEEPTSLLVSSILKKMGRIAMQMQDTQIKNVFNCFNMISSALGPDESLTYADHLLAPLYKVSEGFAGKVVSDEVKQLAQGVQNKLRDLIGSEKFVEVYKSVRMGLKQKRDGRKQAQKIVAAVDPERNAKRKQRMAAKHREHKRRKIMAMKIGRWMR

SEQ ID NO: 171339 - protein, 2667 aa, Zea Mays
MATPSYAAVKCLNTSSSSRKRFSFKSFSQRVEEIDIDVYRSLHTLKAEPSSGSSFFLDAIVEWRELNTAEDFISFYEEMIPLVQTLPQIVLHRDKLFSALLQRVNMSARLSLEPILMLIAAFSRDILEDFLPFLGRHASALLSLLNDGGDRDPEILEQVFTSWSYIMMYLQKYLVKDTVQILRITAALRYFPKDYVREFMAESVSFLLRNAPNNQLTQGLLKVLLEAAKQPSPARIDGVVSLLWHVMKGTSTKLHSKAGQVLKFLLSKSIVSTLRDKFPDGSSTVHAVMTGLIQRLCDEVDPKELPLMYTCLCEEINCCLEDGCLEHLKCLIVFLAFALQKKQNNAFDKVKMIKLVELLVSRYVFPGSNITGSSSIEVLGSILDFMLSVLDVPTILGNLSIISPFYAPVFKLKNPRVIVFIKKLLVKGPQVAQHFESQILSAMDNFIVSSPEDVIFILLNFFKGSKKQIFLCSTDGNHLDSVEKTCKFFESKFSLWIELLDDTAGTGNRSSNQLVFLNGINSKDLHAGNMNGLPMTTWRGLLGAALSSYHKLLLVNTSRNSEFSFFLSLAKSHSTCPQVLSAVAEYLDSLQGVSSMEVTKEFDPQNLLELFSIFAFNLSSPTKDVRILTLRILSYFVKMDQRLITDEERPHKRQRTEVSGEEAVAKYANVVDILLIIESMPISVSTSRKIAIFISRIQMSLSSKMVHDDYIPPLLHGIIGILYNRFSDLWPQTLDCLAVLIRKHKELVWGQFVPFIAIHQSKGLTVKNQEKLEAATQPQSIFDCFNLYLAMDFDCTPAVTVATLLLQSLQRIPDVAESRSRQLIPLFLNFMGYDDSSIFSADSYMPEKCKGKQWKAILKEWLNLLRLMHNARSLYQGNFLQEVLTKRVLDDSDPEIQAKALDCLLNWKDEFLIPYSQNLKNLIDVKTLREELTTWAVSHDSLSILKDHRSRVVPLVIRVLAPKVRKLKLLGSRKHTGASHRKAILRFLLQFDSNELELFFSLLLRSLIPGSLQLKMFGSQPDNLLGSFSDIVGTSTEICVENFTWKKANGFIHLVEEIFGTFDMPHISPFLNVLLIIVARLLESCMRNLRNESDGKYPCNQTNDHGNGCSINSEVGNSVNVDECFKEMHLEGHMEQPHSITQTSVSIKQLKDLRSSCIRVVSSALSHYESHEFGENFWGVFFSSVKPLIDCFTQEASSSEKPSSLFACFMAMSRSPKLAPLLGSNNLVPAIFSILTVKTASGSITTYALEFIENLLRLDIDLQQQDEHLVKKVLLQHMDVLIHSLHDFVNHRKELNRRSGTWLGQRELRLFKLLLNYITDPSAADNFIDLILPFFSKKDLNSDDCLEALCVVRGIIQNLRCKVSEKVLNALNPLLAIVGLELRLCICDIYAGLSLNDPSMLFLAGLIGDLNAVSASELGELDYDTRLNTYDKVRPQLFLGLTEEHVGAILSHCVYDMSSEELILRQSASRALQSFLDFSASVMNNDVSKYSIDDKFRENNTRSICTMGCIQKILEKTYLHNMGVAMTKDVSIQKEWIILLREMVSNFNHLASLSSFRPLCKVDIEEDFFHNITHLQAGKRSKALLLFRQGIKENNFSEDITMKVFVPLFFNMFSDVKAGKGEQVRDICLDTLSAVAAKVQWEHYRTILKRCFRELNLRPDKQKIILRLICSILDAFHFMKPANDASGNSDALSEDIDSSLTFSLVTVSSDKQQYMQKVVFPQVQKLLGSDPEKVNVNINLVALKILKLLPVDYFESQLSSIIHRICNFLKNRLESIRDEARSALAASVKELGIGYLQFVVKILRAILKRGFELHVLGYTLHYLLSKNITADMYGRLDYCLEDLLAVVDSDLLGDVAEQKEVEKLASKMKETKKRMSFETLKLIAQSITFKTDLLKKIISPVSLHLQKQLTPKLKTRLEMMLHNIALGIECNSSTETSNLFIFVYCLIEDTITGSRSECKENTQSSPDQDSTVRKTFLGLGESGSQNSYILTKFALDLLRNRLKSIKLDKEDEQLVKMLDPFVDLLRKCMSSKHASVLSATFRCFALLVKLPLPSLRDNAITIKNVLMEILQRAGNSNGHLVTSCFKLLADLLRGFRISLSDNELQMLVHTPMFVDLQTNPSPVALSLLKTIVRLKLVSHEIYDIVVKIGELMVTTLTESIQQQCIQIMLQFFLNYPLSEKRLQQHIDFFLANLSYEHPSGREAVLEMLHDILTRFPQRIIDEQGQTFFLHLVVALANEQHQNVSSMILRAIQKLLGRIGGQGKSYIYEYSLSWYTGEKKSLWSASAQVIGLLVGDHTLQMGKHLKSILAVVKKIMESSIIASGAIQLGLSDEAALPLWKETYYSVAMMERLLLRFPELYFEKNMEDIWIILCKLLIHPHSMLRSISSSLVASYFATVEKRKHEQKLDAPSWLLVQPSRLFIIAVSLLKQLRSELSDTTANNLIVQNVAYSVCNLHMLIRQSTSTHQFWSSISSDRGAFLEGFELLGSRKAKNIFLLCTSTSSDVSGSSLDTNEEPTSLLVSSILKKMGRIAMQMQDTQIKNVFNCFNMISSALGPDESLTYADHLLAPLYKVSEGFAGKVVSDEVKQLAQGVQNKLRDLIGSEKFVEVYKSVRMGLKQKRDGRKQAQKIVAAVDPERNAKRKQRMAAKHREHKRRKIMAMKIGRWMR

SEQ ID NO: 171340 - protein, 2677 aa, Zea Mays
MATPSYAAVKCLNTSSSSRKRFSFKSFSQRVEEIDIDVYRSLHTLKAEPSSGSSFFLDAIVEWRELNTAEDFISFYEEMIPLVQTLPQIVLHRDKLFSALLQRVNMSARLSLEPILMLIAAFSRDILEDFLPFLGRHASALLSLLNDGGDRDPEILEQVFTSWSYIMMYLQKYLVKDTVQILRITAALRYFPKDYVREFMAESVSFLLRNAPNNQLTQGLLKVLLEAAKQPSPARIDGVVSLLWHVMKGTSTKLHSKAGQVLKFLLSKSIVSTLRDKFPDGSSTVHAVMTGLIQRLCDEVDPKELPLMYTCLCEEINCCLEDGCLEHLKCLIVFLAFALQKKQNNAFDKVKMIKLVELLVSRYVFPGSNITGSSSIEVLGSILDFMLSVLDVPTILGNLSIISPFYAPVFKLKNPRVIVFIKKLLVKGPQVAQHFESQILSAMDNFIVSSPEDVIFILLNFFKGSKKQIFLCSTDGNHLDSVEKTCKFFESKFSLWIELLDDTAGTGNRSSNQVSEKEAAILWGSFFCYPNMKGVHQDSLSLLRKLIINFDRLLEVGEGNMNGLPMTTWRGLLGAALSSYHKLLLVNTSRNSEFSFFLSLAKSHSTCPQVLSAVAEYLDSLQGVSSMEVTKEFDPQNLLELFSIFAFNLSSPTKDVRILTLRILSYFVKMDQRLITDEERPHKRQRTEVSGEEAVAKYANVVDILLIIESMPISVSTSRKIAIFISRIQMSLSSKMVHDDYIPPLLHGIIGILYNRFSDLWPQTLDCLAVLIRKHKELVWGQFVPFIAIHQSKGLTVKNQEKLEAATQPQSIFDCFNLYLAMDFDCTPAVTVATLLLQSLQRIPDVAESRSRQLIPLFLNFMGYDDSSIFSADSYMPEKCKGKQWKAILKEWLNLLRLMHNARSLYQGNFLQEVLTKRVLDDSDPEIQAKALDCLLNWKDEFLIPYSQNLKNLIDVKTLREELTTWAVSHDSLSILKDHRSRVVPLVIRVLAPKVRKLKLLGSRKSLIPGSLQLKMFGSQPDNLLGSFSDIVGTSTEICVENFTWKKANGFIHLVEEIFGTFDMPHISPFLNVLLIIVARLLESCMRNLRNESDGKYPCNQTNDHGNGCSINSEVGNSVNVDECFKEMHLEGHMETSVSIKQLKDLRSSCIRVVSSALSHYESHEFGENFWGVFFSSVKPLIDCFTQEASSSEKPSSLFACFMAMSRSPKLAPLLGSNNLVPAIFSILTVKTASGSITTYALEFIENLLRLDIDLQQQDEHLVKKVLLQHMDVLIHSLHDFVNHRKELNRRSGTWLGQRELRLFKLLLNYITDPSAADNFIDLILPFFSKKDLNSDDCLEALCVVRGIIQNLRCKVSEKVLNALNPLLAIVGLELRLCICDIYAGLSLNDPSMLFLAGLIGDLNAVSASELGELDYDTRLNTYDKVRPQLFLGLTEEHVGAILSHCVYDMSSEELILRQSASRALQSFLDFSASVMNNDVSKYSIDDKFRENNTRSICTMGCIQKILEKTYLHNMGVAMTKDVSIQKEWIILLREMVSNFNHLASLSSFRPLCKVDIEEDFFHNITHLQAGKRSKALLLFRQGIKENNFSEDITMKVFVPLFFNMFSDDITMKVFVPLFFNMFSDVKAGKGEQVRDICLDTLSAVAAKVQWEHYRTILKRCFRELNLRPDKQKIILRLICSILDAFHFMKPANDASGNSDALSEDIDSSLTFSLVTVSSDKQQYMQKVVFPQVQKLLGSDPEKVNVNINLVALKILKLLPVDYFESQLSSIIHRICNFLKNRLESIRDEARSALAASVKELGIGYLQFVVKILRAILKRGFELHVLGYTLHYLLSKNITADMYGRLDYCLEDLLAVVDSDLLGDVAEQKEVEKLASKMKETKKRMSFETLKLIAQSITFKTDLLKKIISPVSLHLQKQLTPKLKTRLEMMLHNIALGIECNSSTETSNLFIFVYCLIEDTITGSRSECKENTQSSPDQDSTVRKTFLGLGESGSQNSYILTKFALDLLRNRLKSIKLDKEDEQLVKMLDPFVDLLRKCMSSKHASVLSATFRCFALLVKLPLPSLRDNAITIKNVLMEILQRAGNSNGHLVTSCFKLLADLLRGFRISLSDNELQMLVHTPMFVDLQTNPSPVALSLLKTIVRLKLVSHEIYDIVVKIGELMVTTLTESIQQQCIQIMLQFFLNYPLSEKRLQQHIDFFLANLSYEHPSGREAVLEMLHDILTRFPQRIIDEQGQTFFLHLVVALANEQHQNVSSMILRAIQKLLGRIGGQGKSYIYEYSLSWYTGEKKSLWSASAQVIGLLVGDHTLQMGKHLKSILAVVKKIMESSIIASGAIQLGLSDEAALPLWKETYYSVAMMERLLLRFPELYFEKNMEDIWIILCKLLIHPHSMLRSISSSLVASYFATVEKRKHEQKLDAPSWLLVQPSRLFIIAVSLLKQLRSELSDTTANNLIVQNVAYSVCNLHMLIRQSTSTHQFWSSISSDRGAFLEGFELLGSRKAKNIFLLCTSTSSDVSGSSLDTNEEPTSLLVSSILKKMGRIAMQMQDTQIKNVFNCFNMISSALGPDESLTYADHLLAPLYKVSEGFAGKVVSDEVKQLAQGVQNKLRDLIGSEKFVEVYKSVRMGLKQKRDGRKQAQKIVAAVDPERNAKRKQRMAAKHREHKRRKIMAMKIGRWMR

SEQ ID NO: 171341 - protein, 2026 aa, Zea Mays
MATPSYAAVKCLNTSSSSRKRFSFKSFSQRVEEIDIDVYRSLHTLKAEPSSGSSFFLDAIVEWRELNTAEDFISFYEEMIPLVQTLPQIVLHRDKLFSALLQRVNMSARLSLEPILMLIAAFSRDILEDFLPFLGRHASALLSLLNDGGDRDPEILEQVFTSWSYIMMYLQKYLVKDTVQILRITAALRYFPKDYVREFMAESVSFLLRNAPNNQLTQGLLKVLLEAAKQPSPARIDGVVSLLWHVMKGTSTKLHSKAGQVLKFLLSKSIVSTLRDKFPDGSSTVHAVMTGLIQRLCDEVDPKELPLMYTCLCEEINCCLEDGCLEHLKCLIVFLAFALQKKQNNAFDKVKMIKLVELLVSRYVFPGSNITGSSSIEVLGSILDFMLSVLDVPTILGNLSIISPFYAPVFKLKNPRVIVFIKKLLVKGPQVAQHFESQILSAMDNFIVSSPEDVIFILLNFFKGSKKQIFLCSTDGNHLDSVEKTCKFFESKFSLWIELLDDTAGTGNRSSNQVSEKEAAILWGSFFCYPNMKGVHQDSLSLLRKLIINFDRLLEVGEGNMNGLPMTTWRGLLGAALSSYHKLLLVNTSRNSEFSFFLSLAKSHSTCPQVLSAVAEYLDSLQGVSSMEVTKEFDPQNLLELFSIFAFNLSSPTKDVRILTLRILSYFVKMDQRLITDEERPHKRQRTEVSGEEAVAKYANVVDILLIIESMPISVSTSRKIAIFISRIQMSLSSKMVHDDYIPPLLHGIIGILYNRFSDLWPQTLDCLAVLIRKHKELVWGQFVPFIAIHQSKGLTVKNQEKLEAATQPQSIFDCFNLYLAMDFDCTPAVTVATLLLQSLQRIPDVAESRSRQLIPLFLNFMGYDDSSIFSADSYMPEKCKGKQWKAILKEWLNLLRLMHNARSLYQGNFLQEVLTKRVLDDSDPEIQAKALDCLLNWKDEFLIPYSQNLKNLIDVKTLREELTTWAVSHDSLSILKDHRSRVVPLVIRVLAPKVRKLKLLGSRKHTGASHRKAILRFLLQFDSNELELFFSLLLRSLIPGSLQLKMFGSQPDNLLGSFSDIVGTSTEICVENFTWKKANGFIHLVEEIFGTFDMPHISPFLNVLLIIVARLLESCMRNLRNESDGKYPCNQTNDHGNGCSINSEVGNSVNVDECFKEMHLEGHMEQPHSITQTSVSIKQLKDLRSSCIRVVSSALSHYESHEFGENFWGVFFSSVKPLIDCFTQEASSSEKPSSLFACFMAMSRSPKLAPLLGSNNLVPAIFSILTVKTASGSITTYALEFIENLLRLDIDLQQQDEHLVKKVLLQHMDVLIHSLHDFVNHRKELNRRSGTWLGQRELRLFKLLLNYITDPSAADNFIDLILPFFSKKDLNSDDCLEALCVVRGIIQNLRCKVSEKVLNALNPLLAIVGLELRLCICDIYAGLSLNDPSMLFLAGLIGDLNAVSASELGELDYDTRLNTYDKVRPQLFLGLTEEHVGAILSHCVYDMSSEELILRQSASRALQSFLDFSASVMNNDVSKYSIDDKFRENNTRSICTMGCIQKILEKTYLHNMGVAMTKDVSIQKEWIILLREMVSNFNHLASLSSFRPLCKVDIEEDFFHNITHLQAGKRSKALLLFRQGIKENNFSEDITMKVFVPLFFNMFSDVKAGKGEQVRDICLDTLSAVAAKVQWEHYRTILKRCFRELNLRPDKQKIILRLICSILDAFHFMKPANDASGNSDALSEDIDSSLTFSLVTVSSDKQQYMQKVVFPQVQKLLGSDPEKVNVNINLVALKILKLLPVDYFESQLSSIIHRICNFLKNRLESIRDEARSALAASVKELGIGYLQFVVKILRAILKRGFELHVLGYTLHYLLSKNITADMYGRLDYCLEDLLAVVDSDLLGDVAEQKEVEKLASKMKETKKRMSFETLKLIAQSITFKTDLLKKIISPVSLHLQKQLTPKLKTRLEMMLHNIALGIECNSSTETSNLFIFVYCLIEDTITGSRSECKENTQSSPDQDSTVRKTFLGLAMHSNYATIFSELSTF

SEQ ID NO: 171342 - protein, 1295 aa, Zea Mays
MATPSYAAVKCLNTSSSSRKRFSFKSFSQRVEEIDIDVYRSLHTLKAEPSSGSSFFLDAIVEWRELNTAEDFISFYEEMIPLVQTLPQIVLHRDKLFSALLQRVNMSARLSLEPILMLIAAFSRDILEDFLPFLGRHASALLSLLNDGGDRDPEILEQVFTSWSYIMMYLQKYLVKDTVQILRITAALRYFPKDYVREFMAESVSFLLRNAPNNQLTQGLLKVLLEAAKQPSPARIDGVVSLLWHVMKGTSTKLHSKAGQVLKFLLSKSIVSTLRDKFPDDKVKMIKLVELLVSRYVFPGSNITGSSSIEVLGSILDFMLSVLDVPTILGNLSIISPFYAPVFKLKNPRVIVFIKKLLVKGPQVAQHFESQILSAMDNFIVSSPEDVIFILLNFFKGSKKQIFLCSTDGNHLDSVEKTCKFFESKFSLWIELLDDTAGTGNRSSNQVSEKEAAILWGSFFCYPNMKGVHQDSLSLLRKLIINFDRLLEVGEGNMNGLPMTTWRGLLGAALSSYHKLLLVNTSRNSEFSFFLSLAKSHSTCPQVLSAVAEYLDSLQGVSSMEVTKEFDPQNLLELFSIFAFNLSSPTKDVRILTLRILSYFVKMDQRLITDEERPHKRQRTEVSGEEAVAKYANVVDILLIIESMPISVSTSRKIAIFISRIQMSLSSKMVHDDYIPPLLHGIIGILYNRFSDLWPQTLDCLAVLIRKHKELVWGQFVPFIAIHQSKGLTVKNQEKLEAATQPQSIFDCFNLYLAMDFDCTPAVTVATLLLQSLQRIPDVAESRSRQLIPLFLNFMGYDDSSIFSADSYMPEKCKGKQWKAILKEWLNLLRLMHNARSLYQGNFLQEVLTKRVLDDSDPEIQAKALDCLLNWKDEFLIPYSQNLKNLIDVKTLREELTTWAVSHDSLSILKDHRSRVVPLVIRVLAPKVRKLKLLGSRKHTGASHRKAILRFLLQFDSNELELFFSLLLRSLIPGSLQLKMFGSQPDNLLGSFSDIVGTSTEICVENFTWKKANGFIHLVEEIFGTFDMPHISPFLNVLLIIVARLLESCMRNLRNESDGKYPCNQTNDHGNGCSINSEVGNSVNVDECFKEMHLEGHMETASGSITTYALEFIENLLRLDIDLQQQDEHLVKKVLLQHMDVLIHSLHDFVNHRKELNRRSGTWLGQRELRLFKLLLNYITDPSAADNFIDLILPFFSKKDLNSDDCLEALCVVRGIIQNLRCKVSEKVLNALNPLLAIVGLELRLCICDIYAGLSLNDPSMLFLAGLIGDLNAVSASELGELDYDTRLNTYDKCI

SEQ ID NO: 171343 - protein, 2562 aa, Zea Mays
MATPSYAAVKCLNTSSSSRKRFSFKSFSQRVEEIDIDVYRSLHTLKAEPSSGSSFFLDAIVEWRELNTAEDFISFYEEMIPLVQTLPQIVLHRDKLFSALLQRVNMSARLSLEPILMLIAAFSRDILEDFLPFLGRHASALLSLLNDGGDRDPEILEQVFTSWSYIMMYLQKYLVKDTVQILRITAALRYFPKDYVREFMAESVSFLLRNAPNNQLTQGLLKVLLEAAKQPSPARIDGVVSLLWHVMKGTSTKLHSKAGQVLKFLLSKSIVSTLRDKFPDDKVKMIKLVELLVSRYVFPGSNITGSSSIEVLGSILDFMLSVLDVPTILGNLSIISPFYAPVFKLKNPRVIVFIKKLLVKGPQVAQHFESQILSAMDNFIVSSPEDVIFILLNFFKGSKKQIFLCSTDGNHLDSVEKTCKFFESKFSLWIELLDDTAGTGNRSSNQLVFLNGINSKDLHAGNMNGLPMTTWRGLLGAALSSYHKLLLVNTSRNSEFSFFLSLAKSHSTCPQVLSAVAEYLDSLQGVSSMEVTKEFDPQNLLELFSIFAFNLSSPTKDVRILTLRILSYFVKMDQRLITDEERPHKRQRTEVSGEEAVAKYANVVDILLIIESMPISVSTSRKIAIFISRIQMSLSSKMVHDDYIPPLLHGIIGILYNRFSDLWPQTLDCLAVLIRKHKELVWGQFVPFIAIHQSKGLTVKNQEKLEAATQPQSIFDCFNLYLAMDFDCTPAVTVATLLLQSLQRIPDVAESRSRQLIPLFLNFMGYDDSSIFSADSYMPEKCKGKQWKAILKEWLNLLRLMHNARSLYQGNFLQEVLTKRVLDDSDPEIQAKALDCLLNWKDEFLIPYSQNLKNLIDVKTLREELTTWAVSHDSLSILKDHRSRVVPLVIRVLAPKVRKLKLLGSRKSLIPGSLQLKMFGSQPDNLLGSFSDIVGTSTEICVENFTWKKANGFIHLVEEIFGTFDMPHISPFLNVLLIIVARLLESCMRNLRNESDGKYPCNQTNDHGNGCSINSEVGNSVNVDECFKEMHLEGHMETSVSIKQLKDLRSSCIRVVSSALSHYESHEFGENFWGVFFSSVKPLIDCFTQEASSSEKPSSLFACFMAMSRSPKLAPLLGSNNLVPAIFSILTVKTASGSITTYALEFIENLLRLDIDLQQQDEHLVKKVLLQHMDVLIHSLHDFVNHRKELNRRSGTWLGQRELRLFKLLLNYITDPSAADNFIDLILPFFSKKDLNSDDCLEALCVVRGIIQNLRCKVSEKVLNALNPLLAIVGLELRLCICDIYAGLSLNDPSMLFLAGLIGDLNAVSASELGELDYDTRLNTYDKVRPQLFLGLTEEHVGAILSHCVYDMSSEELILRQSASRALQSFLDFSASVMNNDVSKYSIDDKFRENNTRSICTMGCIQKILEKTYLHNMGVAMTKDVSIQKEWIILLREMVSNFNHLASLSSFRPLCKVDIEEDFFHNITHLQAGKRSKALLLFRQGIKENNFSEDITMKVFVPLFFNMFSDVKAGKGEQVRDICLDTLSAVAAKVQWEHYRTILKRCFRELNLRPDKQKIILRLICSILDAFHFMKPANDASGNSDALSEDIDSSLTFSLVTVSSDKQQYMQKVVFPQVQKLLGSDPEKVNVNINLVALKILKLLPVDYFESQLSSIIHRICNFLKNRLESIRDEARSALAASVKELGIGYLQFVVKILRAILKRGFELHVLGYTLHYLLSKNITADMYGRLDYCLEDLLAVVDSDLLGDVAEQKEVEKLASKMKETKKRMSFETLKLIAQSITFKTDLLKKIISPVSLHLQKQLTPKLKTRLEMMLHNIALGIECNSSTETSNLFIFVYCLIEDTITGSRSECKENTQSSPDQDSTVRKTFLGLGESGSQNSYILTKFALDLLRNRLKSIKLDKEDEQLVKMLDPFVDLLRKCMSSKHASVLSATFRCFALLVKLPLPSLRDNAITIKNVLMEILQRAGNSNGHLVTSCFKLLADLLRGFRISLSDNELQMLVHTPMFVDLQTNPSPVALSLLKTIVRLKLVSHEIYDIVVKIGELMVTTLTESIQQQCIQIMLQFFLNYPLSEKRLQQHIDFFLANLSYEHPSGREAVLEMLHDILTRFPQRIIDEQGQTFFLHLVVALANEQHQNVSSMILRAIQKLLGRIGGQGKSYIYEYSLSWYTGEKKSLWSASAQVIGLLVGDHTLQMGKHLKSILAVVKKIMESSIIASGAIQLGLSDEAALPLWKETYYSVAMMERLLLRFPELYFEKNMEDIWIILCKLLIHPHSMLRSISSSLVASYFATVEKRKHEQKLDAPSWLLVQPSRLFIIAVSLLKQLRSELSDTTANNLIVQNVAYSVCNLHMLIRQSTSTHQFWSSISSDRGAFLEGFELLGSRKAKNIFLLCTSTSSDVSGSSLDTNEEPTSLLVSSILKKMGRIAMQMQDTQIKNVFNCFNMISSALGPDESLTYADHLLAPLYKVSEGFAGKVVSDEVKQLAQGVQNKLRDLIGSEKFVEVYKSVRMGLKQKRDGRKQAQKIVAAVDPERNAKRKQRMAAKHREHKRRKIMAMKIGRWMR

SEQ ID NO: 171344 - protein, 1207 aa, Zea Mays
MTQDLTPMIRALQSFLDFSASVMNNDVSKYSIDDKFRENNTRSICTMGCIQKILEKTYLHNMGVAMTKDVSIQKEWIILLREMVSNFNHLASLSSFRPLCKVDIEEDFFHNITHLQAGKRSKALLLFRQGIKENNFSEDITMKVFVPLFFNMFSDVKAGKGEQVRDICLDTLSAVAAKVQWEHYRTILKRCFRELNLRPDKQKIILRLICSILDAFHFMKPANDASGNSDALSEDIDSSLTFSLVTVSSDKQQYMQKVVFPQVQKLLGSDPEKVNVNINLVALKILKLLPVDYFESQLSSIIHRICNFLKNRLESIRDEARSALAASVKELGIGYLQFVVKILRAILKRGFELHVLGYTLHYLLSKNITADMYGRLDYCLEDLLAVVDSDLLGDVAEQKEVEKLASKMKETKKRMSFETLKLIAQSITFKTDLLKKIISPVSLHLQKQLTPKLKTRLEMMLHNIALGIECNSSTETSNLFIFVYCLIEDTITGSRSECKENTQSSPDQDSTVRKTFLGLGESGSQNSYILTKFALDLLRNRLKSIKLDKEDEQLVKMLDPFVDLLRKCMSSKHASVLSATFRCFALLVKLPLPSLRDNAITIKNVLMEILQRAGNSNGHLVTSCFKLLADLLRGFRISLSDNELQMLVHTPMFVDLQTNPSPVALSLLKTIVRLKLVSHEIYDIVVKIGELMVTTLTESIQQQCIQIMLQFFLNYPLSEKRLQQHIDFFLANLSYEHPSGREAVLEMLHDILTRFPQRIIDEQGQTFFLHLVVALANEQHQNVSSMILRAIQKLLGRIGGQGKSYIYEYSLSWYTGEKKSLWSASAQVIGLLVGDHTLQMGKHLKSILAVVKKIMESSIIASGAIQLGLSDEAALPLWKETYYSVAMMERLLLRFPELYFEKNMEDIWIILCKLLIHPHSMLRSISSSLVASYFATVEKRKHEQKLDAPSWLLVQPSRLFIIAVSLLKQLRSELSDTTANNLIVQNVAYSVCNLHMLIRQSTSTHQFWSSISSDRGAFLEGFELLGSRKAKNIFLLCTSTSSDVSGSSLDTNEEPTSLLVSSILKKMGRIAMQMQDTQIKNVFNCFNMISSALGPDESLTYADHLLAPLYKVSEGFAGKVVSDEVKQLAQGVQNKLRDLIGSEKFVEVYKSVRMGLKQKRDGRKQAQKIVAAVDPERNAKRKQRMAAKHREHKRRKIMAMKIGRWMR

SEQ ID NO: 171345 - protein, 1952 aa, Zea Mays
MTGLIQRLCDEVDPKELPLMYTCLCEEINCCLEDGCLEHLKCLIVFLAFALQKKQNNAFDKVKMIKLVELLVSRYVFPGSNITGSSSIEVLGSILDFMLSVLDVPTILGNLSIISPFYAPVFKLKNPRVIVFIKKLLVKGPQVAQHFESQILSAMDNFIVSSPEDVIFILLNFFKGSKKQIFLCSTDGNHLDSVEKTCKFFESKFSLWIELLDDTAGTGNRSSNQVSEKEAAILWGSFFCYPNMKGVHQDSLSLLRKLIINFDRLLEVGEGNMNGLPMTTWRGLLGAALSSYHKLLLVNTSRNSEFSFFLSLAKSHSTCPQVLSAVAEYLDSLQGVSSMEVTKEFDPQNLLELFSIFAFNLSSPTKDVRILTLRILSYFVKMDQRLITDEERPHKRQRTEVSGEEAVAKYANVVDILLIIESMPISVSTSRKIAIFISRIQMSLSSKMVHDDYIPPLLHGIIGILYNRFSDLWPQTLDCLAVLIRKHKELVWGQFVPFIAIHQSKGLTVKNQEKLEAATQPQSIFDCFNLYLAMDFDCTPAVTVATLLLQSLQRIPDVAESRSRQLIPLFLNFMGYDDSSIFSADSYMPEKCKGKQWKAILKEWLNLLRLMHNARSLYQGNFLQEVLTKRVLDDSDPEIQAKALDCLLNWKDEFLIPYSQNLKNLIDVKTLREELTTWAVSHDSLSILKDHRSRVVPLVIRVLAPKVRKLKLLGSRKHTGASHRKAILRFLLQFDSNELELFFSLLLRSLIPGSLQLKMFGSQPDNLLGSFSDIVGTSTEICVENFTWKKANGFIHLVEEIFGTFDMPHISPFLNVLLIIVARLLESCMRNLRNESDGKYPCNQTNDHGNGCSINSEVGNSVNVDECFKEMHLEGHMETSVSIKQLKDLRSSCIRVVSSALSHYESHEFGENFWGVFFSSVKPLIDCFTQEASSSEKPSSLFACFMAMSRSPKLAPLLGSNNLVPAIFSILTVKTASGSITTYALEFIENLLRLDIDLQQQDEHLVKKVLLQHMDVLIHSLHDFVNHRKELNRRSGTWLGQRELRLFKLLLNYITDPSAADNFIDLILPFFSKKDLNSDDCLEALCVVRGIIQNLRCKVSEKVLNALNPLLAIVGLELRLCICDIYAGLSLNDPSMLFLAGLIGDLNAVSASELGELDYDTRLNTYDKVRPQLFLGLTEEHVGAILSHCVYDMSSEELILRQSASRALQSFLDFSASVMNNDVSKYSIDDKFRENNTRSICTMGCIQKILEKTYLHNMGVAMTKDVSIQKEWIILLREMVSNFNHLASLSSFRPLCKVDIEEDFFHNITHLQAGKRSKALLLFRQGIKENNFSEDITMKVFVPLFFNMFSDDITMKVFVPLFFNMFSDVKAGKGEQVRDICLDTLSAVAAKVQWEHYRTILKRCFRELNLRPDKQKIILRLICSILDAFHFMKPANDASGNSDALSEDIDSSLTFSLVTVSSDKQQYMQKVVFPQVQKLLGSDPEKVNVNINLVALKILKLLPVDYFESQLSSIIHRICNFLKNRLESIRDEARSALAASVKELGIGYLQFVVKILRAILKRGFELHVLGYTLHYLLSKNITADMYGRLDYCLEDLLAVVDSDLLGDVAEQKEVEKLASKMKETKKRMSFETLKLIAQSITFKTDLLKKIISPVSLHLQKQLTPKLKTRLEMMLHNIALGIECNSSTETSNLFIFVYCLIEDTITGSRSECKENTQSSPDQDSTVRKTFLGLGESGSQNSYILTKFALDLLRNRLKSIKLDKEDEQLVKMLDPFVDLLRKCMSSKHASVLSATFRCFALLVKLPLPSLRDNAITIKNVLMEILQRAGNSNGHLVTSCFKLLADLLRGFRISLSDNELQMLVHTPMFVDLQTNPSPVALSLLKTIVRLKLVSHEIYDIVVKIGELMVTTLTESIQQQCIQIMLQFFLNYPLSEKRLQQHIDFFLANLRYDEYP

SEQ ID NO: 171346 - protein, 1390 aa, Zea Mays
MDVLIHSLHDFVNHRKELNRRSGTWLGQRELRLFKLLLNYITDPSAADNFIDLILPFFSKKDLNSDDCLEALCVVRGIIQNLRCKVSEKVLNALNPLLAIVGLELRLCICDIYAGLSLNDPSMLFLAGLIGDLNAVSASELGELDYDTRLNTYDKVRPQLFLGLTEEHVGAILSHCVYDMSSEELILRQSASRALQSFLDFSASVMNNDVSKYSIDDKFRENNTRSICTMGCIQKILEKTYLHNMGVAMTKDVSIQKEWIILLREMVSNFNHLASLSSFRPLCKVDIEEDFFHNITHLQAGKRSKALLLFRQGIKENNFSEDITMKVFVPLFFNMFSDVKAGKGEQVRDICLDTLSAVAAKVQWEHYRTILKRCFRELNLRPDKQKIILRLICSILDAFHFMKPANDASGNSDALSEDIDSSLTFSLVTVSSDKQQYMQKVVFPQVQKLLGSDPEKVNVNINLVALKILKLLPVDYFESQLSSIIHRICNFLKNRLESIRDEARSALAASVKELGIGYLQFVVKILRAILKRGFELHVLGYTLHYLLSKNITADMYGRLDYCLEDLLAVVDSDLLGDVAEQKEVEKLASKMKETKKRMSFETLKLIAQSITFKTDLLKKIISPVSLHLQKQLTPKLKTRLEMMLHNIALGIECNSSTETSNLFIFVYCLIEDTITGSRSECKENTQSSPDQDSTVRKTFLGLGESGSQNSYILTKFALDLLRNRLKSIKLDKEDEQLVKMLDPFVDLLRKCMSSKHASVLSATFRCFALLVKLPLPSLRDNAITIKNVLMEILQRAGNSNGHLVTSCFKLLADLLRGFRISLSDNELQMLVHTPMFVDLQTNPSPVALSLLKTIVRLKLVSHEIYDIVVKIGELMVTTLTESIQQQCIQIMLQFFLNYPLSEKRLQQHIDFFLANLSYEHPSGREAVLEMLHDILTRFPQRIIDEQGQTFFLHLVVALANEQHQNVSSMILRAIQKLLGRIGGQGKSYIYEYSLSWYTGEKKSLWSASAQVIGLLVGDHTLQMGKHLKSILAVVKKIMESSIIASGAIQLGLSDEAALPLWKETYYSVAMMERLLLRFPELYFEKNMEDIWIILCKLLIHPHSMLRSISSSLVASYFATVEKRKHEQKLDAPSWLLVQPSRLFIIAVSLLKQLRSELSDTTANNLIVQNVAYSVCNLHMLIRQSTSTHQFWSSISSDRGAFLEGFELLGSRKAKNIFLLCTSTSSDVSGSSLDTNEEPTSLLVSSILKKMGRIAMQMQDTQIKNVFNCFNMISSALGPDESLTYADHLLAPLYKVSEGFAGKVVSDEVKQLAQGVQNKLRDLIGSEKFVEVYKSVRMGLKQKRDGRKQAQKIVAAVDPERNAKRKQRMAAKHREHKRRKIMAMKIGRWMR

SEQ ID NO: 171347 - protein, 1959 aa, Zea Mays
MTGLIQRLCDEVDPKELPLMYTCLCEEINCCLEDGCLEHLKCLIVFLAFALQKKQNNAFDKVKMIKLVELLVSRYVFPGSNITGSSSIEVLGSILDFMLSVLDVPTILGNLSIISPFYAPVFKLKNPRVIVFIKKLLVKGPQVAQHFESQILSAMDNFIVSSPEDVIFILLNFFKGSKKQIFLCSTDGNHLDSVEKTCKFFESKFSLWIELLDDTAGTGNRSSNQVSEKEAAILWGSFFCYPNMKGVHQDSLSLLRKLIINFDRLLEVGEGNMNGLPMTTWRGLLGAALSSYHKLLLVNTSRNSEFSFFLSLAKSHSTCPQVLSAVAEYLDSLQGVSSMEVTKEFDPQNLLELFSIFAFNLSSPTKDVRILTLRILSYFVKMDQRLITDEERPHKRQRTEVSGEEAVAKYANVVDILLIIESMPISVSTSRKIAIFISRIQMSLSSKMVHDDYIPPLLHGIIGILYNRFSDLWPQTLDCLAVLIRKHKELVWGQFVPFIAIHQSKGLTVKNQEKLEAATQPQSIFDCFNLYLAMDFDCTPAVTVATLLLQSLQRIPDVAESRSRQLIPLFLNFMGYDDSSIFSADSYMPEKCKGKQWKAILKEWLNLLRLMHNARSLYQGNFLQEVLTKRVLDDSDPEIQAKALDCLLNWKDEFLIPYSQNLKNLIDVKTLREELTTWAVSHDSLSILKDHRSRVVPLVIRVLAPKVRKLKLLGSRKHTGASHRKAILRFLLQFDSNELELFFSLLLRSLIPGSLQLKMFGSQPDNLLGSFSDIVGTSTEICVENFTWKKANGFIHLVEEIFGTFDMPHISPFLNVLLIIVARLLESCMRNLRNESDGKYPCNQTNDHGNGCSINSEVGNSVNVDECFKEMHLEGHMEQPHSITQTSVSIKQLKDLRSSCIRVVSSALSHYESHEFGENFWGVFFSSVKPLIDCFTQEASSSEKPSSLFACFMAMSRSPKLAPLLGSNNLVPAIFSILTVKTASGSITTYALEFIENLLRLDIDLQQQDEHLVKKVLLQHMDVLIHSLHDFVNHRKELNRRSGTWLGQRELRLFKLLLNYITDPSAADNFIDLILPFFSKKDLNSDDCLEALCVVRGIIQNLRCKVSEKVLNALNPLLAIVGLELRLCICDIYAGLSLNDPSMLFLAGLIGDLNAVSASELGELDYDTRLNTYDKVRPQLFLGLTEEHVGAILSHCVYDMSSEELILRQSASRALQSFLDFSASVMNNDVSKYSIDDKFRENNTRSICTMGCIQKILEKTYLHNMGVAMTKDVSIQKEWIILLREMVSNFNHLASLSSFRPLCKVDIEEDFFHNITHLQAGKRSKALLLFRQGIKENNFSEDITMKVFVPLFFNMFSDDITMKVFVPLFFNMFSDVKAGKGEQVRDICLDTLSAVAAKVQWEHYRTILKRCFRELNLRPDKQKIILRLICSILDAFHFMKPANDASGNSDALSEDIDSSLTFSLVTVSSDKQQYMQKVVFPQVQKLLGSDPEKVNVNINLVALKILKLLPVDYFESQLSSIIHRICNFLKNRLESIRDEARSALAASVKELGIGYLQFVVKILRAILKRGFELHVLGYTLHYLLSKNITADMYGRLDYCLEDLLAVVDSDLLGDVAEQKEVEKLASKMKETKKRMSFETLKLIAQSITFKTDLLKKIISPVSLHLQKQLTPKLKTRLEMMLHNIALGIECNSSTETSNLFIFVYCLIEDTITGSRSECKENTQSSPDQDSTVRKTFLGLGESGSQNSYILTKFALDLLRNRLKSIKLDKEDEQLVKMLDPFVDLLRKCMSSKHASVLSATFRCFALLVKLPLPSLRDNAITIKNVLMEILQRAGNSNGHLVTSCFKLLADLLRGFRISLSDNELQMLVHTPMFVDLQTNPSPVALSLLKTIVRLKLVSHEIYDIVVKIGELMVTTLTESIQQQCIQIMLQFFLNYPLSEKRLQQHIDFFLANLRYDEYP

SEQ ID NO: 171348 - protein, 800 aa, Zea Mays
MLFLAGLIGDLNAVSASELGELDYDTRLNTYDKVRPQLFLGLTEEHVGAILSHCVYDMSSEELILRQSASRALQSFLDFSASVMNNDVSKYSIDDKFRENNTRSICTMGCIQKILEKTYLHNMGVAMTKDVSIQKEWIILLREMVSNFNHLASLSSFRPLCKVDIEEDFFHNITHLQAGKRSKALLLFRQGIKENNFSEDITMKVFVPLFFNMFSDVKAGKGEQVRDICLDTLSAVAAKVQWEHYRTILKRCFRELNLRPDKQKIILRLICSILDAFHFMKPANDASGNSDALSEDIDSSLTFSLVTVSSDKQQYMQKVVFPQVQKLLGSDPEKVNVNINLVALKILKLLPVDYFESQLSSIIHRICNFLKNRLESIRDEARSALAASVKELGIGYLQFVVKILRAILKRGFELHVLGYTLHYLLSKNITADMYGRLDYCLEDLLAVVDSDLLGDVAEQKEVEKLASKMKETKKRMSFETLKLIAQSITFKTDLLKKIISPVSLHLQKQLTPKLKTRLEMMLHNIALGIECNSSTETSNLFIFVYCLIEDTITGSRSECKENTQSSPDQDSTVRKTFLGLGESGSQNSYILTKFALDLLRNRLKSIKLDKEDEQLVKMLDPFVDLLRKCMSSKHASVLSATFRCFALLVKLPLPSLRDNAITIKNVLMEILQRAGNSNGHLVTSCFKLLADLLRGFRISLSDNELQMLVHTPMFVDLQTNPSPVALSLLKTIVRLKLVSHEIYDIVVKIGELMVTTLTESIQQQCIQIMLQFFLNYPLSEKRLQQHIDFFLANLRYDEYP

SEQ ID NO: 171349 - protein, 1406 aa, Zea Mays
MHSYCDVSTLPPIKCLEGRRLFVAFYLIGLWMVISQRSGTWLGQRELRLFKLLLNYITDPSAADNFIDLILPFFSKKDLNSDDCLEALCVVRGIIQNLRCKVSEKVLNALNPLLAIVGLELRLCICDIYAGLSLNDPSMLFLAGLIGDLNAVSASELGELDYDTRLNTYDKVRPQLFLGLTEEHVGAILSHCVYDMSSEELILRQSASRALQSFLDFSASVMNNDVSKYSIDDKFRENNTRSICTMGCIQKILEKTYLHNMGVAMTKDVSIQKEWIILLREMVSNFNHLASLSSFRPLCKVDIEEDFFHNITHLQAGKRSKALLLFRQGIKENNFSEDITMKVFVPLFFNMFSDVKAGKGEQVRDICLDTLSAVAAKVQWEHYRTILKRCFRELNLRPDKQKIILRLICSILDAFHFMKPANDASGNSDALSEDIDSSLTFSLVTVSSDKQQYMQKVVFPQVQKLLGSDPEKVNVNINLVALKILKLLPVDYFESQLSSIIHRICNFLKNRLESIRDEARSALAASVKELGIGYLQFVVKILRAILKRGFELHVLGYTLHYLLSKNITADMYGRLDYCLEDLLAVVDSDLLGDVAEQKEVEKLASKMKETKKRMSFETLKLIAQSITFKTDLLKKIISPVSLHLQKQLTPKLKTRLEMMLHNIALGIECNSSTETSNLFIFVYCLIEDTITGSRSECKENTQSSPDQDSTVRKTFLGLGESGSQNSYILTKFALDLLRNRLKSIKLDKEDEQLVKMLDPFVDLLRKCMSSKHASVLSATFRCFALLVKLPLPSLRDNAITIKNVLMEILQRAGNSNGHLVTSCFKLLADLLRGFRISLSDNELQMLVHTPMFVDLQTNPSPVALSLLKTIVRLKLVSHEIYDIVVKIGELMVTTLTESIQQQCIQIMLQFFLNYPLSEKRLQQHIDFFLANLSYEHPSGREAVLEMLHDILTRFPQRIIDEQGQTFFLHLVVALANEQHQNVSSMILRAIQKLLGRIGGQGKSYIYEYSLSWYTGEKKSLWSASAQVIGLLVGDHTLQMGKHLKSILAVVKKIMESSIIASGAIQLGLSDEAALPLWKETYYSVAMMERLLLRFPELYFEKNMEDIWIILCKLLIHPHSMLRSISSSLVASYFATVEKRKHEQKLDAPSWLLVQPSRLFIIAVSLLKQLRSELSDTTANNLIVQNVAYSVCNLHMLIRQSTSTHQFWSSISSDRGAFLEGFELLGSRKAKNIFLLCTSTSSDVSGSSLDTNEEPTSLLVSSILKKMGRIAMQMQDTQIKNVFNCFNMISSALGPDESLTYADHLLAPLYKVSEGFAGKVVSDEVKQLAQGVQNKLRDLIGSEKFVEVYKSVRMGLKQKRDGRKQAQKIVAAVDPERNAKRKQRMAAKHREHKRRKIMAMKIGRWMR

SEQ ID NO: 171350 - protein, 657 aa, Zea Mays
MVSNFNHLASLSSFRPLCKVDIEEDFFHNITHLQAGKRSKALLLFRQGIKENNFSEDITMKVFVPLFFNMFSDVKAGKGEQVRDICLDTLSAVAAKVQWEHYRTILKRCFRELNLRPDKQKIILRLICSILDAFHFMKPANDASGNSDALSEDIDSSLTFSLVTVSSDKQQYMQKVVFPQVQKLLGSDPEKVNVNINLVALKILKLLPVDYFESQLSSIIHRICNFLKNRLESIRDEARSALAASVKELGIGYLQFVVKILRAILKRGFELHVLGYTLHYLLSKNITADMYGRLDYCLEDLLAVVDSDLLGDVAEQKEVEKLASKMKETKKRMSFETLKLIAQSITFKTDLLKKIISPVSLHLQKQLTPKLKTRLEMMLHNIALGIECNSSTETSNLFIFVYCLIEDTITGSRSECKENTQSSPDQDSTVRKTFLGLGESGSQNSYILTKFALDLLRNRLKSIKLDKEDEQLVKMLDPFVDLLRKCMSSKHASVLSATFRCFALLVKLPLPSLRDNAITIKNVLMEILQRAGNSNGHLVTSCFKLLADLLRGFRISLSDNELQMLVHTPMFVDLQTNPSPVALSLLKTIVRLKLVSHEIYDIVVKIGELMVTTLTESIQQQCIQIMLQFFLNYPLSEKRLQQHIDFFLANLRYDEYP

SEQ ID NO: 171351 - protein, 373 aa, Zea Mays
MAGARGRATPTRTPPRSSSPAPRTEAVVPPDWDSAVSTVSSHPSPPVVVVCGPKNSGKSTFSRVLLNALLPRHGKVAYLDTDVGQPEFGPPGCLSFNVLDEAIADLMNPSLREAERCYFFGDISSKRDPEAYLNCLFHSYDYFVGKYRCDENEMLPLIVNTPGWVKGAGFDMLVEMLRYICPTIVVQIRITIKNKNLPDGGFWLDGGQTGPMMINIDAAFHDASNRSLLIQKDSCGMRERRLVEYLKQCFPSNISLSTNKELAYALASLPPYQVPFSDVAIVHLHCKVPAGEIWHSLNATIVGLAVSNASEGTRSIPYCVGLGIIRGVDIQKGLLYLITPVPLQRLQCVDLLQQGLIEIPTALLQCLGNGWPA

SEQ ID NO: 171352 - protein, 327 aa, Zea Mays
MAGARGRATPTRTPPRSSSPAPRTEAVVPPDWDSAVSTVSSHPSPPVVVVCGPKNSGKSTFSRVLLNALLPRHGKVAYLDTDVGQPEFGPPGCLSFNVLDEAIADLMNPSLREAERCYFFGDISSKRDPEAYLNCLFHSYDYFVGKYRCDENEMLPLIVNTPGWVKGAGFDMLVEMLRYICPTIVVQIRITIKNKNLPDGGFWLDGGQTGPMMINIDAAFHDASNRSLLIQKDSCGMRERRLVEYLKQCFPSNISLSTNKELAYALASLPPYQVPFSDVAIVHLHCKVPAGEIWHSLNATIVGLAVSNASEGTRSIPYCVGLAPAMR

SEQ ID NO: 171353 - protein, 238 aa, Zea Mays
MAGARGRATPTRTPPRSSSPAPRTEAVVPPDWDSAVSTVSSHPSPPVVVVCGPKNSGKSTFSRVLLNALLPRHGKVAYLDTDVGQPEFGPPGCLSFNVLDEAIADLMNPSLREAERCYFFGDISSKRDPEAYLNCLFHSYDYFVGKYRCDENEMLPLIVNTPGWVKGAGFDMLVEMLRYICPTIVVQIRITIKNKNLPDGGFWLDGGQTGPMMINIDAAFHDASNRSKIHVECVNADL

SEQ ID NO: 171354 - protein, 360 aa, Zea Mays
MAAWSSPPSLRHLLMLRPCLPLSPTCLAGSLRRHIHSRCRLFSSAASSSTLTHGDIASTHGDADGVVEVNPPRGTRDFPPEDMRLRTWLFDQFREVSRLMAFEEVDFPVLESEALFIRKAGEEITQQLYNFEDKGGRRVVLRPEITPSLARLVIKQGKSVSLPLKWFTIGQCWRYERMTRGRRREHYQWNMDIFGVPKVRAEAELLHAIVLLFQRLGITSSDVGIRVSSRKVLQAVLNMYSIPDHLFTQVCVIVDKLGKMTREEIEKELVSTGLSSEAVQGIIDVLSIKSLSKLEEVLGSDVEAVADLKKLFSFAEQYGYADWICFDASVVRGLAYYTGIVFEAFDREGKLRAICGGGSC

SEQ ID NO: 171355 - protein, 293 aa, Zea Mays
MTRGRRREHYQWNMDIFGVPKVRAEAELLHAIVLLFQRLGITSSDVGIRVSSRKVLQAVLNMYSIPDHLFTQVCVIVDKLGKMTREEIEKELVSTGLSSEAVQEVLGSDVEAVADLKKLFSFAEQYGYADWICFDASVVRGLAYYTGIVFEAFDREGKLRAICGGGRYDRLLSTFGSEDIPACGFGFGDAVIVELLKEKGLLPDMSRQIDDIVFPLDEELEGPASSIASSLRKKGRSVELVEDKRLKWVFKHAERINASRLILVGNSEWERGMVRVKVLSTREEFEVKTSELE

SEQ ID NO: 171356 - protein, 334 aa, Zea Mays
MAAWSSPPSLRHLLMLRPCLPLSPTCLAGSLRRHIHSRCRLFSSAASSSTLTHGDIASTHGDADGVVEVNPPRGTRDFPPEDMRLRTWLFDQFREVSRLMAFEEVDFPVLESEALFIRKAGEEITQQLYNFEDKGGRRVVLRPEITPSLARLVIKQGKSVSLPLKWFTIGQCWRYERMTRGRRREHYQWNMDIFGVPKVRAEAELLHAIVLLFQRLGITSSDVGIRVSSRKVLQAVLNMYSIPDHLFTQVCVIVDKLGKMTREEIEKELVSTGLSSEAVQGIIDVLSIKSLSKLEGFLLTFCCWLVIMHAPYHITLLQYCTDVMLLNWKMYSLE

SEQ ID NO: 171357 - protein, 297 aa, Zea Mays
MAAWSSPPSLRHLLMLRPCLPLSPTCLAGSLRRHIHSRCRLFSSAASSSTLTHGDIASTHGDADGVVEVNPPRGTRDFPPEDMRLRTWLFDQFREVSRLMAFEEVDFPVLESEALFIRKAGEEITQQLYNFEDKGGRRVVLRPEITPSLARLVIKQGKSVSLPLKWFTIGQCWRYERMTRGRRREHYQWNMDIFGVPKVRAEAELLHAIVLLFQRLGITSSDVGIRVSSRKVLQAVLNMYSIPDHLFTQVCVIVDKLGKMTREEIEKELVSTGLSSEAVQGIIDVLSIKSLSKLEGI

SEQ ID NO: 171358 - protein, 490 aa, Zea Mays
MAAWSSPPSLRHLLMLRPCLPLSPTCLAGSLRRHIHSRCRLFSSAASSSTLTHGDIASTHGDADGVVEVNPPRGTRDFPPEDMRLRTWLFDQFREVSRLMAFEEVDFPVLESEALFIRKAGEEITQQLYNFEDKGGRRVVLRPEITPSLARLVIKQGKSVSLPLKWFTIGQCWRYERMTRGRRREHYQWNMDIFGVPKVRAEAELLHAIVLLFQRLGITSSDVGIRVSSRKVLQAVLNMYSIPDHLFTQVCVIVDKLGKMTREEIEKELVSTGLSSEAVQGIIDVLSIKSLSKLEEVLGSDVEAVADLKKLFSFAEQYGYADWICFDASVVRGLAYYTGIVFEAFDREGKLRAICGGGRYDRLLSTFGSEDIPACGFGFGDAVIVELLKEKGLLPDMSRQIDDIVFPLDEELEGPASSIASSLRKKGRSVELVEDKRLKWVFKHAERINASRLILVGNSEWERGMVRVKVLSTREEFEVKTKWMGMILAS

SEQ ID NO: 171359 - protein, 234 aa, Zea Mays
MYSIPDHLFTQVCVIVDKLGKMTREEIEKELVSTGLSSEAVQGIIDVLSIKSLSKLEEVLGSDVEAVADLKKLFSFAEQYGYADWICFDASVAFDREGKLRAICGGGRYDRLLSTFGSEDIPACGFGFGDAVIVELLKEKGLLPDMSRQIDDIVFPLDEELEGPASSIASSLRKKGRSVELVEDKRLKWVFKHAERINASRLILVGNSEWERGMVRVKVLSTREEFEVKTSELE

SEQ ID NO: 171360 - protein, 101 aa, Zea Mays
MQLLKEKGLLPDMSRQIDDIVFPLDEELEGPASSIASSLRKKGRSVELVEDKRLKWVFKHAERINASRLILVGNSEWERGMVRVKVLSTREEFEVKTSELE

SEQ ID NO: 171361 - protein, 94 aa, Zea Mays
MSRQIDDIVFPLDEELEGPASSIASSLRKKGRSVELVEDKRLKWVFKHAERINASRLILVGNSEWERGMVRVKVLSTREEFEVKTKWMGMILAS

SEQ ID NO: 171362 - protein, 176 aa, Zea Mays
MGEAHLDECCHCQGCAGKYTLLRDEENPRWTIFERRLPCCGCGIGWSSFLVSFDLVLCNHSLLLQVLQQRSSRAPWASCISCCGTHLHSPGTHRSLCGTDNLYIKRGMNLRLLEMRTQALIFTVLAAIHRSLWHRSSETQSEENAVAGPGIQKELVISVIVAYSCNHPSCITISSC

SEQ ID NO: 171363 - protein, 902 aa, Zea Mays
MSESNVKWIDGLHFTSLYWPPPQDVEQKQAQILAYVEYFGQFTADSEQFPEDVAQLIQSSYPSKESRLIDEVLATFVLHHPEHGHAVVHPILSPIIDGTLCYDRHGPPFSSFISLFSHTSEQEYSEQWALACGEILRVLTHYNRPIFKVERQHSEAECSTTSDQATSSDSTDKKSNNSLGNESDRKPLRPLTPWITDILLAAPLGIRSDYFRWCSGVMGKYAAGGELKPPTTAYSRGSGKHPQLMPSTPRWAVANGAGVILSVCDEEVARYETANLTAAAVPALLLPPPTTPLDEHLVAGLPPLEPYARLFHRYYAIATPSATQRLLFGLLEAPPSWAPDALDAAVQLVELLRAAEDYASGMRLPKNWMHLHFLRAIGTAMSMRAGIAADTAAALLFRILSQPTLLFPPLRHAEGVDVHHEPLGGYVSSYKKQLEVPASEATIDATAQGIASLLCAHGPDVEWRICTIWEAAYGLLPLSSSAVDLPEIVVAAPLQPPTLSWNLYLPLLKVFEYLPRGSPSEACLMRIFVATVEAILRRAFPSETPEQSRKPRSQSKNLAVAELHTMIHSLFVESCASMDLASRLLFVVLTVCVSHQALPGGSKRPTGSDNHSLEEATEHSRLTNGRSRCKKRQGPVATFDSYVLAAVCALSCELQLFPCISKNGSHSNLKDSMKIIIPGKNNGINNELHSSISSAIIHTRRILAILEALFSLKPSSVGTSWSYSSNEIVAAAMVAAHVSELFRRSRPCLNSLSALMRCKRDAEISTRASSLYHLIDLHGKTVSSIVNKAEPLEAHLTLTPVKKVNQHRCEENNTNSSDSAKLENKNGSTHKKNGFSKPHLKCAEEVLNGNVASTSGKSIASLQVEASDLANFLTMDRNGGYRDVCRKHISSPRMEEGCGCTL

SEQ ID NO: 171364 - protein, 916 aa, Zea Mays
MPSTPRWAVANGAGVILSVCDEEVARYETANLTAAAVPALLLPPPTTPLDEHLVAGLPPLEPYARLFHRYYAIATPSATQRLLFGLLEAPPSWAPDALDAAVQLVELLRAAEDYASGMRLPKNWMHLHFLRAIGTAMSMRAGIAADTAAALLFRILSQPTLLFPPLRHAEGVDVHHEPLGGYVSSYKKQLEVPASEATIDATAQGIASLLCAHGPDVEWRICTIWEAAYGLLPLSSSAVDLPEIVVAAPLQPPTLSWNLYLPLLKVFEYLPRGSPSEACLMRIFVATVEAILRRAFPSETPEQSRKPRSQSKNLAVAELHTMIHSLFVESCASMDLASRLLFVVLTVCVSHQALPGGSKRPTGSDNHSLEEATEHSRLTNGRSRCKKRQGPVATFDSYVLAAVCALSCELQLFPCISKNGSHSNLKDSMKIIIPGKNNGINNELHSSISSAIIHTRRILAILEALFSLKPSSVGTSWSYSSNEIVAAAMVAAHVSELFRRSRPCLNSLSALMRCKRDAEISTRASSLYHLIDLHGKTVSSIVNKAEPLEAHLTLTPVKKVNQHRCEENNTNSSDSAKLENKNGSTHKKNGFSKPHLKCAEEVLNGNVASTSGKSIASLQVEASDLANFLTMDRNGGYRGSQTLLRSVLSEKQELCFSVVSLLWQKLIASPEMQMSAESTSAHQGWRKVVDALCDVVSASPTKASAAIVLQAEKDLQPWIARDDEQGQKMWRVNQRIVKLIAELMRNHDSPETLVILASASDLLLRATDGILVDGEACTLPQLELLEVTARAVHLIIEWGDPGLSVADGLSNLLKCRLSTTIRCLSHPSAHVRALSMSVLRDILDHGSVSPNKISRGEQQRNGIQSPSYRCVAAGILNWQADVERCIEWEAHSRRATGLTLAFLSTAAKELGCPLPC

SEQ ID NO: 171365 - protein, 672 aa, Zea Mays
MLTYSRGSGKHPQLMPSTPRWAVANGAGVILSVCDEEVARYETANLTAAAVPALLLPPPTTPLDEHLVAGLPPLEPYARLFHRYYAIATPSATQRLLFGLLEAPPSWAPDALDAAVQLVELLRAAEDYASGMRLPKNWMHLHFLRAIGTAMSMRAGIAADTAAALLFRILSQPTLLFPPLRHAEGVDVHHEPLGGYVSSYKKQLEVPASEATIDATAQGIASLLCAHGPDVEWRICTIWEAAYGLLPLSSSAVDLPEIVVAAPLQPPTLSWNLYLPLLKVFEYLPRGSPSEACLMRIFVATVEAILRRAFPSETPEQSRKPRSQSKNLAVAELHTMIHSLFVESCASMDLASRLLFVVLTVCVSHQALPGGSKRPTGSDNHSLEEATEHSRLTNGRSRCKKRQGPVATFDSYVLAAVCALSCELQLFPCISKNGSHSNLKDSMKIIIPGKNNGINNELHSSISSAIIHTRRILAILEALFSLKPSSVGTSWSYSSNEIVAAAMVAAHVSELFRRSRPCLNSLSALMRCKRDAEISTRASSLYHLIDLHGKTVSSIVNKAEPLEAHLTLTPVKKVNQHRCEENNTNSSDSAKLENKNGSTHKKNGFSKPHLKCAEEVLNGNVASTSGKSIASLQVEASDLANFLTMDRNGGYRDVCRKHISSPRMEEGCGCTL

SEQ ID NO: 171366 - protein, 742 aa, Zea Mays
MPSTPRWAVANGAGVILSVCDEEVARYETANLTAAAVPALLLPPPTTPLDEHLVAGLPPLEPYARLFHRYYAIATPSATQRLLFGLLEAPPSWAPDALDAAVQLVELLRAAEDYASGMRLPKNWMHLHFLRAIGTAMSMRAGIAADTAAALLFRILSQPTLLFPPLRHAEGVDVHHEPLGGYVSSYKKQLEVPASEATIDATAQGIASLLCAHGPDVEWRICTIWEAAYGLLPLSSSAVDLPEIVVAAPLQPPTLSWNLYLPLLKVFEYLPRGSPSEACLMRIFVATVEAILRRAFPSETPEQSRKPRSQSKNLAVAELHTMIHSLFVESCASMDLASRLLFVVLTVCVSHQALPGGSKRPTGSDNHSLEEATEHSRLTNGRSRCKKRQGPVATFDSYVLAAVCALSCELQLFPCISKNGSHSNLKDSMKIIIPGKNNGINNELHSSISSAIIHTRRILAILEALFSLKPSSVGTSWSYSSNEIVAAAMVAAHVSELFRRSRPCLNSLSALMRCKRDAEISTRASSLYHLIDLHGKTVSSIVNKAEPLEAHLTLTPVKKVNQHRCEENNTNSSDSAKLENKNGSTHKKNGFSKPHLKCAEEVLNGNVASTSGKSIASLQVEASDLANFLTMDRNGGYRGSQTLLRSVLSEKQELCFSVVSLLWQKLIASPEMQMSAESTSAHQGWRKVVDALCDVVSASPTKASAAIVLQVKILLYSPRRTCSLGLLETTNKARRCGESTNV

SEQ ID NO: 171367 - protein, 986 aa, Zea Mays
MSESNVKWIDGLHFTSLYWPPPQDVEQKQAQILAYVEYFGQFTADSEQFPEDVAQLIQSSYPSKESRLIDEVLATFVLHHPEHGHAVVHPILSPIIDGTLCYDRHGPPFSSFISLFSHTSEQEYSEQWALACGEILRVLTHYNRPIFKVERQHSEAECSTTSDQATSSDSTDKKSNNSLGNESDRKPLRPLTPWITDILLAAPLGIRSDYFRWCSGVMGKYAAGGELKPPTTAYSRGSGKHPQLMPSTPRWAVANGAGVILSVCDEEVARYETANLTAAAVPALLLPPPTTPLDEHLVAGLPPLEPYARLFHRYYAIATPSATQRLLFGLLEAPPSWAPDALDAAVQLVELLRAAEDYASGMRLPKNWMHLHFLRAIGTAMSMRAGIAADTAAALLFRILSQPTLLFPPLRHAEGVDVHHEPLGGYVSSYKKQLEVPASEATIDATAQGIASLLCAHGPDVEWRICTIWEAAYGLLPLSSSAVDLPEIVVAAPLQPPTLSWNLYLPLLKVFEYLPRGSPSEACLMRIFVATVEAILRRAFPSETPEQSRKPRSQSKNLAVAELHTMIHSLFVESCASMDLASRLLFVVLTVCVSHQALPGGSKRPTGSDNHSLEEATEHSRLTNGRSRCKKRQGPVATFDSYVLAAVCALSCELQLFPCISKNGSHSNLKDSMKIIIPGKNNGINNELHSSISSAIIHTRRILAILEALFSLKPSSVGTSWSYSSNEIVAAAMVAAHVSELFRRSRPCLNSLSALMRCKRDAEISTRASSLYHLIDLHGKTVSSIVNKAEPLEAHLTLTPVKKVNQHRCEENNTNSSDSAKLENKNGSTHKKNGFSKPHLKCAEEVLNGNVASTSGKSIASLQVEASDLANFLTMDRNGGYRGSQTLLRSVLSEKQELCFSVVSLLWQKLIASPEMQMSAESTSAHQGWRKVVDALCDVVSASPTKASAAIVLQVKILLYSPRRTCSLGLLETTNKARRCGESTNV

SEQ ID NO: 171368 - protein, 270 aa, Zea Mays
MTLLLARYGWFGPDLNQQSSEPSLASAYSADKIIGSRPPDLVFNEQKHMAGSDEFANHFVTPSIVDEINTSQMAENPSKVAQLSWLDSISNISFGALLSEAAPSQDTKQPPSQNSICLQQIPPTCDSFDAAIASLIARQQPSNQPKVLNPSLWEAEETCHAFPFQNQTPHASSSVPGNSFAAMTSSVLCAIPETGTDDQQCATDGRKEELNSQTSVEGDGINAKPEISMESAGDPEREASCPRLLGGTDSIGLSSLLTDSLDAFQKFSVF

SEQ ID NO: 171369 - protein, 606 aa, Zea Mays
MATTEDSAAAGEARRLFALLESQQQVLSDCHGAWSRALAHFASREEDLASRSAALDEALAAADVSTSETLAALEARESSIPARLAEASAALSAAVAEAETESTGPPPTDIKGALRWICRRMDAAALWRFMAARRRELAVVRREAGPAVAMAVDPPRLVLDVVSDFLAAGDGVGGDQCWVLGMLLRSLFDLDGRKPPEIGDTLVERAFAVTKEWQERFGINMDNLSSEDKEVEMAEADGSENSGATEKKEGKEDEEQEEVEEEDEEEEEEEDPEEEEEEEEEDDPEEVEEPEAPGKEGNEVKGEGAEGKVSQEGQGAEKIGHEDEKKGAAVGTMKVKTGEEGNKGASEQSEAQIFVQMVAAFGLKDKFDEEFLRRLFVANGRKRELARIACVLGFEESLGDIVEELIKSGNAIEAIYVAHEADLLGKFPPVPLFKSYLQNSTDKAQAVLKSGRHSSSALEEANSLEGNAYRSVIRCVESCQLQSVFPLEVLRKKLGKLEKEKSDRKKAAGPSRFPNKRSRGAAGPYPFPAAKAARGSSFGPRFQNPVSRSLNYAPHAGYINPAAASPFSVPGSVSGRRGGVPYGGPGATYGGSPSFATGGGQQPFRR

SEQ ID NO: 171370 - protein, 580 aa, Zea Mays
MATTEDSAAAGEARRLFALLESQQQVLSDCHGAWSRALAHFASREEDLASRSAALDEALAAADVSTSETLAALEARESSIPARLAEASAALSAAVAEAETESTGPPPTDIKGALRWICRRMDAAALWRFMAARRRELAVVRREAGPAVAMAVDPPRLVLDVVSDFLAAGDGVGGDQCWVLGMLLRSLFDLDGRKPPEIGDTLVERAFAVTKEWQERFGINMDNLSSEDKEVEMAEADGSENSGATEKKEGKEDEEQEEVEEEDEEEEEEEDPEEEEEEEEEDDPEEGQGAEKIGHEDEKKGAAVGTMKVKTGEEGNKGASEQSEAQIFVQMVAAFGLKDKFDEEFLRRLFVANGRKRELARIACVLGFEESLGDIVEELIKSGNAIEAIYVAHEADLLGKFPPVPLFKSYLQNSTDKAQAVLKSGRHSSSALEEANSLEGNAYRSVIRCVESCQLQSVFPLEVLRKKLGKLEKEKSDRKKAAGPSRFPNKRSRGAAGPYPFPAAKAARGSSFGPRFQNPVSRSLNYAPHAGYINPAAASPFSVPGSVSGRRGGVPYGGPGATYGGSPSFATGGGQQPFRR

SEQ ID NO: 171371 - protein, 501 aa, Zea Mays
MASPAKRAKPSSPAKPSSSPPQEEATAAAVSEDPVVLLRRRWELASVLHFLRVFEPVIEANLGLSADEIEMALASNNRDLARIHIALLKGIPPVNKHLKDEDGWIIVTAKKLTDWWSWVAEGANPFRNNSGKEVEMYKQQDPIKRLLILKALCEVRSEQDDAVWYVNDEMKKGTHISNFRKDKLGSGSSGTTYWYDGDSTIGHRLYTEDVTVNFKQNWMGKGGRLTKPVTNIYWETVATNLDEFLEISLSRKGRAESAIADYLKTEVIPAVENFQKKKERRLKRQEKKDKLLAFTNTFQTRSLRERRPVSYNYSDFDRSIEEAIRAVQKGKVQGSREAGTEEKPASHHGDKGADGRSDINSENNKNGGQEDAKYLSDLSSGDEEDGDYSDRGVSSADSDGDNNASDSYKSDMEEDVSVPRKRTRLAARLANDKPRPGLRRSQRNMKNDEETMHPGQVTPPPMAKKTLRQRPTPVSKQPDITFSSSEDDLAQVVADSEDESG

SEQ ID NO: 171372 - protein, 1217 aa, Zea Mays
MEPRRRQQQQSILSFLQKQPPSWRDPSGEGTPPEKPPRPPMGSVAGIMERLVRPPPPPQASHGWARNQYDSQVRHSEGKNLPVENQVLSNECLGALFSRPIYGEHSRTILSPEGGADMSPSQEPQKHSLRSSTDESTRATKEVILEHPKKLFSESHTNCIHATALNENFGVQTPSQVASKKIFPGLAHGADTPLTGYGSEQTLLQHSSKKFSLVSANGKYTRAAVTPFEQNSNNTRAEELSKMRSGSSDMLYLKPTNLSAELETNGTPLKNHSKNSSLLMDGKYNITSAALFPELDSSPLKPETPAMQAAIPRLKRVQEDQGVDANNQCPPLWAMNKKMKSAHCSIEKKDHDEMAGSARSKFEWLNSFAIRDANKRRPNDPLYDKSTLFIPPDALRKMSTSQKQYWNIKCKYMDVVLFFKVGKFYELYELDAEIGQKELDWKMTVSGVGKCRQVGISESGIDDAVDKLIARGYKVGRIEQMESANQAKARGVHSVIERKLVHVSTPSTAVDNIGTDAVHLLALKEVTLASSGFQVFGFAFLDYAALKIWVGSVQDDDSSAALGALLMQVSPRELIYETSGISKETQRTIRKYASAGSVKMQLTPLSGIDFSDAAQIRNLIHSKGFFNASTESWLSALDCTMNQDVVICALGGLIGHLTRLMLHDALKNGEVLPYHVYKTCLRMDGQTLVNLEIFSNNFNGGSSGTLYKHLNHCVTASGKRMLRRWICHPLKDIDAINKRLDVVEGFIQNCGLGPTTLGYLQKIPDLERLLGQVRSTVGLSSLLQLPFIGEKIIKKRIKTFIMLINGLRNGIDLLNDLQRADHGILALYKIVDIPSLSYLPELIHKFEERMQNEFPCGQVSDVNANGANDLAALMDVFIGKASEWSLVINAVSTIDVLRSFAAMTLSSFGAMCRPQVLLKDDVPVLRMKGLWHPYAFAGNANSLVPNDLTLGQDLSGLNRFALLLTGPNMGGKSTIMRATCLAVVLAQLGCYVPCTSCELTLADSIFTRLGATDRIMTGESTFLVECTETASVLQKATVDSLVLLDELGRGTSTFDGYAIAYAVFRHLVERVRCRQLFATHYHSLTKEFASHPHVSLQHMACMFKPRSDGNGQKELTFLYRLTSGACPESYGLQVAAMAGIPKSIVEKASVAGQVMRAKIAGNFKSSEQRAEFSTLHEEWLRAALAVSAMDGQPDDDDVMDTLFCIQQELKSHFRKAR

SEQ ID NO: 171373 - protein, 805 aa, Zea Mays
MEPRRRQQQQSILSFLQKQPPSWRDPSGEGTPPEKPPRPPMGSVAGIMERLVRPPPPPQASHGWARNQYDSQVRHSEGKNLPVENQVLSNECLGALFSRPIYGEHSRTILSPEGGADMSPSQEPQKHSLRSSTDESTRATKEVILEHPKKLFSESHTNCIHATALNENFGVQTPSQVASKKIFPGLAHGADTPLTGYGSEQTLLQHSSKKFSLVSANGKYTRAAVTPFEQNSNNTRAEELSKMRSGSSDMLYLKPTNLSAELETNGTPLKNHSKNSSLLMDGKYNITSAALFPELDSSPLKPETPAMQAAIPRLKRVQEDQGVDANNQCPPLWAMNKKMKSAHCSIEKKDHDEMAGSARSKFEWLNSFAIRDANKRRPNDPLYDKSTLFIPPDALRKMSTSQKQYWNIKCKYMDVVLFFKVGKFYELYELDAEIGQKELDWKMTVSGVGKCRQVGISESGIDDAVDKLIARGYKVGRIEQMESANQAKARGVHSVIERKLVHVSTPSTAVDNIGTDAVHLLALKEVTLASSGFQVFGFAFLDYAALKIWVGSVQDDDSSAALGALLMQVSPRELIYETSGISKETQRTIRKYASAGSVKMQLTPLSGIDFSDAAQIRNLIHSKGFFNASTESWLSALDCTMNQDVVICALGGLIGHLTRLMLHDALKNGEVLPYHVYKTCLRMDGQTLVNLEIFSNNFNGGSSGTLYKHLNHCVTASGKRMLRRWICHPLKDIDAINKRLDVVEGFIQNCGLGPTTLGYLQKIPDLERLLGQVRSTVGLSSLLQLPFIGEKIIKKRSGPWYLGAL

SEQ ID NO: 171374 - protein, 1179 aa, Zea Mays
MPLTPRQTKHLLNYLSLAPYFAILNMLDSLLCRNQYDSQVRHSEGKNLPVENQVLSNECLGALFSRPIYGEHSRTILSPEGGADMSPSQEPQKHSLRSSTDESTRATKEVILEHPKKLFSESHTNCIHATALNENFGVQTPSQVASKKIFPGLAHGADTPLTGYGSEQTLLQHSSKKFSLVSANGKYTRAAVTPFEQNSNNTRAEELSKMRSGSSDMLYLKPTNLSAELETNGTPLKNHSKNSSLLMDGKYNITSAALFPELDSSPLKPETPAMQAAIPRLKRVQEDQGVDANNQCPPLWAMNKKMKSAHCSIEKKDHDEMAGSARSKFEWLNSFAIRDANKRRPNDPLYDKSTLFIPPDALRKMSTSQKQYWNIKCKYMDVVLFFKVLYELDAEIGQKELDWKMTVSGVGKCRQVGISESGIDDAVDKLIARGYKVGRIEQMESANQAKARGVHSVIERKLVHVSTPSTAVDNIGTDAVHLLALKEVTLASSGFQVFGFAFLDYAALKIWVGSVQDDDSSAALGALLMQVSPRELIYETSGISKETQRTIRKYASAGSVKMQLTPLSGIDFSDAAQIRNLIHSKGFFNASTESWLSALDCTMNQDVVICALGGLIGHLTRLMLHDALKNGEVLPYHVYKTCLRMDGQTLVNLEIFSNNFNGGSSGTLYKHLNHCVTASGKRMLRRWICHPLKDIDAINKRLDVVEGFIQNCGLGPTTLGYLQKIPDLERLLGQVRSTVGLSSLLQLPFIGEKIIKKRIKTFIMLINGLRNGIDLLNDLQRADHGILALYKIVDIPSLSYLPELIHKFEERMQNEFPCGQVSDVNANGANDLAALMDVFIGKASEWSLVINAVSTIDVLRSFAAMTLSSFGAMCRPQVLLKDDVPVLRMKGLWHPYAFAGNANSLVPNDLTLGQDLSGLNRFALLLTGPNMGGKSTIMRATCLAVVLAQLGCYVPCTSCELTLADSIFTRLGATDRIMTGESTFLVECTETASVLQKATVDSLVLLDELGRGTSTFDGYAIAYAVFRHLVERVRCRQLFATHYHSLTKEFASHPHVSLQHMACMFKPRSDGNGQKELTFLYRLTSGACPESYGLQVAAMAGIPKSIVEKASVAGQVMRAKIAGNFKSSEQRAEFSTLHEEWLRAALAVSAMDGQPDDDDVMDTLFCIQQELKSHFRKAR

SEQ ID NO: 171375 - protein, 320 aa, Zea Mays
MMLKNELKSMEALKDSIRSSEEALKTSRSEVSKLSKELEEANELNEDLVSQISKLREESNEMQVDLTNKLGEAESLSKALSEDLASVNEMVQKGQEELEATSIELASIAEARDNLKKELLDAYKNLESTTHELVEERKIVTALNKELEALAKQLQVDSEARKSLESDLEEATKSLDEMNNSALLLSKELESTHSRSATLESEKEMLRKALAEQTKITTEAKENTEDAQNLITRLETEKESFELRCRHLEEELALAKGEILRLRRQISTNSSQKPRARGPPEASETLKEQPVNDYNQKTSGVVAGTPQPVKRTVRRRKGGA

SEQ ID NO: 171376 - protein, 586 aa, Zea Mays
MESKLAENEAALSLMRDNYEKRLLEQQAAQKKQSMKFQEQEVSLSGQLASATKTLTSLSEEFRKEKKLAEELRDEIQRLESSITQAGIDNDVLETKLEEKLGEINFLQEKVSLLNQEIDDKEKHIRELSASLSSKEVDYQKLTAFTNQTKKSLELANSRVQQLEEELSTTKNALVSKISSIDSLNAKLETLNSEKEEADKKINELIQEYTDLKVASETRASHDSKLLSERDDLIKQLEEKLSVALTDSSKDQETIVELNKELDATKMMLKNELKSMEALKDSIRSSEEALKTSRSEVSKLSKELEEANELNEDLVSQISKLREESNEMQVDLTNKLGEAESLSKALSEDLASVNEMVQKGQEELEATSIELASIAEARDNLKKELLDAYKNLESTTHELVEERKIVTALNKELEALAKQLQVDSEARKSLESDLEEATKSLDEMNNSALLLSKELESTHSRSATLESEKEMLRKALAEQTKITTEAKENTEDAQNLITRLETEKESFELRCRHLEEELALAKGEILRLRRQISTNSSQKPRARGPPEASETLKEQPVNDYNQKTSGVVAGTPQPVKRTVRRRKGGA

SEQ ID NO: 171377 - protein, 198 aa, Zea Mays
MAVGGIFGSLLGGYALSNLPIHAIYIVFSVLPFFQLVSCMFVEDSPKGFHNASDEHKYVDNQSSVTVFSGKGSSEGTRRRKGTSKSNNRSPQAKRTESNEKHNGSINSLPCLSLRSAFFSLCTAFKQPNILRPMAWFFFSNVTIPNISTVMFYYQTEDLNLEASFLGTARVIGWFSLMLGTYTYNRYFKQKKLRNILV

SEQ ID NO: 171378 - protein, 153 aa, Zea Mays
MAVGGIFGSLLGGYALSNLPIHAIYIVFSVLPFFQLVSCMFVEDSPKGFHNASDEHKYVDNQSSVTVFSGKGSSEGTRRRKGTSKSNNRSPQAKRTESNEKHNGSINSLPCLSLRSAFFSLCTAFKQPNILRDCTCDWVVQSDAWHLHLQPLF

SEQ ID NO: 171379 - protein, 345 aa, Zea Mays
MRVWVKILTKGAPTLDLEFCGRDPSYRRIAVSCFVQAAYLLELDRQEGRAGEAALAPNWWKPFKYKLVRPLIDSRDGSIYGALLEWDQLAALADLIVAKPQGAPKVVLALRGTMLRQLTVVRDLEDDLRLFALESLRGSVRFTGALEVLKSAIHRHGSANVCVAGHSLGAGFALQVGRALAKDGTFVECHLFNPPSVSLGTGLRKIQEKASSVLKRYISRSGGGGSSSSSNVSPGPGEELQAAAARDGVGEEVMSREVKRWVPNLYVNSCDYICCFYADRSGVATVTEEKRSGMHSKLYVIAKGPSKFLEAHGLQQWWSDDSELHLAVHDSKLMYRHLKSLYVEQ

SEQ ID NO: 171380 - protein, 103 aa, Zea Mays
MQHVRSAPANPGYNFIDQPLKHNTWLQFSSRSNSFIFHKAESSPSGLFTTKSKVFVLLVINMNNCECRTDIHYDVDCTISSTHGHHVLLYVCTMTIQCKLKKT

SEQ ID NO: 171381 - protein, 85 aa, Zea Mays
MRAVVQRVLSASVEVEGRIVSAIGPGLLVLVGVHEADTDSDADYICRKVLNMRLFSNDKTGKAWDQSVMQRNFEVLLVSSPYTAS

SEQ ID NO: 171382 - protein, 251 aa, Zea Mays
MSVETERSSTESSGASGLDFEDTALTLTLRLPGSAPSAAAAAAASLSLSSSSSSAFPDPDRKRASSDADPGRSSPLAASSDAAPAPKARVVGWPPVRSYRKNALADAAGSSKAAKFVKVAVDGAPYLRKVDLQAYAGYDQLLRALQDKFFSHFTIIRRRREEAGGRGERDGVRTHVRGQGWRLDARRRRPLEDVRGNLPAPSSDERFRGRELGTKSRPMRHTPLGVGTHARTGVLKERGNSAGLDEDLHVR

SEQ ID NO: 171383 - protein, 245 aa, Zea Mays
MSVETERSSTESSGASGLDFEDTALTLTLRLPGSAPSAAAAAAASLSLSSSSSSAFPDPDRKRASSDADPGRSSPLAASSDAAPAPKARVVGWPPVRSYRKNALADAAGSSKAAKFVKVAVDGAPYLRKVDLQAYAGYDQLLRALQDKEVRRRREEAGGRGERDGVRTHVRGQGWRLDARRRRPLEDVRGNLPAPSSDERFRGRELGTKSRPMRHTPLGVGTHARTGVLKERGNSAGLDEDLHVR

SEQ ID NO: 171384 - protein, 276 aa, Zea Mays
MGNRPFIRKAVSNIFYRFVFETDHHNGIAELLEVFGSVISGFAKPLKEEHKLFLWKALIPLHKPKSMGVYLPQLTYCITQFIDKEPKLAGTVIRGLLKYWPVTNSQKEMMFLGELEEVLELTDMAEFQKCMVPLFRKIASCLNSSHFQVAERALFLWNNEHLFDMISQNRQVILPIIYPALERNTRWHWNQSVLNVTMNVRKMFRDMDERLLQACHDNFQEEEEKRAVTEERRRLMWEQLERSAARGYHQPTTIAADASSFPAPSSSARLVSLTVT

SEQ ID NO: 171385 - protein, 211 aa, Zea Mays
MGSFVKLARRAVETDAPVMVKIQELLRGAKDVMSLAQGVVYWQPPESAMAKVEKIIREPTLSKYGSDDGLPELREALFEKLRRENKLTKSSVMVTAGANQAFVNLVLTLCDAGDSVVMFAPYYFNAYMSFQMTGVTDILVGGSDPKTLHPDVDWLEKVLKENDPIPKLVTVVNPGNPSGAFIPRPMLEICAKTLVHGLWLTIPMNTLCMME

SEQ ID NO: 171386 - protein, 1426 aa, Zea Mays
MWAAEAAFSRSGSWREAEDEREALRWAALQRLPTVTRARRGLLRSPAPDGAAAVEGDDVLCEVDVAGLSSGDRTALVDRLVADSGDSEHFFRRIRSRFDAVQIEFPKIEVRYEDVTVDAYVHVGSRALPTIPNFICNMTEAFLRHLRIYRGGRVKLPILDNISGVIRPSRMTLLLGPPSSGKTTLLLALAGRLGPGLKMSGNITYNGHHLNEFVPQRTSAYVSQQDWHASEMTVRETLEFAGRCQGVGIKYDMLVELLRREKNAGIKPDEDLDVFMKALALEGKQTSLVAEYIMKILGLDVCADTIVGDEMIKGISGGQKKRLTTGELLVGSARVLFMDEISTGLDSATTYQIIKYLRNSTHALDGTTIISLLQPAPETYELFDDVILIAEGQIVYQGPREYAVDFFGAMGFRCPERKNVADFLQEVLSKKDQQQYWCHYDYPYQFVSVSKFAEAFKTFIIGKRLHQELTVPYNRHHNHPAALCTSSYGVKRLELLKSNYQWQRLLMKRNSFIYVFKFIQLLLVALITMTVFFRSTMHHDSVDDGIIYLGALYFAIVMILFNGFTEVSMLVTKLPVLYKHRDLHFYPPWAYTLPSWLLSIPTSLYESGMWVLVTYYVVGYDPQFTRFLGQFLLLFFLHQTSLALFRVMASLGRNMIVANTFGSFALLVVMILGGFIITKESIPVWWIWGYWVSPMMYAQNAISVNEFHGHSWNKQFANQNITMGEAILTGYGLFKEKYWFWIGVGALFGYAIILNILFTMFLTLLNPIGNLQAVVAKDQVRHRDSRRKNDRVALELRSYLHSNSLSGNLKEQKGMVLPFQPLSMCFRNINYYVDVPVELKKQGVAEDRLQLLVDVTGAFRPGILTALVGVSGAGKTTLMDVLAGRKTGGLIEGSITISGYPKNQETFTRISGYCEQNDVHSPCLTVIESLLYSACLRLPSHVDADTQRAFVEEVMELVELNPLSGALVGLPGVNGLSTEQRKRLTIAVELVANPSIVFMDEPTSGLDARSAAIVMRTVRNIVNTGRTIVCTIHQPSIDIFESFDELLFMKRGGQLIYAGPLGAKSRNLVDFFEAIPGVPKIRDGYNPAAWMLEVTSTQMEQILGVDFAEYYRQSKLFQQTREIVEALSRPSSESKELTFATKYAQPFCAQYMACLWKHNLSYWRNPQYTAVRFFYTVIISLMFGTICWKFGSRRGTQHDIFNAMGAMYAAVLFIGITNATSVQPVISIERFVSYRERAAGMYSALPFAFSLVTVEFPYILVQSLIYGSIFYSLGSFEWTAAKFLWYLFFMYFTLLYFTFYGMMTTAITPNHTIAPIIAAPFYTLWNLFCGFMIPRKRIPVWWRWYYWANPVSWTLYGLLTSQFGDLDQPLLMADGVTSTTVVAFLEEHFGFRHDFLGAVAAMVAGFCVLFAVVFALAIKYLNFQRR

SEQ ID NO: 171387 - protein, 529 aa, Zea Mays
MIKGISGGQKKRLTTGELLVGSARVLFMDEISTGLDSATTYQIIKYLRNSTHALDGTTIISLLQPAPETYELFDDVILIAEGQIVYQGPREYAVDFFGAMGFRCPERKNVADFLQEVLSKKDQQQYWCHYDYPYQFVSVSKFAEAFKTFIIGKRLHQELTVPYNRHHNHPAALCTSSYGVKRLELLKSNYQWQRLLMKRNSFIYVFKFIQLLLVALITMTVFFRSTMHHDSVDDGIIYLGALYFAIVMILFNGFTEVSMLVTKLPVLYKHRDLHFYPPWAYTLPSWLLSIPTSLYESGMWVLVTYYVVGYDPQFTRFLGQFLLLFFLHQTSLALFRVMASLGRNMIVANTFGSFALLVVMILGGFIITKESIPVWWIWGYWVSPMMYAQNAISVNEFHGHSWNKQFANQNITMGEAILTGYGLFKEKYWFWIGVGALFGYAIILNILFTMFLTLLNPIGNLQAVVAKDQVRHRDSRRKNDRVALELRSYLHSNSLSGNLKEQKGMVLPFQPLSMCFRNINYYVDVPVFC

SEQ ID NO: 171388 - protein, 822 aa, Zea Mays
MWAAEAAFSRSGSWREAEDEREALRWAALQRLPTVTRARRGLLRSPAPDGAAAVEGDDVLCEVDVAGLSSGDRTALVDRLVADSGDSEHFFRRIRSRFDAVQIEFPKIEVRYEDVTVDAYVHVGSRALPTIPNFICNMTEAFLRHLRIYRGGRVKLPILDNISGVIRPSRMTLLLGPPSSGKTTLLLALAGRLGPGLKMSGNITYNGHHLNEFVPQRTSAYVSQQDWHASEMTVRETLEFAGRCQGVGIKYDMLVELLRREKNAGIKPDEDLDVFMKALALEGKQTSLVAEYIMKILGLDVCADTIVGDEMIKGISGGQKKRLTTGELLVGSARVLFMDEISTGLDSATTYQIIKYLRNSTHALDGTTIISLLQPAPETYELFDDVILIAEGQIVYQGPREYAVDFFGAMGFRCPERKNVADFLQEVLSKKDQQQYWCHYDYPYQFVSVSKFAEAFKTFIIGKRLHQELTVPYNRHHNHPAALCTSSYGVKRLELLKSNYQWQRLLMKRNSFIYVFKFIQLLLVALITMTVFFRSTMHHDSVDDGIIYLGALYFAIVMILFNGFTEVSMLVTKLPVLYKHRDLHFYPPWAYTLPSWLLSIPTSLYESGMWVLVTYYVVGYDPQFTRFLGQFLLLFFLHQTSLALFRVMASLGRNMIVANTFGSFALLVVMILGGFIITKESIPVWWIWGYWVSPMMYAQNAISVNEFHGHSWNKQFANQNITMGEAILTGYGLFKEKYWFWIGVGALFGYAIILNILFTMFLTLLNPIGNLQAVVAKDQVRHRDSRRKNDRVALELRSYLHSNSLSGIKKARCSRRPPAAAC

SEQ ID NO: 171389 - protein, 209 aa, Zea Mays
MLAQARWKAPAITQIALAPAIALAPAIPLCARMEDGTRLTLSCPRGLSLPYHPRVMPLWPHTRGTVMTTVSPPPTQSLLRGCWISAAAREGAMEVAPMAGALVEGKLDPVVGRQDQIERVTQILGRRTKNNPCLIGEPGVGKTAIAEGLAQRIANWDVPETIEGKKSVGSMDEDDDSPASGSGRHKKKLRLIMGLHDGSAKPPTVASSS

SEQ ID NO: 171390 - protein, 257 aa, Zea Mays
MEVAPMAGALVEGKLDPVVGRQDQIERVTQILGRRTKNNPCLIGEPGVGKTAIAEGLAQRIANWDVPETIEGKKSVGSMDEDDDSPASGSGRHKKKLRLIMGLHDGSAKVQTGISLNTLGSLGYEIDHGWRQRIAVCHSKLGVVVNPTQQAAADAMPTQPRGVAVLSVMLFGWRTEFSGEKKYMWVRQGLIFPFLDYMNRFQGQTELSSCKPVDFRRAVEEAFLADQGFSEVVVHCSTKGIYAHTNVSQELFFSKHS

SEQ ID NO: 171391 - protein, 161 aa, Zea Mays
MLLVPLWQLGMILNETLRLYPPAVATVRRAKADVELGGCLIPRGTELLIPIMAVHHDARLWGPDATQFNPARFARGAAQAARHPTAFIPFGLGARMCIGQNLALLESKLTLAIVLQRFDFRLSPSYLHAPTVLMLLHPQYGAPVVFRPRPSEPSDRDSRDV

SEQ ID NO: 171392 - protein, 170 aa, Zea Mays
MSQYFASLKPGDVVEVKGPIEKLRYNPNMKKQIGMIAGGSGITPMLQVVRAILKNPNDNTQVSLIYANVSPDDILLKRELDRLASSYPNFKVFYTVDKPSTDWRGGVGFVSKDMVLKGLPGPAEDSLILVCGPPGMMNHISGDKAKDRSQGELSGVLKDLGYTAEMVYKF

SEQ ID NO: 171393 - protein, 132 aa, Zea Mays
MAAQEQEQEQEKQQAKTSTTSSLPSSSERSSSSARNNLTEGDSEEHDGAREQEVRRRRRRWRQGRRRRQEAPPRQELVRNERGSWFVPCSRSPDLTIAGVLLFLTTPSLFLLFSYCYPWVSSLASLMHCFNC

SEQ ID NO: 171394 - protein, 94 aa, Zea Mays
MPPKKASAPGASTLQPLDPNQDVLSLREARSQKRKAASPTPPEDDLDQEIQNLEILQQQVQRKKEKMARVAELQRQIDEASEEVRHLAQDEQHR

SEQ ID NO: 171395 - protein, 676 aa, Zea Mays
MTVLLGNKVEFKWTQKCQEAFEALKEKLTTTPVLVLPDVHKPFLVYCDACYTGLGCVLMQEGRVVAYSSRQLKVHEQNYPIHDLELAAVVHALKTWRHYLYGQKCDVYTDHKSLKYIFTQSELNMRQRRWLELIKDYELEIHYHLGKANVVADALSRKSQVNLMVARPMPYELAKEFDRLSVGFLNNSRGVTIELEPTLEREIKEAQKNDEKISEIRRLILDGRGKDFREGAEGVIWFKDRLCVPNVQSIRELILKEAHETAYSIHPGSEKMYQDLKKKFWWYGMKREIAEHVAMCDSCRRIKAEHQRPAGLLQPLQIPQWKWDEIGMDFIVGLPRTRAGYDSIWVVVDRLTKSAHFIPVKTNYSSAVLAELYMSRIVCLHGVPKKIVSDRGTQFTSHFWQQLHEALGTHLNFSSAYHPQTDGQTKRTNQILEDMLRACALQDQSGWDKKLPYAEFSYNNSYQTSLKMSPFQALYGRSCRTPLQWDQPREKQVFGPDVLLEAEENIKMVRKNLKIAQSRQRSYADTRRRELSFEVGDFVYLKVSPIRGVRRFGVKGKLAPRYIGPYQILARRGEVAYQLSLPEGLSAVHDVFHVSQLKKCLCVPEEQLPVEGLEVQEDLTYTEKPAQILETVDRVTRRKTIRMCKVRWSHHSKEEATWEREDDLMAKYPELFASKP

SEQ ID NO: 171396 - protein, 56 aa, Zea Mays
MYVCARIENDPVGEPKELAGEAPEQQSVGGGKCPLTYLCPIHSLIHLPHYTFIPKD

SEQ ID NO: 171397 - protein, 507 aa, Zea Mays
MSDLGMSTASDITKYKEYIVLATPPAKDQMEQFKKAHAQFLQATCQVVARLQQVDLAEFIAHEQTTDNHMTSTTTSPSIVDLEKLLHKQALVIQNVSQLTSSCQQVLASRNVTRNETANQQTQKDAHQQTSDLGTFCCCAYYGIPCRQISTNESETTKQKNRILFSSINRQMSPPEQIIADSLIPNALSVDELQSIPKRKHHKDAQPQEETQECYIDGWTITCTQFQPRRRIRSKKQKGKCGKSQEITSRKACYQCGLLGHYFRNCPEKSSLQITSEMKLSQSPDMEYEQKCTETSTNNVKTTPPCNSSSRACFGCGDTGHLVNGCPKKDVEINKVQKKRQHPQTQASTKNKQRKETTGKISYAVTGTIPYDDAVIFGTLVIHTTIATVLYDPCTTHSLISAQFATKYGIFKCPLRSSKTISAPEGKMLVNYICPKVSVKINGIDFPADLLVIESMEKDVILGRNWLQRTKAVIQHTERTMCLETPSGERIVVEDNRPPALKIGASD

SEQ ID NO: 171398 - protein, 95 aa, Zea Mays
MMSMLCNCCVRELLILARTWFAFGLPSKTVCDRYVRYMAEDRATLPRYPRTLPRPAGTICNGIPPKGGTEPSDPIEWVRAQQITCRYFWSAPLGH

SEQ ID NO: 171399 - protein, 89 aa, Zea Mays
MQQHEDVELSALGMAIATVVTVAEILKNNGFAVEKKIRTSTVEINDESRGRPFQKAKIEIILGKSDKFDELMAAAAEERGEVEDGEEQA

SEQ ID NO: 171400 - protein, 166 aa, Zea Mays
MAIAGQCSSCYYTSPTLQLHRRHSHLPRQPQAARRARRPRLQVAAAADSGPIRAATDAEFFQPSDTRPIMLFDGVCNLCNGGVRFVREHDPNRYSRAAQSSVKATAIQPLIGSSDGFATPTGASGTCRCRASPGGSSCRGQGGPLTTSPALFSSRKTGLSSSLKRC

SEQ ID NO: 171401 - protein, 527 aa, Zea Mays
MIKPSFLCSRLFKSTIQVVVRPVCCLVLQAGFSAPTPIQAQSWPIAMKGRDIVAVAKTGSGKTLGYLLPGFILLKRLHHNSREGPTVLVLSPTRELATQIQDEAIKFGRSSRISSTCLYGGAPKGPQLRELERGADVVVATPGRLNDILEMNKVSLRQVSYLVLDEADRMLDMGFEPQIRKIVKQIPPRRQTLMYTATWPKEVRKIASDLLNNPVQVNIGNTDQLVANKSITQHVEVIPHMEKSRRLDQILRSQDPGSKIIIFCSTKRMCDQLARNLSRQYGASAIHGDKSQAERDSVLNDFRSGRCPVLVATDVAARGLDIKDIRIVVNYDFPTGVEDYVHRIGRTGRAGATGSAYTFFGDQDSKYASELVKILEGANQSVPPQLKEMALRGGYGGRSRRWASSDDSYGSQGYGAKRSTDSFKNSSFGNQAGGGSSFHSSFHNSSSGNQFGDTTSFHASYGNSSQNNQTGDNPSFPPSSSNNQSGDGLSFHERFYGSRGRDESRSNNDGFRARSRSPGKPVEVSNW

SEQ ID NO: 171402 - protein, 651 aa, Zea Mays
MTSSASAPASNGPRYAPPDPTLPKPWRGLIDGNTGYLYFWNPETKVTQYERPVAAVPNSPPQPPGYSRPEERPRSSTPSERSSETTVSRPQYAPLSDNRARNDHSEAASGNQMSTEAYRAKHEITIIGNESPAPFMTFQSTCFPSDILREVLQAGFSAPTPIQAQSWPIAMKGRDIVAVAKTGSGKTLGYLLPGFILLKRLHHNSREGPTVLVLSPTRELATQIQDEAIKFGRSSRISSTCLYGGAPKGPQLRELERGADVVVATPGRLNDILEMNKVSLRQVSYLVLDEADRMLDMGFEPQIRKIVKQIPPRRQTLMYTATWPKEVRKIASDLLNNPVQVNIGNTDQLVANKSITQHVEVIPHMEKSRRLDQILRSQDPGSKIIIFCSTKRMCDQLARNLSRQYGASAIHGDKSQAERDSVLNDFRSGRCPVLVATDVAARGLDIKDIRIVVNYDFPTGVEDYVHRIGRTGRAGATGSAYTFFGDQDSKYASELVKILEGANQSVPPQLKEMALRGGYGGRSRRWASSDDSYGSQGYGAKRSTDSFKNSSFGNQAGGGSSFHSSFHNSSSGNQFGDTTSFHASYGNSSQNNQTGDNPSFPPSSSNNQSGDGLSFHERFYGSRGRDESRSNNDGFRARSRSPGKPVEVSNW

SEQ ID NO: 171403 - protein, 297 aa, Zea Mays
MLPIRYSKGGSASRILCTNSYPSSVMANCYEGELATQIQDEAIKFGRSSRISSTCLYGGAPKGPQLRELERGADVVVATPGRLNDILEMNKVSLRQVSYLVLDEADRMLDMGFEPQIRKIVKQIPPRRQTLMYTATWPKEVRKIASDLLNNPVQVNIGNTDQLVANKSITQHVEVIPHMEKSRRLDQILRSQDPGSKIIIFCSTKRMCDQLARNLSRQYGASAIHGDKSQAERDSVLNDFRSGRCPVLVATDVAARGLDIKDIRTMSIELGEQVGLAQQDLPTHSLVTRIQSTLQNL

SEQ ID NO: 171404 - protein, 420 aa, Zea Mays
MARAEKIRSGSTALATASTETPGRSTDHRRALYFAAFLVLADAALVALIVAFVPYTKIDWDAYMSQVDAFLEGERDYTKIEGDTGPLVYPAGFLYVYSAVKFLTGGRVFPAQLPWWALGLLCLSKRVHSIFVLRLFNDCFAMTLLHAAMVLIIYRKWYLGLVVFSGAVSIKMNVLLFAPSLLLLMVKAMSIKGVFFALLGAAVVQVLLGMPFLLSHPVEYISRAFNLGRVFIHFWSVNFKFVPEKVFVSKELAIALLILHLTTLMIFAHYKWLKHEGGLFGFLHSRFKNAKSIKQLVSSQPRPSSLSAEHIVTVMFVGNFIGVVCARSLHYQFYSWYFYSLPFLLWKTRYQTPLRIILFLVVECCWNVYPSTAYSSLLLLFVHLCILFGIWFSPAEYPYIISKGTKRTYQEVAKLDFPAK

SEQ ID NO: 171405 - protein, 249 aa, Zea Mays
MNVLLFAPSLLLLMVKAMSIKGVFFALLGAAVVQVLLGMPFLLSHPVEYISRAFNLGRVFIHFWSVNFKFVPEKVFVSKELAIALLILHLTTLMIFAHYKWLKHEGGLFGFLHSRFKNAKSIKQLVSSQPRPSSLSAEHIVTVMFVGNFIGVVCARSLHYQFYSWYFYSLPFLLWKTRYQTPLRIILFLVVECCWNVYPSTAYSSLLLLFVHLCILFGIWFSPAEYPYIISKGTKRTYQEVAKLDFPAK

SEQ ID NO: 171406 - protein, 244 aa, Zea Mays
MARAEKIRSGSTALATASTETPGRSTDHRRALYFAAFLVLADAALVALIVAFVPYTKIDWDAYMSQVDAFLEGERDYTKIEGDTGPLVYPAGFLYVYSAVKFLTGGRVFPAQILFGVLYIVNLSLTLLLYVKTEVLPWWALGLLCLSKRVHSIFVLRLFNDCFAMTLLHAAMVLIIYRKWYLGLVVFSGAVSIKMNVLLFAPSLLLLMVKAMSIKGVFFALLGAAVVQVLLGMPFLLSHPVCEL

SEQ ID NO: 171407 - protein, 312 aa, Zea Mays
MSLILPWWALGLLCLSKRVHSIFVLRLFNDCFAMTLLHAAMVLIIYRKWYLGLVVFSGAVSIKMNVLLFAPSLLLLMVKAMSIKGVFFALLGAAVVQVLLGMPFLLSHPVEYISRAFNLGRVFIHFWSVNFKFVPEKVFVSKELAIALLILHLTTLMIFAHYKWLKHEGGLFGFLHSRFKNAKSIKQLVSSQPRPSSLSAEHIVTVMFVGNFIGVVCARSLHYQFYSWYFYSLPFLLWKTRYQTPLRIILFLVVECCWNVYPSTAYSSLLLLFVHLCILFGIWFSPAEYPYIISKGTKRTYQEVAKLDFPAK

SEQ ID NO: 171408 - protein, 232 aa, Zea Mays
MSIKGVFFALLGAAVVQVLLGMPFLLSHPVEYISRAFNLGRVFIHFWSVNFKFVPEKVFVSKELAIALLILHLTTLMIFAHYKWLKHEGGLFGFLHSRFKNAKSIKQLVSSQPRPSSLSAEHIVTVMFVGNFIGVVCARSLHYQFYSWYFYSLPFLLWKTRYQTPLRIILFLVVECCWNVYPSTAYSSLLLLFVHLCILFGIWFSPAEYPYIISKGTKRTYQEVAKLDFPAK

SEQ ID NO: 171409 - protein, 211 aa, Zea Mays
MPFLLSHPVEYISRAFNLGRVFIHFWSVNFKFVPEKVFVSKELAIALLILHLTTLMIFAHYKWLKHEGGLFGFLHSRFKNAKSIKQLVSSQPRPSSLSAEHIVTVMFVGNFIGVVCARSLHYQFYSWYFYSLPFLLWKTRYQTPLRIILFLVVECCWNVYPSTAYSSLLLLFVHLCILFGIWFSPAEYPYIISKGTKRTYQEVAKLDFPAK

SEQ ID NO: 171410 - protein, 401 aa, Zea Mays
MRAREPRMWMGWCWVALAALLALILPPSNATLSPAGINYEVVALMAIKTELEDPYNVLDNWDINSVDPCSWRMVTCSSDGYVSALGLPSQSLSGKLSPGIGNLTRLQSVLLQNNVISGPIPSTIGRLGMLKTLDMSDNQLTGSIPGSLGNLKNLNYLKLNNNSLSGVLPDSIASIDGFALVDLSFNNLSGPLPKISARTFIIAGNPMICGNNSGDSCSSVSLDPLSYPPDDLKTQPQQGIGRSHHIATICGATVGSVAFVAVVVGMLLWWRHRRNQQIFFDVNDQYDPEVCLGHLKRYAFKELRAATNNFNSKNILGEGGYGIVYKGYLRDGSVVAVKRLKDYNAVGGEVQFQTEVEVISLAVHRNLLRLIGFCTTESERLLVYPYMPNGSVASQLRGKLA

SEQ ID NO: 171411 - protein, 343 aa, Zea Mays
MICGNNSGDSCSSVSLDPLSYPPDDLKTQPQQGIGRSHHIATICGATVGSVAFVAVVVGMLLWWRHRRNQQIFFDVNDQYDPEVCLGHLKRYAFKELRAATNNFNSKNILGEGGYGIVYKGYLRDGSVVAVKRLKDYNAVGGEVQFQTEVEVISLAVHRNLLRLIGFCTTESERLLVYPYMPNGSVASQLREHINGKPALDWPRRKRIALGTARGLLYLHEQCDPKIIHRDVKASNVLLDEYFEAIVGDFGLAKLLDHRESHVTTAVRGTVGHIAPEYLSTGQSSEKTDVFGFGVLLVELITGQKALDFGRVANQKGGVLDWVSMQLVFTLLVRFQVCFGTSK

SEQ ID NO: 171412 - protein, 88 aa, Zea Mays
MKECMQQDLQSDTDEETTKEHIATINQDKGKTTITSIGFLVFGLSLDFWLQLDLVHVFSRLPQLMKQRNYTCYLALGLMLPLSFLAVQ

SEQ ID NO: 171413 - protein, 437 aa, Zea Mays
MAPNLSKKTPAGLLGDEVAPVEGLKPSRFTLKGKDLAVDGHPVLLDVPANIRLTPASTLVPAADVPAAGGGSFLGFDAAAAESRHVVPVGKLRDIRFMSIFRFKVWWTTHWVGDSGRDVENETQMMVLDRSAGEPGGGGRPYVLLLPIIEGSFRACLEAGKVEDYVDLCVESGSSAVRGAAFRSSLYLHAGDDPFELVADAVRVVRAHLGTFRTMEEKTPPPIVDKFGWCTWDAFYLKVHPEGVWEGVRRLAEGGCPPGLVLIDDGWQSICHDEDDPNSGEEGMNRTSAGEQMPCRLIKFQENHKFREYKQGGMGAFVREMKAAFPTVEQVYVWHALCGYWGGLRPGAPGLPPAKVVAPKLSPGLQRTMEDLAVDKIVNNGVGLVDPKRAHELYDGLHSHLQASGIDGVKVDVIHCWRCCARSTAAVSSWPRPTSPG

SEQ ID NO: 171414 - protein, 180 aa, Zea Mays
MLFTVSKSTGHAGTRIGWALVKDRDVARKMAKFIELNTIGVSKDSQLRAAKVLRAVSDAYELPEAGDARRRRLFDYGRRKMVERWRMLRGAAAASGIFSLSEETSALCNFTKEMAVTNPAFAWLRCDREDVEDCAGFLRAHRILTRSGDQFGADPRYVRVSMLDRDDAYDIFVKRLSSLR

SEQ ID NO: 171415 - protein, 1794 aa, Zea Mays
MAMPSSTTAALSRLVDRTRVPDPTLQRHAVGAVFRHLLSLPAPLPAAAHDATSALLASPHPAVAAHAAASIARLTATRPDLLPSDVALPLLIAPLAASPSPLLASCLVKAVSALATCALRSGSRFPAHDHPFIQALASGADGARAELMRQAAGMVADRVDWVVKFLRPFVMFSVVRKGDAAFARDLIGALAAAAVAAGKASVAIPVLKMLQDSMLHFGRGDDQEVRLWLSSAECLVDAYVVLLRKLAHGQMPTYDAQASSATLMETLLSQYSFHQKFLGIDSTIFGLSKHLFLVQKDLGLCYIPEISVVLSSLSYSLTGLEFEHEQLAALKLLSFLIDWKYENVLDSKEQTHHVSVELLCVLAVINLTISPSKSVKAVAYHVLSRFSLFVLDLPASHSSEEQDISTSYHISKPALLLPKLLHHLWSKPSSSCFSFMKYIATKASPDSGQSDLEANYWTHQINAYLTALHREKHTLDVRSSKTTSVAISSLISSVASVLVMHPKLGTSAAESLAMLGTSDPRLGMPLFVVILFYSKILCSSGKFSAEISLSLLESLPSLAIHGFVLPLALQWISPMLKRDSNSVLYAMAVRLLCKIWAVTDWAFPNLQVVLDPENFSNFISDREISASIATSIRDVCKQNPDRGVDIILSVSFCIESRDSVVQALGLESLSYLCEADVVDFYTAWKVISKQVLDYYVEPAVAHSLCILLRCGAMDAEAYSVISGNLVRTLWRIGTSKKNNPDPLWDKARGTAFHSLSNYKVSLIQDAIPDFWKLNYEFFTNEHNLAVLKAMEHLQDEIIRYEHINRRRVTTDKRTAVHKFEKLLEVFPRAVFKGMLSHHQLPGAALLTLNFTPKDILNEGKPKDLPRVHSAFEQAFVEIAESMYVSRNIVVALLALQSWKSFVSNWMQAVVALLDTKDSSKLNKAMKAANDIFKILCDQVPVSTPQVVVNIALVIGALALIVPPTAHLVVSSVSDFLLKWLLQYEHEHKQWSAALSLGLIFNCFHPTDKKSRLQVINGFLEVISKTESCLVKGACGLALGYVCHGLLTRAHNAVDSEVEAITQLNERASVEDILHALVTLLIQLCPSSCYSLKKLSIYGISSMGGMEENIHSFSDDPWAVAGLVIGLGNSVVALYRLGAYEAVTEVKDVLISWIPNVDSNSALFDEIDSVSLCMGSCLALPSVVAFCQRVELLNDDLDALFNRYTSLASELLNLNKSGIIFQNLLMAICIGAGSFLSSILNDGVHAMEFNGVKGFLDTLRHIYTHPFPPLVHLGGMFGVVNAFGAGAGDLTGVFSKPMTSQIKHEDAKDKHIQDYAAWAISFLRSRWSKNQNQILYEDNGSNRSPDDHDQASSFSEQSLVWNLSLWLSDLKFEKSGDVVPISTVGTVLKCLSKAPRLPTTDWGAIVRRCIKAEAQISHKLTNQEDPKILKEACLYLTLAHAAHISPLLQFLDDLTDILRFQRLDINVQSILLKHLLHLMKLFSDSRLDKLHEDFTEYLYSPTSSYLNYSSEQKSMLRMSFWEGIYTCLVDVSEESGVFSFIEKCIQCLLPLLTLHSDGQPEFMKEWSVAILCLTNAQKKWLDDILQIRSTALVNEGHVDVAKKIILRARLCATGCGSTHELGNIKTAILCTKADGVWWSVLVEITSALNSAENIIKRQWLLDALDIGCVTAHPSTVLCFVGLLCGSCCIYMPLLLVNSINVLSDLPVTLPAFLSTIVSDDFRNSVADRLWLLTTDIYTWAEQLAHGHDQPGHDRIHRSETEIATFLANILLSTCITVEDYLSVDKRLKLANLEAL

SEQ ID NO: 171416 - protein, 614 aa, Zea Mays
MAMPSSTTAALSRLVDRTRVPDPTLQRHAVGAVFRHLLSLPAPLPAAAHDATSALLASPHPAVAAHAAASIARLTATRPDLLPSDVALPLLIAPLAASPSPLLASCLVKAVSALATCALRSGSRFPAHDHPFIQALASGADGARAELMRQAAGMVADRVDWVVKFLRPFVMFSVVRKGDAAFARDLIGALAAAAVAAGKASVAIPVLKMLQDSMLHFGRGDDQEVRLWLSSAECLVDAYVVLLRKLAHGQMPTYDAQASSATLMETLLSQYSFHQKFLGIDSTIFGLSKHLFLVQKDLGLCYIPEISVVLSSLSYSLTGLEFEHEQLAALKLLSFLIDWKYENVLDSKEQTHHVSVELLCVLAVINLTISPSKSVKAVAYHVLSRFSLFVLDLPASHSSEEQDISTSYHISKPALLLPKLLHHLWSKPSSSCFSFMKYIATKASPDSGQSDLEANYWTHQINAYLTALHREKHTLDVRSSKTTSVAISSLISSVASVLVMHPKLGTSAAESLAMLGTSDPRLGMPLFVVILFYSKILCSSGKFSAEISLSLLESLPSLAIHGFVLPLALQWISPMLKRDSNSVLYAMAVRLLCKIWAVTDWAFPNLQVRSGSGS

SEQ ID NO: 171417 - protein, 1020 aa, Zea Mays
MAMPSSTTAALSRLVDRTRVPDPTLQRHAVGAVFRHLLSLPAPLPAAAHDATSALLASPHPAVAAHAAASIARLTATRPDLLPSDVALPLLIAPLAASPSPLLASCLVKAVSALATCALRSGSRFPAHDHPFIQALASGADGARAELMRQAAGMVADRVDWVVKFLRPFVMFSVVRKGDAAFARDLIGALAAAAVAAGKASVAIPVLKMLQDSMLHFGRGDDQEVRLWLSSAECLVDAYVVLLRKLAHGQMPTYDAQASSATLMETLLSQYSFHQKFLGIDSTIFGLSKHLFLVQKDLGLCYIPEISVVLSSLSYSLTGLEFEHEQLAALKLLSFLIDWKYENVLDSKEQTHHVSVELLCVLAVINLTISPSKSVKAVAYHVLSRFSLFVLDLPASHSSEEQDISTSYHISKPALLLPKLLHHLWSKPSSSCFSFMKYIATKASPDSGQSDLEANYWTHQINAYLTALHREKHTLDVRSSKTTSVAISSLISSVASVLVMHPKLGTSAAESLAMLGTSDPRLGMPLFVVILFYSKILCSSGKFSAEISLSLLESLPSLAIHGFVLPLALQWISPMLKRDSNSVLYAMAVRLLCKIWAVTDWAFPNLQVVLDPENFSNFISDREISASIATSIRDVCKQNPDRGVDIILSVSFCIESRDSVVQALGLESLSYLCEADVVDFYTAWKVISKQVLDYYVEPAVAHSLCILLRCGAMDAEAYSVISGNLVRTLWRIGTSKKNNPDPLWDKARGTAFHSLSNYKVSLIQDAIPDFWKLNYEFFTNEHNLAVLKAMEHLQDEIIRYEHINRRRVTTDKRTAVHKFEKLLEVFPRAVFKGMLSHHQLPGAALLTLNFTPKDILNEGKPKDLPRVHSAFEQAFVEIAESMYVSRNIVVALLALQSWKSFVSNWMQAVVALLDTKDSSKLNKAMKAANDIFKILCDQVPVSTPQVVVNIALVIGALALIVPPTAHLVVSSVSDFLLKWLLQYEHEHKQWSAALSLGLIFNCFHPTDKKSRLQVINGFLE

SEQ ID NO: 171418 - protein, 656 aa, Zea Mays
MAMPSSTTAALSRLVDRTRVPDPTLQRHAVGAVFRHLLSLPAPLPAAAHDATSALLASPHPAVAAHAAASIARLTATRPDLLPSDVALPLLIAPLAASPSPLLASCLVKAVSALATCALRSGSRFPAHDHPFIQALASGADGARAELMRQAAGMVADRVDWVVKFLRPFVMFSVVRKGDAAFARDLIGALAAAAVAAGKASVAIPVLKMLQDSMLHFGRGDDQEVRLWLSSAECLVDAYVVLLRKLAHGQMPTYDAQASSATLMETLLSQYSFHQKFLGIDSTIFGLSKHLFLVQKDLGLCYIPEISVVLSSLSYSLTGLEFEHEQLAALKLLSFLIDWKYENVLDSKEQTHHVSVELLCVLAVINLTISPSKSVKAVAYHVLSRFSLFVLDLPASHSSEEQDISTSYHISKPALLLPKLLHHLWSKPSSSCFSFMKYIATKASPDSGQSDLEANYWTHQINAYLTALHREKHTLDVRSSKTTSVAISSLISSVASVLVMHPKLGTSAAESLAMLGTSDPRLGMPLFVVILFYSKILCSSGKFSAEISASLLSCYWVEALNTATYEAYDRCKQVLLCLMMKCRPLKVLLLSRPSPLVLVIAMVLLEMVEHEHGILQVPEMLLTSHYPPPPLRPALVIEGGVTHFCTTGPGVDNRWS

SEQ ID NO: 171419 - protein, 1824 aa, Zea Mays
MAMPSSTTAALSRLVDRTRVPDPTLQRHAVGAVFRHLLSLPAPLPAAAHDATSALLASPHPAVAAHAAASIARLTATRPDLLPSDVALPLLIAPLAASPSPLLASCLVKAVSALATCALRSGSRFPAHDHPFIQALASGADGARAELMRQAAGMVADRVDWVVKFLRPFVMFSVVRKGDAAFARDLIGALAAAAVAAGKASVAIPVLKMLQDSMLHFGRGDDQEVRLWLSSAECLVDAYVVLLRKLAHGQMPTYDAQASSATLMETLLSQYSFHQKFLGIDSTIFGLSKHLFLVQKDLGLCYIPEISVVLSSLSYSLTGLEFEHEQLAALKLLSFLIDWKYENVLDSKEQTHHVSVELLCVLAVINLTISPSKSVKAVAYHVLSRFSLFVLDLPASHSSEEQDISTSYHISKPALLLPKLLHHLWSKPSSSCFSFMKYIATKASPDSGQSDLEANYWTHQINAYLTALHREKHTLDVRSSKTTSAISSLISSVASVLVMHPKLGTSAAESLAMLGTSDPRLGMPLFVVILFYSKILCSSGKFSAEISLSLLESLPSLAIHGFVLPLALQWISPMLKRDSNSVLYAMAVRLLCKIWAVTDWAFPNLQVVLDPENFSNFISDREISASIATSIRDVCKQNPDRGVDIILSVSFCIESRDSVVQALGLESLSYLCEADVVDFYTAWKVISKQVLDYYVEPAVAHSLCILLRCGAMDAEAYSVISGNLVRTLWRIGTSKKNNPDPLWDKARGTAFHSLSNYKVSLIQDAIPDFWKLNYEFFTNEHNLAVLKAMEHLQDEIIRYEHINRRRVTTDKRTAVHKFEKLLEVFPRAVFKGMLSHHQLPGAALLTLNFTPKDILNEGKPKDLPRVHSAFEQAFVEIAESMYVSRNIVVALLALQSWKSFVSNWMQAVVALLDTKDSSKLNKAMKAANDIFKILCDQVPVSTPQVVVNIALVIGALALIVPPTAHLVVSSVSDFLLKWLLQYEHEHKQWSAALSLGLIFNCFHPTDKKSRLQVINGFLEVISKTESCLVKGACGLALGYVCHGLLTRAHNAVDSEVEAITQLNERASVEDILHALVTLLIQLCPSSCYSLKKLSIYGISSMGGMEENIHSFSDDPWAVAGLVIGLGNSVVALYRLGAYEAVTEVKDVLISWIPNVDSNSALFDEIDSVSLCMGSCLALPSVVAFCQRVELLNDDLDALFNRYTSLASELLNLNKSGIIFQNLLMAICIGAGSFLSSILNDGVHAMEFNGVKGFLDTLRHIYTHPFPPLVHLGGMFGVVNAFGAGAGDLTGVFSKPMTSQIKHEESSFVSGSLLTSPVGETLSTSMIQEIFLLAKDAKDKHIQDYAAWAISFLRSRWSKNQNQILYEDNGSNRSPDDHDQASSFSEQSLVWNLSLWLSDLKFEKSGDVVPISTVGTVLKCLSKAPRLPTTDWGAIVRRCIKAEAQISHKLTNQEDPKILKEACLYLTLAHAAHISPLLQFLDDLTDILRFQRLDINVQSILLKHLLHLMKLFSDSRLDKLHEDFTEYLYSPTSSYLNYSSEQKSMLRMSFWEGIYTCLVDVSEESGVFSFIEKCIQCLLPLLTLHSDGQPEFMKEWSVAILCLTNAQKKWLDDILQIRSTALVNEGHVDVAKKIILRARLCATGCGSTHELGNIKTAILCTKADGVWWSVLVEITSALNSAENIIKRQWLLDALDIGCVTAHPSTVLCFVGLLCGSCCIYMPLLLVNSINVLSDLPVTLPAFLSTIVSDDFRNSVADRLWLLTTDIYTWAEQLAHGHDQPGHDRIHRSETEIATFLANILLSTCITVEDYLSVDKRLKLANLEAL

SEQ ID NO: 171420 - protein, 1475 aa, Zea Mays
MPVNYYHCKVSYMCMAAVLDSKEQTHHVSVELLCVLAVINLTISPSKSVKAVAYHVLSRFSLFVLDLPASHSSEEQDISTSYHISKPALLLPKLLHHLWSKPSSSCFSFMKYIATKASPDSGQSDLEANYWTHQINAYLTALHREKHTLDVRSSKTTSVAISSLISSVASVLVMHPKLGTSAAESLAMLGTSDPRLGMPLFVVILFYSKILCSSGKFSAEISLSLLESLPSLAIHGFVLPLALQWISPMLKRDSNSVLYAMAVRLLCKIWAVTDWAFPNLQVVLDPENFSNFISDREISASIATSIRDVCKQNPDRGVDIILSVSFCIESRDSVVQALGLESLSYLCEADVVDFYTAWKVISKQVLDYYVEPAVAHSLCILLRCGAMDAEAYSVISGNLVRTLWRIGTSKKNNPDPLWDKARGTAFHSLSNYKVSLIQDAIPDFWKLNYEFFTNEHNLAVLKAMEHLQDEIIRYEHINRRRVTTDKRTAVHKFEKLLEVFPRAVFKGMLSHHQLPGAALLTLNFTPKDILNEGKPKDLPRVHSAFEQAFVEIAESMYVSRNIVVALLALQSWKSFVSNWMQAVVALLDTKDSSKLNKAMKAANDIFKILCDQVPVSTPQVVVNIALVIGALALIVPPTAHLVVSSVSDFLLKWLLQYEHEHKQWSAALSLGLIFNCFHPTDKKSRLQVINGFLEVISKTESCLVKGACGLALGYVCHGLLTRAHNAVDSEVEAITQLNERASVEDILHALVTLLIQLCPSSCYSLKKLSIYGISSMGGMEENIHSFSDDPWAVAGLVIGLGNSVVALYRLGAYEAVTEVKDVLISWIPNVDSNSALFDEIDSVSLCMGSCLALPSVVAFCQRVELLNDDLDALFNRYTSLASELLNLNKSGIIFQNLLMAICIGAGSFLSSILNDGVHAMEFNGVKGFLDTLRHIYTHPFPPLVHLGGMFGVVNAFGAGAGDLTGVFSKPMTSQIKHEEIFLLAKDAKDKHIQDYAAWAISFLRSRWSKNQNQILYEDNGSNRSPDDHDQASSFSEQSLVWNLSLWLSDLKFEKSGDVVPISTVGTVLKCLSKAPRLPTTDWGAIVRRCIKAEAQISHKLTNQEDPKILKEACLYLTLAHAAHISPLLQFLDDLTDILRFQRLDINVQSILLKHLLHLMKLFSDSRLDKLHEDFTEYLYSPTSSYLNYSSEQKSMLRMSFWEGIYTCLVDVSEESGVFSFIEKCIQCLLPLLTLHSDGQPEFMKEWSVAILCLTNAQKKWLDDILQIRSTALVNEGHVDVAKKIILRARLCATGCGSTHELGNIKTAILCTKADGVWWSVLVEITSALNSAENIIKRQWLLDALDIGCVTAHPSTVLCFVGLLCGSCCIYMPLLLVNSINVLSDLPVTLPAFLSTIVSDDFRNSVADRLWLLTTDIYTWAEQLAHGHDQPGHDRIHRSETEIATFLANILLSTCITVEDYLSVDKRLKLANLEAL

SEQ ID NO: 171421 - protein, 1060 aa, Zea Mays
MPVNYYHCKVSYMCMAAVLDSKEQTHHVSVELLCVLAVINLTISPSKSVKAVAYHVLSRFSLFVLDLPASHSSEEQDISTSYHISKPALLLPKLLHHLWSKPSSSCFSFMKYIATKASPDSGQSDLEANYWTHQINAYLTALHREKHTLDVRSSKTTSVAISSLISSVASVLVMHPKLGTSAAESLAMLGTSDPRLGMPLFVVILFYSKILCSSGKFSAEISLSLLESLPSLAIHGFVLPLALQWISPMLKRDSNSVLYAMAVRLLCKIWAVTDWAFPNLQVVLDPENFSNFISDREISASIATSIRDVCKQNPDRGVDIILSVSFCIESRDSVVQALGLESLSYLCEADVVDFYTAWKVISKQVLDYYVEPAVAHSLCILLRCGAMDAEAYSVISGNLVRTLWRIGTSKKNNPDPLWDKARGTAFHSLSNYKVSLIQDAIPDFWKLNYEFFTNEHNLAVLKAMEHLQDEIIRYEHINRRRVTTDKRTAVHKFEKLLEVFPRAVFKGMLSHHQLPGAALLTLNFTPKDILNEGKPKDLPRVHSAFEQAFVEIAESMYVSRNIVVALLALQSWKSFVSNWMQAVVALLDTKDSSKLNKAMKAANDIFKELCISIKNGIDPVLRKTGPESYTERTNNPDNDSPTQSPSRFIVAELNTRDEQLRLRETSRTWPKELDDTYIETPILCDQVPVSTPQVVVNIALVIGALALIVPPTAHLVVSSVSDFLLKWLLQYEHEHKQWSAALSLGLIFNCFHPTDKKSRLQVINGFLEVISKTESCLVKGACGLALGYVCHGLLTRAHNAVDSEVEAITQLNERASVEDILHALVTLLIQLCPSSCYSLKKLSIYGISSMGGMEENIHSFSDDPWAVAGLVIGLGNSVVALYRLGAYEAVTEVKDVLISWIPNVDSNSALFDEIDSVSLCMGSCLALPSVVAFCQRVELLNDDLDALFNRYTSLASELLNLNKSGIIFQNLLMAICIGAGSFLSSILNDGVHAMEFNGVKGFLDTLRHIYTHPFPPLVHLGGMFGVVNAFGAGAGDLTGVFSKPMTSQIKHEVSFIHLNT

SEQ ID NO: 171422 - protein, 1191 aa, Zea Mays
MAMPSSTTAALSRLVDRTRVPDPTLQRHAVGAVFRHLLSLPAPLPAAAHDATSALLASPHPAVAAHAAASIARLTATRPDLLPSDVALPLLIAPLAASPSPLLASCLVKAVSALATCALRSGSRFPAHDHPFIQALASGADGARAELMRQAAGMVADRVDWVVKFLRPFVMFSVVRKGDAAFARDLIGALAAAAVAAGKASVAIPVLKMLQDSMLHFGRGDDQEVRLWLSSAECLVDAYVVLLRKLAHGQMPTYDAQASSATLMETLLSQYSFHQKFLGIDSTIFGLSKHLFLVQKDLGLCYIPEISVVLSSLSYSLTGLEFEHEQLAALKLLSFLIDWKYENVLDSKEQTHHVSVELLCVLAVINLTISPSKSVKAVAYHVLSRFSLFVLDLPASHSSEEQDISTSYHISKPALLLPKLLHHLWSKLSLLESLPSLAIHGFVLPLALQWISPMLKRDSNSVLYAMAVRLLCKIWAVTDWAFPNLQVVLDPENFSNFISDREISASIATSIRDVCKQNPDRGVDIILSVSFCIESRDSVVQALGLESLSYLCEADVVDFYTAWKVISKQVLDYYVEPAVAHSLCILLRCGAMDAEAYSVISGNLVRTLWRIGTSKKNNPDPLWDKARGTAFHSLSNYKVSLIQDAIPDFWKLNYEFFTNEHNLAVLKAMEHLQDEIIRYEHINRRRVTTDKRTAVHKFEKLLEVFPRAVFKGMLSHHQLPGAALLTLNFTPKDILNEGKPKDLPRVHSAFEQAFVEIAESMYVSRNIVVALLALQSWKSFVSNWMQAVVALLDTKDSSKLNKAMKAANDIFKILCDQVPVSTPQVVVNIALVIGALALIVPPTAHLVVSSVSDFLLKWLLQYEHEHKQWSAALSLGLIFNCFHPTDKKSRLQVINGFLEVISKTESCLVKGACGLALGYVCHGLLTRAHNAVDSEVEAITQLNERASVEDILHALVTLLIQLCPSSCYSLKKLSIYGISSMGGMEENIHSFSDDPWAVAGLVIGLGNSVVALYRLGAYEAVTEVKDVLISWIPNVDSNSALFDEIDSVSLCMGSCLALPSVVAFCQRVELLNDDLDALFNRYTSLASELLNLNKSGIIFQNLLMAICIGAGSFLSSILNDGVHAMEFNGVKGFLDTLRHIYTHPFPPLVHLGGMFGVVNAFGAGAGDLTGVFSKPMTSQIKHEVSFIHLNT

SEQ ID NO: 171423 - protein, 1827 aa, Zea Mays
MAMPSSTTAALSRLVDRTRVPDPTLQRHAVGAVFRHLLSLPAPLPAAAHDATSALLASPHPAVAAHAAASIARLTATRPDLLPSDVALPLLIAPLAASPSPLLASCLVKAVSALATCALRSGSRFPAHDHPFIQALASGADGARAELMRQAAGMVADRVDWVVKFLRPFVMFSVVRKGDAAFARDLIGALAAAAVAAGKASVAIPVLKMLQDSMLHFGRGDDQEVRLWLSSAECLVDAYVVLLRKLAHGQMPTYDAQASSATLMETLLSQYSFHQKFLGIDSTIFGLSKHLFLVQKDLGLCYIPEISVVLSSLSYSLTGLEFEHEQLAALKLLSFLIDWKYENVLDSKEQTHHVSVELLCVLAVINLTISPSKSVKAVAYHVLSRFSLFVLDLPASHSSEEQDISTSYHISKPALLLPKLLHHLWSKPSSSCFSFMKYIATKASPDSGQSDLEANYWTHQINAYLTALHREKHTLDVRSSKTTSGRVAISSLISSVASVLVMHPKLGTSAAESLAMLGTSDPRLGMPLFVVILFYSKILCSSGKFSAEISLSLLESLPSLAIHGFVLPLALQWISPMLKRDSNSVLYAMAVRLLCKIWAVTDWAFPNLQVVLDPENFSNFISDREISASIATSIRDVCKQNPDRGVDIILSVSFCIESRDSVVQALGLESLSYLCEADVVDFYTAWKVISKQVLDYYVEPAVAHSLCILLRCGAMDAEAYSVISGNLVRTLWRIGTSKKNNPDPLWDKARGTAFHSLSNYKVSLIQDAIPDFWKLNYEFFTNEHNLAVLKAMEHLQDEIIRYEHINRRRVTTDKRTAVHKFEKLLEVFPRAVFKGMLSHHQLPGAALLTLNFTPKDILNEGKPKDLPRVHSAFEQAFVEIAESMYVSRNIVVALLALQSWKSFVSNWMQAVVALLDTKDSSKLNKAMKAANDIFKILCDQVPVSTPQVVVNIALVIGALALIVPPTAHLVVSSVSDFLLKWLLQYEHEHKQWSAALSLGLIFNCFHPTDKKSRLQVINGFLEVISKTESCLVKGACGLALGYVCHGLLTRAHNAVDSEVEAITQLNERASVEDILHALVTLLIQLCPSSCYSLKKLSIYGISSMGGMEENIHSFSDDPWAVAGLVIGLGNSVVALYRLGAYEAVTEVKDVLISWIPNVDSNSALFDEIDSVSLCMGSCLALPSVVAFCQRVELLNDDLDALFNRYTSLASELLNLNKSGIIFQNLLMAICIGAGSFLSSILNDGVHAMEFNGVKGFLDTLRHIYTHPFPPLVHLGGMFGVVNAFGAGAGDLTGVFSKPMTSQIKHEESSFVSGSLLTSPVGETLSTSMIQEIFLLAKDAKDKHIQDYAAWAISFLRSRWSKNQNQILYEDNGSNRSPDDHDQASSFSEQSLVWNLSLWLSDLKFEKSGDVVPISTVGTVLKCLSKAPRLPTTDWGAIVRRCIKAEAQISHKLTNQEDPKILKEACLYLTLAHAAHISPLLQFLDDLTDILRFQRLDINVQSILLKHLLHLMKLFSDSRLDKLHEDFTEYLYSPTSSYLNYSSEQKSMLRMSFWEGIYTCLVDVSEESGVFSFIEKCIQCLLPLLTLHSDGQPEFMKEWSVAILCLTNAQKKWLDDILQIRSTALVNEGHVDVAKKIILRARLCATGCGSTHELGNIKTAILCTKADGVWWSVLVEITSALNSAENIIKRQWLLDALDIGCVTAHPSTVLCFVGLLCGSCCIYMPLLLVNSINVLSDLPVTLPAFLSTIVSDDFRNSVADRLWLLTTDIYTWAEQLAHGHDQPGHDRIHRSETEIATFLANILLSTCITVEDYLSVDKRLKLANLEAL

SEQ ID NO: 171424 - protein, 1113 aa, Zea Mays
MDAEAYSVISGNLVRTLWRIGTSKKNNPDPLWDKARGTAFHSLSNYKVSLIQDAIPDFWKLNYEFFTNEHNLAVLKAMEHLQDEIIRYEHINRRRVTTDKRTAVHKFEKLLEVFPRAVFKGMLSHHQLPGAALLTLNFTPKDILNEGKPKDLPRVHSAFEQAFVEIAESMYVSRNIVVALLALQSWKSFVSNWMQAVVALLDTKDSSKLNKAMKAANDIFKILCDQVPVSTPQVVVNIALVIGALALIVPPTAHLVVSSVSDFLLKWLLQYEHEHKQWSAALSLGLIFNCFHPTDKKSRLQVINGFLEVISKTESCLVKGACGLALGYVCHGLLTRAHNAVDSEVEAITQLNERASVEDILHALVTLLIQLCPSSCYSLKKLSIYGISSMGGMEENIHSFSDDPWAVAGLVIGLGNSVVALYRLGAYEAVTEVKDVLISWIPNVDSNSALFDEIDSVSLCMGSCLALPSVVAFCQRVELLNDDLDALFNRYTSLASELLNLNKSGIIFQNLLMAICIGAGSFLSSILNDGVHAMEFNGVKGFLDTLRHIYTHPFPPLVHLGGMFGVVNAFGAGAGDLTGVFSKPMTSQIKHEESSFVSGSLLTSPVGETLSTSMIQEIFLLAKDAKDKHIQDYAAWAISFLRSRWSKNQNQILYEDNGSNRSPDDHDQASSFSEQSLVWNLSLWLSDLKFEKSGDVVPISTVGTVLKCLSKAPRLPTTDWGAIVRRCIKAEAQISHKLTNQEDPKILKEACLYLTLAHAAHISPLLQFLDDLTDILRFQRLDINVQSILLKHLLHLMKLFSDSRLDKLHEDFTEYLYSPTSSYLNYSSEQKSMLRMSFWEGIYTCLVDVSEESGVFSFIEKCIQCLLPLLTLHSDGQPEFMKEWSVAILCLTNAQKKWLDDILQIRSTALVNEGHVDVAKKIILRARLCATGCGSTHELGNIKTAILCTKADGVWWSVLVEITSALNSAENIIKRQWLLDALDIGCVTAHPSTVLCFVGLLCGSCCIYMPLLLVNSINVLSDLPVTLPAFLSTIVSDDFRNSVADRLWLLTTDIYTWAEQLAHGHDQPGHDRIHRSETEIATFLANILLSTCITVEDYLSVDKRLKLANLEAL

SEQ ID NO: 171425 - protein, 927 aa, Zea Mays
MAMPSSTTAALSRLVDRTRVPDPTLQRHAVGAVFRHLLSLPAPLPAAAHDATSALLASPHPAVAAHAAASIARLTATRPDLLPSDVALPLLIAPLAASPSPLLASCLVKAVSALATCALRSGSRFPAHDHPFIQALASGADGARAELMRQAAGMVADRVDWVVKFLRPFVMFSVVRKGDAAFARDLIGALAAAAVAAGKASVAIPVLKMLQDSMLHFGRGDDQEVRLWLSSAECLVDAYVVLLRKLAHGQMPTYDAQASSATLMETLLSQYSFHQKFLGIDSTIFGLSKHLFLVQKDLGLCYIPEISVVLSSLSYSLTGLEFEHEQLAALKLLSFLIDWKYENVLDSKEQTHHVSVELLCVLAVINLTISPSKSVKAVAYHVLSRFSLFVLDLPASHSSEEQDISTSYHISKPALLLPKLLHHLWSKPSSSCFSFMKYIATKASPDSGQSDLEANYWTHQINAYLTALHREKHTLDVRSSKTTSVAISSLISSVASVLVMHPKLGTSAAESLAMLGTSDPRLGMPLFVVILFYSKILCSSGKFSAEISILCDQVPVSTPQVVVNIALVIGALALIVPPTAHLVVSSVSDFLLKWLLQYEHEHKQWSAALSLGLIFNCFHPTDKKSRLQVINGFLEVISKTESCLVKGACGLALGYVCHGLLTRAHNAVDSEVEAITQLNERASVEDILHALVTLLIQLCPSSCYSLKKLSIYGISSMGGMEENIHSFSDDPWAVAGLVIGLGNSVVALYRLGAYEAVTEVKDVLISWIPNVDSNSALFDEIDSVSLCMGSCLALPSVVAFCQRVELLNDDLDALFNRYTSLASELLNLNKSGIIFQNLLMAICIGAGSFLSSILNDGVHAMEFNGVKGFLDTLRHIYTHPFPPLVHLGGMFGVVNAFGAGAGDLTGVFSKPMTSQIKHEVSFIHLNT

SEQ ID NO: 171426 - protein, 1251 aa, Zea Mays
MLKRDSNSVLYAMAVRLLCKIWAVTDWAFPNLQVVLDPENFSNFISDREISASIATSIRDVCKQNPDRGVDIILSVSFCIESRDSVVQALGLESLSYLCEADVVDFYTAWKVISKQVLDYYVEPAVAHSLCILLRCGAMDAEAYSVISGNLVRTLWRIGTSKKNNPDPLWDKARGTAFHSLSNYKVSLIQDAIPDFWKLNYEFFTNEHNLAVLKAMEHLQDEIIRYEHINRRRVTTDKRTAVHKFEKLLEVFPRAVFKGMLSHHQLPGAALLTLNFTPKDILNEGKPKDLPRVHSAFEQAFVEIAESMYVSRNIVVALLALQSWKSFVSNWMQAVVALLDTKDSSKLNKAMKAANDIFKILCDQVPVSTPQVVVNIALVIGALALIVPPTAHLVVSSVSDFLLKWLLQYEHEHKQWSAALSLGLIFNCFHPTDKKSRLQVINGFLEVISKTESCLVKGACGLALGYVCHGLLTRAHNAVDSEVEAITQLNERASVEDILHALVTLLIQLCPSSCYSLKKLSIYGISSMGGMEENIHSFSDDPWAVAGLVIGLGNSVVALYRLGAYEAVTEVKDVLISWIPNVDSNSALFDEIDSVSLCMGSCLALPSVVAFCQRVELLNDDLDALFNRYTSLASELLNLNKSGIIFQNLLMAICIGAGSFLSSILNDGVHAMEFNGVKGFLDTLRHIYTHPFPPLVHLGGMFGVVNAFGAGAGDLTGVFSKPMTSQIKHEESSFVSGSLLTSPVGETLSTSMIQEIFLLAKDAKDKHIQDYAAWAISFLRSRWSKNQNQILYEDNGSNRSPDDHDQASSFSEQSLVWNLSLWLSDLKFEKSGDVVPISTVGTVLKCLSKAPRLPTTDWGAIVRRCIKAEAQISHKLTNQEDPKILKEACLYLTLAHAAHISPLLQFLDDLTDILRFQRLDINVQSILLKHLLHLMKLFSDSRLDKLHEDFTEYLYSPTSSYLNYSSEQKSMLRMSFWEGIYTCLVDVSEESGVFSFIEKCIQCLLPLLTLHSDGQPEFMKEWSVAILCLTNAQKKWLDDILQIRSTALVNEGHVDVAKKIILRARLCATGCGSTHELGNIKTAILCTKADGVWWSVLVEITSALNSAENIIKRQWLLDALDIGCVTAHPSTVLCFVGLLCGSCCIYMPLLLVNSINVLSDLPVTLPAFLSTIVSDDFRNSVADRLWLLTTDIYTWAEQLAHGHDQPGHDRIHRSETEIATFLANILLSTCITVEDYLSVDKRLKLANLEAL

SEQ ID NO: 171427 - protein, 1825 aa, Zea Mays
MAMPSSTTAALSRLVDRTRVPDPTLQRHAVGAVFRHLLSLPAPLPAAAHDATSALLASPHPAVAAHAAASIARLTATRPDLLPSDVALPLLIAPLAASPSPLLASCLVKAVSALATCALRSGSRFPAHDHPFIQALASGADGARAELMRQAAGMVADRVDWVVKFLRPFVMFSVVRKGDAAFARDLIGALAAAAVAAGKASVAIPVLKMLQDSMLHFGRGDDQEVRLWLSSAECLVDAYVVLLRKLAHGQMPTYDAQASSATLMETLLSQYSFHQKFLGIDSTIFGLSKHLFLVQKDLGLCYIPEISVVLSSLSYSLTGLEFEHEQLAALKLLSFLIDWKYENVLDSKEQTHHVSVELLCVLAVINLTISPSKSVKAVAYHVLSRFSLFVLDLPASHSSEEQDISTSYHISKPALLLPKLLHHLWSKPSSSCFSFMKYIATKASPDSGQSDLEANYWTHQINAYLTALHREKHTLDVRSSKTTSVAISSLISSVASVLVMHPKLGTSAAESLAMLGTSDPRLGMPLFVVILFYSKILCSSGKFSAEISLSLLESLPSLAIHGFVLPLALQWISPMLKRDSNSVLYAMAVRLLCKIWAVTDWAFPNLQVVLDPENFSNFISDREISASIATSIRDVCKQNPDRGVDIILSVSFCIESRDSVVQALGLESLSYLCEADVVDFYTAWKVISKQVLDYYVEPAVAHSLCILLRCGAMDAEAYSVISGNLVRTLWRIGTSKKNNPDPLWDKARGTAFHSLSNYKVSLIQDAIPDFWKLNYEFFTNEHNLAVLKAMEHLQDEIIRYEHINRRRVTTDKRTAVHKFEKLLEVFPRAVFKGMLSHHQLPGAALLTLNFTPKDILNEGKPKDLPRVHSAFEQAFVEIAESMYVSRNIVVALLALQSWKSFVSNWMQAVVALLDTKDSSKLNKAMKAANDIFKILCDQVPVSTPQVVVNIALVIGALALIVPPTAHLVVSSVSDFLLKWLLQYEHEHKQWSAALSLGLIFNCFHPTDKKSRLQVINGFLEVISKTESCLVKGACGLALGYVCHGLLTRAHNAVDSEVEAITQLNERASVEDILHALVTLLIQLCPSSCYSLKKLSIYGISSMGGMEENIHSFSDDPWAVAGLVIGLGNSVVALYRLGAYEAVTEVKDVLISWIPNVDSNSALFDEIDSVSLCMGSCLALPSVVAFCQRVELLNDDLDALFNRYTSLASELLNLNKSGIIFQNLLMAICIGAGSFLSSILNDGVHAMEFNGVKGFLDTLRHIYTHPFPPLVHLGGMFGVVNAFGAGAGDLTGVFSKPMTSQIKHEESSFVSGSLLTSPVGETLSTSMIQEIFLLAKDAKDKHIQDYAAWAISFLRSRWSKNQNQILYEDNGSNRSPDDHDQASSFSEQSLVWNLSLWLSDLKFEKSGDVVPISTVGTVLKCLSKAPRLPTTDWGAIVRRCIKAEAQISHKLTNQEDPKILKEACLYLTLAHAAHISPLLQFLDDLTDILRFQRLDINVQSILLKHLLHLMKLFSDSRLDKLHEDFTEYLYSPTSSYLNYSSEQKSMLRMSFWEGIYTCLVDVSEESGVFSFIEKCIQCLLPLLTLHSDGQPEFMKEWSVAILCLTNAQKKWLDDILQIRSTALVNEGHVDVAKKIILRARLCATGCGSTHELGNIKTAILCTKADGVWWSVLVEITSALNSAENIIKRQWLLDALDIGCVTAHPSTVLCFVGLLCGSCCIYMPLLLVNSINVLSDLPVTLPAFLSTIVSDDFRNSVADRLWLLTTDIYTWAEQLAHGHDQPGHDRIHRSETEIATFLANILLSTCITVEDYLSVDKRLKLANLEAL

SEQ ID NO: 171428 - protein, 385 aa, Zea Mays
MAMPSSTTAALSRLVDRTRVPDPTLQRHAVGAVFRHLLSLPAPLPAAAHDATSALLASPHPAVAAHAAASIARLTATRPDLLPSDVALPLLIAPLAASPSPLLASCLVKAVSALATCALRSGSRFPAHDHPFIQALASGADGARAELMRQAAGMVADRVDWVVKFLRPFVMFSVVRKGDAAFARDLIGALAAAAVAAGKASVAIPVLKMLQDSMLHFGRGDDQEVRLWLSSAECLVDAYVVLLRKLAHGQMPTYDAQASSATLMETLLSQYSFHQKFLGIDSTIFGLSKHLFLVQKDLGLCYIPEISVVLSSLSYSLTGLEFEHEQLAALKLLSFLIDWKYENGTFPNIHNHKRSVNFQIQLLEGLGTWFSYFSNLKLLCFVSYQ

SEQ ID NO: 171429 - protein, 1040 aa, Zea Mays
MAMPSSTTAALSRLVDRTRVPDPTLQRHAVGAVFRHLLSLPAPLPAAAHDATSALLASPHPAVAAHAAASIARLTATRPDLLPSDVALPLLIAPLAASPSPLLASCLVKAVSALATCALRSGSRFPAHDHPFIQALASGADGARAELMRQAAGMVADRVDWVVKFLRPFVMFSVVRKGDAAFARDLIGALAAAAVAAGKASVAIPVLKMLQDSMLHFGRGDDQEVRLWLSSAECLVDAYVVLLRKLAHGQMICSGILLHGVILWCYYIISLPTYDAQASSATLMETLLSQYSFHQKFLGIDSTIFGLSKHLFLVQKDLGLCYIPEISVVLSSLSYSLTGLEFEHEQLAALKLLSFLIDWKYENVLDSKEQTHHVSVELLCVLAVINLTISPSKSVKAVAYHVLSRFSLFVLDLPASHSSEEQDISTSYHISKPALLLPKLLHHLWSKPSSSCFSFMKYIATKASPDSGQSDLEANYWTHQINAYLTALHREKHTLDVRSSKTTSVAISSLISSVASVLVMHPKLGTSAAESLAMLGTSDPRLGMPLFVVILFYSKILCSSGKFSAEISLSLLESLPSLAIHGFVLPLALQWISPMLKRDSNSVLYAMAVRLLCKIWAVTDWAFPNLQVVLDPENFSNFISDREISASIATSIRDVCKQNPDRGVDIILSVSFCIESRDSVVQALGLESLSYLCEADVVDFYTAWKVISKQVLDYYVEPAVAHSLCILLRCGAMDAEAYSVISGNLVRTLWRIGTSKKNNPDPLWDKARGTAFHSLSNYKVSLIQDAIPDFWKLNYEFFTNEHNLAVLKAMEHLQDEIIRYEHINRRRVTTDKRTAVHKFEKLLEVFPRAVFKGMLSHHQLPGAALLTLNFTPKDILNEGKPKDLPRVHSAFEQAFVEIAESMYVSRNIVVALLALQSWKSFVSNWMQAVVALLDTKDSSKLNKAMKAANDIFKILCDQVPVSTPQVVVNIALVIGALALIVPPTAHLVVSSVSDFLLKWLLQYEHEHKQWSAALSLGLIFNCFHPTDKKSRLQVINGFLE

SEQ ID NO: 171430 - protein, 796 aa, Zea Mays
MGVMRKPMTCCTSAAHWVYSRLGSPDELSHFLLSLLESLPSLAIHGFVLPLALQWISPMLKRDSNSVLYAMAVRLLCKIWAVTDWAFPNLQVVLDPENFSNFISDREISASIATSIRDVCKQNPDRGVDIILSVSFCIESRDSVVQALGLESLSYLCEADVVDFYTAWKVISKQVLDYYVEPAVAHSLCILLRCGAMDAEAYSVISGNLVRTLWRIGTSKKNNPDPLWDKARGTAFHSLSNYKVSLIQDAIPDFWKLNYEFFTNEHNLAVLKAMEHLQDEIIRYEHINRRRVTTDKRTAVHKFEKLLEVFPRAVFKGMLSHHQLPGAALLTLNFTPKDILNEGKPKDLPRVHSAFEQAFVEIAESMYVSRNIVVALLALQSWKSFVSNWMQAVVALLDTKDSSKLNKAMKAANDIFKILCDQVPVSTPQVVVNIALVIGALALIVPPTAHLVVSSVSDFLLKWLLQYEHEHKQWSAALSLGLIFNCFHPTDKKSRLQVINGFLEVISKTESCLVKGACGLALGYVCHGLLTRAHNAVDSEVEAITQLNERASVEDILHALVTLLIQLCPSSCYSLKKLSIYGISSMGGMEENIHSFSDDPWAVAGLVIGLGNSVVALYRLGAYEAVTEVKDVLISWIPNVDSNSALFDEIDSVSLCMGSCLALPSVVAFCQRVELLNDDLDALFNRYTSLASELLNLNKSGIIFQNLLMAICIGAGSFLSSILNDGVHAMEFNGVKGFLDTLRHIYTHPFPPLVHLGGMFGVVNAFGAGAGDLTGVFSKPMTSQIKHEVSFIHLNT

SEQ ID NO: 171431 - protein, 709 aa, Zea Mays
MGVMRKPMTCCTSAAHWVYSRLGSPDELSHFLLSLLESLPSLAIHGFVLPLALQWISPMLKRDSNSVLYAMAVRLLCKIWAVTDWAFPNLQVVLDPENFSNFISDREISASIATSIRDVCKQNPDRGVDIILSVSFCIESRDSVVQALGLESLSYLCEADVVDFYTAWKVISKQVLDYYVEPAVAHSLCILLRCGAMDAEAYSVISGNLVRTLWRIGTSKKNNPDPLWDKARGTAFHSLSNYKVSLIQDAIPDFWKLNYEFFTNEHNLAVLKAMEHLQDEIIRYEHINRRRVTTDKRTAVHKFEKLLEVFPRAVFKGMLSHHQLPGAALLTLNFTPKDILNEGKPKDLPRVHSAFEQAFVEIAESMYVSRNIVVALLALQSWKSFVSNWMQAVVALLDTKDSSKLNKAMKAANDIFKVISKTESCLVKGACGLALGYVCHGLLTRAHNAVDSEVEAITQLNERASVEDILHALVTLLIQLCPSSCYSLKKLSIYGISSMGGMEENIHSFSDDPWAVAGLVIGLGNSVVALYRLGAYEAVTEVKDVLISWIPNVDSNSALFDEIDSVSLCMGSCLALPSVVAFCQRVELLNDDLDALFNRYTSLASELLNLNKSGIIFQNLLMAICIGAGSFLSSILNDGVHAMEFNGVKGFLDTLRHIYTHPFPPLVHLGGMFGVVNAFGAGAGDLTGVFSKPMTSQIKHEVSFIHLNT

SEQ ID NO: 171432 - protein, 789 aa, Zea Mays
MGVMRKPMTCCTSAAHWVYSRLGSPDELSHFLLSLLESLPSLAIHGFVLPLALQWISPMLKRDSNSVLYAMAVRLLCKIWAVTDWAFPNLQVVLDPENFSNFISDREISASIATSIRDVCKQNPDRGVDIILSVSFCIESRDSVVQALGLESLSYLCEADVVDFYTAWKVISKQVLDYYVEPAVAHSLCILLRCGAMDAEAYSVISGNLVRTLWRIGTSKKNNPDPLWDKARGTAFHSLSNYKVSLIQDAIPDFWKLNYEFFTNEHNLAVLKAMEHLQDEIIRYEHINRRRVTTDKRTAVHKFEKLLEVFPRAVFKGMLSHHQLPGAALLTLNFTPKDILNEGKPKDLPRVHSAFEQAFVEIAESMYVSRNIVVALLALQSWKSFVSNWMQAVVALLDTKDSSKLNKAMKAANDIFKILCDQVPVSTPQVVVNIALVIGALALIVPPTAHLVVSSVSDFLLKWLLQYEHEHKQWSAALSLGLIFNCFHPTDKKSRLQVISKTESCLVKGACGLALGYVCHGLLTRAHNAVDSEVEAITQLNERASVEDILHALVTLLIQLCPSSCYSLKKLSIYGISSMGGMEENIHSFSDDPWAVAGLVIGLGNSVVALYRLGAYEAVTEVKDVLISWIPNVDSNSALFDEIDSVSLCMGSCLALPSVVAFCQRVELLNDDLDALFNRYTSLASELLNLNKSGIIFQNLLMAICIGAGSFLSSILNDGVHAMEFNGVKGFLDTLRHIYTHPFPPLVHLGGMFGVVNAFGAGAGDLTGVFSKPMTSQIKHEVSFIHLNT

SEQ ID NO: 171433 - protein, 1110 aa, Zea Mays
MEHLQDEIIRYEHINRRRVTTDKRTAVHKFEKLLEVFPRAVFKGMLSHHQLPGAALLTLNFTPKDILNEGKPKDLPRVHSAFEQAFVEIAESMYVSRNIVVALLALQSWKSFVSNWMQAVVALLDTKDSSKLNKAMKAANDIFKELCISIKNGIDPVLRKTGPESYTERTNNPDNDSPTQSPSRFIVAELNTRDEQLRLRETSRTWPKELDDTYIETPILCDQVPVSTPQVVVNIALVIGALALIVPPTAHLVVSSVSDFLLKWLLQYEHEHKQWSAALSLGLIFNCFHPTDKKSRLQVINGFLEVISKTESCLVKGACGLALGYVCHGLLTRAHNAVDSEVEAITQLNERASVEDILHALVTLLIQLCPSSCYSLKKLSIYGISSMGGMEENIHSFSDDPWAVAGLVIGLGNSVVALYRLGAYEAVTEVKDVLISWIPNVDSNSALFDEIDSVSLCMGSCLALPSVVAFCQRVELLNDDLDALFNRYTSLASELLNLNKSGIIFQNLLMAICIGAGSFLSSILNDGVHAMEFNGVKGFLDTLRHIYTHPFPPLVHLGGMFGVVNAFGAGAGDLTGVFSKPMTSQIKHEESSFVSGSLLTSPVGETLSTSMIQEIFLLAKDAKDKHIQDYAAWAISFLRSRWSKNQNQILYEDNGSNRSPDDHDQASSFSEQSLVWNLSLWLSDLKFEKSGDVVPISTVGTVLKCLSKAPRLPTTDWGAIVRRCIKAEAQISHKLTNQEDPKILKEACLYLTLAHAAHISPLLQFLDDLTDILRFQRLDINVQSILLKHLLHLMKLFSDSRLDKLHEDFTEYLYSPTSSYLNYSSEQKSMLRMSFWEGIYTCLVDVSEESGVFSFIEKCIQCLLPLLTLHSDGQPEFMKEWSVAILCLTNAQKKWLDDILQIRSTALVNEGHVDVAKKIILRARLCATGCGSTHELGNIKTAILCTKADGVWWSVLVEITSALNSAENIIKRQWLLDALDIGCVTAHPSTVLCFVGLLCGSCCIYMPLLLVNSINVLSDLPVTLPAFLSTIVSDDFRNSVADRLWLLTTDIYTWAEQLAHGHDQPGHDRIHRSETEIATFLANILLSTCITVEDYLSVDKRLKLANLEAL

SEQ ID NO: 171434 - protein, 509 aa, Zea Mays
MGVMRKPMTCCTSAAHWVYSRLGSPDELSHFLLSLLESLPSLAIHGFVLPLALQWISPMLKRDSNSVLYAMAVRLLCKIWAVTDWAFPNLQVVLDPENFSNFISDREISASIATSIRDVCKQNPDRGVDIILSVSFCIESRDSVVQALGLESLSYLCEADVVDFYTAWKVISKQVLDYYVEPAVAHSLCILLRCGAMDAEAYSVISGNLVRTLWRIGTSKKNNPDPLWDKARGTAFHSLSNYKVSLIQDAIPDFWKLNYEFFTNEHNLAVLKAMEHLQDEIIRYEHMLVYFCCLSSEFRCLVSLLTDEPCSHRNRRRVTTDKRTAVHKFEKLLEVFPRAVFKGMLSHHQLPGAALLTLNFTPKDILNEGKPKDLPRVHSAFEQAFVEIAESMYVSRNIVVALLALQSWKSFVSNWMQAVVALLDTKDSSKLNKAMKAANDIFKILCDQVPVSTPQVVVNIALVIGALALIVPPTAHLVVSSVSDFLLKWLLQYEHEHKQWLSQKLKAVL

SEQ ID NO: 171435 - protein, 724 aa, Zea Mays
MGGMEENIHSFSDDPWAVAGLVIGLGNSVVALYRLGAYEAVTEVKDVLISWIPNVDSNSALFDEIDSVSLCMGSCLALPSVVAFCQRVELLNDDLDALFNRYTSLASELLNLNKSGIIFQNLLMAICIGAGSFLSSILNDGVHAMEFNGVKGFLDTLRHIYTHPFPPLVHLGGMFGVVNAFGAGAGDLTGVFSKPMTSQIKHEESSFVSGSLLTSPVGETLSTSMIQEIFLLAKDAKDKHIQDYAAWAISFLRSRWSKNQNQILYEDNGSNRSPDDHDQASSFSEQSLVWNLSLWLSDLKFEKSGDVVPISTVGTVLKCLSKAPRLPTTDWGAIVRRCIKAEAQISHKLTNQEDPKILKEACLYLTLAHAAHISPLLQFLDDLTDILRFQRLDINVQSILLKHLLHLMKLFSDSRLDKLHEDFTEYLYSPTSSYLNYSSEQKSMLRMSFWEGIYTCLVDVSEESGVFSFIEKCIQCLLPLLTLHSDGQPEFMKEWSVAILCLTNAQKKWLDDILQIRSTALVNEGHVDVAKKIILRARLCATGCGSTHELGNIKTAILCTKADGVWWSVLVEITSALNSAENIIKRQWLLDALDIGCVTAHPSTVLCFVGLLCGSCCIYMPLLLVNSINVLSDLPVTLPAFLSTIVSDDFRNSVADRLWLLTTDIYTWAEQLAHGHDQPGHDRIHRSETEIATFLANILLSTCITVEDYLSVDKRLKLANLEAL

SEQ ID NO: 171436 - protein, 466 aa, Zea Mays
MGRQPLVIVANAELCKEVGIKKFKSMPNRSLPSAIANSPIHLKGLFSTRDSRWSALRNIIVSIYQPSHLAGLIPSMQSHIERAATNLDDGGEAEVAFSKLALSLATDVIGQAAFGADFGLTTKPAAPPPHHGPPRQHGEEDGDGSHSTRSSEFIKMHIHSTTSLKMDLSGSLSTIVGTLLPVLQWPLRQLLLRVPGAADREIQRVNGALCRMMDGIVADRVAARERAPQAQRQKDFLSVVLAARDSDAAARKLLTPDYLSALTYEHLLAGSATTAFTLSSVLYLVAQHPRVEEKLLREVDAFGPPDRVPTAEDLQSRFPYTDQVLKESMRFFMVSPLVARETSEQVDIAGYVLPKSTWVWMAPGVLAKDPVNFPEPELFRPERFDPAGDEQKRRHPYAFIPFGIGPRICIGQRFSIQEIKLALIHLYRQYVFRHSPSMESPLEFQFGVVLNFKHGVKLQSIKRHKC

SEQ ID NO: 171437 - protein, 177 aa, Zea Mays
MAVAFASSRRALHTLHRRLLLHPSPTPAAARRALPTSTRTPIPAHSPTFISSSSSSSSSRFFTTARTDATRLRHGVLPQRLAGGVRSVASGGSKLAPLGQGVKGLGRPMEAARSAAARYRAAVGLQVEAFWRRNYMILVGAGAVVVCVALWRIMFGIASTFVGLSEGMAKACMPGQG

SEQ ID NO: 171438 - protein, 204 aa, Zea Mays
MAVAFASSRRALHTLHRRLLLHPSPTPAAARRALPTSTRTPIPAHSPTFISSSSSSSSSRFFTTARTDATRLRHGVLPQRLAGGVRSVASGGSKLAPLGQGVKGLGRPMEAARSAAARYRAAVGLQVEAFWRRNYMILVGAGAVVVCVALWRIMFGIASTFVGLSEGMAKYGFLALATALVAFATTAYHVGKQIESLYPARWSY

SEQ ID NO: 171439 - protein, 235 aa, Zea Mays
MAVAFASSRRALHTLHRRLLLHPSPTPAAARRALPTSTRTPIPAHSPTFISSSSSSSSSRFFTTARTDATRLRHGVLPQRLAGGVRSVASGGSKLAPLGQGVKGLGRPMEAARSAAARYRAAVGLQVEAFWRRNYMILVGAGAVVVCVALWRIMFGIASTFVGLSEGMAKYGFLALATALVAFAGMYARARLTINPDKVYRLAMTKLNTSAAILEVMANGASSFSPSKDQKEGVL

SEQ ID NO: 171440 - protein, 105 aa, Zea Mays
MKLLAVDIPMASGPDQRLFVVGDEQEYKVGGGLISELRDPIVKAMAAEKEFDYLDEREDEEDERREREEAEQEEAEALRREEERLRQQAEERRRREEAESLEKAS

SEQ ID NO: 171441 - protein, 350 aa, Zea Mays
MEQNTAKPKRDVLLGSGGSSDISKKESDGSSSSSSDSDSEVDEASEENGNGISYISDERIAELEDELQEARQQIEALEVKNMHCQCEKLEESLKQVSNEKEDLVAAILASKNEVEDLKGDMVSAAKHFEAQLVHRDHEIEKCKQEAEQVSEKYFHEKSTLESEIQRLQEVVKSFEENLTKVADEKLQLEAQLKELEQTSNDLDDSSAEIIKLQEIIKDLQERLENDSNEKSVLEERAMELEQVRRQLEDSRAEASMELQTTIKNLNQVLQEKAELENRMKDAEQATSDLNSLVASLDGKLKATEAQLEQLHAERAEAILESEKQVSELNQAILRLLLQGHRRPRPMVMTA

SEQ ID NO: 171442 - protein, 259 aa, Zea Mays
MLSSVKMTKLAIIPCTVILETLFFRKKFSRNIKLSLSVLLLGVGVATVTDLQLNVMGSVLSLLAIITTCIAQIMTNTIQKKFKVSSTQLLYQSCPYQALTLFLVGPFLDGFLTNQNVFAFDYTTQVLFFIVLSCLISVSVNFSTFLVIGKTSPVTYQVLGHLKTCLVLTFGYVLLHDPFSWRNILGILIAVIGMVLYSYFCTRETQQKPAEASPQAVQAKEGESNPLISDSLSAAENGGSATDDEPLKVPMWSSKYSKA

SEQ ID NO: 171443 - protein, 173 aa, Zea Mays
MLITKYCLYVQMTKLAIIPCTVILETLFFRKKFSRNIKLSLSVLLLGVGVATVTDLQLNVMGSVLSLLAIITTCIAQIMTNTIQKKFKVSSTQLLYQSCPYQALTLFLVGPFLDGFLTNQNVFAFDYTTQVLAKEGESNPLISDSLSAAENGGSATDDEPLKVPMWSSKYSKA

SEQ ID NO: 171444 - protein, 426 aa, Zea Mays
MVGLQYDLVGNPLGAVRATFERTAAAAAAQSGGADPVAAFRGKDWGAGDLFRSFLFEQDGLGKVPVLDSSNLGLIKPNTLVRYRGMVQDMLGNEYYIGAFKDGSTWRTNKYTDFSPYSMPHPCDSHLWERHLFHCVPAPGQNSWTLESSPGPDVCRMSNCLAPELREKRKRDGDDDAMDVSENGHGNSSFCKKPEGDVHVSSSSTEVAGTIPEMNGGDHHIPGSSFSCLVKIYDMPDSQVKLNDVIEFIGVYTFDPELAAPSDNPDDIMLDLIEDVTVQLPPSKVPRLHCLVWRKLSFHDFISRPVVEPSPSLLRGIRQSLLSHLTLVLGNDELAAQCLLLHLLSRLRNRVDVVTVGRLSLNFTGFNRESASIFGNQLYSLIQKLVPYSQAIPLSIEYLNTATLQPRKDNKSGRSSAATSRHSSDL

SEQ ID NO: 171445 - protein, 266 aa, Zea Mays
MICASVKMSTEETAKKTEIDGSGSGGITKSEMMNEMRSMIQELMGLGLIGAKANTGTSELKLELVPNDVKLEGSKNYLSWSQRVCVLLGGKGVEHYLEETCVEPIDKLGAEWRIWHAANSVIVAWLLASMSPTVSKRVEAMRTASQIWKTLSNIYSRKGNVMVMMEIQSKADAVKQMGRPVEQYASELQHLWGELDHYAPLQMVCPHDAQMAHKWVEDRRVTHFLKNLDSEFESRRAAFCHQESLPTMDEVVSAMIDEESRLSSDE

SEQ ID NO: 171446 - protein, 302 aa, Zea Mays
MLSLPIAMLAEYLPLQMVSRVILLSTDRWAEKNVNPALFSRELMRNSSNFLNDEALQVSHDPQILLMKAHAATSSIGSATVIIAMLEKTGTLKIASVGDCGLKVIRKGQVMFSISPQEHYFDCPYQISSEAEGQTYKDALVCSVNLMEGDIIVSGSDGLFDNIFDQEIVSIISESPSVDEAAKALAELARKHSVDVRFDSPYSMEARSRGFDVPWWKKLLGGKLIGGKMDDITVVVAQVKTVVVPEDEVDLKKHTFLYKRNAISSFSLFFIDVNMCYFRFRVATQKNKRGMSRALQLWLHTK

SEQ ID NO: 171447 - protein, 591 aa, Zea Mays
MPNIARLNLSNNKLSVVDGEYNASWASIADFDTLCLASCNISKLPEALRHMDSFAVLDLSNNHIHGTLPQWAWDNWINSLILMNISHNQFSGGIGYGSVISANMFVFDISYNLFEGPIPIPGPQNQLFDCSNNQFSSMPFNFGSHLTGISLLMASGNNLSGEIPQSICEATSLMLLDLSNNNLLGSIPSCLMEDMSNLNVLNLKGNQLHGRLPNSLKQDCAFEALDFSDNQIEGQLPRSLVACKDLEVFDIGKNLINDAFPCWMSMLPKLQVLVLKSNMFTGDVGPSISEDQNSCELGKLRIIDLASNNFSGLLRNEWFTTMESMMTKDVNETLVMENQYDLLGKTYQFTTAITYKGSDISFSKILRTIVLIDVSNNAFCGPIPESIGDLVLLSGLNMSHNTLIGPIPSQLGMLHQLEALDLSSNKLSGEIPLELASLDFLSVLDLSYNLLQGRIPESSHFLTFSALSFLGNIGLCGFQVSKACNNMTPDVVLHQSNKVSIDIVLFLFTGLGFGVGFAIAIVLTWGISRSPFLPFQCTIAKDNVPSPICLTPLPNQPCHLKEDHPHLPIVEELEAPKLRCMSSSSEHIFSS

SEQ ID NO: 171448 - protein, 1899 aa, Zea Mays
MIVGVLGTRATLAPKLVQNLILFVARTAQHDAFESVDLPWLRVSVMALISLVQSQSVHVFPKKPLMVLKDIRDFSGILSVLSSEYNIEKFIRLYVESLIDYSIVDGTCHTHLIETIESLPMKNFIESVVCKILGNCIKVSRATGIPDINHTELWAKKIFKAIERKYPLELRDAIHKFLENSETNSPGGDSLAEVFGILFDENKNLPTEISDSNIWFSLDHPKATVRQSALSKVATSGIFNNRTLNPQKFINMQDAILRSLYDDDLSVVQAALSIEGLAAVANPDSLLKAYDCVLTKCIKIINKGGSKALKASDVAVSCLEKLVTEYQSHHMEHAKDIATLVFRLLIVHPKTLRVNIKALELAKKIRWEFYASSSLVYDGVDFDKMKNMSADSIASINMNNIKAFAETFLADPNKHVEWLANSGSGSRFSKTLFLLIVLQTLVSTEALDEQVNLCHACLPVLKDECHHIQPKDSDVGDEISITNLEMCSLELVKHFFNRDTEALNVRILVCIFWGIVRVQSSCIKQNPVVGSGGNTMLDDLFLFFLVSPAKNIFQKHLQYLVNCIGAPFQFISKYFLDEDLSERVQVESLLVFASICSKCASSDNNSLDESICVQLLLGFPSIILPLAHVNKDIRASAIKCIEGLSLVWQRLSTSVPRNGNNTKLPQCLSSPTFGSFLELLVNQKTMICSDAKFLPAYISSMLSPCKDILVPENLHERFDPHTKDTILTFILRSALRLPPYGKFMVLSVLKGVGSILFHAEDVKSLFFDLLDRRDQYQNRHNCKQILSTHEMHTLCLLLEVLFSTPDHVNIGFNMFEPLMKALKVDASSPGDSVVVMPCLTVLQNLQPGFFDNLKTDTKEKVVGRLISLVRTESFVVRNAARDALLRINVHSSTLVKFIELISTLGDARGHSKRIKRNEDRDLNVFCNFAEIFGENSVASILVSLLDILFLKKDVKQRSRLLQPLFQILSKLLSDQWVSVIVSQYNDQQDTSSEIPDLSSFVKEVQHLVLLALKDITDTLQSGHHDAMVSSSDVGLLIDCVRSIQDIGTRNHGFSLIASLGKACPQLVSESIVDLFVAIGDAIKQDDSHSQRVLEDLLSVLVPCWLSRTTSIEKLLQIFIKALADVPEHRRLTLMVYLLRTMGKENNLSTVIMHLLHSVVERISHSFSVHHGDDYRLAMSQEWEYGLAVNVLDQFSYKLWFPCLSKLLKNIRVHEKQDLHLMLHLAMRLILFKLQDTELNFELESEEAANSIQGSLGALMEEVILCGVYARDKKRDICTDITKEVRDFANTILKTITGWMRASTYLMGITLLLDHSDNHVKRKTLRILSETARGNSLVQKNQRKARKLKHISGTTIKVDKSSGPYFSKLCLKILELIDRVGDSDTKVKVAAISSLETLAKEYPSDNPVYSNCLATIIDQIGSDEAAVSSALIHTVGSLVNVIGSKALPQLPLIMKNIMLMSHQISCCPSGNYAHGSTRTAAELSNQDITVLLSALTTIEVIVEKLGEFVNPYLKEILDLVVLHPECSTQMHAKLDAKAARVRELLTVKVPVRLILSPLLNLYSLTANCGDASLTLAFSMLASLVGTMDRLAVGTYHSKIYEHCLAALDLRRQHPDSLKNINMVEQSIIHAIISLTMKLTEGTFRPLFLRTLEWAEAEVDESSSKKSLDRAIVFYKLVNKLAEKHRSLFTPYFKYLLEGSIQYLSEDDALGGSKHKKKKTKLVDVQVEQKDKLLGLKLWNLRALVLKSLHQCFLYDNDQKILDSSNFQVLLKPIVSQFVVEPPKSVESVLDAPSIEEVDETIILCLGQMAVTARTDVLWKPLNHEVLMQTRSDEVRPKMLGLKVIRYMVQHLKEEYVVLVPETIPFLGELLEDVELPVKTLSQEILKEMETLSGESLQQYL

SEQ ID NO: 171449 - protein, 1082 aa, Zea Mays
MSSIASQLKAIKSALGAAPEPARRPVTRPSVLFDAKEAADIDLRAILPIALSGLEHLTSVDERFAKYSNTLFRETSLEVNREQLTPKENDKLNKSISTYLRLLAGYLHLPSALKTLEYLIRRYLVHVYNSDELLLSALPYHDTHAFVRIVQLVNLGNSNWAFLGGVKSSGAPPPRSVLVQQCIRDKAVLETLCNYATPTKEFSHSKTVVCFCTAVIVECLGAVPKLDTDVVQRVLGFVFDSLNPAVTRDQEYKAGALMIVGVLGTRATLAPKLVQNLILFVARTAQHDAFESVDLPWLRVSVMALISLVQSQSVHVFPKKPLMVLKDIRDFSGILSVLSSEYNIEKFIRLYVESLIDYSIVDGTCHTHLIETIESLPMKNFIESVVCKILGNCIKVSRATGIPDINHTELWAKKIFKAIERKYPLELRDAIHKFLENSETNSPGGDSLAEVFGILFDENKNLPTEISDSNIWFSLDHPKATVRQSALSKVATSGIFNNRTLNPQKFINMQDAILRSLYDDDLSVVQAALSIEGLAAVANPDSLLKAYDCVLTKCIKIINKGGSKALKASDVAVSCLEKLVTEYQSHHMEHAKDIATLVFRLLIVHPKTLRVNIKALELAKKIRWEFYASSSLVYDGVDFDKMKNMSADSIASINMNNIKAFAETFLADPNKHVEWLANSGSGSRFSKTLFLLIVLQTLVSTEALDEQVNLCHACLPVLKDECHHIQPKDSDVGDEISITNLEMCSLELVKHFFNRDTEALNVRILVCIFWGIVRVQSSCIKQNPVVGSGGNTMLDDLFLFFLVSPAKNIFQKHLQYLVNCIGAPFQFISKYFLDEDLSERVQVESLLVFASICSKCASSDNNSLDESICVQLLLGFPSIILPLAHVNKDIRASAIKCIEGLSLVWQRLSTSVPRNGNNTKLPQCLSSPTFGSFLELLVNQKTMICSDAKFLPAYISSMLSPCKDILVPENLHERFDPHTKDTILTFILRSALRLPPYGKFMVLSVLKGVGSILFHAEDVKSLFFDLLDRRDQYQNRHNCKQILSTHEMHTLCLLLEVLFSTPDHVNIGFNMFEPLMKALKVS

SEQ ID NO: 171450 - protein, 1935 aa, Zea Mays
MSSIASQLKAIKSALGAAPEPARRPVTRPSVLFDAKEAADIDLRAILPIALSGLEHLTSVDERFAKYSNTLFRETSLEVNREQLTPKENDKLNKSISTYLRLLAGYLHLPSALKTLEYLIRRYLVHVYNSDELLLSALPYHDTHAFVRIVQLVNLGNSNWAFLGGVKSSGAPPPRSVLVQQCIRDKAVLETLCNYATPTKEFSHSKTVVCFCTAVIVECLGAVPKLDTDVVQRVLGFVFDSLNPAVTRDQEYKAGALMIVGVLGTRATLAPKLVQNLILFVARTAQHDAFESVDLPWLRVSVMALISLVQSQSVHVFPKKPLMVLKDIRDFSGILSVLSSEYNIEKFIRLYVESLIDYSIVDGTCHTHLIETIESLPMKNFIESVVCKILGNCIKVSRATGIPDINHTELWAKKIFKAIERKYPLELRDAIHKFLENSETNSPGGDSLAEVFGILFDENKNLPTEISDSNIWFSLDHPKATVRQSALSKVATSGIFNNRTLNPQKFINMQDAILRSLYDDDLSVVQAALSIEGLAAVANPDSLLKAYDCVLTKCIKIINKGGSKALKASDVAVSCLEKLVTEYQSHHMEHAKDIATLVFRLLIVHPKTLRVNIKALELAKKIRWEFYASSSLVYDGVDFDKMKNMSADSIASINMNNIKAFAETFLADPNKHVEWLANSGSGSRFSKTLFLLIVLQTLVSTEALDEQVNLCHACLPVLKDECHHIQPKDSDVGDEISITNLEMCSLELVKHFFNRDTEALNVRILVCIFWGIVRVQSSCIKQNPVVGSGGNTMLDDLFLFFLVSPAKNIFQKHLQYLVNCIGAPFQFISKYFLDEDLSERVQVESLLVFASICSKCASSDNNSLDESICVQLLLGFPSIILPLAHVNKDIRASAIKCIEGLSLVWQRLSTSVPRNGNNTKLPQCLSSPTFGSFLELLVNQKTMICSDAKFLPAYISSMLSPCKDILVPENLHERFDPHTKDTILTFILRSALRLPPYGKFMVLSVLKGVGSILFHAEDVKSLFFDLLDRRDQYQNRHNCKQILSTHEMHTLCLLLEVLFSTPDHVNIGFNMFEPLMKALKNLQPGFFDNLKTDTKEKVVGRLISLVRTESFVVRNAARDALLRINVHSSTLVKFIELISTLGDARGHSKRIKRNEDRDLNVFCNFAEIFGENSVASILVSLLDILFLKKDVKQRSRLLQPLFQILSKLLSDQWVSVIVSQYNDQQDTSSEIPDLSSFVKEVQHLVLLALKDITDTLQSGHHDAMVSSSDVGLLIDCVRSIQDIGTRNHGFSLIASLGKACPQLVSESIVDLFVAIGDAIKQDDSHSQRVLEDLLSVLVPCWLSRTTSIEKLLQIFIKALADVPEHRRLTLMVYLLRTMGKENNLSTVIMHLLHSVVERISHSFSVHHGDDYRLAMSQEWEYGLAVNVLDQFSYKLWFPCLSKLLKNIRVHEKQDLHLMLHLAMRLILFKLQDTELNFELESEEAANSIQGSLGALMEEVILCGVYARDKKRDICTDITKEVRDFANTILKTITGWMRASTYLMGITLLLDHSDNHVKRKTLRILSETARGNSLVQKNQRKARKLKHISGTTIKVDKSSGPYFSKLCLKILELIDRVGDSDTKVKVAAISSLETLAKEYPSDNPVYSNCLATIIDQIGSDEAAVSSALIHTVGSLVNVIGSKALPQLPLIMKNIMLMSHQISCCPSGNYAHGSTRTAAELSNQDITVLLSALTTIEVIVEKLGEFVNPYLKEILDLVVLHPECSTQMHAKLDAKAARVRELLTVKVPVRLILSPLLNLYSLTANCGDASLTLAFSMLASLVGTMDRLAVGTYHSKIYEHCLAALDLRRQHPDSLKNINMVEQSIIHAIISLTMKLTEGTFRPLFLRTLEWAEAEVDESSSKKSLDRAIVFYKLVNKLAEKHRFMFTENSIPKIKII

SEQ ID NO: 171451 - protein, 766 aa, Zea Mays
MVYLLRTMGKENNLSTVIMHLLHSVVERISHSFSVHHGDDYRLAMSQEWEYGLAVNVLDQFSYKLWFPCLSKLLKNIRVHEKQDLHLMLHLAMRLILFKLQDTELNFELESEEAANSIQGSLGALMEEVILCGVYARDKKRDICTDITKEVRDFANTILKTITGWMRASTYLMGITLLLDHSDNHVKRKTLRILSETARGNSLVQKNQRKARKLKHISGTTIKVDKSSGPYFSKLCLKILELIDRVGDSDTKVKVAAISSLETLAKEYPSDNPVYSNCLATIIDQIGSDEAAVSSALIHTVGSLVNVIGSKALPQLPLIMKNIMLMSHQISCCPSGNYAHGSTRTAAELSNQDITVLLSALTTIEVIVEKLGEFVNPYLKEILDLVVLHPECSTQMHAKLDAKAARVRELLTVKVPVRLILSPLLNLYSLTANCGDASLTLAFSMLASLVGTMDRLAVGTYHSKIYEHCLAALDLRRQHPDSLKNINMVEQSIIHAIISLTMKLTEGTFRPLFLRTLEWAEAEVDESSSKKSLDRAIVFYKLVNKLAEKHRSLFTPYFKYLLEGSIQYLSEDDALGGSKHKKKKTKLVDVQVEQKDKLLGLKLWNLRALVLKSLHQCFLYDNDQKILDSSNFQVLLKPIVSQFVVEPPKSVESVLDAPSIEEVDETIILCLGQMAVTARTDVLWKPLNHEVLMQTRSDEVRPKMLGLKVIRYMVQHLKEEYVVLVPETIPFLGELLEDVELPVKTLSQEILKEMETLSGESLQQYL

SEQ ID NO: 171452 - protein, 74 aa, Zea Mays
MMTGIIPKLCSRQPRLPLLWASIHETAQICLKALVNAFCLAVRLRVVGRAELQISASQSEQMTPKLACKDWITI

SEQ ID NO: 171453 - protein, 187 aa, Zea Mays
MVQNGDIVLNKVFVPDEDRLPGINSFQDISKVLAISRIMVAWQPVGISMGVFDMCHRYLKERKQFGVPLAAFQLNQEKLARMLGNVQSMVLVGWRLCKLYESGKMTPGHASLGKAWNSRTAREVVSLGRELLGGNGILADFLVAKAFCDLEPIYSYEGTYDINSLVTGREVTGIASFRPAAPAKARL

SEQ ID NO: 171454 - protein, 115 aa, Zea Mays
MLGPLFGSVPATCFQEPQQMQEGAGRWGWIHRPRKRAVPWRERILDRREREVVVCVEVGGARSYKWRELDDEVSVGIRVPALPPTPCGATVVALAARVEGGGGMVAPSREGEKRG

SEQ ID NO: 171455 - protein, 70 aa, Zea Mays
MATPLIAGLAIAATALAGRYGVQAWQAYKARPIVPRMRKFYEGGFQPTMNRREAALILGVRYSISCSSFQ

SEQ ID NO: 171456 - protein, 149 aa, Zea Mays
MAHISKRAGDDDVVGSKARLSPPRRNSPQPERSRDDQDNTDESTTSTIISLTRIREIGNDFPIQTICRTLGRCHTNIMLLALSSRLGTWRRRERRSMISTCQRDDFHLMTVMAVRLVRVETSAIQEPQQYVDKSMTTQRGERDNTRLNG

SEQ ID NO: 171457 - protein, 549 aa, Zea Mays
MNFRDIFLYSHALEGITLSMILEAPKEEEVSLLLEIFGICLTGGKEVNNAIVSSIQDLAKSFSNYHDEVLVKREELLQFTQSAISGLKRNADIVRIDSEALDLWKKLHEKEASRAQSIGDPDKVTEKTSTIESFKEALNEVRFCSRMEELLLKKKTINTGDSLEIHSQKVEKLKVLATSLANSSSKAEKRILDHRRQKEEALNFRAKKENEVIAVEKDLTAEISELEKQKDELEAQLKKVNISLNAAICRLKQTREERDQFHEANNQMIFTLQAKNDLSKSIDSCNMEASVVKTWVNFLEDTWQLQLSYNEQKETKTNDELERCTSSFLKLTKHHLSYFKEVLSPSIERIRTYVDNLAVLNSREESIEHEGDDEISVQTSPQKSLEEEYLETEKKIVIAFSIVDRMKKMFYSEQAANSRQDDAEVRTLFSEIEKLKEVFESVERPTLDIEVRKAKDPMKDKSGSNRSAKDKSESSHSPVQVPSSPKDVPVESPKSPVKPEQTMDPDSEFAKLELEFGKVNRDHEEIGGWDFDELEEELRADLSKSTNPK

SEQ ID NO: 171458 - protein, 472 aa, Zea Mays
MKSNFSCVCEQGWTSLIQYSEALDLWKKLHEKEASRAQSIGDPDKVTEKTSTIESFKEALNEVRFCSRMEELLLKKKTINTGDSLEIHSQKVEKLKVLATSLANSSSKAEKRILDHRRQKEEALNFRAKKENEVIAVEKDLTAEISELEKQKDELEAQLKKVNISLNAAICRLKQTREERDQFHEANNQMIFTLQAKENDLSKSIDSCNMEASVVKTWVNFLEDTWQLQLSYNEQKETKTNDELERCTSSFLKLTKHHLSYFKEVLSPSIERIRTYVDNLAVLNSREESIEHEGDDEISVQTSPQKSLEEEYLETEKKIVIAFSIVDRMKKMFYSEQAANSRQDDAEVRTLFSEIEKLKEVFESVERPTLDIEVRKAKDPMKDKSGSNRSAKDKSESSHSPVQVPSSPKDVPVESPKSPVKPEQTMDPDSEFAKLELEFGKVNRDHEEIGGWDFDELEEELRADLSKSTNPK

SEQ ID NO: 171459 - protein, 461 aa, Zea Mays
MDQPDTMIDSEALDLWKKLHEKEASRAQSIGDPDKVTEKTSTIESFKEALNEVRFCSRMEELLLKKKTINTGDSLEIHSQKVEKLKVLATSLANSSSKAEKRILDHRRQKEEALNFRAKKENEVIAVEKDLTAEISELEKQKDELEAQLKKVNISLNAAICRLKQTREERDQFHEANNQMIFTLQAKNDLSKSIDSCNMEASVVKTWVNFLEDTWQLQLSYNEQKETKTNDELERCTSSFLKLTKHHLSYFKEVLSPSIERIRTYVDNLAVLNSREESIEHEGDDEISVQTSPQKSLEEEYLETEKKIVIAFSIVDRMKKMFYSEQAANSRQDDAEVRTLFSEIEKLKEVFESVERPTLDIEVRKAKDPMKDKSGSNRSAKDKSESSHSPVQVPSSPKDVPVESPKSPVKPEQTMDPDSEFAKLELEFGKVNRDHEEIGGWDFDELEEELRADLSKSTNPK

SEQ ID NO: 171460 - protein, 283 aa, Zea Mays
MIFTLQAKENDLSKSIDSCNMEASVVKTWVNFLEDTWQLQLSYNEQKETKTNDELERCTSSFLKLTKHHLSYFKEVLSPSIERIRTYVDNLAVLNSREESIEHEGDDEISVQTSPQKSLEEEYLETEKKIVIAFSIVDRMKKMFYSEQAANSRQDDAEVRTLFSEIEKLKEVFESVERPTLDIEVRKAKDPMKDKSGSNRSAKDKSESSHSPVQVPSSPKDVPVESPKSPVKPEQTMDPDSEFAKLELEFGKVNRDHEEIGGWDFDELEEELRADLSKSTNPK

SEQ ID NO: 171461 - protein, 87 aa, Zea Mays
MLAQCILYLVSFLASSHSWRMQTPPSTLLVLLRCSHAHSSPSSTTSRPSTASPTIEEAAPSVVAAAESWLTELAKPLYPIRCSKFLC

SEQ ID NO: 171462 - protein, 290 aa, Zea Mays
MSGSTAPPHVVEDFLGVIQIFSDGSIVRGDESTIRPSGPCSDVPGVQWKDAVYEATRGLKVRVYKPPPTPGGGNQGKLPVLVYFHGGGYCGGAYDHPLLHSCCQRFAAELPAVVLSVQYRLAPEHRLPAAVEDGAAFFSWLRSQAQAQPAAPGAAAADPWLAESADFSRTFVSGGSAGANLAHHIVVRIASGQIALGAAVRVAGSGAWRCRWGPPGTTRWRTRSARAARAWNRCRCRRRSSWRPSATCCTATCGATPPGSGRWGSPWSSPSSRGKGMPSLSDRGAKRGMS

SEQ ID NO: 171463 - protein, 327 aa, Zea Mays
MEILEHWFVFSWIHQKHNWAWKLRGKRMSGHIHKSFRLTGQNCKLGIVANLLACNAWIDRLGKDGRYREAEKLFRGMADRGLDPNEVTYAILIHSLCKRGMMEDALCMFDRMREKGIRMTVYPYNSLINGYCKHNNFHQARGLLNEMVAKGLTPSPASYSPLIAGLCRKGDLASAMELHREMTRNAVSGNVYTFTALISGFCKDGNMDEATRLFHKMMESSLVPNEVTFNVMIEGYCRVGNIRKAFQLYDQMLDRGLTPDNYTYRSLISVVCLTLGAMKAKEFVADLENNCAVLNSFSLTALMHGFCKEGRLTETYQVWDDMRARGV

SEQ ID NO: 171464 - protein, 431 aa, Zea Mays
MVQVTVLPEYPEVYNIVNKLRVESVVAVEGVIRPRPVDAINADMRTGTIEVVAHHVLVLNSVTRSLPFPVTTSDTVKEKFPEEIRLRFRVLDLRRPQMQSNLRLRHNVVKLIRRYLEDEHEFVEIETPVLSKSTPEGARDYLVPSRVQPGTFYALPQSPQLFKQMLMVSGFEKYYQIARCFRDEDLRADRQPEFTQLDMEVAFTSMEDMLKLNEDLMRHVFQAVGDIKLPNPFPRLTYAEAMDRYGTDRPDLRFDWELKDVSDVFLGSSFKVFADTLESGGVIKALCVPGGATVFSNTDLKKGTVYTEASKAGAKGLPFLKVMENGELEGIGPLLSSLKPEKKDQLMELLDTKTGDLILFALGEQSSANQILGRLRLFIAHKLEVIDTSAHSVLWVTDFPMFQWNSDEQRYELFHHPSARSARSAFLNLGL

SEQ ID NO: 171465 - protein, 267 aa, Zea Mays
MLMVSGFEKYYQIARCFRDEDLRADRQPEFTQLDMEVAFTSMEDMLKLNEDLMRHVFQAVGDIKLPNPFPRLTYAEAMDRYGTDRPDLRFDWELKDVSDVFLGSSFKVFADTLESGGVIKALCVPGGATVFSNTDLKKGTVYTEASKAGAKGLPFLKVMENGELEGIGPLLSSLKPEKKDQLMELLDTKTGDLILFALGEQSSANQILGRLRLFIAHKLEVIDTSAHSVLWVTDFPMFQWNSDEQRYELFHHPSARSARSAFLNLGL

SEQ ID NO: 171466 - protein, 324 aa, Zea Mays
MLLNSYAATWRMNMNLLRLRLLFCPSLHLKVLGTILYHREFRGTFYALPQSPQLFKQMLMVSGFEKYYQIARCFRDEDLRADRQPEFTQLDMEVAFTSMEDMLKLNEDLMRHVFQAVGDIKLPNPFPRLTYAEAMDRYGTDRPDLRFDWELKDVSDVFLGSSFKVFADTLESGGVIKALCVPGGATVFSNTDLKKGTVYTEASKAGAKGLPFLKVMENGELEGIGPLLSSLKPEKKDQLMELLDTKTGDLILFALGEQSSANQILGRLRLFIAHKLEVIDTSAHSVLWVTDFPMFQWNSDEQRYELFHHPSARSARSAFLNLGL

SEQ ID NO: 171467 - protein, 362 aa, Zea Mays
MDFVEGLPKSEGYTTILVVVDRFSKYAHFFPLKHPFSAQQVAQVIVDNICKLHGMPLSFVSDRDKVFTSAFWKQLFTLMQTKLLMSTAYHPQTDGQTERVNQCLEMFLRCSVHASPSKWKAWLPLAEYWYNTSYHTSLGCSPFKVVYGYEPPVAAAPALDTSSETQVSEFLETRLRHMEMLKVQLAKAQNRMKQQADKLRTNRKFQVGELVLLKLQPYVQHSVVFRSCPKLSFRYFGPFKIVKVIGSVAYELELPDGAAIHPVFHVLQLKPFTPNYQPVFSELPTTLNLEQGELKPVKILDRRLVKKGNQAIVQVLIQWTTKKDEATSWQDWNVVAKMFPELNAWGHAQSEEGAGVAIPGDN

SEQ ID NO: 171468 - protein, 64 aa, Zea Mays
MGAPPHGGIAYGLDRLVMLLAGESSIRDVIAFPKTTTAQCALTKAPSAVEPQQLKDLAFPKPTS

SEQ ID NO: 171469 - protein, 240 aa, Zea Mays
MATTTAAAALSMKLLINKKAQRVLFAEASKEVVDFLFSLLALPVAKAVKLVGKDAMVGCVGNLYASVDKLDSTYLQAGAAKDALLCPTVVSPAANTRSSLLRLPEPSSVQPENLYRCTGNSYITDEYDKECPQCGYSMSMETVVHNYRPSARAARGQTVAQSAVGGFVQGIVTYTVLDDLTVTPMSAISSITLLNTFAVADLGDLEEKKGLAVLKASLQSKTVLTDVFIHGKAASSSARA

SEQ ID NO: 171470 - protein, 66 aa, Zea Mays
MSIMNSFINDIFEKLAGEAAKLARYNKKPTITSREIQTSVRLVLPGELAKHAVSEGTKAVTKFTSS

SEQ ID NO: 171471 - protein, 114 aa, Zea Mays
MWKFRGRKKGTMWRFLLVDATELAHKANTRFQFYVSYVKDFGKQVTEVAKLVPQQEAHQIQRDPGRLGLALSADITKHTGCLLGHHQATWPSPSSPHLRIWTHILLPIIHKKTY

SEQ ID NO: 171472 - protein, 132 aa, Zea Mays
MWKFRGRKKGTMWRFLLVDATELAHKANTRFQFYVSYVKDFGKQVTEVAKLVPQQEAHQIQRDPGRLGLALSADITKHTGCLLGHHQATWPSPSSPHLRLASRTGNSSSGIGSRASVHLITCYSLLVAVLPW

SEQ ID NO: 171473 - protein, 127 aa, Zea Mays
MTNSQRSSYQTTTKQHNRFQQGVPKQSKQHSDQSKAATLMAYRRAKGLCYKCGLRWSQTHKCSTTVPLHMVEELWQLVDSVDEQQSLQDESNQDLMVLSVNAVLGTEALETVILLATIFTKKILRQS

SEQ ID NO: 171474 - protein, 89 aa, Zea Mays
MMTQFDISNTTHPNYRNKQAMICFSKSICVATYIYIWMINNLEIVSRLYISSYLVFVPVKKKHQYYVISIPLYIYNISSFYIGIFSRIV

SEQ ID NO: 171475 - protein, 120 aa, Zea Mays
MFSFRLRTRICRDKKGVPSMTATNWGMKWDITPPTRIRQAMEMQAEVERRKCAQVLESEGKKQAQILELEGKKTAQIFESEAQSGGSQCQDNQHEASSQKIAYNKHGKSMDSYVEVVEVE

SEQ ID NO: 171476 - protein, 199 aa, Zea Mays
MWQQEDDAEMMKNKRTATLGDVVASARVDSWNTHGASIGVSATLKELKPYGFSVGLFEWVIKRGRQLWWRISDQELHKEWGQMEELLKGINHLNDADHFALMNERLFSIVEAFVNFVHKFHSLATLCKASTSFISEGLHQNDRFRAHSKYKQNPSYVQDHGKLQCSHSRALASVTLTISSICQQQGSYIEQGAQSAKGS

SEQ ID NO: 171477 - protein, 160 aa, Zea Mays
MLFPADLRRRMRPPLPSHYFGNAVFRLCATGRAGDIGTVALGSVAARIKGAIDRMDDELVRSAIDYYEYETAEVNKRRTPTGTLPQTDLNITSWLGRSQYDADFGWGTPQFMSRADSDRGGFVHLINDEGGGTATGDVRVLVTVGAENIKELGRLLYAKL

SEQ ID NO: 171478 - protein, 79 aa, Zea Mays
MSSIQALFLVTFTFSRRLEEQLSHICTRTITILSTQAYQAISICTSKEPLIQMHTQKSNQMSNKLQKEARHRHQQCAFS

SEQ ID NO: 171479 - protein, 178 aa, Zea Mays
MVIYIRTEDKMAALPLATAEACDANAALIMNGDLRSLQPIFRIYGGRQIFAGPVVTLKIFEDNVLLREFLEEKGHGRVLVVDAGGSMRCAVLGGNLAQLMQNNGWAGIVVNGCIRDVDEINGCDVGVRALNSHPMKSNKKGVGEKHVPVTFAGTRICDGEWLYADSDGILISRSELSV

SEQ ID NO: 171480 - protein, 163 aa, Zea Mays
MQLALGFLMFAVGVNSSAKDLIETIKKPRCYCCGLYRTVCQARHRRRPFHHHGLHGFGRINGLVARVPSRNVGKIDEASELRRTVSDIKHNVQTQLSENAKTNKRVTGIRKELQKLHREAIQNTINSVTMVATLIASIAFVVIFNLPGQYFQDVNSGGDIDCE

SEQ ID NO: 171481 - protein, 63 aa, Zea Mays
MCPSWCGVIKKAFHLSNSRSLKCYLIPLLPRYTALLSLFCTSLDALFCFPPPLYFLSLTSQRS

SEQ ID NO: 171482 - protein, 66 aa, Zea Mays
MAQPHSSAAGGRQLLPAVEECVGADKLQLPVPLPLTDHLPRAIGHDSDAKGMFFGHLICKADITQI

SEQ ID NO: 171483 - protein, 78 aa, Zea Mays
MAQPHSSAAGGRQLLPAVEECVGADKLQLPVPLPLTGTDGIIWDVFGSLVQSESGSVRGPDLREPACTEPTNNVWLSA

SEQ ID NO: 171484 - protein, 71 aa, Zea Mays
MASKNATWCRRSKSRFPISGGRQPRAPGRRRRQRRRGAPRSEKATRTQPIAQLCAKLFFFLAPLRREHFRR

SEQ ID NO: 171485 - protein, 676 aa, Zea Mays
MAQLLHHQDSAFYSKELHGCRWGILQFFGFRRRLRSTKMLSDKRHGQEKNSRGSRRRSSSYAPLKNEDSAILDDEENTEVTKKQKASKRNSGKSSLRSLILTKLYGKEGQKEKMLPVAPKLLRTISIHYLESNEYVLDGESTSSGDGSSNSTKPPMQNAGDMMNLHHATSSVPDGCGVDSSSSLLLKIDDVRTKRKKSHRSISMDGILHKVPYGKKVSGDVISEGLPRSASATYDRDGAKPYFGGAAAKRHANQGFRRSRSLSESWENYSRLLDSISSGESKRTLASSKSTRDHSLDGPVASTSLQRTSEALRSQGLGKRDENLVTAEDALAPHVQEKTGEVAKGQSSSDTMVAGGSENPALPDEHVDDKAEENTCAAPSPSEAVGISEEQAVSRDGNSQTPSPEVGIPEEHSAEAYDDGDGQIHSSTQAADAYAALSSEETTVSEERTPVSHGNQTHPFHTSEPTEGTLLDLDPRVVHSNDADASTGIAAVEQESGFDGLQVDPRHETEFRYVKEIFRKSSFSTETLFDEWCSQNISVLQEADCQHYEAAAASYDLSADMSAEQLLLFDLTNEGLLDIYRRHSVSRSRLSWFSSFDRPRPVGSRALGELWSGLSLRLDGRRPRASVHVDAVLSSDLAKSDPWTDFPRGAERLGSRLADSVFDELLSELVQQLAEL

SEQ ID NO: 171486 - protein, 216 aa, Zea Mays
MQVVVSPPYVFLPVVKSQLRQEFHVAAQNCWVKKGGAFTGEVSAEMLVNLGVPWVILGHSERRALLGESNEFVGDKVAYALSQGLKVIACVGETLEQREAGSTMDVVAAQTKAIAEKIKDWSNVVVAYEPVWAIGTGKVATPAQAQEVHASLRDWLKTNASPEVAESTRIIYGGSVTAANCKELAAQPDVDGFLVGGASLKPEFIDIINAATVKSA

SEQ ID NO: 171487 - protein, 213 aa, Zea Mays
MGRKFFVGGNWKCNGTTDQVEKIVKTLNEGQVPPSDVVEVVVSPPYVFLPVVKSQLRQEFHVAAQNCWVKKGGAFTGEVSAEMLVNLGVPWVILGHSERRALLGESNEFVGDKVAYALSQGLKVIACVGETLEQREAGSTMDVVAAQTKAIAEKIKDWSNVVVAYEPVWAIGTGKVATPAQAQEVHASLRDWLKTNASPEVAESTRISSTRPP

SEQ ID NO: 171488 - protein, 216 aa, Zea Mays
MGRKFFVGGNWKCNGTTDQVEKIVKTLNEGQVPPSDVVEVVVSPPYVFLPVVKSQLRQEFHVAAQNCWVKKGGAFTGEVSAEMLVNLGVPWVILGHSERRALLGESNEFVGDKVAYALSQGLKVIACVGETLEQREAGSTMDVVAAQTKAIAEKIKDWSNVVVAYEPVWAIGTGKVATPAQAQEVHASLRDWLKTNASPEVAESTRIINAATVKSA

SEQ ID NO: 171489 - protein, 605 aa, Zea Mays
MSSPTPLRPAGGGSYYPLHRRRGRPGPGPGAGLRRPRVRRCKMKLMYFLMDRDEQREKRLELEFEVSELETVLEKEQQLGRVLQCSLQGRVVCHCCLSALVPTNVRGLLAELAVVEDEIFYLEKKVDDLRLRLRREQKWTDHCILHHQQQQQQHNRQQRHSVSVSRRELQLQQAGAQQLPRLPCPGPGSDEAPERESKASVGSASAKGDETEHVVGRRSSHCHSSSSSSENPYRPTPPERKTYCMASSPNRLSEELVRLTVTIFHKLNKTATATAADAGELDLELEPSGGGASSSKLNISCIGPRSLVPRVSASVNGAAAAMSPLKSRRAAAKGGGAETGSAAGCQRRFVEFTRGSVDVSRISLCLVDIKNLRGLMQKLCAVDPSLMTNKQKLAFWINVYNFCVMHAFLQHGLPPSPEKLLALLNQASVNVGGTVLNVVSIEHLILRHSPDAKQGIMGDDGQTDLLHSYGLGYPEPNVVFALCRGSRSSPALRVYTAEDVSNELERAKVEYLESSVRVAGRKQRAVVVPKLLHWHMRDFADDAASLLEWVHSQLPRASGPLRRAIREVLGANMGSGSRAPTPAPAAKMLEVEPYDADFCYLLPVW

SEQ ID NO: 171490 - protein, 555 aa, Zea Mays
MKLMYFLMDRDEQREKRLELEFEVSELETVLEKEQQLGRVLQCSLQGRVVCHCCLSALVPTNVRGLLAELAVVEDEIFYLEKKVDDLRLRLRREQKWTDHCILHHQQQQQQHNRQQRHSVSVSRRELQLQQAGAQQLPRLPCPGPGSDEAPERESKASVGSASAKGDETEHVVGRRSSHCHSSSSSSENPYRPTPPERKTYCMASSPNRLSEELVRLTVTIFHKLNKTATATAADAGELDLELEPSGGGASSSKLNISCIGPRSLVPRVSASVNGAAAAMSPLKSRRAAAKGGGAETGSAAGCQRRFVEFTRGSVDVSRISLCLVDIKNLRGLMQKLCAVDPSLMTNKQKLAFWINVYNFCVMHAFLQHGLPPSPEKLLALLNQASVNVGGTVLNVVSIEHLILRHSPDAKQTDLLHSYGLGYPEPNVVFALCRGSRSSPALRVYTAEDVSNELERAKVEYLESSVRVAGRKQRAVVVPKLLHWHMRDFADDAASLLEWVHSQLPRASGPLRRAIREVLGANMGSGSRAPTPAPAAKMLEVEPYDADFCYLLPVW

SEQ ID NO: 171491 - protein, 315 aa, Zea Mays
MPTQLPADRADRQHHGEDSPGSGAAPPPAAPRRSPGADDRPPAPAGRRCRRRGPPPPAGAGARADVQRAGRAAHGRLPPLRAAVRRHEGEGLVRPLGQLLRPARAPLRAVLHGADGPRLRPRRERLPEPARRRDARAQFRLLPRIPEEPRAHDLVLVLRGPQKRAGKGRVPRRRHPVRGPVRPPLRPAGARPAIGGLLRLLPSAGEPRRGREPQEPGQEGDPLRAQLRGHGGAGVRPEHSHGVARQSARSSWPLGRCGGPSSPPSSTSPPRRCSGAGRSWSPRGGTTPPTTWRTSSSPSATAPAWSPSGDGRSPR

SEQ ID NO: 171492 - protein, 130 aa, Zea Mays
MSRRSLNPSRRVADGGLPTVGGLFHPKSRSPPVLTIALVVLGVILLVAYFNSGSGVTVTSRESVTRSEGTTFFSPYCLVLGCKSPADVISLVIQNSVFSFKLALYCVVKIAGSNIFCSPDYKVALIVVCN

SEQ ID NO: 171493 - protein, 244 aa, Zea Mays
MALFAAARRAAASSVPVLLRASASSGSHRSAVLLRPLAAAVAPPKPRAMPFSSAPATRPSSDAELLSVIDSEIKYAEDCDDHDRVEEIPENFPFKISDEKGTNAVTLKRTYQGEQIEVVVHMPSLVTGDEPDHDRDGEDEDTAGDDNDEDEGQKPEQSSIPLTVTISKGDGPVLEFTCTAYPDEVIIDSMSVTQQSGDDERDMIAYEGPDFNDLDENLQREFHRYLDLQQKKKKKKEEEEGESQ

SEQ ID NO: 171494 - protein, 129 aa, Zea Mays
MQTEARVGVVVDGGAAVGRCQEQRHIGTAAHLAAGGFAGAVSKTCTAPLARLTILFQVAGMHSDVATLRKCSIWHEASRIFREEGIEAFWKGNLVTIVHRLPYSAISFYSYERYKNISISASPNGSWPG

SEQ ID NO: 171495 - protein, 437 aa, Zea Mays
MGNHGGGPGSGLAGDMAPMRSDDWPSWLPDGMDPKTSFNLEFRIFATKSRFPWFLHTELVDSDIMNYKDLLDEIMRKYPCSYGEVVKMYYYCAESKSNIEVCCDEDLVNMFQKNASTKTCHISIAHYDPSTEPPAIPLWDVTYAKAVEIPCTSSMPAPTQSLDEPSQQPEDDDKYLQNPEPENEYVGVDEEGMYIDLGPQVQGNADQEDEYIPETDSNLDSNFESDGSDDEMVEDNVPPHTAEAVYDKADPPMEVKKNPHLHECHSTRRKGQVKGATKHWVADTVRDWLVDNPRLTPKALQQRIKDEFKVWVHYKRVYHAPRMVFPDLGLTPPVTKKKKSSSTTSKAAKKKKSSAMSVRSGQGSNQPDPMPLSIMMPSMEVADKEENQETKKEVAGHGKKNKREPEVIGSPAMGTRSKASCSGSPAMGTRSKRKLNV

SEQ ID NO: 171496 - protein, 264 aa, Zea Mays
MPNEKLRNDLSNIDIWDEDRIQAVLNTFLEDLRSGRLEEAGWPVMLPAYSLSKMVINLYTRIIARRYPEMRINCVRPGFVTTDISWNLGVLTPKQGARGPVMLALLPDDGPTGWYRDEMGDKMGSLLFFKMVKYSSLVEGFCGVQFSFPNIQLCKSWSQELATNTESHLLPEMLEAANGYICHELHLMLTSIGVTHMIDCVKYLIGVIDLLTPWDPGIVVFNLKFLMLWLEGKPNLKKGGMSVLMRWKTVWWLMAGRVRLVCII

SEQ ID NO: 171497 - protein, 668 aa, Zea Mays
MSHLLEREADTAFLPHSDQRDGVEAWFILRRCTPASFNVASTDPNNEVSSAVTADALAKAAPALFASRAPRPSLKYLELLLPAEIDFDHIDLPTAAAAGHIVAQVTGNNAVSVVEDQLRCTLLLTRNFLSSHHQAVSKEWDMVAVVHPVCNLGEKSILVLTMDSLHGPGAMAQFLSSIFSNTLSWNNSMSIAASCSTNTLFAKDDGDSMNRCFSWCWKPPWLHPGQSKFRDFLWWSFWYFQFVRSKYYGCRASQLLTPWTPPMTLCLVGDDLLVMLVIPSMLLLSRCYFSGVECVLAAADPLFSTFHAERELFWKPPWQHLVPNTRSEIQLLMEFVYLNTGVCRSLHMINKFSKQYFVGLSLLITREKFMSGRIMLALLPLLKLFTSGGARIVNASSLASELKRMPNEKLRNDLSNIDIWDEDRIQAVLNTFLEDLRSGRLEEAGWPVMLPAYSLSKMVINLYTRIIARRYPEMRINCVRPGFVTTDISWNLGVLTPKQGARGPVMLALLPDDGPTGWYRDEMGDKMGSLLFFKMVKYSSLVEGFCGVQFSFPNIQLCKSWSQELATNTESHLLPEMLEAANGYICHELHLMLTSIGVTHMIDCVKYLIGVIDLLTPWDPGIVVFNLKFLMLWLEGKPNLKKGGMSVLMRWKTVWWLMAGRVRLVCII

SEQ ID NO: 171498 - protein, 180 aa, Zea Mays
MTRQKKDETTNAEAALLSSGDTVQDMDADATSTNGIQENVEVIEVASGSPLPGMKQQLDDSVRIPKATIDILKDQVFGFDTFFVTSQEPYEGGVLFKGNLRGKPAKSYEKITSRLQNKFGDEYKLFLLINPEDEKPVAVVIPKQTLQPETTGDKNLSVPSVASVVLRVRSQNGLLLLHLD

SEQ ID NO: 171499 - protein, 235 aa, Zea Mays
MAPQEQESLIWQKAVATEADSTFFSISSSDLVSKWMGESEKLVANLFQMARENAPSIIFIDEIDSLCGQRGEGNESEASRRIKTELLVQMQGVGHNDDKVLVLAATNTPYALDQAVRRRFDKRIYIPLPDLKARQHMFKVHLGDTPHSLTESDFESLARRTDGFSGSDVAVCVKDVLFEPVRKTQDAMFFFKADGDMWMPCGPKQPGAVQTTMQELASKGLAAKGHFIREGIFWR

SEQ ID NO: 171500 - protein, 99 aa, Zea Mays
MFKVHLGDTPHSLTESDFESLARRTDGFSGSDVAVCVKDVLFEPVRKTQDAMFFFKADGDMWMPCGPKQPGAVQTTMQELASKGLAAKGHFIREGIFWR

SEQ ID NO: 171501 - protein, 129 aa, Zea Mays
MFKVHLGDTPHSLTESDFESLARRTDGFSGSDVAVCVKDVLFEPVRKTQDAMFFFKADGDMWMPCGPKQPGAVQTTMQELASKGLAAKILPPPISRADFEKVLSRQRPTVSKKDLEVHERFTKEFGEEG

SEQ ID NO: 171502 - protein, 736 aa, Zea Mays
MVLQCHRIASLSVRFRRARFLPRSRTAVRSRIIVRVRRTPSGSSVLPPASPCPLPFPTTIPPPPPSATLKSPSFPTPPQRRNFSTPATPLKSSSLRQGIPPPMRLLPLLLLLLAGAGARASDDPFLSGAANHSYNIDCGGAADFTSALGRRWLADRFFSAGGAAGMVAEPHRFPQPQERTLRFFPPSSAGKSSCYSLPLPPGRYYLRLFSVYDNYDSKLRTPSFDVSAAATLVLSFRSPWPEPAARYGAYSDLIFPSATEPASDLCFYSLSTDAPAVASIEVSPVHPLAYDGATTGADLVLVNYGRVTCGNSLFGPGFTRDADAFSRVWQADVDFRNNDLSYDAITAGGRKVFGSNQPPNYFPTKLYESAVTTGGDAANEIEYLMPVDTRLSYMVWLHFAEIDAGIGSPGQRVFDVVLAGENVTRIDIFKQVGGFTAFKWTYIVKNLTSSTLSVRLVPVVGRPILCGLENYAMVPLEMRTVPSQVAAMKALKESLKIPARMGWNGDPCAPRAWDAWEGVTCHRGDKGLVITQLDLASQGLKGYITDEISHLKDLVSLNLSYNSLTGSLPPGLGQPSLVSLDISSNEFTGSIPGTIGSSKLQTALLNNNQLDGQVPERLYSIGVHGGVIDLSGNKGLCGVPTLPACALFWEKGGLNKTGKIALGASFGFVLLVILIVVYILCIRRGPYDYDFDFPQDLTSISAISAKRNRYQRAKSVMLAEMEAHNPDGFYTNGSPH

SEQ ID NO: 171503 - protein, 456 aa, Zea Mays
MRLLPLLLLLLAGAGARASDDPFLSGAANHSYNIDCGGAADFTSALGRRWLADRFFSAGGAAGMVAEPHRFPQPQERTLRFFPPSSAGKSSCYSLPLPPGRYYLRLFSVYDNYDSKLRTPSFDVSAAATLVLSFRSPWPEPAARYGAYSDLIFPSATEPASDLCFYSLSTDAPAVASIEVSPVHPLAYDGATTGADLVLVNYGRVTCGNSLFGPGFTRDADAFSRVWQADVDFRNNDLSYDAITAGGRKVFGSNQPPNYFPTKLYESAVTTGGDAANEIEYLMPVDTRLSYMVWLHFAEIDAGIGSPGQRVFDVVLAGENVTRIDIFKQVGGFTAFKWTYIVKNLTSSTLSVRLVPVVGRPILCGLENYAMVPLEMRTVPSQVAAMKALKESLKIPARMGWNGDPCAPRAWDAWEGVTCHRGDKGLVITQLDLASQGLKGYITDEISHLKDLEFEL

SEQ ID NO: 171504 - protein, 174 aa, Zea Mays
MAARIGADGKAMARRGRVELRRIEDRVSRQVRFSKRRSGLFKKAFELSLLCDAEVALIVFSPAGKLYEYASTSIEDTYNRYQQFSGEGRNINDDRNRNDNKDEASSDLQLMLSKIATWSPQSNADESDVDELEKLENLLRNALKDTRSRKIQMLAKQNSGASTSGQKSPEQGTA

SEQ ID NO: 171505 - protein, 652 aa, Zea Mays
MEPLPSATAAGVGGPGPGYPESTESSPRSRGGDSWDEPFPSSAAAAAAAAGGGGRLRLMCSFGGRIVPRPTDKSLCYLGGETRIVAVDRHASLADVHARLSRSLLGGRPFTLKYQLPNEDLDSLISVSTDEDLDNLVDEYDRIAATSSGGGTSRTSRIRLFLFPAKPESSSSLGSLLDDSSKSENWFVDALNSAISGSLDGIPRGISTDSASVNCLLGLEDDSSVHSRSGVTNSAPTEDQRASQPKLQAGAAAAAVGTGRHPHDVQSVPDSPMLDKNSSFGSTSSAPSLSNLPPIRVRPEDRPSDARIMQPTAVEDHFAQMGISEQQLPMYIQAQQQVPIPAMTGMSPSEASSRMFSDDDKSDHGGGGGRKPQPPKQDVPPVVDPTNRSPPAELKRDMPVGTEAASYRLPVSAPDAAAAAAATAATQAPPGYVLAQMHAPPPPQQPPPQQQPQQPAPQQIVAAGNQHFIHNPATGTFIPIQSYYHHPVHQQAPQTMQRQQQAPTFDPNTGMYYVPMQQNAHQAYGVPPGAQVTLPPPTLVDTTPKPTVPIPQMAVRPELQQPGVYRTTAAATPAPAPNAAPGYAGMAYHHVIQSHHHHHPAPQPVANMAGNYGYEFADPTRPQVYYSQAAAPPTLPQYPPIVSPDAGQAEKH

SEQ ID NO: 171506 - protein, 493 aa, Zea Mays
MPCSLPHDCDGDSARAVALPRLLALDGMGGVDVACGARDGGATGPARSRAGLLPDAMRRREHLLPVLDRRRPRHGDQLWTDRVPGPKGRTSKVVGIVCGVVAVSLLAACFFFVWHKRKRRKQARAPNGFMHSESSLQSYSKDLELGGSPQIFTYEELEEATDGFSDSRELGDGGFGTVYKGKLQDGRVVAVKRLYKNNYKRVEQFKNEVDILSRLLHQNLVILYGCTSRSSRDLMLVYEFVPNGTVADHLHGSRASERDLTWPLRVNIAIETAEALAYLHAVEIIHRDVKTNNILLDNSFHVKVADFGLSRLCPPEVTHVSTVPQGTPGYVDPVYHQCYKLTEKSDVYSFGVVLVELISSKPAVDMSRTHSDINLANMALNRIQNHEVDRLVDPELGYETDDGTKKSIDLVMELAFQCLQLERDSRPSMKEVVVALNCIKNGDSPENKMDRSSSSPKEDAHLLTNSIQYSPDSVIHRFHSQSTTHSAASNASG

SEQ ID NO: 171507 - protein, 412 aa, Zea Mays
MQNGPKGRTSKVVGIVCGVVAVSLLAACFFFVWHKRKRRKQARAPNGFMHSESSLQSYSKDLELGGSPQIFTYEELEEATDGFSDSRELGDGGFGTVYKGKLQDGRVVAVKRLYKNNYKRVEQFKNEVDILSRLLHQNLVILYGCTSRSSRDLMLVYEFVPNGTVADHLHGSRASERDLTWPLRVNIAIETAEALAYLHAVEIIHRDVKTNNILLDNSFHVKVADFGLSRLCPPEVTHVSTVPQGTPGYVDPVYHQCYKLTEKSDVYSFGVVLVELISSKPAVDMSRTHSDINLANMALNRIQNHEVDRLVDPELGYETDDGTKKSIDLVMELAFQCLQLERDSRPSMKEVVVALNCIKNGDSPENKMDRSSSSPKEDAHLLTNSIQYSPDSVIHRFHSQSTTHSAASNASG

SEQ ID NO: 171508 - protein, 403 aa, Zea Mays
MSAQICLARHPVVFLPETPWPASSPRSSSSRRCRLPGPLPACFHAFASVCSERLHFLYESRLAVGKSSEGFQALQQSTPGPASRPLLHRRVRLIVPRWASALVLSLFAKILEKHVSFSQVMGKEKLHINIVVNGHVDSGKSTTTGHLIYKLGGIDKRVIESSLSWSCRGTLCSMIHAQNFPATSMGGILFELVGPIHISRDPGTISRPAASLQRCCASDTRTSHYLGLFTPLKGKHTDEVAKSKQSTVSTKTKKFKEIQFQKLQRLPDGCHPDFDNDHLCSVNNHDLLPEMSTLSADLHLLRETGVENMRTPKSLHAELKRELLKLNTVLKLPDNVLFLANQFLEYLLNNHLVVREPRSILHVFNIALCWRAASFLKYTELDRRESLALASDGLNYECNEAPS

SEQ ID NO: 171509 - protein, 219 aa, Zea Mays
MGGILFELVGPIHISRDPGTISRPAASLQRCCASDTRTSHYLGLFTPLKGKHTDEVAKSKQSTVSTKTKKFKEIQFQKLQRLPDGCHPDFDNDHLCSVNNHDLLPEMSTLSADLHLLRETGVENMRTPKSLHAELKRELLKLNTVLKLPDNVLFLANQFLEYLLNNHLVVREPRSILHVFNIALCWRAASFLKYTELDRRESLALASDGLNYECNEAPS

SEQ ID NO: 171510 - protein, 87 aa, Zea Mays
MTTSMSNSAASEKQSQQAGHRHRRRRAGQGRGRGRGQGGVTGVVRGERERLELFASRVLFTCTQEILLLHKTTVLLDKKFYFYMTIT

SEQ ID NO: 171511 - protein, 62 aa, Zea Mays
MSAYIFFSLGYVWTQEESDWVPNQVILKLNRATFLCYVDPKRLVSSLPIFVTFIHFLTLLVN

SEQ ID NO: 171512 - protein, 85 aa, Zea Mays
MKYISINSSQTSGRNFMICQRGKMSAYIFFSLGYVWTQEESDWVPNQVILKLNRATFLCYVDPKRLVSSLPIFVTFIHFLTLLVN

SEQ ID NO: 171513 - protein, 409 aa, Zea Mays
MLSLPRHTIGWVVSTSLAGATLGSFTGGSLADKFGRTRTFILDAAPLAVGAFLSATAQDIRTMIIGRLLAGIGIGISSALVPLYISEISPTEIRGTLGSVNQLFICIGILAALLAGLPLAGNPAWWRTMFGIAVVPSILLAVGMAFSPESPRWLFQQGKVIQAESAVKRLYGKEMVTEIMYDLRASGQSSSETEAGWFDLFSKRYWKVVSVGAALFLFQQLAGINAVVYYSTSVFRNAGITSDVAASALVGAANVFGTMVASSLMDKQGRKSLLMTSFSGMGASMLLLALSFTWKALAPYSGILAVVGTVLYVLSFALGAGPVPALLLPEIFASRIRAKAVALSLGMHWVSNFFIGLYFLSVVNKFGISNVYLGFASVCVLAVLYIAGNVVETKGRSLEEIERELSVAE

SEQ ID NO: 171514 - protein, 438 aa, Zea Mays
MMRCTVTGGGCVASWIGDRRSPAVNPFSVRMSTGNGGWCGGLRSRAAELSGLEMAHLRGGIGGLFRASPRYGRLQATAAVDPEDIPLEKVQVKSSGHVMPYVGVACLGAILFGYHLGVVNGALEYLAKDLGIAENAVLQGWVVSTSLAGATLGSFTGGSLADKFGRTRTFILDAAPLAVGAFLSATAQDIRTMIIGRLLAGIGIGISSALVPLYISEISPTEIRGTLGSVNQLFICIGILAALLAGLPLAGNPAWWRTMFGIAVVPSILLAVGMAFSPESPRWLFQQGKVIQAESAVKRLYGKEMVTEIMYDLRASGQSSSETEAGWFDLFSKRYWKVVSVGAALFLFQQLAGINAVVYYSTSVFRNAGITSDVAASALVGAANVFGTMVASSLMDKQGRKSLLMTSFSGMGASMLLLALSFTWKALAPYSGMCCLLL

SEQ ID NO: 171515 - protein, 347 aa, Zea Mays
MIIGRLLAGIGIGISSALVPLYISEISPTEIRGTLGSVNQLFICIGILAALLAGLPLAGNPAWWRTMFGIAVVPSILLAVGMAFSPESPRWLFQQGKVIQAESAVKRLYGKEMVTEIMYDLRASGQSSSETEAGWFDLFSKRYWKVVSVGAALFLFQQLAGINAVVYYSTSVFRNAGITSDVAASALVGAANVFGTMVASSLMDKQGRKSLLMTSFSGMGASMLLLALSFTWKALAPYSGILAVVGTVLYVLSFALGAGPVPALLLPEIFASRIRAKAVALSLGMHWVSNFFIGLYFLSVVNKFGISNVYLGFASVCVLAVLYIAGNVVETKGRSLEEIERELSVAE

SEQ ID NO: 171516 - protein, 515 aa, Zea Mays
MMRCTVTGGGCVASWIGDRRSPAVNPFSVRMSTGNGGWCGGLRSRAAELSGLEMAHLRGGIGGLFRASPRYGRLQATAAVDPEDIPLEKVQVKSSGHVMPYVGVACLGAILFGYHLGVVNGALEYLAKDLGIAENAVLQWTSAYCSGWVVSTSLAGATLGSFTGGSLADKFGRTRTFILDAAPLAVGAFLSATAQDIRTMIIGRLLAGIGIGISSALVPLYISEISPTEIRGTLGSVNQLFICIGILAALLAGLPLAGNPAWWRTMFGIAVVPSILLAVGMAFSPESPRWLFQQGKVIQAESAVKRLYGKEMVTEIMYDLRASGQSSSETEAGWFDLFSKRYWKGITSDVAASALVGAANVFGTMVASSLMDKQGRKSLLMTSFSGMGASMLLLALSFTWKALAPYSGILAVVGTVLYVLSFALGAGPVPALLLPEIFASRIRAKAVALSLGMHWVSNFFIGLYFLSVVNKFGISNVYLGFASVCVLAVLYIAGNVVETKGRSLEEIERELSVAE

SEQ ID NO: 171517 - protein, 51 aa, Zea Mays
MNYASCTYIYIYVKHDTTSTEIKSFHITLTLLQLSDTPMIEQTVAVKPYVK

SEQ ID NO: 171518 - protein, 452 aa, Zea Mays
MYVDWKHTWLSFPHGNQSVVLRGLTPLMPSGSLLQIQLVCTLYGEPLCAVTDLSIPPSVQQLLYTYAYLFEEPKTLPPSRFCDHSIPLIQGVRPVNIQPYRLTPALKDEVESQVTDMLNNGIIQHSNSAFSFPVLLVKKKDNSWRLCVDYRHLNALTVKSKYTVPVIDELLDELFGASWFSILDLRAGFHQILLHQGEEYKTAFQTYLGHYEFRVMAFGLTGAPGTFQKAMNHTLAPMLRKCALVFFDDILVYNVSLESHLNHLQQVFELLAKEQWKIKLSKCSFAQNQVSYLGHVVSSKGVTTDPTKIQAIVDWPTPQCLKELRSFLGLAGYYRKFIRYFGIICQPLTSLLKKGVLFVWTADHDLAFHTLQQALVSAPVLALPDFSSQFTIETDASDLDIGAVLMQHGHPLAFLSKALGPKSRGLSTYEKEYMAIIVAVQQWLPIFNTESL

SEQ ID NO: 171519 - protein, 96 aa, Zea Mays
MEDEPLIITVQENETVLDDTPDKFGIEVLNVRNYWEAIGVIAAHKAGVNPHALRRRGIDHLKSPQRSYSAYSASPKPSARPPVHDKVQRQQLVRQI

SEQ ID NO: 171520 - protein, 92 aa, Zea Mays
MKRVRTIASFYQVASNQESNEIIQNVQIGTNLDENENNQESLDVGTAQNNTESIDSEIVGDPGLRKPIEELDVNIRDVVRREYLLLGPCQPK

SEQ ID NO: 171521 - protein, 369 aa, Zea Mays
MGDDDDHNEGLRAGPTASWRLNVSDFHMPERPKEPPFVARVFLRSHGKQRKIAKYYKKQENLLKDFSEMETMNEMGGLDQNAPTEEEQKQLAKSERFAINLSNAVNLVLFVTKVVASVESASMAVIASTLDSLLDLLSGFILWFTAYKMKKPNKYNYPIGKRRMQPVGIIVFASVMGTLGFQVLIESGRQLITQHVLCCGREFFLMLYCRTFKNEIVRAYAQDHFFDVITNSVGLVSALLAVRFKWWMDPVGAILIALYTITTWARTVLENVGTLIGKSAPAEYLTKLTYLIWNHHEEIQHIDTVRAYTFGTHYFVEVDIVLSGDMPLSQAHDIGESLQEKLEQLTEVERAFVHVDFEFTHRPEHKAEV

SEQ ID NO: 171522 - protein, 229 aa, Zea Mays
MGDDDDHNEGLRAGPTASWRLNVSDFHMPERPKEPPFVARVFLRSHGKQRKIAKYYKKQENLLKDFSEMETMNEMGGLDQNAPTEKQLAKSERFAINLSNAVNLVLFVTKVVASVESASMAVIASTLDSLLDLLSGFILWFTAYKMKKPNKYNYPIGKRRMQPVGIIVFASVMGTLGFQVLIESGRQLITQEHADFKFKQELWMVISMSSVAVVSSSSCSTAERSRMRS

SEQ ID NO: 171523 - protein, 408 aa, Zea Mays
MGGAGGLMLLRARCRLQLCLGLSRGGGGGGGADEIDRPTPVTSGVAFSFRPGEKRRKPNLGSGVPAGMSATVAGHRSRFRNRTTVPREPRNSEDTWARASEAKPIRNIALRPAQSRPDLGRGHASDDKLPRGGEGRLGVGAELDELHLHLARDSHALACSCRAGAETMGSPHHGHGVDGGGRSDDEEGDAGSWRLRMDSGFSVPDRFHRQPPFYARIFGGSHGKQRKIAKYYKKQENLLKDFSEMETMNEMGGLDQNAPTEEEQKQLAKSERFAINLSNAVNLVLFVTKVVASVESASMAVIASTLDSLLDLLSGFILWFTAYKMKKPNKYNYPIGKRRMQPVGIIVFASVMGTLGFQVLIESGRQLITQEHADFKFKQELWMVISMSSVAVVSSSSCSTAERSRMRS

SEQ ID NO: 171524 - protein, 120 aa, Zea Mays
MQATNKRPQRRYPVAPIVMCLVLAWASCLHGDDTKLLAAAVPLPRRPAATSSVAAAGGMPVVVGYRPRPQAGAAAGRSAPRSTAWIGDDKRQIPSCPDALHNRAVPEGSSWLATQVLTQN

SEQ ID NO: 171525 - protein, 107 aa, Zea Mays
MQATNKRPQRRYPVAPIVMCLVLAWASCLHGDDTKLLAAAVPLPRRPAATSSVAAAGGMPVVVGYRPRPQAGAAAGRSAPRSTAWIGDDKRQIPSCPDALHNRCGFR

SEQ ID NO: 171526 - protein, 106 aa, Zea Mays
MQATNKRPQRRYPVAPIVMCLVLAWASCLHGDDTKLLAAAVPLPRRPAATSSVAAAGGMPVVVGYRPRPQAGAAAGRSAPRSTAWIGDDKRQIPSCPDALHNSMQR

SEQ ID NO: 171527 - protein, 382 aa, Zea Mays
MALDLPKWAIKAIDKIRRGFLWKGRKDVLGGHCLVAWGKVTRPKELGGLGISDLQKLNWALRVRWLWLEKTDPSKSWADLPLQSSSILKSILSTALITEIGDGRNTLFWRDRWLMGLRIEDLTPHIFAIVPTRITNRRTVAEGIVEMAWIRDLRGTITWDVLSDFLTLSEVIADYSINVGVPDKHIWKFSPTGQYSSKSAYDMLFLGSTSLGAYERIWESWAPSKCSFFLWLVMHNSCWTADRLARRGLPHPSVCPLCDQEEETIQHLLISCVFARQFWYSLLSRSGLPNLSPDNASCGLDDWWSRAVEKIPRDLQSGFNSLVILGAWSLWRHRNDCVFNGRSASLASALTLAGDELRMWCSAGAKGLNLLSTLMFMLDPGG

SEQ ID NO: 171528 - protein, 223 aa, Zea Mays
MAPCASPSALALSASTRVSILRLPLALRQRAEARVPGAQFRPSTACSWARPLLPELAGAVPRAGARGTGRRTQPLFRPRALTTTSQIASCAFTLGTVAVLPFYTLMVVAPNADITKRTVESGAPYVALGLLYAYLLYLSWTPDTLRAMFASKYWLPELAGIVRMFASEMTVASAWIHLLAVDLFAARQVYHDGLRNNVETRHSVSLCLLFCPVGILAHVLTKE

SEQ ID NO: 171529 - protein, 232 aa, Zea Mays
MPTIRPEIPLPLSHGIHVLNQPSRLCCSDPSPSVPAVRMEAAATLPPLLLLILLAATAVPAPSHAWGVDGHLMVCQIAQGRLSGAAAAAVKDLLPSYAGNNLSSLCSWADDVKFRYPWSSPLHYIDTPDGLCTYRYDRDCKDEDGVEGRCVAGAINNYTSQLLAYRRSSPTEYNLTQALLFLSHFIGDIHQPLHVGFTSDKGGNTIDVHWYTRKTVLHHVRLGRQHHPDGRR

SEQ ID NO: 171530 - protein, 171 aa, Zea Mays
MVVRGSSTGQSYGAAVCRAVLPVVMSLRPSLACVGVHSVWCICCALLGIRVTVEAPMLRYFMNRVVRPLEAVGACLGLYLGRCGHVDSGHSVCTHTVVWVTGHSLGCHVLSLAGADFVTFDLGFCLASLSWLGPRWSFCLMDLLGRDLLGRPASLTCPVGIWLVAPPRGLA

SEQ ID NO: 171531 - protein, 94 aa, Zea Mays
MAPLSVDTGTQFLQVAAHLVRRSSQVHTPDQLVHSPHQHCFFVVGPLATAAETRRAWRTRIANRVLLFIFSTSRSTTACCRPLLQERKLRVRHC

SEQ ID NO: 171532 - protein, 127 aa, Zea Mays
MVELDESLVDLAAAVFGEEVAAPVLDGPLVRGHGDAVLAGGGALGEEVVAGPHARPAGALAAPALLLRRRPCAQQPAGPLATAAETRRAWRTRIANRVLLFIFSTSRSTTACCRPLLQERKLRVRHC

SEQ ID NO: 171533 - protein, 125 aa, Zea Mays
MVELDESLVDLAAAVFGEEVAAPVLDGPLVRGHGDAVLAGGGALGEEVVAGPHARPAGALAAPALLLQVLWPRPQRPEGPGELGSPTECCSSSSRPLALPPLAADLYYKNASFEFVTAEMRSTRN

SEQ ID NO: 171534 - protein, 883 aa, Zea Mays
METLPNGSVNNAELNQENEKSMYASESEEARDIFVYREDVVSLKSKEDVRGVVLEVAGEYDYDGSITDDDIDTEEHEDKTAYGAENGVADGGLQCSLGPGEPGASTFVLVAYDYIESGGAFGDPYKLYGVSQSQKLLPNKTEDDSMSIQLETKGDQQSVPLEEQNPEDLTLLSRFSYTNWQLTDWCLSQRYTSCTNDTMIDSDKHTWQICTCSENSVPLSGIPESQADAQIDTDTGHRQTDVDSTADVLSMSDGDNSCIAKESETGTSASSISNEGPQDNATSRKKFRKVFFKKDKRTKKRDDNFERALLIANTCTKVDVIWQDGTKECGVAATALIPIHSPNEHEFFPEQYVVDKVTNDVGVDDSSEPRRVGLVRGVNAKDRTATVSWFKPPLHPEEPKEIACNEIVSVYELDVHPDYDYCYGDIVVRLPPVKPVIESTNSKEQMELDKTLDSSEGFAASYSAPPDTSADEQLSQKESCLQFTSLSWAGNIVGFQDGEIEVIWGDGSISKVGPHEIYVVGREDDGASLDDGTASDGSSWETVDDNEMDVLHDSAKGDSQNVPENSIGRENGSFSSQDGSSVATGPLSVAFEFVTRLASDLFARGRRHLDGSSDAMDEVESHWSNEISEIGDDIDKCNKNHVESPEHAAVIENDSSVEKSVDVVMADNPVHSECFKHFDVLQCPLDHHYLENTTQTFRFLSSVNCQEVELKTAASSDNIMSSPNEAPSSVAGEYDPKSDPTRKPRKSTDPGWKYGFWPDLQNKDKVECTLCGQVVSGGIKRLKQHLAGVYGDAKLCPKASSGLRKEMTSYLEANKRKRPMFLDEDEEDDEVVAVAAADGANDTSAVEFQASKVQPSSGTAAKKDNQPCNLRQVVKHNQSQPSP

SEQ ID NO: 171535 - protein, 813 aa, Zea Mays
MSIQLETKGDQQSVPLEEQNPEDLTLLSRFSYTNWQLTDWCLSQRYTSCTNDTMIDSDKHTWQICTCSENSVPLSGIPESQADAQIDTDTGHRQTDVDSTADVLSMSDGDNSCIAKESETGTSASSISNEGPQDNATSRKKFRKVFFKKDKRTKKRDDNFERALLIANTCTKVDVIWQDGTKECGVAATALIPIHSPNEHEFFPEQYVVDKVTNDVGVDDSSEPRRVGLVRGVNAKDRTATVSWFKPPLHPEEPKEIACNEIVSVYELDVHPDYDYCYGDIVVRLPPVKPVIESTNSKEQMELDKTLDSSEGFAASYSAPPDTSADEQLSQKESCLQFTSLSWAGNIVGFQDGEIEVIWGDGSISKVGPHEIYVVGREDDGASLDDGTASDGSSWETVDDNEMDVLHDSAKGDSQNVPENSIGRENGSFSSQDGSSVATGPLSVAFEFVTRLASDLFARGRRHLDGSSDAMDEVESHWSNEISEIGDDIDKCNKNHVESPEHAAVIENDSSVEKSVDVVMADNPVHSECFKHFDVLQCPLDHHYLENTTQGTGGKKWVKKVQQEWSILEKNLPDYIYVRVFEDRMDLLRAVIVGASGTPYQDGLFFFDFHLPLEYPLVPPSAYYHSGGLRVNPNLYVDGKVCLSLLNTWTGRGNEVWDPSSSSILQVLVSLQGLVLNEKPYFNEAGYEKQVGTVEGEKNAVPYNENTYLLSVKSMLYILRRPPLHFEDFVKSHFRKRGHYILKACHAYLQGNVVGTLTDDACTTDRSKEHSSSVGFKLVLAKILPRLITALKDTGADCDQYEHLGRTETVTES

SEQ ID NO: 171536 - protein, 651 aa, Zea Mays
MIDSDKHTWQICTCSENSVPLSGIPESQADAQIDTDTGHRQTDVDSTADVLSMSDGDNSCIAKESETGTSASSISNEGPQDNATSRKKFRKDGTKECGVAATALIPIHSPNEHEFFPEQYVVDKVTNDVGVDDSSEPRRVGLVRGVNAKDRTATVSWFKPPLHPEEPKEIACNEIVSVYELDVHPDYDYCYGDIVVRLPPVKPVIESTNSKEQMELDKTLDSSEGFAASYSAPPDTSADEQLSQKESCLQFTSLSWAGNIVGFQDGEIEVIWGDGSISKVGPHEIYVVGREDDGASLDDGTASDGSSWETVDDNEMDVLHDSAKGDSQNVPENSIGRENGSFSSQDGSSVATGPLSVAFEFVTRLASDLFARGRRHLDGSSDAMDEVESHWSNEISEIGDDIDKCNKNHVESPEHAAVIENDSSVEKSVDVVMADNPVHSECFKHFDVLQCPLDHHYLENTTQTFRFLSSVNCQEVELKTAASSDNIMSSPNEAPSSVAGEYDPKSDPTRKPRKSTDPGWKYGFWPDLQNKDKVECTLCGQVVSGGIKRLKQHLAGVYGDAKLCPKASSGLRKEMTSYLEANKRKRPMFLDEDEEDDEVVAVAAADGANDTSAVEFQASKVQPSSGTAAKKDNQPCNLRQVVKHNQSQPSP

SEQ ID NO: 171537 - protein, 481 aa, Zea Mays
MIDSDKHTWQICTCSENSVPLSGIPESQADAQIDTDTGHRQTDVDSTADVLSMSDGDNSCIAKESETGTSASSISNEGPQDNATSRKKFRKDGTKECGVAATALIPIHSPNEHEFFPEQYVVDKVTNDVGVDDSSEPRRVGLVRGVNAKDRTATVSWFKPPLHPEEPKEIACNEIVSVYELDVHPDYDYCYGDIVVRLPPVKPVIESTNSKEQMELDKTLDSSEGFAASYSAPPDTSADEQLSQKESCLQFTSLSWAGNIVGFQDGEIEVIWGDGSISKVGPHEIYVVGREDDGASLDDGTASDGSSWETVDDNEMDVLHDSAKGDSQNVPENSIGRENGSFSSQDGSSVATGPLSVAFEFVTRLASDLFARGRRHLDGSSDAMDEVESHWSNEISEIGDDIDKCNKNHVESPEHAAVIENDSSVEKSVDVVMADNPVHSECFKHFDVLQCPLDHHYLENTTQGYRWKKVGQKGTTGMEHT

SEQ ID NO: 171538 - protein, 498 aa, Zea Mays
MIDSDKHTWQICTCSENSVPLSGIPESQADAQIDTDTGHRQTDVDSTADVLSMSDGDNSCIAKESETGTSASSISNEGPQDNATSRKKFRKDGTKECGVAATALIPIHSPNEHEFFPEQYVVDKVTNDVGVDDSSEPRRVGLVRGVNAKDRTATVSWFKPPLHPEEPKEIACNEIVSVYELDVHPDYDYCYGDIVVRLPPVKPVIESTNSKEQMELDKTLDSSEGFAASYSAPPDTSADEQLSQKESCLQFTSLSWAGNIVGFQDGEIEVIWGDGSISKVGPHEIYVVGREDDGASLDDGTASDGSSWETVDDNEMDVLHDSAKGDSQNVPENSIGRENGSFSSQDGSSVATGPLSVAFEFVTRLASDLFARGRRHLDGSSDAMDEVESHWSNEISEIGDDIDKCNKNHVESPEHAAVIENDSSVEKSVDVVMADNPVHSECFKHFDVLQCPLDHHYLENTTQVEKSGSKRYNRNGAYLRRTYQTIFMSGYLRIAWIS

SEQ ID NO: 171539 - protein, 57 aa, Zea Mays
MFDVLFIAFFARGSSDRRSRSLSSKEGQEPDLSEIEPSCYESFDEGLPRKELIYHCQ

SEQ ID NO: 171540 - protein, 69 aa, Zea Mays
MHELEPPIFRSPLNTFIVIKVRVPEEIILAPRRCKEPVIGTQHWQLTGIEVPLFISCAEKRICLRILLR

SEQ ID NO: 171541 - protein, 478 aa, Zea Mays
MGFRAASAAAAAAVAVFAAAGLAVTAASSGDSLADLGGAAREIESAPEVKNLGPWAKGLLKGMPQAAAGPAAMAPVAKYPLVLAEDRTRRPDVLRHLKVYEGGWNVTNKHYWASKFHEEATRTVDFVVNQSDFTIQTLRNVTEYLSFAQTITVAALYLPSEVQGQIDSLKGDLNKAADTISVKTAENYKMIRKVLHIMSVVLICIAVVLLVLVFLGYGLEKYGPRYTVYIFVTLCWKAVAALFILLGIFLILNSAAQDTCEAMDQWAQHPQAETALSSILPCVDESTTNRTLYQSKEVVVRLVGIVNRAISALSNRRPHHKHPGQFMPYLCSPYDSNLNDRPCKYREATFENATTAWLNYTCMAQDTDLCSGNKTLTYDIYGQLVLAANVSYALYHYAPFLLNLQDCKFVRATFSAIASRYCPPLGHDLVLVSAGLALIASAFVLCLVWMLFADRPRREEVSDLASGSRIAPVDSSPS

SEQ ID NO: 171542 - protein, 503 aa, Zea Mays
MDRREVKNLGPWAKGLLKGMPQAAAGPAAMAPVAKYPLVLAEDRTRRPDVLRHLKVYEGGWNVTNKHYWASVSFTGVSGFLLGALWFIFFGIAVAGRCYFGTRMSKRKVSYADVVGPVLLGVFTLAIIAGCILLLYGQSKFHEEATRTVDFVVNQSDFTIQTLRNVTEYLSFAQTITVAALYLPSEVQGQIDSLKGDLNKAADTISVKTAENYKMIRKVLHIMSVVLICIAVVLLVLVFLGYGLEKYGPRYTVYIFVTLCWKAVAALFILLGIFLILNSAAQDTCEAMDQWAQHPQAETALSSILPCVDESTTNRTLYQSKEVVVRLVGIVNRAISALSNRRPHHKHPGQFMPYLCSPYDSNLNDRPCKYREATFENATTAWLNYTCMAQDTDLCSGNKTLTYDIYGQLVLAANVSYALYHYAPFLLNLQDCKFVRATFSAIASRYCPPLGHDLVLVSAGLALIASAFVLCLVWMLFADRPRREEVSDLASGSRIAPVDSSPS

SEQ ID NO: 171543 - protein, 289 aa, Zea Mays
MDRREVKNLGPWAKGLLKGMPQAAAGPAAMAPVAKYPLVLAEDRTRRPDVLRHLKVYEGGWNVTNKHYWASVSFTGVSGFLLGALWFIFFGIAVAGRCYFGTRMSKRKVSYADVVGPVLLGVFTLAIIAGCILLLYGQSKFHEEATRTVDFVVNQSDFTIQTLRNVTEYLSFAQTITVAALYLPSEVQGQIDSLKGDLNKAADTISVKTAENYKMIRKVLHIMPREVWTEIYSLHICYLMLESCGGSLYPSRDFPDTKQRCAGYLRSNGPVGPAPSGRDSSEQHPSVCG

SEQ ID NO: 171544 - protein, 586 aa, Zea Mays
MGMDAGGGKLPYSYPAHQDGKLVKSFSRVEPRKFGLALVAGFLLVTCAYFSTAKFDAIHVAMTVSPVSGNAAGIGPLVGAANADTSDSKQRLDLGKQDPDDALSRSEEEEGSRADEVLEKDDGKASSSSGTDSGSNAPLEDTRRDETFVGDSGGASSAAGARSEAVPARHEHDDDAPAAALLPPVTSEGAANSTQGSGVLEDEELQVQDAVANPSKRSNDSAATRSSSSGRSPSVVHSDPAILPAPSQQIAPAAPQEADKALAVQHIPAIPEVKQSDSETPAREWKPLCDITSNRRIDWCELDGDVRVLGANASVTLVAPPGGADGRTFRAESWRIKPYPRKADPNAMRVVRVLTVRSVPGEAPACTDRHGVPALVFSDRGYTGNYFHAFTDVILPLFLTARQYAGEVRLLIARARTRRFVNAEEIVRGAEKLGFEVVVSEGTHEVAPFAELANSCDAIMGVHGAGLTNMVFVPTGGVVIQVVPLGGLEFVAGYFRGPSRDMGLRYLEYRITPEESTLINQYPRDHPIFTDPNGIKSKGWESLKDAYLDKQDVSLDMKRFRPTLKKAIAHIRKARAKANAGGGGNN

SEQ ID NO: 171545 - protein, 280 aa, Zea Mays
MVARFGDAGAGVEAAVRHHLEPPHRLVRARRRRPRAGRQRERHAGGAARRGGRPHLPRGVVAHQAVPAQGGPERDARRPRADGAVGARRGARVHGPARRPGAGVLGPRVHGELLPRVHGRDPAAVPDGAAVRRRGAAADRARADAAVRERGGDRARRGEARVRGGGVGGDARGGALRGAGQQLRRHHGRARRRADQRDQEQGLGVPQGCLPRQAGRVVGHEEVPAHAQEGHRAHQEGQGQGQRRRRRQQLGIAVHVLIHPPLTLLLFFLPSFSDYGSTCM

SEQ ID NO: 171546 - protein, 440 aa, Zea Mays
MVARFGDAGAGVEAAVRHHLEPPHRLVRARRRRPRAGRQRERHAGGAARRGGRPHLPRGVVAHQAVPAQGGPERDARRPRADGAVGARRGARVHGPARRPGAGVLGPRVHGELLPRVHGRDPAAVPDGAAVRRRGAAAGDGPPGVVGGQVRAGVQEHLQLRAGGPGPRPARALLPPRPGGAHQPRRLQHRPAPRPQRLLHAGLHRVHARRLRAPARRRRRRRWPVVEAAAEAAADRARADAAVRERGGDRARRGEARVRGGGVGGDARGGALRGAGQQLRRHHGRARRRADQHGVRADGRGGHPGGAAGRAGVRGGLLPGSVQGHGAALPRVPDHAGGEHPDQPVPARPPHLHGPQRDQEQGLGVPQGCLPRQAGRVVGHEEVPAHAQEGHRAHQEGQGQGQRRRRRQQLGIAVHVLIHPPLTLLLFFLPSFSDYGSTCM

SEQ ID NO: 171547 - protein, 141 aa, Zea Mays
MGGEMKPGRGLRTWAQRHLNVTFAVGFLLVLLTYLVVSRQLAVAAPGGAASRVVAGKQVVVRDAGDNAEGASKRRQEWQPKQAAAEEEETSGAVPTEEEESYPKRDEADGKPSDFWALHPCCQHLLLSTEYSGDNLGWGGL

SEQ ID NO: 171548 - protein, 468 aa, Zea Mays
MSFGSLFDGGSGGGGGGGGMQFPFSTGFSSSPALSLGLENPGGGMVGRMLPVGGAPAAGGMARDAADAENDSRSGSDHLDAMSAGAGAEDEDDAEPGNPRKRKKRYHRHTPQQIQELEALFKECPHPDEKQRGELSKRLGLDPRQVKFWFQNRRTQMKRRWSDMFSCMIAKATVLEEVTSGIAGSRNGALLLMKAELQVLSPLVPIREVTFLRFCKQLAEGAWAVVDVSIDGLVRDHNSGTASNAGNIRCRRLPSGCVMQDTPNGYCKVTWVEYTEYDEASVHQLYRPLIRSGLAFGARRWLAMLQRQCECLAILMSPDTVSANDSSVITQEGKRSMLKLARRMTENFCAGVSASSAREWSKLDGAAGSIGEDVRVMARKSVDEPGEPPGVVLSAATSVWVPVAPEKLFNFLRDEQLRAEWDILSNGGPMQEMANIAKGQEHGNSVSLLRASHECQPEQHADPPGDLH

SEQ ID NO: 171549 - protein, 72 aa, Zea Mays
MDRRFVRRSSEFYAAPAQLPSAHLLKMGELSPGFEQRLLQVATAQDADHHHGHAVPCRPRYGRTCGAGAIGA

SEQ ID NO: 171550 - protein, 100 aa, Zea Mays
MFNYKMDLRCYFTCLHVLKLLLFIAAIIIYGIYLSYMLVLFGIRILNLFKYVESMSLISLNLQQRLLQVATAQDADHHHGHAVPCRPRYGRTCGAGAIGA

SEQ ID NO: 171551 - protein, 653 aa, Zea Mays
MVSTIMTNTGVIATQGQAFCPSSSCGHLQDIRSPFRMQGDPQGCGFPEYELVCIDSKAIIHINNGRYFVTSISYSNSTFWVVDANLDNSSCPIPASNQRPYVNGLPSEGRTLLDPDTVTWAAFVSCSEMLSDVSSPFLSCCSGIYQPVNCRSTKNSFAYVFTTTFFPMVGDIKPSCRYLSMIPFGSRHVKRPDNASYDDIVKFMKNGFAVNFPYRNGRSYHLVINTCLKDANGYFNDKISNSSIVDQTLAAVFGIDLRFLRCVNDYSYRSKLFWAMVAMISTVVIVKFVIVFGILSRFVFAPLTVLTFLAYKYWKTRISIDAVEKFLQMQQALSPARYAYTDITAITGHFREKLGQGGYGSVYRGVLPGDVSVAVKMLSNSLCNGDEFISEVSTIGSIHHVNVVRLVGFCSEETKRALIYEYMPRGSLDKHIFSSEQSFSWDKLNGIALGIARGINYLHQGCEMQILHFDIKPHNILLDNSFTPKVADFGLAKLYPRDNSFVPVSAARGTIGYIAPEMISRNFGVVSCKSDVYSFGMLLLEMAGGRRNLDQHAERRSQTYYPAWVYSHLTRQEVGEICEAFDVHEVERKLCVVGLWCIQMKPHDRPTMAEVVGMLEAGADGLQIPPQPFFCGGELTGSTSYFSSELSAISENG

SEQ ID NO: 171552 - protein, 63 aa, Zea Mays
MKMTSLDPAYQWLNSLDTRKPTGTRLCPSDADPRAVGGAGAAPPASDPIPPPIPERLRPSDGC

SEQ ID NO: 171553 - protein, 87 aa, Zea Mays
MRTRCRSRSAARRCPASSSTPQSSSTLSNLVCVATSILPARVFPLCSNVGARGEEHLEEVMFEQEVYSSACSSSGWSHLTDHRVRSI

SEQ ID NO: 171554 - protein, 76 aa, Zea Mays
MKKIFSPVGATLRDSSFANGDTEGALDWIKNELSEVENIINTRSDYCAMIGSSGMAPFLEKAGCEHVKDMGKMTLA

SEQ ID NO: 171555 - protein, 769 aa, Zea Mays
MVKFSKQFEGQLVPEWKHAFLDYCLLKKDLKRMQHARHHAAADRRQAAGLTDTQETAAGHHAERASLSLSQWLLDRLPAGLFGSNAPNRDRHGVIHVHRRKLAGSASRGGGGDVYETELLEPLADDDGDAAAAREFFARLDAQLNKVNQFYRGKEQEFLERGRSLRRQMDILADLRAARAREDPSVASASAASEDEYTRYAMTSASDTDALQLSEQEEQATPLPTDGPGVTAQEDHQQQQDLEGSGTFAVRPPLSGCGRKSLKITIPLTTPSRTISALTDILWDELAISHFSSSSKKCIPDGKQSVSKTKLRHAEKMIKRAFVELYKGLGYLATYRSLNMMAFVKILKKFEKITGKEVLSIYLKVVETSYFNSSDEALKLMDEVEDIFVRHFAGDNRRKAMKYLRPAQRRDSHAATFFTGLMAGCFAALFVGYCVMAHMAGMYYYYSTPAPPSRARGTGGGSVSVSVSVSVYMETAYPVLSMFALLFLHLLLYGCNMVAWRRCRVNYGFIFESSPSPAGGELGPRDVFLVCAASMAAVAGVMFAHLALVLRWGYHASPHVEAIPAFLLLVFLLLLFCPINVVYRSSRFQFLRILRNIVLSPLYKVVMVDFFMADQLCSQVPMLRSLEYLACYYISGSYWTQEYGYCTNTKHIRDLAYAVSFLPYYWRAMQCARRWFDEGDTSHLVNLGKYVSAMLAAGAKVAYEKDRSLASLSLLVAVSSGATVYQLYWDFVKDWGLLQPNSKNPWLRNDLILRRKSIYYLSMMDEHAI

SEQ ID NO: 171556 - protein, 770 aa, Zea Mays
MVKFSKQFEGQLVPEWKHAFLDYCLLKKDLKRMQHARHHAAADRRQAAGLTDTQETAAGHHAERASLSLSQWLLDRLPAGLFGSNAPNRDRHGVIHVHRRKLAGSASRGGGGDVYETELLEPLADDDGDAAAAREFFARLDAQLNKVNQFYRGKEQEFLERGRSLRRQMDILADLRAARAREDPSVASASAASEDEYTRYAMTSASDTDALQLSEQEEQATPLPTDGPGVTAQEDHQQQQDLEGSGTFAVRPPLSGCGRKSLKITIPLTTPSRTISALTDILWDELAISHFSSSSKKCIPDGKQSVSKTKLRHAEKMIKRAFVELYKGLGYLATYRSLNMMAFVKILKKFEKITGKEVLSIYLKVVETSYFNSSDEALKLMDEVEDIFVRHFAGDNRRKAMKYLRPAQRRDSHAATFFTGLMAGCFAALFVGYCVMAHMAGMYYYYSTPAPPSRARGTGGGSVSVSVSVSVYMETAYPVLSMFALLFLHLLLYGCNMVAWRRCRVNYGFIFESSPSPAGGELGPRDVFLVCAASMAAVAGVMFAHLALVLRWGYHASPHVEAIPAFLLLSVSVPQDTEEHCTVTALQGCNGRLLHGRSALQPGAYATEPGVPGVLLHQWELLDAGVRLLHQHQAHQRPGLRRLLPAVLLESHAVRTEVVRRGGHEPPGEPGQVRLRHARRRRQSGVREGQEPGVAVAPRRRVQRRDGVPAVLGLRQGLGPAPAQLQEPLAQERPHPQEEIHILPVNGTEPCAEARLAADHHPSKFWELGF

SEQ ID NO: 171557 - protein, 80 aa, Zea Mays
MHLHCAVSILQLSSSLVAAAAGAGGPSEPSHGRWTALRRGERGPRSSSVSMISDQRRYTVSYRYEEEEDDAALPLPTVRA

SEQ ID NO: 171558 - protein, 625 aa, Zea Mays
MAAEAPPSASASSSSAPRPPAAAASASGGGAAGSAESYIGSLISLTSKSEIRYEGVLYKINTEESSIGLRNVRSFGTEGRKKDGMQIPASDKVYEYILFRGTDIKDLQVKSSPPPPPPQAASLHNDPAIIQSHYSQPASTSSNLPSAGGAVLPDLSSQAVQYGLQRPTFQSNLPLYQPGNAPRGSSAAPPAGNAPWGSSAEPPAGTTLSVPSMYWHGYYAPSSGLPPHLQQPLLLQPTPGLSVPQNLQYPGLNPSLPSGMQKLSELQPSLMPPINSQGSSGILPTTTAPASATLLAPESSKPQVPNMGSLFTPATSLGATFPYPSQPTPVAETSATVSQNITSFSSNKATALPGSTLSYQTASQSVSSTIAPSSSAQVEMAVPLLASSGQLLQNTSSMLSSSHSMQAPLQVASKEVKPVEPKAKVAEPLLPDPLLPDPPSQSLPENKEPILPLPKQTPQKFSQSVTTFTEEFDFTAMNEKFNKDEVWGHLGKKSQSRDKDGEVGDDVFDEDLEVEETDNPELSVKPVYVKDDFFDSLSSGTFGRGGPNGRGRPSERRRVDTETFGEFPRHRQPYRGGARGYRGGGRSRGSYYGGRGYGNTGTGGYGNTGTGGPGNSYSHRGYGRD

SEQ ID NO: 171559 - protein, 650 aa, Zea Mays
MAAEAPPSASASSSSAPRPPAAAASASGGGAAGSAESYIGSLISLTSKSEIRYEGVLYKINTEESSIGLRNVRSFGTEGRKKDGMQIPASDKVYEYILFRGTDIKDLQVKSSPPPPPPQAASLHNDPAIIQSHYSQPASTSSNLPSAGGAVLPDLSSQAVQYGLQRPTFQSNLPLYQPGNAPRGSSAAPPAGNAPWGSSAEPPAGTTLSVPSMYWHGYYAPSSGLPPHLQQPLLLQPTPGLSVPQNLQYPGLNPSLPSGMQKLSELQPSLMPPINSQGSSGILPTTTAPASATLLAPESSKPQVPNMGSLFTPATSLGATFPYPSQPTPVAETSATVSQNITSFSSNKATALPGSTLSYQTASQSVSSTIAPSSSAQVEMAVPLLASSGQLLQNTSSMLSSSHSMQAPLQVASKEVKPVEPKAKVAEPLLPDPLLPDPPSQSLPENKEPILPLPKQTPQKYNGSGLHNHHNFRGRGRGRGSAFSQSVTTFTEEFDFTAMNEKFNKDEVWGHLGKKSQSRDKDGEVGDDVFDEDLEVEETDNPELSVKPVYVKDDFFDSLSSGTFGRGGPNGRDFWRISTAQATLPWWRPRLPWRWTFPRFILWWQRLWKHRDRRLWKHRDRWPWKFLFSPGLWERLIIAEMCRQPYLWVL

SEQ ID NO: 171560 - protein, 544 aa, Zea Mays
MQIPASDKVYEYILFRGTDIKDLQVKSSPPPPPPQAASLHNDPAIIQSHYSQPASTSSNLPSAGGAVLPDLSSQAVQYGLQRPTFQSNLPLYQPGNAPRGSSAAPPAGNAPWGSSAEPPAGTTLSVPSMYWHGYYAPSSGLPPHLQQPLLLQPTPGLSVPQNLQYPGLNPSLPSGMQKLSELQPSLMPPINSQGSSGILPTTTAPASATLLAPESSKPQVPNMGSLFTPATSLGATFPYPSQPTPVAETSATVSQNITSFSSNKATALPGSTLSYQTASQSVSSTIAPSSSAQVEMAVPLLASSGQLLQNTSSMLSSSHSMQAPLQVASKEVKPVEPKAKVAEPLLPDPLLPDPPSQSLPENKEPILPLPKQTPQKFSQSVTTFTEEFDFTAMNEKFNKDEVWGHLGKKSQSRDKDGEVGDDVFDEDLEVEETDNPELSVKPVYVKDDFFDSLSSGTFGRGGPNGRDFWRISTAQATLPWWRPRLPWRWTFPRFILWWQRLWKHRDRRLWKHRDRWPWKFLFSPGLWERLIIAEMCRQPYLWVL

SEQ ID NO: 171561 - protein, 541 aa, Zea Mays
MQIPASDKVYEYILFRGTDIKDLQVKSSPPPPPPQAASLHNDPAIIQSHYSQPASTSSNLPSAGGAVLPDLSSQAVQYGLQRPTFQSNLPLYQPGNAPRGSSAAPPAGNAPWGSSAEPPAGTTLSVPSMYWHGYYAPSSGLPPHLQQPLLLQPTPGLSVPQNLQYPGLNPSLPSGMQKLSELQPSLMPPINSQGSSGILPTTTAPASATLLAPESSKPQVPNMGSLFTPATSLGATFPYPSQPTPVAETSATVSQNITSFSSNKATALPGSTLSYQTASQSVSSTIAPSSSAQVEMAVPLLASSGQLLQNTSSMLSSSHSMQAPLQVASKEVKPVEPKAKVAEPLLPDPLLPDPPSQSLPENKEPILPLPKQTPQKFSQSVTTFTEEFDFTAMNEKFNKDEVWGHLGKKSQSRDKDGEVGDDVFDEDLEVEETDNPELSVKPVYVKDDFFDSLSSGTFGRGGPNGRGRPSERRRVDTETFGEFPRHRQPYRGGARGYRGGGRSRGSYYGGRGYGNTGTGGYGNTGTGGPGNSYSHRGYGRD

SEQ ID NO: 171562 - protein, 577 aa, Zea Mays
MHFGLLAHQFEVLMDSKATMKLSYHQTKPNSHDLQVKSSPPPPPPQAASLHNDPAIIQSHYSQPASTSSNLPSAGGAVLPDLSSQAVQYGLQRPTFQSNLPLYQPGNAPRGSSAAPPAGNAPWGSSAEPPAGTTLSVPSMYWHGYYAPSSGLPPHLQQPLLLQPTPGLSVPQNLQYPGLNPSLPSGMQKLSELQPSLMPPINSQGSSGILPTTTAPASATLLAPESSKPQVPNMGSLFTPATSLGATFPYPSQPTPVAETSATVSQNITSFSSNKATALPGSTLSYQTASQSVSSTIAPSSSAQVEMAVPLLASSGQLLQNTSSMLSSSHSMQAPLQVASKEVKPVEPKAKVAEPLLPDPLLPDPPSQSLPENKEPILPLPKQTPQKYNGSGLHNHHNFRGRGRGRGSAFSQSVTTFTEEFDFTAMNEKFNKDEVWGHLGKKSQSRDKDGEVGDDVFDEDLEVEETDNPELSVKPVYVKDDFFDSLSSGTFGRGGPNGRDFWRISTAQATLPWWRPRLPWRWTFPRFILWWQRLWKHRDRRLWKHRDRWPWKFLFSPGLWERLIIAEMCRQPYLWVL

SEQ ID NO: 171563 - protein, 121 aa, Zea Mays
MTEKLALTTSAPSCSSTVMTSCSLKGLAASLMSTTSSVPSWHRTSMTGMRTPPPPPVDPAAAPAFRCFSASIRSLSCLMYAAALSSWSSCVTASCDGNIELLSVSLCRGQDRRFSVSPEIP

SEQ ID NO: 171564 - protein, 503 aa, Zea Mays
MIVPKPSIFIRKSSGFQPFPFQVGWWVGYAKGIDDSIGRIVRISPGVGRYVAKSYSPRQLVTASSGTPLFEIFLVREDDKTYTMKVVHLRPTKGTLGASSISSAITESPATVETPESSAISDSITEEANIDTPVKGNGDAEEKEQDVGSSKDTSVDGFKSLLNFFKSRIPEFKVQVINVDVSEETELAANSSEESVQDDVKSTPEGSLEEPTTEELEQEEDVPEEDMDEESKSTKVKLFISGVVHNKEDAGTKSYVRVPAEINNMEKDSFDLYIPGNGSGHDLPETKAAKQKVADMAAKLASELMPSDVAKALWGTTKSSSKINKEVQELLRLTLSKARVKLTDDTFFNRIIMDTNSMDPFNGLYVGAFSPYGPEIVQLRRKFGHWNSSDDVEFFEYVEAVKLTGDLSVPAGQITFRAKIGKGKRLENRGAYPEEFGVIASYKGQGRIAQPGFKNPRWVDGELLVLNGKSTIPHLGGAELGFLYSVPEQSFLVLFDRLNLPEC

SEQ ID NO: 171565 - protein, 498 aa, Zea Mays
MIVPKPSIFIRKSSGFQPFPFQVGWWVGYAKGIDDSIGRIVRISPGVGRYVAKSYSPRQLVTASSGTPLFEIFLVREDDKTYTMKVVHLRPTKGTLGASSISSAITESPATVETPESSAISDSITEEANIDTPVKGNGDAEEKEQDVGSSKDTSVDGFKSLLNFFKSRIPEFKVQVINVDVSEETELAANSSEESVQDDVKSTPEGSLEEPTTEELEQEEDVPEEDMDEESKSTKVKLFISGVVHNKEDAGTKSYVRVPAEINNMEKDSFDLYIPGNGSGHDLPETKAAKQKVADMAAKLASELMPSDVAKALWGTTKSSSKINKEVQELLRLTLSKARVKLTDDTFFNRIIMDTNSMDPFNAFSPYGPEIVQLRRKFGHWNSSDDVEFFEYVEAVKLTGDLSVPAGQITFRAKIGKGKRLENRGAYPEEFGVIASYKGQGRIAQPGFKNPRWVDGELLVLNGKSTIPHLGGAELGFLYSVPEQSFLVLFDRLNLPEC

SEQ ID NO: 171566 - protein, 167 aa, Zea Mays
MDEESKSTKVKLFISGVVHNKEDAGTKSYVRVPAEINNMEKDSFDLYIPGNGSGHDLPETKAAKQKVADMAAKLASELMPSDVAKALWGTTKSSSKINKEVQELLRLTLSKARVKLTDDTFFNRIIMDTNSMDPFNVHMDQKLCSSVGSSATGIVPMTLSFSSMSKQ

SEQ ID NO: 171567 - protein, 393 aa, Zea Mays
MIVPKPSIFIRKSSGFQPFPFQVGWWVGYAKGIDDSIGRIVRISPGVGRYVAKSYSPRQLVTASSGTPLFEIFLVREDDKTYTMKVVHLRPTKGTLGASSISSAITESPATVETPESSAISDSITEEANIDTPVKGNGDAEEKEQDVGSSKDTSVDGFKSLLNFFKSRIPEFKVQVINVDVSEETELAANSSEESVQDDVKSTPEGSLEEPTTEELEQEEDVPEEDMDEESKSTKVKLFISGVVHNKEDAGTKSYVRVPAEINNMEKDSFDLYIPGNGSGHDLPETKAAKQKVADMAAKLASELMPSDVAKALWGTTKSSSKINKEVQELLRLTLSKARVKLTDDTFFNRIIMDTNSMDPFNVHMDQKLCSSVGSSATGIVPMTLSFSSMSKQ

SEQ ID NO: 171568 - protein, 415 aa, Zea Mays
MAEKSPSSAPQGGSGGNESFDNLVIQAPQLMREDYIQNAVKFLSHPKVKGSPVFHRRSFLEKKGLTSEEIDEAFCRVPDPKPNGTDAVAAGRQQANNPSQSVVLQPYTEVQPQAATASATAGPIVPHTKAQLSWVNTLLGAGLFLGLGASAAITLKKLVIPSLKSWTRRVVAEGDENAKSEHTSKLCEEIREAIKVSASAFSDIAKINQEVLASKDEGPIDYQGRAFQQTNMYATPPNNSFDTGRNSFMPLAAESSYGPFPGSYSEQRVQRPGGYGFQQQTSSDRLNVVGPRSSYQGGSSNHHAGSNAMDDPAAVAAELQRRWVPPQPPGVIMPEAAAAIRQARSVPRQLPSGDGRLGADVPRQPEPAIAMATTEHVNVAPEAPGGELPSDGGGAMTADASNGGGSGEQQEQEAS

SEQ ID NO: 171569 - protein, 414 aa, Zea Mays
MAEKSPSSAPQGGSGGNESFDNLVIQAPQLMREDYIQNAVKFLSHPKVKGSPVFHRRSFLEKKGLTSEEIDEAFCRVPDPKPNGTDAVAAGRQQANNPSQSVVLQPYTEVQPQAATASATAGPIVPHTKAQLSWVNTLLGAGLFLGLGASAAITLKKLVIPSLKSWTRRVVAEGDENAKSEHTSKLCEEIREAIKVSASAFSDIAKINQEVLASKDEGPIDYQGRAFQQTNMYATPPNNSFDTGRNSFMPLAAESSYGPFPGSYSERVQRPGGYGFQQQTSSDRLNVVGPRSSYQGGSSNHHAGSNAMDDPAAVAAELQRRWVPPQPPGVIMPEAAAAIRQARSVPRQLPSGDGRLGADVPRQPEPAIAMATTEHVNVAPEAPGGELPSDGGGAMTADASNGGGSGEQQEQEAS

SEQ ID NO: 171570 - protein, 1099 aa, Zea Mays
MAEKSPSSAPQGGSGGNESFDNLVIQAPQLMREDYIQNAVKFLSHPKVKGSPVFHRRSFLEKKGLTSEEIDEAFCRVPDPKPNGTDAVAAGRQQANNPSQSVVLQPYTEVQPQAATASATAGPIVPHTKAQLSWVNTLLGAGLFLGLGASAAITLKKLVIPSLKSWTRRVVAEGDENAKSEHTSKLCEEIREAIKVSASAFSDIAKINQEVLASKDEDRKVLMKLTEAFESQENVFKSLSETLNRIRENQLSDCNFRNFGLLNSALITLLPKLEGAALVKDFRPISLIHSFAKLVTKMMANRLAGHLGAMVSPNQTAFIKKRFILDNFILVQRTARYLHQQRQARILFKLDISKAFDSVSWPFLIEVLRKMGFGQIWCDVVCGLLASSSTRILLNGVPGEIISHQRGLRQGDPLSPLLFILVMDVLNLLIQKASDEGLLQQLSSGTLHHRLSLYADDAVVFLRPVASDISLVLEILRLFGEASGLKTNVLKSSVFPIRCTEDDLMRVQASLPCPISDFPCQYLGLPLSLGKLSKAQLQALVDKAASVLPGWKADLMTKAGRAVYVQFVLTAKMIYAAMALDLPIWTIKAIDKIRRGFLWKGRKQANGGHCLVAWGKVTRPKVLGGLGITDLWLLSVALRARWPWLQRTDHSKPWSVLPVQACGAVEALINVAVVSQLGDGQDILFWKDRWLNGRRISEVAPEVLEHVPKCVVSKRLVKDALTNLNWVADIRGALSVRALAQVLDLCDLLEGLVLQPGIPDKHSWKFSASGDYSSSSAYQVLLLGAVEFRPAERIWKTWAPRKCKFFMWLVVHDRCWTADRLAKRGMDHPVCCPLCDQADETINHLLVECSFAKQFWFLFLRSGDFQVLCPSTGDGCFDSWWEKSAEVVGKPLSGGFNSLVILGPIDYQGRAFQQTNMYATPPNNSFDTGRNSFMPLAAESSYGPFPGSYSERVQRPGGYGFQQQTSSDRLNVVGPRSSYQGGSSNHHAGSNAMDDPAAVAAELQRRWVPPQPPGVIMPEAAAAIRQARSVPRQLPSGDGRLGADVPRQPEPAIAMATTEHVNVAPEAPGGELPSDGGGAMTADASNGGGSGEQQEQEAS

SEQ ID NO: 171571 - protein, 878 aa, Zea Mays
MKLTEAFESQENVFKSLSETLNRIRENQLSDCNFRNFGLLNSALITLLPKLEGAALVKDFRPISLIHSFAKLVTKMMANRLAGHLGAMVSPNQTAFIKKRFILDNFILVQRTARYLHQQRQARILFKLDISKAFDSVSWPFLIEVLRKMGFGQIWCDVVCGLLASSSTRILLNGVPGEIISHQRGLRQGDPLSPLLFILVMDVLNLLIQKASDEGLLQQLSSGTLHHRLSLYADDAVVFLRPVASDISLVLEILRLFGEASGLKTNVLKSSVFPIRCTEDDLMRVQASLPCPISDFPCQYLGLPLSLGKLSKAQLQALVDKAASVLPGWKADLMTKAGRAVYVQFVLTAKMIYAAMALDLPIWTIKAIDKIRRGFLWKGRKQANGGHCLVAWGKVTRPKVLGGLGITDLWLLSVALRARWPWLQRTDHSKPWSVLPVQACGAVEALINVAVVSQLGDGQDILFWKDRWLNGRRISEVAPEVLEHVPKCVVSKRLVKDALTNLNWVADIRGALSVRALAQVLDLCDLLEGLVLQPGIPDKHSWKFSASGDYSSSSAYQVLLLGAVEFRPAERIWKTWAPRKCKFFMWLVVHDRCWTADRLAKRGMDHPVCCPLCDQADETINHLLVECSFAKQFWFLFLRSGDFQVLCPSTGDGCFDSWWEKSAEVVGKPLSGGFNSLVILGPIDYQGRAFQQTNMYATPPNNSFDTGRNSFMPLAAESSYGPFPGSYSEQRVQRPGGYGFQQQTSSDRLNVVGPRSSYQGGSSNHHAGSNAMDDPAAVAAELQRRWVPPQPPGVIMPEAAAAIRQARSVPRQLPSGDGRLGADVPRQPEPAIAMATTEHVNVAPEAPGGELPSDGGGAMTADASNGGGSGEQQEQEAS

SEQ ID NO: 171572 - protein, 915 aa, Zea Mays
MAEKSPSSAPQGGSGGNESFDNLVIQAPQLMREDYIQNAVKFLSHPKVKGSPVFHRRSFLEKKGLTSEEIDEAFCRVPDPKPNGTDAVAAGRQQANNPSQSVVLQPYTEVQPQAATASATAGPIVPHTKAQLSWVNTLLGAGLFLGLGASAAITLKKLVIPSLKSWTRRVVAEGDENAKSEHTSKLCEEIREAIKVSASAFSDIAKINQEVLASKDEDRKVLMKLTEAFESQENVFKSLSETLNRIRENQLSDCNFRNFGLLNSALITLLPKLEGAALVKDFRPISLIHSFAKLVTKMMANRLAGHLGAMVSPNQTAFIKKRFILDNFILVQRTARYLHQQRQARILFKLDISKAFDSVSWPFLIEVLRKMGFGQIWCDVVCGLLASSSTRILLNGVPGEIISHQRGLRQGDPLSPLLFILVMDVLNLLIQKASDEGLLQQLSSGTLHHRLSLYADDAVVFLRPVASDISLVLEILRLFGEASGLKTNVLKSSVFPIRCTEDDLMRVQASLPCPISDFPCQYLGLPLSLGKLSKAQLQALVDKAASVLPGWKADLMTKAGRAVYVQFVLTAKMIYAAMALDLPIWTIKAIDKIRRGFLWKGRKQANGGHCLVAWGKVTRPKVLGGLGITDLWLLSVALRARWPWLQRTDHSKPWSVLPVQACGAVEALINVAVVSQLGDGQDILFWKDRWLNGRRISEVAPEVLEHVPKCVVSKRLVKDALTNLNWVADIRGALSVRALAQVLDLCDLLEGLVLQPGIPDKHSWKFSASGDYSSSSAYQVLLLGAVEFRPAERIWKTWAPRKCKFFMWLVVHDRCWTADRLAKRGMDHPVCCPLCDQADETINHLLVECSFAKQFWFLFLRSGDFQVLCPSTGDGCFDSWWEKSAEVVGKPLSGGFNSLVILGAWSIWKHRNRAN

SEQ ID NO: 171573 - protein, 434 aa, Zea Mays
MREDYIQNAVKFLSHPKVKGSPVFHRRSFLEKKGLTSEEIDEAFCRVPDPKPNGTDAVAAGRQQANNPSQSVVLQPYTEVQPQAATASATAGPIVPHTKAQLSWVNTLLGAGLFLGLGASAAITLKKLVIPSLKSWTRRVVAEGDENAKSEHTSKLCEEIREAIKVSASAFSDIAKINQEVLASKDEDRKVLMKLTEAFESQENVFKSLSETLNRIRENQLSQHSLLEEHVQPSSWNGPIDYQGRAFQQTNMYATPPNNSFDTGRNSFMPLAAESSYGPFPGSYSERVQRPGGYGFQQQTSSDRLNVVGPRSSYQGGSSNHHAGSNAMDDPAAVAAELQRRWVPPQPPGVIMPEAAAAIRQARSVPRQLPSGDGRLGADVPRQPEPAIAMATTEHVNVAPEAPGGELPSDGGGAMTADASNGGGSGEQQEQEAS

SEQ ID NO: 171574 - protein, 298 aa, Zea Mays
MIDVGQLTGWQKGEWIIPSAVRFVTRRMKLLITYWSSAALRSSFGSFSFGLGTSRCSVPLQGMAALTLGGRRVPRWWASLCRVVSTRWSYWVRGRSGNTGIGPIDYQGRAFQQTNMYATPPNNSFDTGRNSFMPLAAESSYGPFPGSYSERVQRPGGYGFQQQTSSDRLNVVGPRSSYQGGSSNHHAGSNAMDDPAAVAAELQRRWVPPQPPGVIMPEAAAAIRQARSVPRQLPSGDGRLGADVPRQPEPAIAMATTEHVNVAPEAPGGELPSDGGGAMTADASNGGGSGEQQEQEAS

SEQ ID NO: 171575 - protein, 470 aa, Zea Mays
MAALKASFRGELSAASFLDSSRGPLVQHKVDFTFQRKGKRAISLRRTCCSMQQAPPPAWPGRAVAEPGRRSWDGPKPISIVGSTGSIGTQTLDIVAENPDKFRVVALAAGSNVTLLADQVKTFKPKLVAVRNESLVDELKEALADCEEKPEIIPGEQGVIEVARHPDAVTVVTGIVGCAGLKPTVAAIEAGKDIALANKETLIAGGPFVLPLAHKHKVKILPADSEHSAIFQCIQGLSEGALRRIILTASGGAFRDWPVDRLKDVKVADALKHPNWNMGRKITVDSATLFNKGLEVIEAHYLFGAEYDDIEIVIHPQSIIHSMVETQDSSVLAQLGWPDMRLPILYTLSWPDRIYCSEVTWPRLDLCKLGSLTFKAPDNVKYPSMDLAYAAGRAGGTMTGVLSAANEKAVELFIDENYLDIFKVVELTCNAHRNELVTSPSLEEIVHYDLWARRYAASLQPSSGLSPVPA

SEQ ID NO: 171576 - protein, 195 aa, Zea Mays
MGRKITVDSATLFNKGLEVIEAHYLFGAEYDDIEIVIHPQSIIHSMVETQDSSVLAQLGWPDMRLPILYTLSWPDRIYCSEVTWPRLDLCKLGSLTFKAPDNVKYPSMDLAYAAGRAGGTMTGVLSAANEKAVELFIDEKISYLDIFKVVELTCNAHRNELVTSPSLEEIVHYDLWARRYAASLQPSSGLSPVPA

SEQ ID NO: 171577 - protein, 371 aa, Zea Mays
MAIEAIDKIRKGFLWRGRKEVKGGHYLVAWGKVCRPLQLGGLGIASLPNLCWALHMQWLWLQKTDPRRPWSSMSIQVPSTTRSFSKVLISEVGNGTNIMFWTDKWIHGKRVSDIAPRLFSIIPKIIINRRTMQHALLNRRWIADIKVALTVGAIVDYLHLWNILADFVLQPNTEDRHIFSLSSNGRYSAKSSYIGFFHGSTTFGHYKRVWRSWAPPKCCFFIWLVAHNRCWTADRLAKRGLNHPIRCPLCDEQGETVNHLLVNCVFSRVFWYNLLRKFGLHSLAPKPYAVSFMDWWEMVSETANGLVREGLDSLIILGSWMIWKHRNRIIFYGGPPSLPLIMEHADEERRGWEIVGAKGLSLLGAPLHRLL

SEQ ID NO: 171578 - protein, 93 aa, Zea Mays
MSPYLWFPNQTLLYLLQTYQRLSPNFHLFPILDSPDTRTLGATPPCSCASLVARQVRWRLARARCWVFVYPIGLLQRPIFKPMTNTVHALMHL

SEQ ID NO: 171579 - protein, 284 aa, Zea Mays
MRAITGGVVSSQPCPLHKAALFLKRFTESAASHLPSSDCCNYLRNAADATTQLSRFRKELGGSHKQGAANSDAHYYDDPVKGNRNHEDQESKGDMAIAADDSNRDSAAEAKLDVASGKKGNKKKNGDPLEDRAVARANSHILPSPEIATEKSKKKSRPNKEIIVDVKQEPSFVVEEELVSEKKSKKKKEKDHVKLEENVNEVEEKIVNDSAAEQRVAITERERKKKKHKQEECTEVVKEKKITDGDLDREKKRKKKRDRGDNYDNAPEQVEHINKKQKKHLGIS

SEQ ID NO: 171580 - protein, 268 aa, Zea Mays
MASEKSKILVVGGTGYLGRHVVAASARLGHPTSALVRDTAPSDPAKAALLKTFQDAGVTLLKGDLYDQASLVSAVKGADVVISVLGSMQIADQSRLVDAIKEAGNVKRFFPSEFGLDVDRTGIVEPAKSILGAKVGIRRATEAAGIPYTYAVAGFFAGFALPNIGQLLAPGPPADKAVVLGDGDTKAVFVEEGDIATYTVLAADDPRAENKVLYIKPPANTLSHNELLSLWEKKTGKTFRREYVPEEAVLKQIQAVSCVVCMQSRRSL

SEQ ID NO: 171581 - protein, 373 aa, Zea Mays
MGAEAAHGHPQQQPPSSLRPGREAAAPPAVVGLQLSALIDHVARVDWSLLDRVPGDRGGSQQVSIDELNHILDEVNAHILPSRNDLTPVTTIAGGSVANTIRGLSAGFGISTGIIGACGDDNQGLLFVNNMSFSGVDLTRLRAKKGHTAQCVCLVDASGNRTMRPCLSSAVKIQANEFRKEDFKGSKWLIVRYAQQNMEQIVEAIRIAKQEGLSVSLDLASFEMVRDSRSKLVNLLETGNIDLCFANEDEAREVIGLESDPEEALAFLGKYCKWAVVTLASKGCMAKHGKQVVRVPAIGESNAVDTTGAGDLFASGFLYGLVKGLPLEECCKVGACSGGSVTRALGGEVRPENWQWMYKQMHARGLLLPELKN

SEQ ID NO: 171582 - protein, 249 aa, Zea Mays
MGAEAAHGHPQQQPPSSLRPGREAAAPPAVVGLQLSALIDHVARVDWSLLDRVPGDRGGSQQVSIDELNHILDEVNAHILPSRNDLTPVTTIAGGSVANTIRGLSAGFGISTGIIGACGDDNQGLLFVNNMSFSGVDLTRLRAKKGHTAQCVCLVDASGNRTMRPCLSSAVKIQANEFRKEDFKGSKVPFFFPFWRTFHFVIYAFLLGETSRAYVFVKGSFGTQEIHRNGIGTSHELVQKHRKNTGFRK

SEQ ID NO: 171583 - protein, 187 aa, Zea Mays
MWLIVRYAQQNMEQIVEAIRIAKQEGLSVSLDLASFEMVRDSRSKLVNLLETGNIDLCFANEDEAREVIGLESDPEEALAFLGKYCKWAVVTLASKGCMAKHGKQVVRVPAIGESNAVDTTGAGDLFASGFLYGLVKGLPLEECCKVGACSGGSVTRALGGEVRPENWQWMYKQMHARGLLLPELKN

SEQ ID NO: 171584 - protein, 77 aa, Zea Mays
MWSSKLFILELLELKLHAKSHGNSTLIPTWPISTSILALYASLFCIEVTVELPRGRAELELSGYLSSLFSEVSCQVF

SEQ ID NO: 171585 - protein, 50 aa, Zea Mays
MTSTRRSAPFRNGSWRFLHGRGEATYDELLKIDGYSADLRRESSTRERSA

SEQ ID NO: 171586 - protein, 561 aa, Zea Mays
MTRAIFTVFSHLEGTGLASGLRCDGNGVGGPWRPPRSPSPCCWLPHCSPSPLLRWLEAHLALMVGKAALFRTDASLSSVQELNFVKSLCGSSSTGCWVGGHHYSTSTGNGWKWSDDSSVWNETVFLGEPLPANCSDPACKVATSNDFCTLVTNGQPSTITEKRCSESHGLICRMNHVDRCYHDHCHKEYFISIIAVSGFILATTLAVVVWLLVYRRSKKRRRSREVLSASAAALVAPQWKVFTSEELRSITKNFSEGNRLPGNAKTGGTYSGILPDGSKVAIKRLKRSSLQRKKDFYSEIRRVAKLYHPNLVAVKGCCYDHGDRFIVYEFVANGPLDVWLHHIPRGGRSLDWAMRMRAATTLAQGIAFLHDKVKPQVVHRDIRASNVLLDEDFGSHLMGVGLSKFVPWEVMHERTVKAASYGYLAPEFIYRNELTTKSDVYSFGVLLLEIISGRRPAQSVESVGWQTIFEWATPLVQSHRYLDLLDPLIQESPDAGVVQKVVDLVYSCTQHVPSVRPRMSHVVHQLQQLELKSAASEQQLRSGTSTSATSPMLPLEVRTPR

SEQ ID NO: 171587 - protein, 125 aa, Zea Mays
MPFSVKEYSKGDSRYAARDTAIVALEAITVGLKGPASLLAVYAIASRKPYGHILQFAVSLGQLYGCLFYFVTAYLDGFSFWASPFYFWAYFVGNNSLWVVIPTLVATRSWKKISAAFQADKVKTR

SEQ ID NO: 171588 - protein, 63 aa, Zea Mays
MNGSASNKSTLISLYHLVEKRSKPVSKDLRGEFCKAVDEADGPVITSRHGSCLLRDQSNICCV

SEQ ID NO: 171589 - protein, 214 aa, Zea Mays
MLPTRVNRRMKRIAAEIEGILRRMIATRESSLRAGKATSDDLLGLLLESNMEQLRGEGGGGGGGTSSGGMSTDDIIGECKLCSTSPAWRPRDHGAVRGAAALHAAAGVAPADIQAHGAWGRQGPDADEFRPERFAEGVARASSAGDAPPSFFPFGWGPRTCVGQTFALLEAKIGLAMILGSFTFELSPSYSHAPFPVVLLKPEHGAQVKLRKLP

SEQ ID NO: 171590 - protein, 62 aa, Zea Mays
MWHLLRSCPYCSTGQATEMISCTRFHSRVASSTDFTISTMAFPGSGFSSCGTVDPMHFFDFR

SEQ ID NO: 171591 - protein, 64 aa, Zea Mays
MLARLPELKKGPHKFHSRIRSYMDLQLQNQFLLLGVIQIGTLQIIVVYDWEIIYPTNQTTAHEP

SEQ ID NO: 171592 - protein, 100 aa, Zea Mays
MNDKIADAKAMFQTLRKKAFTLFHAWNILRHEPKWSSIKDSTMATKKLDPHNGNEDDGHDTPRPPGRKAEKDKLRARKREDNDNDALMEELKKLESQDWR

SEQ ID NO: 171593 - protein, 61 aa, Zea Mays
MSQVVFFFSIIFLTLPQVSNNHISLLTWASPQCHSRTHPKTTQNGAHTLRQPSLQTSASGS

SEQ ID NO: 171594 - protein, 401 aa, Zea Mays
MALECARDSLLKKTMDNKENTDKFRSDLMNIAMTTLSSKILSQDKEYFAELAVDAVLRLKGSTNLESIQILKKPGGSLKDSFLDEGFILDKKIGIGQPKRIENAKILVANTAMDTDKVKIYGARVRVDSMSKVADIEAAEKQKMREKVQKIIAHGINCFVNRQLIYNFPEELFADAGILAIEHADFEGIERLALVTGGEIASTFDNPESVKLGQCKVIEEIMIGEDRLIHFSGVAMGQACTIVLRGASEHVLDEAERSLHDALCVLSQTVNDTRVLFGGGWPEMVMAKEVDELARKTPGKKSHAIDAFSHALQAIPTIIADNAGLDSADLISQLRAEHHKENSTAGIDVITGTVGDMQKLGIQESFKVKQAILLSATEAAEMILRVDEIITCAPRRREDRM

SEQ ID NO: 171595 - protein, 289 aa, Zea Mays
MDTDKVKIYGARVRVDSMSKVADIEAAEKQKMREKVQKIIAHGINCFVNRQLIYNFPEELFADAGILAIEHADFEGIERLALVTGGEIASTFDNPESVKLGQCKVIEEIMIGEDRLIHFSGVAMGQACTIVLRGASEHVLDEAERSLHDALCVLSQTVNDTRVLFGGGWPEMVMAKEVDELARKTPGKKSHAIDAFSHALQAIPTIIADNAGLDSADLISQLRAEHHKENSTAGIDVITGTVGDMQKLGIQESFKVKQAILLSATEAAEMILRVDEIITCAPRRREDRM

SEQ ID NO: 171596 - protein, 302 aa, Zea Mays
MLLTYLLPHHNITFQASWPGLFVDKKGTYWDVPLSLSADLASVGSSSGLSYHLLLQQNSGEPKCFGGDETDDVPTALLPGLCAKVAISMKKSIDAWRKKEDKLKKVQPYDVFLSDSHVSLTGIVGGVASGYLGDCSRRVAIRDETHKSNAFIMFDERNKRAAFADLFASVTFTAQYGNFQRLFLDLTKASARFDITSGSLFLCGASRLAQDFFFSRRPDVETFCDICPDVTVSFQQQIVGPFSFRVESSVAIDPRSQDHFVRVDDPIFAIDWALKVLGSAKATAWYSPKHQEAMMELRFYET

SEQ ID NO: 171597 - protein, 381 aa, Zea Mays
MMTPGSTSLERRLLAYQVTTHASLISPLVHSAAAPPPPAFDDDQDTGPRRRRLNSSVQMGHAESGEALAARRPVREILGVAPVSVRHVEAGLYGGGVSSPKGAPSIALVTGDTHANAVEPVIGCIDAGLCLPLENVHGPDTVTLGVAVSSLFPSSSRSPVGLMPSSEIPGAHDGPGGEVFLSIVDVDVDSSVPAVETLSASSSLPGGPAIATRVGNVLKPSMKAVGAGLRMWPCPPIKYFRRKPRGAAAQQSPLSAAQSATTADFIARMSRPAARVLCVSQKRQRRPRAPHEGSLPRRSRRLARADVEKVMAPARVSKGKWRIANELGLLGGDPSESLSLEVLDNYAKVFGERLTNLQVKALAALFNWTVPEDLQGAVVQA

SEQ ID NO: 171598 - protein, 510 aa, Zea Mays
MAVPTKPSPPPPPLPTLDMLHGQTLVVDVEAWILRPPVSAFPYFMLVAVEAGGFLRGLLLLLLYPLMLLLLGDGARAKAMATVALVGLEEKEVARVGRAVLPKFFLEATAAEGVAAVQAAARVVAVTATFPRVMVDGFLREYVGVDAVVGPEVRSVGGVLAGLMDDEDADEVAAKTLRAVFGDDLEAARKKGAVGLVGPASSGRVHYLLCPYYCKETFAVSETDTRGWRPLPRDKYPRPLVFHDGRLAFAPTPPAALAMYTFLPFGIVLVVFRIIAFSFLPYRVCFPVGALTGVHYRLVAGHEPTATRQGGGGRLYVCNHRTLLDPVIVAAALGKPVTAVTYSLSPVSELIAPIRTARLTRDREKDQRNMAAVLARGDLVVCPEGTTCREEYLLRLSPLFAELGVDVNPVALDTRVGMFYGTSTKPGRKWMDPFYFMMNPRPAYRVEFLPRAATAPVDNGGRGHSIDVANRVQRELGKALGFELTGLTRKDKYLTLAGNEGVVPTAPKNH

SEQ ID NO: 171599 - protein, 343 aa, Zea Mays
MAMKSSSLCNPFVSLFFFLLRKLAGHRYHRGRMAVPTKPSPPPPPLPTLDMLHGQTLVVDVEAWILRPPVSAFPYFMLVAVEAGGFLRGLLLLLLYPLMLLLLGDGARAKAMATVALVGLEEKEVARVGRAVLPKFFLEATAAEGVAAVQAAARVVAVTATFPRVMVDGFLREYVGVDAVVGPEVRSVGGVLAGLMDDEDADEVAAKTLRAVFGDDLEAARKKGAVGLVGPASSGNFRCKRDRHAGMATAAAGQVPEASRLPRRPPRLRAHAAGCARHVHLPPVRHRARRLPHHRLLLPPVSRLLPGRCAHRSALPPRGRPRAHRHAPRRRRATVRLQPPHAA

SEQ ID NO: 171600 - protein, 245 aa, Zea Mays
MAAAVEGVRHRTLEANGVRLHVAEAGPEEGSAPVVLLLHGFPDLWYGWRHQMSALAARGYRAVAPDLRGYGDSDSPPDASSYTTFHVVGDLVALISDLGQRQVFVVGHDWGATVAWQLCLLRPDLVRALVNLSVVYHPRRPEMSPLQAIRAACGEDHYMCRFQDAYRNLVLLKLNLLYMTSSGCLRRHLACASQLLLFCPRTRASLTLLIQMELVLHGYQRKIFLTMQKNLRKQALLEDLTTTGA

SEQ ID NO: 171601 - protein, 139 aa, Zea Mays
MRKPAPLILPKDKSFFDSLDSDGTCPPWLSEEDISYYAEKFAKTGFTGGLNYYRCIDRSWELSAAWTGAPIKVPSKFIVGDLDITYNAPGVPDYIHKGGFKASVPNLEDVVVMEGVSHFINQEKPNEVSDHICEFFSKF

SEQ ID NO: 171602 - protein, 82 aa, Zea Mays
MSWELSAAWTGAPIKVPSKFIVGDLDITYNAPGVPDYIHKGGFKASVPNLEDVVVMEGVSHFINQEKPNEVSDHICEFFSKF

SEQ ID NO: 171603 - protein, 52 aa, Zea Mays
MCFCGPCLCGPCFCGPVPCRARPAHMYMYTYERRKQLAKLRRYADIFAPHKY

SEQ ID NO: 171604 - protein, 92 aa, Zea Mays
MLGKGSVQGTHQGSIWLKKNDSDERDQAQHHLEESDSATMEEDDSYGPPQDRNEEDFHLNDDLLFRSCLCRCIARPSSCKLLFSTLRLHCWT

SEQ ID NO: 171605 - protein, 387 aa, Zea Mays
MGFLACLCRCPQDGDDDEKEGEQFRINHQVVAVKQLDLNGLQGNREFLVEVLMLNLLHHPNLVNLHGYCVDGDQRLLVYEYMPLGSLEDHLHDLAPNQQPLDWKTRMKIAAGAAAGLEYLHDKANPPVIYRDIKPSNILLGEGYHAKLSDFGLAKLGPVGDKTHVTTRVMGTHGYCAPEYALTGQLTVKSDIYSFGVVFLELITGRRPQDSDRPPEEQDLVAWARPLFKDQKKFRKMADPSLCGRFPKRGLFQALAIAAMCLQEKAKSRPPMREVAAALSYLASQAYDRNNNAAAHRNRAGPSTPRVLDDQIGQDTCTLANQQGAQMSMHVGTDHAMPEVKEASCSGSHRGGRGRVTPNGADRERALADANVWAEAWRRQEKASKMR

SEQ ID NO: 171606 - protein, 166 aa, Zea Mays
MLTAALLYWCVCCACAEQQMLPGVQTRKQFQIDEAWHYWRVTATLNRSLTTTPNRTNGTPGHGPWPCSQKKPRRRGGGSKRATSIKAATATRANATRMLSSTVSRHTFPMDGLAAWGMAVQRGLQLQAGKLKSDAWMRVLVLVIVVEVSPSLWVNCSSKALLFFFL

SEQ ID NO: 171607 - protein, 188 aa, Zea Mays
MIDDKQGQSSSERPARRPKEICRRSRTDLLRILHQGRPRRTGGAGGAGPGPLRRRARWPPKTVPYADRRQLGGVVLSFAWPVRCGLGCAHVRTYGYGSGVDIPAGLSGSCSSSSRRPSAYGWHGTRHVRPIRRRLPISDIKAGASLMHPRQHFAFQPILKSGANLLSQCVHVNVAFQPILIVCSRFQF

SEQ ID NO: 171608 - protein, 126 aa, Zea Mays
MSALYPISCHTSLRCTLFLLFVYYMPAFKYGYEQLAADQRGSDENGYSNGLDKFNILKYICIKFNVNFSYVIKHIIINKNKIVYKFLYTLFAHVTKKVKKYLYSNLISNILIRYIINLMSTFYEFL

SEQ ID NO: 171609 - protein, 183 aa, Zea Mays
MVSEASVNRNRSTIIVPAGSSGEEGWEAFRSVLLEINNEATRLYVLPNHPNQQHMEPPERLPGLSDDVGAGFIAGHGSQSASGPEVDVERLVDLPPQEEISGMGMSKVIRADQKRFFFDLGSNNRGHYLRISEVAGADRSSIILPLSGLKQFHEMVGHFVDIMKDRLEGMTGANVRTVEPSQR

SEQ ID NO: 171610 - protein, 200 aa, Zea Mays
MEEGILDVELMDRQIPGEGKGEDGVNGGELDDGAKGLVVVDSGALGEAPKDPTSLVAVEGAVQGQLVAKESLAGDHVGAWSTRHQVPGVVDQQGHVLLHSTTPVWVSEGGANGEDRGGIRRSGVISGQNQPVDGAKKIGDAPSHHRVDVPGVAVDGDRVIHRQLRAGRQDVGCHGRGRLASVVDDDGVGEASRARRQGHA

SEQ ID NO: 171611 - protein, 331 aa, Zea Mays
MGVLGGAPPASCPATRHCAEWARIYLRYCLCSQKEGAALALGLISVISWGFAEVPQIMTNYRQKSTEGLSVAFLMTWIVGDLFNLVGCFLEPATLPTQMYMALLYTITTLILTVQTIYYSHIYHRLEAKKSRAASKAQKHQRADASLRERLLGAKDGVLSRNNGSDATVLIPSSPIPVNVKLVDQYHGSSPNTDYYYMSARSLSRSPVPTAGTWLGSNRQSLMTPPQTNDQRGSLIGEIAPAHSAPSTVTKNALSVAPWMGLLLGTCLLHILIGNTHREMPSGTVIPVGRRLLVFVEGHGNSSLSHGNGSEIGRYLGWAMAIIYMDAKRPR

SEQ ID NO: 171612 - protein, 262 aa, Zea Mays
MVRMNVLVYATCFADAASSSELSLAYVKLIQQLAVFKGYSAAFCALKLAEKKFPSSTSLHIQLLGMQILHERALHRGHLKVAQQICDEFGVLSSSVSGVDIELKTEFSVRRARTLLAAKQFSQAAAVANSLFSTCYKYNMQVENASVLLLLAEIHKKSDNAVLGLPYALASQSFCKSFNLDLLEASATLTLAELWLDLGSSHAKKALSLVYQSLPMILGHGGLELRARAHVVLAKCHLSDLKFSGILQHFVLHYVENLLLIL

SEQ ID NO: 171613 - protein, 253 aa, Zea Mays
MQILHERALHRGHLKVAQQICDEFGVLSSSVSGVDIELKTEFSVRRARTLLAAKQFSQAAAVANSLFSTCYKYNMQVENASVLLLLAEIHKKSDNAVLGLPYALASQSFCKSFNLDLLEASATLTLAELWLDLGSSHAKKALSLVYQSLPMILGHGGLELRARAHVVLAKCHLSDLKFSVLEDPEAVLDPLNQATEDLQALEYHEMAAEAYYLKAMAYNHLGKLDEREEAAARFKDHVTALETPHNEEDSLKY

SEQ ID NO: 171614 - protein, 134 aa, Zea Mays
MAEMEPSIGNHMAEDQPTPAASTVEEAAMDADTSGERRSAAALVGLLRGFLAVQQRRAEAYSTLRRGFSEYMAYGGELAYQQLCGNITAEFNDCSKQVLEIISLLSMPEFSRSDLADLLKGVQAHEKEKLHLVS

SEQ ID NO: 171615 - protein, 254 aa, Zea Mays
MSRHRVETCDSWRPPRKNHAGAPPLLRAGPRLLAFASLSVRDGGDSAAAVAKAVEEAVVVRSDEVKEAVAGEERKKTKSTERRLPPAAQLVSHPLALLALVPNSAAIFAAGAAAGTVAKTVTAPLDRVKILMQTHSVRVAGESAKKGVGFLEAMADIGKKDGLKGYWKGNLPQVIRIIPYSAVQLFSYEVYKKIFRRKDGELSVFGRLAAGACAGMTSTLVTYPLDVLRLRLAVQSGHSTLSQDEEICTREVQE

SEQ ID NO: 171616 - protein, 382 aa, Zea Mays
MSRHRVETCDSWRPPRKNHAGAPPLLRAGPRLLAFASLSVRDGGDSAAAVAKAVEEAVVVRSDEVKEAVAGEERKKTKSTERRLPPAAQLVSHPLALLALVPNSAAIFAAGAAAGTVAKTVTAPLDRVKILMQTHSVRVAGESAKKGVGFLEAMADIGKKDGLKGYWKGNLPQVIRIIPYSAVQLFSYEVYKKIFRRKDGELSVFGRLAAGACAGNLPTGCSPAQASSSIWTQHFISEGLASFYGGLGPSLVAIAPYIAVNFCVFDLMKKSVPEKYKNRPETSLATALLSATFATLMCYPLDTVRRQMQMKGTPYNTVFDAIPGIVERDGLTGLYRGFVPNALKNLPNSSIKLTVFDTVKTLIATGQKEMDKLIQENEEKRS

SEQ ID NO: 171617 - protein, 1043 aa, Zea Mays
MPLPGGNGEPSPPPPPFPSLIKLGCAVTARHVDRLLTVLLRRRRHRLLAALASQALANGIAPTPRTHLLAASALLDSARPRDAAQRLALASSTSTRHLWDALLRRACARGGDPRHALELLSAAIEDHGMVLSPSTYCGMVVLLCAHGEVDCALRVFDIMTNRGCQVDDRICSSIVSGFSRTGKAGAGLHFYDKVKRQFSGFDPGLVTLTSVVHALGLEGRTGEMAELMREMECKGMNADAVFYGSMVHGYMSRGFLMEGLREHRSMLGKGITADVINYTTVIDGLCREGSVEKVTGFLDEMVRVDAKPNLITYTSLVGGFCKRDRWEDAFSIVRKLEQTGMVVDEYVYSILIDSLCKMDDLDRAFSLLTEMENKGIKASIITYNAIINGLCKAGHCEKAVEISEGVAADNFTYSTLLHGYINRGDITGVMAMKDRLEGSGISMDVVTCNVLIKALFMINKVNDAWSLFHKMPEIGLRPNTITYHTIIDKLCKAEQVDKALELFDEYKKDAGFSSAVVHECLIRALCNGGKVNMADQIFYDLVQKKIRPNFFNCRKLIHAHFKGHGEHSVLDFICKVGELDIDLFSSVCNYASAFLSKRNCCQAAMDAYKLLRIQAIAVSSKTCCKLLKSLHRNGNEEVIQPLLCDFIKIHGLLDLTMINMLSCYLSEKDISKTIWFSNYMDKGSVPVSVLRGAVFALKKQGEVLDACNFLKVAEQSGFSVDLTMYSIVVDGLCKGGYLEKALDLCEGMKKEGFQPNIVIHNSVLSGLCHQGCLTEAFRLFDYLENSKMLPTIITYTILIGALCREGLLDDADQLFQKMSTKGIKPTTRVYNLLISGHCNFGLTGKALELMSHMEELFILPDCFTLGAIINGLCLKGETEAALRFFNEYRHRNIDPDFVGFMSLIKGLYAKGRMEESRGILREMFQCKEVTELINSVGDKIQAESLVDLLSSACDQGRIDEIVTILNEVGLMLLSSSNSISYNALAHIKKMEMIVYQNRVVTLILTTEICLGSLSMMILSHIMLVLLHFARKGSFLRPTRQLKQ

SEQ ID NO: 171618 - protein, 378 aa, Zea Mays
MELAFLLRHVGSQVVWITNQRSQETNDVTYSLEHRMLNHGVQVLPARGQEAVDIALKADLVILNTAVAGKWLDPVLKDHVPKVLPKILWWIHEMRGHYFKVEYVKHLPFVAGAMIDSHTTAEYWNSRTSDRLKIQMPQTYVVHLGNSKELMEVAEDNVARRVLREHIRESLGVRSEDLLFAIINSVSRGKGQDLFLQAFYQALQLIQHEKLKVPRIHAVVVGSDVNAQTKFETQLRDFVVKNTIHDRVHFVNKTLAVAPYLAAIDVLVQNSQGRGECFGRITIEAMAFKLPVLGTAAGGTTEIVLDGSTGLLHPAGKEGVAPLAKNIVRLASHAEQRVSMGEKGYGRVKEMFMEHHMAERIAAVLKDVLRKSQEHSRS

SEQ ID NO: 171619 - protein, 225 aa, Zea Mays
MKDWVSELKKDNAELNDKLMEKQDELEKARQEFLEDILTRDTEILRLKQLLDEKAEKNNSTASGFHCLTPEAILENSTSMSPKRKTPLSHGKEKRVQLSENAPHSSPAKESQELVCSRRRTCIRGNGTNEIRSAHMLRLLLQSLVRMKVSVNDESEIFSVSVSHEASGYSFTLTWLEKSDEWSYKLSSLGTLGRIAADWMRQDIRFSTKMCRMFVERISSIITKG

SEQ ID NO: 171620 - protein, 466 aa, Zea Mays
MAEAAADSSNSAVDGGGSNVQNDYPTIDPTSFDVVLCGTGLPESVLAAACAAVGKTVLHVDPSPFYGSLYSSIPLSSLTSFLSPEASPPTSSAAAAASDSRTVVDLHRRSVYSDVETSGTVPEPARRFTVDMVGPRVLYCADEAVDLLLRSGGSHHVEFKSVEGGSLLYWEGCLYPVPDSRQAIFKDTTLKLKEKNILFRFFKLVQAHIAAASASSDETGQGDASTKIPEEDLDLPFVEFLKKQGLPPKMRAVVLYAIAMVDYDQDGADPCDKLTTTREGIQTIALYSSSIGRFANAEGAFIYPMYGHAELPQAFCRCAAVKGALYVLRMPVVALLMDEKHFLGARLASGQDILCQQLIIDASYKIPTLDVPFDGSDSWKVVRGVCIISKSVKQGSSNVLVIFPPKSGCSGSASSVEQQSRSMPSWDVYIISVYSLYRCLSRKAIHKKSNRHSFQSSGFRWFRRPF

SEQ ID NO: 171621 - protein, 131 aa, Zea Mays
MGKDFNSSSSVGDHGVDVEVTMVIGEDEIEGAKWTMDNVKFSVKERIEAIATKEELEHLVMLCRSEADAMGRITAGILCLLKLDKSLGQGTIEQLRNLGNGGWNYNRNRGGGGGRGRGNWRYGVSVLGICS

SEQ ID NO: 171622 - protein, 165 aa, Zea Mays
MSFRFKKAGIEGLQAIKPRLRDQCTQKGPSNNHEMGKDFNSSSSVGDHGVDVEVTMVIGEDEIEGAKWTMDNVKFSVKERIEAIATKEELEHLVMLCRSEADAMGRITAGILCLLKLDKSLGQGTIEQLRNLGNGGWNYNRNRGGGGGRGRGNWRYGVSVLGICS

SEQ ID NO: 171623 - protein, 148 aa, Zea Mays
MLIYPFLAKTVDHITLVRAVALLTLPVLASYPFFPSLSGFGLMVVVNCASFLKNTFSVTTITVFNILMNEAVTQDVRAAANGIAVTLMSISKAVAPAVAGIIFSWAQRRQTAAFLPGDHLVFFILNIFTFIGFVFTFRPFFVRGSAKH

SEQ ID NO: 171624 - protein, 104 aa, Zea Mays
MPCAVATHRAHQAAPSPIHLLQTASPHPSRPCSRNPEPNPSQSTSALRRAALHVLATQSFAASIAQEDLRCSHRCRDRDLFPSFEELTIKRWRPSDLALRVLRG

SEQ ID NO: 171625 - protein, 97 aa, Zea Mays
MRRSYASRPPGRPISYSSSPNRLSPPISPMFAKPRAEPLPVDLGSSASCPPCPGHSVVRRVDRPGRSAMLSSLPRLVAGSRFVSKLRGIDDQALATK

SEQ ID NO: 171626 - protein, 86 aa, Zea Mays
MILGAHRDKKEQTQAEHYTDAFADTITVMTSLVALSFYGASQIKFHWVERYDKILVGTVLCLVGVLTYVFHHHDGDEHVHQKLVSP

SEQ ID NO: 171627 - protein, 379 aa, Zea Mays
MLAPLLAAFAVVFLLLLSRPCARDMRLFLASLCQQLVLSLLGFLAGLRLLSGVAAASAATETMPLMPSFKRKRAAATVENAEEAAATAGGGETSVLDLPELAIDCILEKLRPAELRSMAAVCRSMRERCRGDHLWERHMTNRWGRVLGRAARDEWRTHLASASESRAAGGGGKRRKWLAALSCVCPVVSWMRPRADGGKSSAPVLDDSIMSWYLSVESGKFWFPAQVYNREHGHVGFMMSCYDAALSYDFHTDTFRARYPPHGRRTVVLEDGVQWDRVRAPPVDTLAHDLHTSDCLHELRPGDHIEIQWRRNKEFPYDTVVLEFNQYTPGSRWRQALVKRKEHREEGNEGDGFYGGIRKLRGKDDISKWRQLWPTDVLE

SEQ ID NO: 171628 - protein, 167 aa, Zea Mays
MMSCYDAALSYDFHTDTFRARYPPHGRRTVVLEDGVQWDRVRAPPVDTLAHDLHTSDCLHELRPGDHIEIQWRRNKEFPYGWWYGVVGHLESCDGSEHFCRCHLSDTVVLEFNQYTPGSRWRQALVKRKEHREEGNEGDGFYGGIRKLRGKDDISKWRQLWPTDVLE

SEQ ID NO: 171629 - protein, 473 aa, Zea Mays
MMMSSENSSAAGAADDESRLEPWRELFRDRDIYDVISKAILVAATDSPQEFRRRRDGIVEQIYTAPTVPVPQGRAAGERSGRAALEVSDKGSKVASCTVVAPADEGNNSKKKGTAAAHHQHANGNGDSADTDAFGASGMDWLQSLAEEMDAETQQIDEVLRIKEILLNHHELSSDTLFDSLRRLQLMQLTADKIKSTEIGGAIAAMRKHKSHKIRMLVHKIVKDWKAIVDDWVAATKATMDSGSNKHMDTSDTVSTEDGGLATPPMDIGALYLVSHGTEIQNVSEFLHGMDDDDRITGKRRPSRNMSPPVTHKKTTQEQGSQAPRVRIKVRHSSTEHARWVLSKRSSVEKKSFEENHGTVTRISPVLEEGELPSGHVLLEKNGMPTQSSAGPEVGIWKRKRNAQLTEMDMDETKRKLRGAYQEAENSKQRRAIQVVELRDIARSRDNKHVIRCRNPSTKSMDLTNRTHTTNPS

SEQ ID NO: 171630 - protein, 191 aa, Zea Mays
MAGSGNRRFGQDMVSSSTHFSQWQMVWVGDHVPGGRVDLQCGGPIWPPMSARSGANSDSLAVTTFRCSFRCSDDLSLHPWISRRLGTRHRNEGNQESKRPRESQSTRRGTRELGIVKRARGDELLRFMDGASKEPLRKHCRSSHCSLIYTSWDLKVATGERGARHWVLCWFCWGYLFPWKGHQRRAMGHVR

SEQ ID NO: 171631 - protein, 156 aa, Zea Mays
MASGEGWEAAVRAEVGAVAWWDDLDSADLRARFKAFTGQRSDWPQPTVLFWKDLLLRVARRLRVCSAPAHHVTSAWFARPGGLTPLCLPQVLEEMRADGDVLLKSELIDPSSTNLHQLVRRVRLMTISSRKAVWQEDILVFKLLIELIAGTSCRYC

SEQ ID NO: 171632 - protein, 238 aa, Zea Mays
MASGEGWEAAVRAEVGAVAWWDDLDSADLRARFKAFTGQRSDWPQPTVLFWKDLLLRVARRLRVCSAPAHHVTSAWFARPGGLTPLCLPQVLEEMRADGDVLLKSELIDPSSTNLHQLVRRVRLMTISSRKAVWQEDILVFKLLIEERAADIARQLSDSHWTSTCVVTISKFNSFFVDMDDAHIALCFLTQHGKARYLLGRKQDPIEKRSCKNSLMCLIDDGRFQGEGHWHPSSLEIN

SEQ ID NO: 171633 - protein, 411 aa, Zea Mays
MASGEGWEAAVRAEVGAVAWWDDLDSADLRARFKAFTGQRSDWPQPTVLFWKDLLLRVARRLRVCSAPAHHVTSAWFARPGGLTPLCLPQVLEEMRADGDVLLKSELIDPSSTNLHQLVRRVRLMTISSRKAVWQEDILVFKLLIEERAADIARQLSDSHWTSTCVVTISKFNSFFVDMDDAHIALCFLTQHGKARYLLGRKQDPIEGVKVALTASQVPAVSKLDHDTLHLVWTEEKLQEQLDVLDRRWEISRRRALASFKSGDKLAAYRYVRQSKLFSQSRSRCTQLLERIEEVISLIASAESNKKVYEAIQIGILAMKDNTVSIDEVNIHMKEIDELVAAQREVDAALVPLQSLDDEGDIDEEFSKLEAELQDDVPHIHVQEPMAPSNEESPDEVVLSSSFHKVDFLQK

SEQ ID NO: 171634 - protein, 222 aa, Zea Mays
MDDAHIALCFLTQHGKARYLLGRKQDPIEGVKVALTASQVPAVSKLDHDTLHLVWTEEKLQEQLDVLDRRWEISRRRALASFKSGDKLAAYRYVRQSKLFSQSRSRCTQLLERIEEVISLIASAESNKKDNTVSIDEVNIHMKEIDELVAAQREVDAALVPLQSLDDEGDIDEEFSKLEAELQDDVPHIHVQEPMAPSNEESPDEVVESLSHNMSRIRLEPI

SEQ ID NO: 171635 - protein, 60 aa, Zea Mays
MEAQPAVGRGGTADLRHRRPPTPQQICAQDQQPASHPLRLHSASALDQQPAILHLHCSLF

SEQ ID NO: 171636 - protein, 95 aa, Zea Mays
MKDNTVSIDEVNIHMKEIDELVAAQREVDAALVPLQSLDDEGDIDEEFSKLEAELQDDVPHIHVQEPMAPSNEESPDEVVESLSHNMSRIRLEPI

SEQ ID NO: 171637 - protein, 95 aa, Zea Mays
MLPAVLLSLHGSPPTFFLKRWFQYPKNLVHILFDAYRLVTGILLYFLDFSAYAVHKFSYFQCTESVVHICIWHLLEKLKNTSYHRRILCKWYRVF

SEQ ID NO: 171638 - protein, 195 aa, Zea Mays
MTDCWIGYPQNQSHTANAIPSPPVPFQWAIPNSKPNCLTSSRRVIPSASAAHALAGSLLRNAVGNGRSYRHGHRCVCGLTATQWEPKAARLRHRGLRLQRRGTGLHRRAAVRGLRRGGRRHQWPLHRAGAVQAARRRGRACHGGPRPLRRQHHPGRATRGRVPLRLGREKFVIVSLSSLNFVRNNWIYTIKRSKL

SEQ ID NO: 171639 - protein, 572 aa, Zea Mays
MQQIGFGHIWRDIVCGLLASSTTQVLLNGSPGERLAHRRGLRQEDPLSPMLFILVMDVLGLLFAKAEEAGLLQQLSRRKKLHRISIYADDVAVFLYPTAEETSITLDILQLFGDASGLINNVQKSNVYPIQCSEGNLMEVQSLLPCEMATFPCRYLGLPLSLHKLSRQQFQPFVERIADQLSNWKADLMSRAGRRIQVQHVLTGMTVYLAMAIDIPQWALDAIDKIRKGFLWRGTKEAKGGHCLVAWGKVCRPLQLGGLGISSLPELCWALRMRWLWLQKTDLGRPWASLPIQVPNKARAFFSMALVSMVGDGSNTLFWNDRWLHGTQIADIAPSLHKSIPTRIANKRTVKEALVNRKWISDIKGALTVRVLVDYLNLWESLSGIELQPNIRDKHVFSLAADGKYTTKAAYNDLFLGSATFDHYKRIWRSWAPSKCRFFIWLVAHNRCWTADRLAKKGLNHPQRCLLCDQEDETMNHLLISCVFTRIFWYMLLRKFGLHALAPQPGLTSFLEWWKGAAEAVQGMVKKGLNSLIILGAWKIWNLRNRCVFDGETPSLSRILQQADEERNLFGS

SEQ ID NO: 171640 - protein, 149 aa, Zea Mays
MAPRPAPPLGQPWRPLPFSSHGRELHFPCRRAATSASKQPTPLASIDGRRPAQCPTPSPSQTDSDIHLPTPATSSKDSPLPSLLSDVPRVFNTMPARKMCCCSPVDARRVFAVFGADPLATSSTLATVKVALRALQFDEMLSHVDSPCG

SEQ ID NO: 171641 - protein, 131 aa, Zea Mays
MAPRPAPPLGQPWRPLPFSSHGRELHFPCRRAATSASKQPTPLASIDGRRPAQSTSSKDSPLPSLLSDVPRVFNTMPARKMCCCSPVDARRVFAVFGADPLATSSTLATVKVALRALQFDEMLSHVDSPCG

SEQ ID NO: 171642 - protein, 121 aa, Zea Mays
MLSNAGLWDKHDTWVEAGSAACYLINRSPNSAIDFKIPKEVWTGKSVDYSNLRIFGCPAYAHVNNEKLVPRAQKCTFIGYGSGVKGYRLLCVDSKKVIVSHDVTFDESTFLSLEVFLIVVS

SEQ ID NO: 171643 - protein, 346 aa, Zea Mays
MYPAPRSSPFGELHGCEGDGCASDQDTWPLHHVLRSGVHCRLCCSCILLSHRSLYCCRCFLLVTSPSCNYDNGDTLMAPPAPTVTCQVCHDAVAHLPCLYPPPTDGVFVCPPCTAAQNGRPFTYAPPCRQPLDERNARVLVLGARIALALLQRHATAAREAAERLAMEARDARARAHDALIVAFDLDAEEDLSCVVPQPTENDLAASEEEEEEEEEDSEAETDEGEVMLVRRNVMPPLVTPTIDTGGSVVPLASAEAKHMPPLSQPKLLFDLNENAAENEIDDAQAEPMRHQALNSFNVKEVAMAAGAEATRASPSTPQTLQLFPITYQDIVPRTLQLFNDDDEEM

SEQ ID NO: 171644 - protein, 470 aa, Zea Mays
MEASFLRKDGGDQASAATMSGEHRNKGLDWDLNDWRWDANLFLATPAAIVPSECSSRKLSRAQGEIDFGVVVDKRRRLSPEEDGSAGCSNSGVADGDNNHVVPAQRGRSSEEETPRKGASSSTTPSCQVDGCHADLSGARDYHKRHKVCEAHTRTTVVCIKNVEHRFCQQCSRFQLLQEFDEGKKSCRSRLAQHNGRRRKVQPQTVVNGNSMSENQSLSNTSILLLKQLSRLESGSSSEPINHPNSLVNLLKNLAAIASTQSYQDILKNANSNSILSNAGNNAANGSTVHEQTIRSIPIRGESLAEEPPVKRRVHDFDLNDACFEEVESRTDKIVFKLFGKEPKDFPVDLREQIQHWLSHYPTDMESYIRPGCVILTIYLRLPNWMWDELDDDPASWIEKLISISNDGLWRKGWLYARSYVCISLATGNWRQASETVCNSYCSCLFFVCKILCERFQYSSANYKITLCVW

SEQ ID NO: 171645 - protein, 308 aa, Zea Mays
MIKAAFVFPLLSLTKMSHVRATSEQPQYCPDRFPVERFRWLLSFAVDQEWCAVLRKLLNTMFQGDIDLDVPSPIEFALGENVLLTAVKKRSKPLVEFLLRYTATDYAPVGSGAGAPVQFLFTPAMTGLSNITPLHIAATISDATGVLDALTDDPRQLGIKAWKNARDATGFTPEEYARKRGHISYIQLVQDKIDRRVSRAHVSVTIPSTIDTAGKHASRLKPADQITFGVEKKQRGMNQTLSCRQCVQQVQQLAFHSRTNRFLSNRPAMLSLVAIAAVCVCVGLIMKSLPQVGGMRPFLWDKIRWGPN

SEQ ID NO: 171646 - protein, 670 aa, Zea Mays
MSENQSLSNTSILLLKQLSRLESGSSSEPINHPNSLVNLLKNLAAIASTQSYQDILKNANSNSILSNAGNNAANGSTVHEQTIRSIPIRGESLAEEPPVKRRVHDFDLNDACFEEVESRTDKIVFKLFGKEPKDFPVDLREQIQHWLSHYPTDMESYIRPGCVILTIYLRLPNWMWDELDDDPASWIEKLISISNDGLWRKGWLYARVQDCLTLSYNGSLMFASPWQLVIGDKHQRLCVTPIAVACSSSVKFSVKGFNIVQPTTKLLCVFGDKYLIQEETQMLLEDSTVQQGPQCLTFSCSFSCTSGRGFIEVEDYDQSSLCVPFVVADKDVCSEIRMLEHGLNLISFDETSERIDDLMAYRNRSLHFLHEIGWLLQRSHVRATSEQPQYCPDRFPVERFRWLLSFAVDQEWCAVLRKLLNTMFQGDIDLDVPSPIEFALGENVLLTAVKKRSKPLVEFLLRYTATDYAPVGSGAGAPVQFLFTPAMTGLSNITPLHIAATISDATGVLDALTDDPRQLGIKAWKNARDATGFTPEEYARKRGHISYIQLVQDKIDRRVSRAHVSVTIPSTIDTAGKHASRLKPADQITFGVEKKQRGMNQTLSCRQCVQQVQQLAFHSRTNRFLSNRPAMLSLVAIAAVCVCVGLIMKSLPQVGGMRPFLWDKIRWGPN

SEQ ID NO: 171647 - protein, 481 aa, Zea Mays
MEASFLRKDGGDQASAATMSGEHRNKGLDWDLNDWRWDANLFLATPAAIVPSECSSRKLSRAQGEIDFGVVVDKRRRLSPEEDGSAGCSNSGVADGDNNHVVPAQRGRSSEEETPRKGASSSTTPSCQVDGCHADLSGARDYHKRHKVCEAHTRTTVVCIKNVEHRFCQQCSRFQLLQEFDEGKKSCRSRLAQHNGRRRKVQPQTVVNGNSMSENQSLSNTSILLLKQLSRLESGSSSEPINHPNSLVNLLKNLAAIASTQSYQDILKNANSNSILSNAGNNAANGSTVHEQTIRSIPIRGESLAEEPPVKRRVHDFDLNDACFEEVESRTDKIVFKLFGKEPKDFPVDLREQIQHWLSHYPTDMESYIRPGCVILTIYLRLPNWMWDELDDDPASWIEKLISISNDGLWRKGWLYARVQDCLTLSYNGSLMFASPWQLVIGDKHQRLCVTPIAVACSSSVKFSVKGFNIVQPTTKDTNAT

SEQ ID NO: 171648 - protein, 880 aa, Zea Mays
MEASFLRKDGGDQASAATMSGEHRNKGLDWDLNDWRWDANLFLATPAAIVPSECSSRKLSRAQGEIDFGVVVDKRRRLSPEEDGSAGCSNSGVADGDNNHVVPAQRGRSSEEETPRKGASSSTTPSCQVDGCHADLSGARDYHKRHKVCEAHTRTTVVCIKNVEHRFCQQCSRFQLLQEFDEGKKSCRSRLAQHNGRRRKVQPQTVVNGNSMSENQSLSNTSILLLKQLSRLESGSSSEPINHPNSLVNLLKNLAAIASTQSYQDILKNANSNSILSNAGNNAANGSTVHEQTIRSIPIRGESLAEPPVKRRVHDFDLNDACFEEVESRTDKIVFKLFGKEPKDFPVDLREQIQHWLSHYPTDMESYIRPGCVILTIYLRLPNWMWDELDDDPASWIEKLISISNDGLWRKGWLYARVQDCLTLSYNGSLMFASPWQLVIGDKHQRLCVTPIAVACSSSVKFSVKGFNIVQPTTKLLCVFGDKYLIQEETQMLLEDSTVQQGPQCLTFSCSFSCTSGRGFIEVEDYDQSSLCVPFVVADKDVCSEIRMLEHGLNLISFDETSERIDDLMAYRNRSLHFLHEIGWLLQRSHVRATSEQPQYCPDRFPVERFRWLLSFAVDQEWCAVLRKLLNTMFQGDIDLDVPSPIEFALGENVLLTAVKKRSKPLVEFLLRYTATDYAPVGSGAGAPVQFLFTPAMTGLSNITPLHIAATISDATGVLDALTDDPRQLGIKAWKNARDATGFTPEEYARKRGHISYIQLVQDKIDRRVSRAHVSVTIPSTIDTAGKHASRLKPADQITFGVEKKQRGMNQTLSCRQCVQQVQQLAFHSRTNRFLSNRPAMLSLVAIAAVCVCVGLIMKSLPQVGGMRPFLWDKIRWGPN

SEQ ID NO: 171649 - protein, 198 aa, Zea Mays
MKVSEKQARKRGIYEGNEKKVSLCHRRDGTDLKRCTEDIPVSAASEEDRQSRANIAASFQRVAVLHLEERCERAVEWALNMEPSIKYFVVSGGVASNKYVTTRLNHVAGNNGLQLVSPPPSLCTDNGVMIAWTGIEHFVAGRFEDPPAADESDDMQYELRPRWPLGEEYSKGRSVARSLKTARVHPSLTSMIQGSLQK

SEQ ID NO: 171650 - protein, 164 aa, Zea Mays
MKVSEKQARKRGIYEGNEKKVSLCHRRDGTDLKRCTEDIPVSAASEEDRQSRANIAASFQRVAVLHLEERCERAVEWALNMEPSIKYFVVSGGVASNKYVTTRLNHVAGNNGLQLVSPPPSLCTDNGVMIAWTGIEHFVAGRFEDPPAADESDDMQGIGHKWAN

SEQ ID NO: 171651 - protein, 188 aa, Zea Mays
MNPKTSAPAHPNRQLGPQTTPLAMWRRASHLLIRTAAAAAAPTRRLPLPHPPLPIAPRVASASSSYATAVAARAPRTVGTLLRLNDLCDNPGARKQKTRKGRGIGSGKGKTAGRGHKGQKARGTARFGFEGGQTPLRRRLPRRGFKNPFSLTFQPCGLGKIAKLINAGKIDSSELITMKTLKVPLGSK

SEQ ID NO: 171652 - protein, 98 aa, Zea Mays
MMIFLSVSRATARAKAAVEAAGGTVRLVYYNKLGFRALLKPEWFEKKGRLLPKAARPPPKQRDKVDSIGRLPAPTKPLPFTVEELEFAAQREAARVTA

SEQ ID NO: 171653 - protein, 56 aa, Zea Mays
MDSLLSSASLFPPSQCRDDARTYEPRGLHQLCRPASLDLLCSMHMMTQLLLNVLRH

SEQ ID NO: 171654 - protein, 62 aa, Zea Mays
MQMGLMMTTPSRAAVSTVIVNHVLFCNFSGYGSCTWPHLSNLYTKPPNCNGAFGSSHKLKQK

SEQ ID NO: 171655 - protein, 150 aa, Zea Mays
MAAELLRCIVEPRQGGQAGSTPEKQGRFSFTPRAGIRHSYVRHHAPPFASRETRVVRFISYILPVSAAAVRCRRRPRVRWRCPPARLQLRHLIIAHALLVDAGRCHINEDTRTSPRQMMRRVVWYMLCRNGDVHGRQFFGLTLGSATGNK

SEQ ID NO: 171656 - protein, 73 aa, Zea Mays
MFVHQNRLLAVKGTFRFSAYFCKSRFYENRSNQHEYKVYRAITAGGINPPLLNPKPWRLIHLSPHVSLMESRF

SEQ ID NO: 171657 - protein, 145 aa, Zea Mays
MAAELLRCIVEPRQGGQAGSTPEKQGRFSFTPRAGIRHSYVRHHAPPFASRETRVVRFISYILPVSAAAVRCRRRPRVRWRCPPARLQLRHLIIAHALLVDAGRCHISQPPPHLSQTVTGSQLPHWRLIISMHLQTRIHVRRRVR

SEQ ID NO: 171658 - protein, 82 aa, Zea Mays
MSKSTEIADKATILMQDHAKHIFRICKEKLPFGKGLTTIEVKELREALEFAAKGLDQDSLFAKRIWMLLLRRNIWSTTRWWL

SEQ ID NO: 171659 - protein, 124 aa, Zea Mays
MATSSPGRRRTGTSCLPEGLRTELFSSPPSPEGFRPSLQCLFLSPSHGSRVRHSRAPLPPRWPGEIFPRPALPGQGRRGGVLERRREGGGSARREAGGGCGRRHAEAPRGPHAAAQEAWHPLQA

SEQ ID NO: 171660 - protein, 59 aa, Zea Mays
MHSLEVWGSLCTEEYPVLDCLKAVNRETLSVSLGWIELGSKVTLVATPLEISSLGHLCA

SEQ ID NO: 171661 - protein, 187 aa, Zea Mays
MASDDAKGKGKVTGEKETINNEPKGDKPIDLGSNNKKKDMKKKKCMKKIVYYDSDASSSSPKDDDDSSSSKKKDGQTNYTRTSFNYSRIPYNANAHLLSIPHGKLPHFDGEDHSWWSHKMRSHLFSLHPSIWDIVENGMHIFDSDDENCNVIYMQEMIHKNAQVTTVLLTSLYREEYNKVSGLDNAK

SEQ ID NO: 171662 - protein, 57 aa, Zea Mays
MSWLLGSWQSLKPCRTRVFRLGAWALALIICYLEPLSPERERDLVRKPSPTNREQQC

SEQ ID NO: 171663 - protein, 623 aa, Zea Mays
MDAAAAASLLPRAAASSLLPRRVLSPLHVSRSGLLPRQSSFLAARCAHSRAPPPHPPLPRADCDDAAAKAHPRLRLRLLAEEFRALPSDADRARRLLSLAAALPRLPEPDRAQGNRVMGCVARVWLVARCNASTGWRMWFSADSDSDLSRGYCACLVAALDGAKPEDVLAVDPADPDLAPLGAGTTAAWSRASTWHNVLVGMQKRARTAIAAREGRHPGKPFPSLVIARDGAVSAQGSYAEAQVVVYRMSSEPIGCSLADAASSCEYTHFLREASRCYPSLHVIYINTSLETKAHAHELVPTITCTSSNVVPTILQAFSQIPNVNVWYGPDSYMGANIADLFQRMATMSDEEIAKIHPDHNRKSLSSLLPRLHYYQSGNCMVHDMFGHEVVEKIKEQYCDAFLTAHFEVPGEMFSLAMEAKQRGMGVVGSTQNILDFIKDHVMGALDKNVDEHLQFVLGTESGMITSIVAAVQELLHFYSSQERANIKVEIVFPVSSDAISKTSNGSHHVGSSMATDLDNLTIVPGVSSGEGCSIHGGCASCPYMKMNTLGSLIKICHQLPDKNNKLSVYQANRINVRTPLGKSVAEVGCEPILHMRHFQKTRRLPNKLVHQVVHGNGDKPLQ

SEQ ID NO: 171664 - protein, 421 aa, Zea Mays
MERRRKAMWLYPKVVGFNPPERWGHSACFFEGFVYVFGFPVKGASPGVRAGHAAMSVGSKVYIIGGVGDKHYYSDVWVLDVTNRSWSQLEVCGQRPQGRFSHTAVAMNTDIAIYGGCGEDERPLNELLILQLGSEHPNGRYNISMCKVLSNHWSQEKRKFLRSEARDASVSNGEMAQKPREAETEQRNPFLRGLENGRVKRRRTGEARPKEAESEQEEHSLSLSQHSSPSQSDQEQTGAHKLPASANTSPSALQPFARLNGNGAQLRAAGPGGVSSRPLKADQLLRTIAPQHRREIGAEVHGTVDGAFDSGYLVTAVVNGQLFRGVLFAPGPGVTAPRPAVHHQILTSSAVPPQQRPLLAHAIPVHARPVPLPQATGFVLPDCAHHARQGFPAKAVKSEPERGSSDLHDVVLTLGGPGGGK

SEQ ID NO: 171665 - protein, 442 aa, Zea Mays
MERRRKAMWLYPKVVGFNPPERWGHSACFFEGFVYVFGFPVKGASPGVRAGHAAMSVGSKVYIIGGVGDKHYYSDVWVLDVTNRSWSQLEVCGQRPQGRFSHTAVAMNTDIAIYGGCGEDERPLNELLILQLGSEHPNGRYNISMCKVLSNHWSQEKRKFLRSEARDASVSNGEMAQKPREAETEQRNPFLRGLENGRVKRRRTGEARPKEAESEQEEHSLSLSQHSSPSQSDQEQTGAHKLPASANTSPSALQPFARLNGNGAQLRAAGPGGVSSRPLKADQLLRTIAPQHRREVQFLSSDHQPQPRGPPGPPHLIGAEVHGTVDGAFDSGYLVTAVVNGQLFRGVLFAPGPGVTAPRPAVHHQILTSSAVPPQQRPLLAHAIPVHARPVPLPQATGFVLPDCAHHARQGFPAKAVKSEPERGSSDLHDVVLTLGGPGGGK

SEQ ID NO: 171666 - protein, 576 aa, Zea Mays
MQEANNQNVPQLSPKGCCGGLHFGDVLKLNVETMAWSLVATTGQCPGTRDSHGAALVGHRMLVFGGTNGGRKVNDLHVLDLRTGEWTRPQCKGAPPPSPRESHTVTVVGGDRLVVFGGSGEGEGNYLCDVHVLDVPTMTWSSPEVRGGHAPAPRDSHSAVAVGRRLFVFGGDCGDRYHGDVDVLDVDTMAWSMFPVKGASPGVRAGHAAMSVGSKVYIIGGVGDKHYYSDVWVLDVTNRSWSQLEVCGQRPQGRFSHTAVAMNTDIAIYGGCGEDERPLNELLILQLGSEHPNGRYNISMCKVLSNHWSQEKRKFLRSEARDASVSNGEMAQKPREAETEQRNPFLRGLENGRVKRRRTGEARPKEAESEQEEHSLSLSQHSSPSQSDQEQTGAHKLPASANTSPSALQPFARLNGNGAQLRAAGPGGVSSRPLKADQLLRTIAPQHRREIGAEVHGTVDGAFDSGYLVTAVVNGQLFRGVLFAPGPGVTAPRPAVHHQILTSSAVPPQQRPLLAHAIPVHARPVPLPQATGFVLPDCAHHARQGFPAKAVKSEPERGSSDLHDVVLTLGGPGGGK

SEQ ID NO: 171667 - protein, 144 aa, Zea Mays
MMGSSEDEQCSGDTDVPDMGQEHSSHLGDHELKEMLLKKYSGCLSRLRSEFLKKRKKGKLPKDARTVLLEWWNTHYRWPYPTEEDKVRLAAMTGLDPKQINNWFINQRKRHWKPSEDMRFALMEGVAGGSSGTTLYFDTGTIGP

SEQ ID NO: 171668 - protein, 88 aa, Zea Mays
MSATVEEQMVVKAIREECPWESLPKRLQSTLQTKDEWHRSIVGHTGMLVVHSHCRPRSRCFTSICHLKVSRYIMENTVKFTTDQVVDL

SEQ ID NO: 171669 - protein, 671 aa, Zea Mays
MDANSVLNEERLPAFPSSILSDDEEGSNTSIHSEKSGQQLNGMDSDGPRKISGTAHVGFVVDANVTSYLMMGSLSPGLKSHAVTLYEAGKLGASCIAELCSDLASLEGKKFEGVLEEFASHAFSLRCFLECLQSGGVSANEITDNTSEAKTPRSSVHDIDNAADHLSKVNIEGVADNNHNEFSEHNQCVGELDNSDGNIVSPAMVILESVESMVKNDDKNDSTVQLNVSTESRVLKNKRKYKVDILRCESLASLAPATLERLFLRDYDIIVSMVPLPSSSVLPGPSGPIHFGPPSYSSMTPWMKLVLYTAGHCGPVSAVFMKGLRFRLLPEPLAGCEKALLWSWDGSVVGGLGGKFEGNLLKGNLLLHCLNSMLKQSAVLVQPLSIHDLDTSGNLVTVDIPLPLKNDDQSIESVVAQTNLPKEQILDLTSVLKDLSSKFELSTLGYLRLLRLHRIDEPDKFDPENVSYKWVPLSLEFGVPLFSPKLCEKICERVVASHMLQKDDLIEHSDVMQNVRRQLRELCSEYQATGPVAKLFNKRGSSRDSPRALINSISGRWNLSNDPSTPSGGAPSEHERLKFVGRQRPRTEVVSFDGSTVRSYALDPEHNEEQSSIQDVKPDPEETDSKDVVLPGVNLIFDGAELHPFDIAACLQARQPLWLISEASTASSTLL

SEQ ID NO: 171670 - protein, 876 aa, Zea Mays
MFMFLTCFFGAEQPYDSIPNFTAADALRLTGVGRNEFIDIMNKCRSKKLMWKLNKSIAKEMLPTQPVDFPVEPWWGVCLVNFTLEEFKKLSEEETTTIDKICKEEANSYVLFDPKVIDGLYKRGLVYFDVPVYPDDRFKVSRLENFVSNKDQSYEDPIEELLYAVFVVSSANATVAELAATLQADLYQLQAAASFACRLGWAAKVMDANSVLNEERLPAFPSSILSDDEEGSNTSIHSEKSGQQLNGMDSDGPRKISGTAHVGFVVDANVTSYLMMGSLSPGLKSHAVTLYEAGKLGASCIAELCSDLASLEGKKFEGVLEEFASHAFSLRCFLECLQSGGVSANEITDNTSEAKTPRSSVHDIDNAADHLSKVNIEGVADNNHNEFSEHNQCVGELDNSDGNIVSPAMVILESVESMVKNDDKNDSTVQLNVSTESRVLKNKRKYKVDILRCESLASLAPATLERLFLRDYDIIVSMVPLPSSSVLPGPSGPIHFGPPSYSSMTPWMKLVLYTAGHCGPVSAVFMKGLRFRLLPEPLAGCEKALLWSWDGSVVGGLGGKFEGNLLKGNLLLHCLNSMLKQSAVLVQPLSIHDLDTSGNLVTVDIPLPLKNDDQSIESVVAQTNLPKEQILDLTSVLKDLSSKFELSTLGYLRLLRLHRIDEPDKFDPENVSYKWVPLSLEFGVPLFSPKLCEKICERVVASHMLQKDDLIEHSDVMQNVRRQLRELCSEYQATGPVAKLFNKRGSSRDSPRALINSISGRWNLSNDPSTPSGGAPSEHERLKFVGRQRPRTEVVSFDGSTVRSYALDPEHNEEQSSIQDVKPDPEETDSKDVVLPGVNLIFDGAELHPFDIAACLQARQPLWLISEASTASSTLL

SEQ ID NO: 171671 - protein, 56 aa, Zea Mays
MMKAELEEGSRWSSRPLYQPVRQQFLVGVKTPRGSAEHRGPKPPRHHSRSRTCTTR

SEQ ID NO: 171672 - protein, 354 aa, Zea Mays
MGRAPCCEKVGLKKGRWTKEEDEVLARYIKEHGEGSWRSLPKNAGLLRCGKSCRLRWINYLRAGLKRGNISEEEEDMIIKLHATLGNSFILLSSPRRWSLIAGHLPGRTDNEIKNYWNSHLSRRAADFRDGVVVDIDLSKLPGGGKRRGGRASRGAVVAAAKEKKAKEKDDRGNSKVAEAEQQLRDTEDDDGGSVSTPRPQSDDCGTAQSEEEQAQASASGLTSDGHGPEEEEEEDPLALSEEMVSALLAPESPKLEVGPDGSCMDSYSGPPSGESGCGSSGPSGDVAQDLDLDDDKAIMDWDLMGLDISTAGDMWDQLVWDYDETLVTEPEGGEEGHQQQDDVMSDLFFLDNL

SEQ ID NO: 171673 - protein, 111 aa, Zea Mays
MVSALLAPESPKLEVGPDGSCMDSYSGPPSGESGCGSSGPSGDVAQDLDLDDDKAIMDWDLMGLDISTAGDMWDQLVWDYDETLVTEPEGGEEGHQQQDDVMSDLFFLDNL

SEQ ID NO: 171674 - protein, 185 aa, Zea Mays
MADPWRMVKAIRKAKRVPTIFSHTDPAAAAEADQPPPPAAEAEEAEAKGEAQAPAPAPPPPADPPAAGDRAEETAPADTSAPEEHKEAKPAETPAAVDATVVVRTVRDHPYGYGAGGHGHRMCSEANHPVDSFYSHHRPTSPYVAEYGAGGGYAGFPVQEGRGKEDAINITCMFSDENPNACSIA

SEQ ID NO: 171675 - protein, 576 aa, Zea Mays
MEQRDATQPEAAAEERDQERPSIIPPPKENEDKDLKLPSRVVSLLFGGDISTSAQTFEKWLSLVRKRSGAFRPSGFPHRGSRIEVMPSGSFSLFGSGDLSEHLIREAPTRKDPLDCDQSPEISLWERLGNSSALDIESSEFSWDVLLSLHHTEHSSSSEQTEDEMNKALEVTVNSGGVVFFALFSSPGNIGVPEAAAVIKFSSSKMATQAERLGYEFARLLGVHTPQARVVYNSSSEWLAIRHAAENARTVAVSNNDEVGEMTCSELLEALELSRCLLLMSYIHGSPLLESSKAFHSREAACVTASSLGRVLMLDLILRNEDRLPCRQLGWRGNPANLMISDKSSLPNLDRLDDFKSSTDSSNQLITHFLHREKRSHSLNGKFGSPGLDPMSPKLEPLINEKENAERTNGDFRIVAIDTGVPRRPPVGRRVKDHERYPKVVELILNSSDYSASILYEISGCKLGHPRPDEVTSSDSCCSLSDEDNAGVIHEFRGSFRAALRDLEGFHLFLLQLYQKLDGVLRVFLSIITKTSEESDNNDAALSDFPSPGASYSTPRLPRRVGTTSPSREVQRLPVV

SEQ ID NO: 171676 - protein, 113 aa, Zea Mays
MIAVQHVRYTGISIIILDSLSHHLFFRTMRFTKKYPPSIVSRKSILPNMFYRDLYYFLFLLAHLLHGHGTRLAPLAASPNARSMKASVFLIHLGVTSFHPTQLVYIHSRSSIL

SEQ ID NO: 171677 - protein, 314 aa, Zea Mays
MHRPAKLFLSLRALGAPANVIMLAVQGIFRGFKDTKTPVFYIGLGNLSAVALLPLLIYGFKLGITGAAISTVVSQYIITVLLLWSLSKRAVLLPPRIDQLEFGGYLKSGGMLLGRTLSILLTMTIGTSMAARQGPTAMAAHQICLQVWLAVSLLADALAVSAQALIASSYAILDYKKVQKTAMFALQIGVFSGLALAIGLYASFGNIARLFTSDPEVLTVVKSCALFVCASQPINALAFIFDGLHYGVSDFEYVAQATIVVGVTSSLVLLWAPSVFGLAGVWAGLTTLMGLRMAAGILRLLQKAGPWSFLHEEP

SEQ ID NO: 171678 - protein, 433 aa, Zea Mays
MLRLHHHSAPVSPHAAICPPSRLACSCICNKPNSRITASQGWSSIRRRITTVASGQSVPGYTPDDGDQCLETGNKLSFATVKEAFISLNSVGVRSELILLALPAVLGQAIDPIAQLMETAYIGRLGALELASAGIGISIFNIVSKIFNIPLLSIATSFVAEDISRSATKHPSSGKLELTSVSSALILAAGIGIMEALALFLGSGLFLKLMGVSPVSPMHRPAKLFLSLRALGAPANVIMLAVQGIFRGFKDTKTPVFYIGLGNLSAVALLPLLIYGFKLGITGAAISTVVSQYIITVLLLWSLSKRAVLLPPRIDQLEFGGYLKSGGMLLGRTLSILLTMTIGTSMAARQGPTAMAAHQICLQALIASSYAILDYKKVQKTAMFALQIGVFSGLALAIGLYASFGNIARLFTSDPEVLTVVKSCALVNPPTLC

SEQ ID NO: 171679 - protein, 296 aa, Zea Mays
METAYIGRLGALELASAGIGISIFNIVSKIFNIPLLSIATSFVAEDISRSATKHPSSGKLELTSVSSALILAAGIGIMEALALFLGSGLFLKLMGVSPVSPMHRPAKLFLSLRALGAPANVIMLAVQGIFRGFKDTKTPVFYIGLGNLSAVALLPLLIYGFKLGITGAAISTVVSQYIITVLLLWSLSKRAVLLPPRIDQLEFGGYLKSGGMLLGRTLSILLTMTIGTSMAARQGPTAMAAHQICLQVWLAVSLLADALAVSAQVCMLRSGSHLAVKIGFPELCWSTILQAEPANF

SEQ ID NO: 171680 - protein, 336 aa, Zea Mays
MLRLHHHSAPVSPHAAICPPSRLACSCICNKPNSRITASQGWSSIRRRITTVASGQSVPGYTPDDGDQCLETGNKLSFATVKEAFISLNSVGVRSELILLALPAVLGQAIDPIAQLMETAYIGRLGALELASAGIGISIFNIVSKIFNIPLLSIATSFVAEDISRSATKHPSSGKLELTSVSSALILAAGIGIMEALALFLGSGLFLKLMGVSPVSPMHRPAKLFLSLRALGAPANVIMLAVQGIFRGFKDTKTPVFYIGLGNLSAVALLPLLIYGFKLGITGAAISTVVSQYIITVLLLWSLSKRAVLLPPRIDQLEFGGYLKSALLQLEEKNKL

SEQ ID NO: 171681 - protein, 446 aa, Zea Mays
MLRLHHHSAPVSPHAAICPPSRLACSCICNKPNSRITASQGWSSIRRRITTVASGQSVPGYTPDDGDQCLETGNKLSFATVKEAFISLNSVGVRSELILLALPAVLGQAIDPIAQLMETAYIGRLGALELASAGIGISIFNIVSKIFNIPLLSIATSFVAEDISRSATKHPSSGKLELTSVSSALILAAGIGIMEALALFLGSGLFLKLMGVSPVSPMHRPAKLFLSLRALGAPANVIMLAVQGIFRGFKDTKTPVFYIGLGNLSAVALLPLLIYGFKLGITGAAISTVVSQYIITVLLLWSLSKRAVLLPPRIDQLEFGGYLKSGGMLLGRTLSILLTMTIGTSMAARQGPTAMAAHQICLQVWLAVSLLADALAVSAQALIASSYAILDYKKVQKTAMFALQIGVFSGLALAIGLYASFGNIARLFTSDPEVLTVVKSCALSAN

SEQ ID NO: 171682 - protein, 334 aa, Zea Mays
MLRLHHHSAPVSPHAAICPPSRLACSCICNKPNSRITASQGWSSIRRRITTVASGQSVPGYTPDDGDQCLETGNKLSFATVKEAFISLNSVGVRSELILLALPAVLGQAIDPIAQLMETAYIGRLGALELASAGIGISIFNIVSKIFNIPLLSIATSFVAEDISRSATKHPSSGKLELTSVSSALILAAGIGIMEALALFLGSGLFLKLMGVSPVSPMHRPAKLFLSLRALGAPANVIMLAVQGIFRGFKDTKTPVFYIGLGNLSAVALLPLLIYGFKLGITGAAISTVVSQYIITVLLLWSLSKRAVLLPPRIDQLEFGGYLKSGELLMQPLH

SEQ ID NO: 171683 - protein, 415 aa, Zea Mays
METAYIGRLGALELASAGIGISIFNIVSKIFNIPLLSIATSFVAEDISRSATKHPSSGKLELTSVSSALILAAGIGIMEALALFLGSGLFLKLMGVSPVSPMHRPAKLFLSLRALGAPANVIMLAVQGIFRGFKDTKTPVFYIGLGNLSAVALLPLLIYGFKLGITGAAISTVVSQYIITVLLLWSLSKRAVLLPPRIDQLEFGGYLKSGGMLLGRTLSILLTMTIGTSMAARQGPTAMAAHQICLQVWLAVSLLADALAVSAQALIASSYAILDYKKVQKTAMFALQIGVFSGLALAIGLYASFGNIARLFTSDPEVLTVVKSCALFVCASQPINALAFIFDGLHYGVSDFEYVAQATIVVGVTSSLVLLWAPSVFGLAGVWAGLTTLMGLRMAAGILRLLQKAGPWSFLHEEP

SEQ ID NO: 171684 - protein, 256 aa, Zea Mays
MTAAYSFEISSCQHLLGTNKLMLCFSFPFFLFSLLFWYLYFYHLCMLGFVGGMLLGRTLSILLTMTIGTSMAARQGPTAMAAHQICLQVWLAVSLLADALAVSAQALIASSYAILDYKKVQKTAMFALQIGVFSGLALAIGLYASFGNIARLFTSDPEVLTVVKSCALFVCASQPINALAFIFDGLHYGVSDFEYVAQATIVVGVTSSLVLLWAPSVFGLAGVWAGLTTLMGLRMAAGILRLLQKAGPWSFLHEEP

SEQ ID NO: 171685 - protein, 459 aa, Zea Mays
MAWARLASRSRLRPAASAAGRSRHASTPAPPPPPSPPTTRTRWRQGHGRRCFASAAYPAQATPGEASELVDVPLAQTGEGIAECELLRWFVAEGDQVDEFQPLCEVQSDKATIEITSRFKGKVHKIHFVPGDIVKVGETLLKMVVGDSQIVSPDNIVPSAGKSLGVESAVFSSEGNVPGGNLSTPAVRHLAKHKGVCKQQSLASEGNIGQVELLEEGKALLDEDFYEDKKILLRGYQRSMVKSMSLAAKVPHFHYLEEINCDSLVQLKTTFQNENKDQTIKHTFLPFLIKSLSMALSKYPMLNSSFIEETNEVVFKGPHNIGVAMATTHGLVVPNIKKVQSLSILEITKELARLHEMASQNRLSAADIEGGTITLSNIGAIGGKFGSPLLNLPEVAIIALGRIQKLPRFDDDENVYPSSIINVTVGADHRVVDGATVARFCNEWKSLVEKPELLLLHMR

SEQ ID NO: 171686 - protein, 503 aa, Zea Mays
MAWARLASRSRLRPAASAAGRSRHASTPAPPPPPSPPTTRTVPAATSAPPLRRLLLLPRHRFADATPSASTAWLLGARWRQGHGRRCFASAAYPAQATPGEASELVDVPLAQTGEGIAECELLRWFVAEGDQVDEFQPLCEVQSDKATIEITSRFKGKVHKIHFVPGDIVKVGETLLKMVVGDSQIVSPDNIVPSAGKSLGVESAVFSSEGNVPGGNLSTPAVRHLAKQYGISINEIVGTGKDGRVLKEDVLNYAVSKGVCKQQSLASEGNIGQVELLEEGKALLDEDFYEDKKILLRGYQRSMVKSMSLAAKVPHFHYLEEINCDSLVQLKTTFQNENKDQTIKHTFLPFLIKSLSMALRPHNIGVAMATTHGLVVPNIKKVQSLSILEITKELARLHEMASQNRLSAADIEGGTITLSNIGAIGGKFGSPLLNLPEVAIIALGRIQKLPRFDDDENVYPSSIINVTVGADHRVVDGATVARFCNEWKSLVEKPELLLLHMR

SEQ ID NO: 171687 - protein, 75 aa, Zea Mays
MDCNATHLPLEEPSASSHHLPHPLAITGSLQLQMEEPSLSASSSSVRPGSTATLEARRLPAPRPRRWRWPREPEV

SEQ ID NO: 171688 - protein, 638 aa, Zea Mays
MAPASVPALPTAMDTKDEGDGGSKNQNSVVVVKSEVVCTNGGPLVVGTELVKYEGGDTTECSSSFGDTCSGFEGEADNGEPEVNSSLSAHANGVGPSKPPRRKKVMAEWSNSVRPIQWRCHWLELRMRELSSQISKYDKELALIKKQNELQQAASKANGTMSESMQIHKGHGNSIMKRRKRKRHEDSVDASLYINKHQILSYYHDKQNKGVQTGDLLVDDDCGTVDGSISGGLDTTTLLDSEDYDMICEQHALQDILLTIDGLQSRVHLLQDRLSKAHSEGENLAFSGADTDVRVAGKRQRTQKHSFSNTKSRHTKPQKRKNLNILLKDDDDGQALAGGPALADGETDVHMIGASRSTEERSGECNHSRDKAITVDLLLGTGNSITNSDIGDLYNVNTDDVLIANQAAVEACQQFHEAKHLPSGSPSKDKIISAPAEMKNNSPPVEVKNTCGPVKIESLCSPVEGENTSDPALEQESFLEKSPSRQPVSPGNKQELKPKKRRKKKGSLFTKKQRKVDSRTPDAKEKTEGTPSDVAEETESPLSGATGPGTMRSCCAGKKRKSGNEPADANKTGKPSSAVKKQKTENPTAAANATKKRATEKKLESASASQKLQVEKAVLVAVNSRRSQRVRKPKVFAD

SEQ ID NO: 171689 - protein, 923 aa, Zea Mays
MAMTPHASAATVAVTPALRFPHTLSATGLSSPPLAGGCGGCRVRFRPSQRGRGTQGRRGGSHVSRVGGLLGTVFGGGGRDDGEATRKKYADTVARINSMELEVSALSDADLRARTAALQDRARSGESLDSLLPEAFAVVREASKRVLGLRPFDVQLIGGMVLHKGEIAEMKTGEGKTLVAILPAYLNALSGKGVHVVTVNDYLARRDCEWVGQVPRFLGLQVGLIQQNMTPEQRRENYSYDITYVTNSELGFDYLRDNLAMTVDELVLRNFNYCVIDEVDSILIDEARTPLIISGLAEKPSDRYYKAAKIAEAFERDIHYTVDEKQRNVLLTEEGYADAEEILDIDDLYDPREQWASYILNAIKAKELFLKDVNYIVRSKEVLIVDEFTGRVMAGRRWSDGLHQAIEAKEGVPIQNETITLASISYQNFFLQFPKLCGMTGTAATETQEFESIYKLKVTVVPTNKPMIRKDDSDVVFRATNGKWRAVLVEISRMNKVGRPVLVGTTSVEQSESLSKQLREAGIPHEVLNAKPENVEREAEIVAQSGRLGAVTIATNMAGRGTDIILGGNAEFMARLKLREILMPRVVNPIDGVIVSKKQMPPRKTWKTNESLFPCELSKETLSSVKDTVEMAVKEWGDKSLTELEAEERLSYSCEKGPTRDEVIANLRNAFVKIADEYKVYTEEEKQKVITVGGLHVVGTERHESRRIDNQLRGRSGRQGDPGSSRFFLSLEDNIFRIFGGDRIQGLMQAFRVEDLPIESKMLTRALDEAQRKVENYFFDIRKQLFEYDEVLNSQRDRVYAERRRALASDSLQSLIVEYAELTMDDILGANIGPDTPKENWDLNKLIAKLQQYCHLLDDLTPELLEGKSSSYDDLREYLRKRGREAYFQKTVSYFSFSFHGYCFFAWFKGFKKFNNNNINIAF

SEQ ID NO: 171690 - protein, 223 aa, Zea Mays
MAMTPHASAATVAVTPALRFPHTLSATGLSSPPLAGGCGGCRVRFRPSQRGRGTQGRRGGSHVSRVGGLLGTVFGGGGRDDGEATRKKYADTVARINSMELEVSALSDADLRARTAALQDRARSGESLDSLLPEAFAVVREASKRVLGLRPFDVQLIGGMVLHKGEIAEMKTGEGKTLVAILPAYLNALSGKGVHVVTVNDYLARRDCEWVGQVPRFLGLQRT

SEQ ID NO: 171691 - protein, 391 aa, Zea Mays
MTPEQRRENYSYDITYVTNSELGFDYLRDNLAMTVDELVLRNFNYCVIDEVDSILIDEARTPLIISGLAEKPSDRYYKAAKIAEAFERDIHYTVDEKQRNVLLTEEGYADAEEILDIDDLYDPREQWASYILNAIKAKELFLKDVNYIVRSKEVLIVDEFTGRVMAGRRWSDGLHQAIEAKEGVPIQNETITLASISYQNFFLQFPKLCGMTGTAATETQEFESIYKLKVTVVPTNKPMIRKDDSDVVFRATNGKWRAVLVEISRMNKVGRPVLVGTTSVEQSESLSKQLREAGIPHEVLNAKPENVEREAEIVAQSGRLGAVTIATNMAGRGTDIILGGNAEFMARLKLREILMPRVVNPIDGVIVSKKQMPPRKTWKLKWLSKNGEINH

SEQ ID NO: 171692 - protein, 786 aa, Zea Mays
MAMTPHASAATVAVTPALRFPHTLSATGLSSPPLAGGCGGCRVRFRPSQRGRGTQGRRGGSHVSRVGGLLGTVFGGGGRDDGEATRKKYADTVARINSMELEVSALSDADLRARTAALQDRARSGESLDSLLPEAFAVVREASKRVLGLRPFDVQLIGGMVLHKGEIAEMKTGEGKTLVAILPAYLNALSGKGVHVVTVNDYLARRDCEWVGQVPRFLGLQVGLIQQNMTPEQRRENYSYDITYVTNSELGFDYLRDNLAMTVDELVLRNFNYCVIDEVDSILIDEARTPLIISGLAEKPSDRYYKAAKIAEAFERDIHYTVDEKQRNVLLTEEGYADAEEILDIDDLYDPREQWASYILNAIKAKELFLKDVNYIVRSKEVLIVDEFTGRVMAGRRWSDGLHQAIEAKEGVPIQNETITLASISYQNFFLQFPKLCGMTGTAATETQEFESIYKLKVTVVPTNKPMIRKTNESLFPCELSKETLSSVKDTVEMAVKEWGDKSLTELEAEERLSYSCEKGPTRDEVIANLRNAFVKIADEYKVYTEEEKQKVITVGGLHVVGTERHESRRIDNQLRGRSGRQGDPGSSRFFLSLEDNIFRIFGGDRIQGLMQAFRVEDLPIESKMLTRALDEAQRKVENYFFDIRKQLFEYDEVLNSQRDRVYAERRRALASDSLQSLIVEYAELTMDDILGANIGPDTPKENWDLNKLIAKLQQYCHLLDDLTPELLEGKSSSYDDLREYLRKRGREAYFQKTVSYFSFSFHGYCFFAWFKGFKKFNNNNINIAF

SEQ ID NO: 171693 - protein, 446 aa, Zea Mays
MSLLAELWRRWSDGLHQAIEAKEGVPIQNETITLASISYQNFFLQFPKLCGMTGTAATETQEFESIYKLKVTVVPTNKPMIRKDDSDVVFRATNGKWRAVLVEISRMNKVGRPVLVGTTSVEQSESLSKQLREAGIPHEVLNAKPENVEREAEIVAQSGRLGAVTIATNMAGRGTDIILGGNAEFMARLKLREILMPRVVNPIDGVIVSKKQMPPRKTWKTNESLFPCELSKETLSSVKDTVEMAVKEWGDKSLTELEAEERLSYSCEKGPTRDEVIANLRNAFVKIADEYKVYTEEEKQKVITVGGLHVVGTERHESRRIDNQLRGRSGRQGDPGSSRFFLSLEDNIFRIFGGDRIQGLMQAFRVEDLPIESKMLTRALDEAQRKVENYFFDIRKQLFEYDEVLNSQRDRVYAERRRALASDSLQSLIVEYAELTMDDILGVGYG

SEQ ID NO: 171694 - protein, 397 aa, Zea Mays
MAMTPHASAATVAVTPALRFPHTLSATGLSSPPLAGGCGGCRVRFRPSQRGRGTQGRRGGSHVSRVGGLLGTVFGGGGRDDGEATRKKYADTVARINSMELEVSALSDADLRARTAALQDRARSGESLDSLLPEAFAVVREASKRVLGLRPFDVQLIGGMVLHKGEIAEMKTGEGKTLVAILPAYLNALSGKGVHVVTVNDYLARRDCEWVGQVPRFLGLQVGLIQQNMTPEQRRENYSYDITYVTNSELGFDYLRDNLAMTVDELVLRNFNYCVIDEVDSILIDEARTPLIISGLAEKPSDRYYKAAKIAEAFERDIHYTVDEKQRNVLLTEEGYADAEEILDIDDLYDPREQWASYILNAIKAKELFLKDVNYIVRSKEVLIVDEFTGRVMAAME

SEQ ID NO: 171695 - protein, 833 aa, Zea Mays
MAMTPHASAATVAVTPALRFPHTLSATGLSSPPLAGGCGGCRVRFRPSQRGRGTQGRRGGSHVSRVGGLLGTVFGGGGRDDGEATRKKYADTVARINSMELEVSALSDADLRARTAALQDRARSGESLDSLLPEAFAVVREASKRVLGLRPFDVQLIGGMVLHKGEIAEMKTGEGKTLVAILPAYLNALSGKGVHVVTVNDYLARRDCEWVGQVPRFLGLQVGLIQQNMTPEQRRENYSYDITYVTNSELGFDYLRDNLAMTVDELVLRNFNYCVIDEVDSILIDEARTPLIISGLAEKPSDRYYKAAKIAEAFERDIHYTVDEKQRNVLLTEEGYADAEEILDIDDLYDPREQWASYILNAIKAKELFLKDVNYIVRSKEVLIVDEFTGRVMAGRRWSDGLHQAIEAKEGVPIQNETITLASISYQNFFLQFPKLCGMTGTAATETQEFESIYKLKVTVVPTNKPMIRKDDSDVVFRATNGKWRAVLVEISRMNKVGRPVLVGTTSVEQSESLSKQLREAGIPHEVLNAKPENVEREAEIVAQSGRLGAVTIATNMAGRGTDIILGGNAEFMARLKLREILMPRVVNPIDGVIVSKKQMPPRKTWKTNESLFPCELSKETLSSVKDTVEMAVKEWGDKSLTELEAEERLSYSCEKGPTRDEVIANLRNAFVKIADEYKVYTEEEKQKVITVGGLHVVGTERHESRRIDNQLRGRSGRQGDPGSSRFFLSLEDNIFRIFGGDRIQGLMQAFRVEDLPIESKMLTRALDEAQRKVENYFFDIRKQLFEYDEVLNSQRDRVYAERRRALASDSLQSLIVEYAELTMDDILGVGYG

SEQ ID NO: 171696 - protein, 293 aa, Zea Mays
MAVKEWGDKSLTELEAEERLSYSCEKGPTRDEVIANLRNAFVKIADEYKVYTEEEKQKVITVGGLHVVGTERHESRRIDNQLRGRSGRQGDPGSSRFFLSLEDNIFRIFGGDRIQGLMQAFRVEDLPIESKMLTRALDEAQRKVENYFFDIRKQLFEYDEVLNSQRDRVYAERRRALASDSLQSLIVEYAELTMDDILGANIGPDTPKENWDLNKLIAKLQQYCHLLDDLTPELLEGKSSSYDDLREYLRKRGREAYFQKTVSYFSFSFHGYCFFAWFKGFKKFNNNNINIAF

SEQ ID NO: 171697 - protein, 227 aa, Zea Mays
MANADQVLLAGCSSGGLAVILHCDQLRAFFPSGSTVVKCISDGGLYLDAVDVSGGRSLRSYFGDIVAMQGIAQNLPPACTARLDATSNIIDGVKTPLFLLNAAYDFIQIVLSLAPDRADPSGAWRACKSNRTACSASQMSFLQDFRDQMVASVKGFSGSRSNGVFLSSCFAHCQSEQLGTWNTKPGGSPTIQNKGISKSVGDWYFDRAEVKAVDCRYPCDNTCHHII

SEQ ID NO: 171698 - protein, 473 aa, Zea Mays
MSSPMPSPTLKDHLSTPTGPLHLKVWEVICIALGAFMVLVLFATVWLTLRSKKRVRRRASANIPITQIPAISKEIKEVRVEQVPASDFVAHDGVLLTFQDKTSDRDSDKVMAHLGVSKSKRGDESHSGSFRYMDKDAGFQSAEEGGSGTFRQTSANAIVAPSPLVGLPEFSYLGWGHWFTLRDLELATNRFSKDNIIGEGGYGVVYRGQLINGSPVAVKKLLNNLGQAEKEFRVEVEAIGHVRHKNLVRLLGYCVEGTQRMLVYEYVNNGNLEQWLHGAMSQHGSLTWEARIKILLGTAKALAYLHEAIEPKVVHRDIKSSNILIDDEFESKVSDFGLAKLLGAGKSHVTTRVMGTFGYVAPEYANTGLLNEKSDIYSFGVVLLEAITGRDPVDYGRPPNEVNLVDWLKMMVASRRSEEVVDPTIETRPSTRALKRALLTALRCVDPDSEKRPKMGQVVRMLESDDPIPRGKI

SEQ ID NO: 171699 - protein, 469 aa, Zea Mays
MPIGGARSWHPAMSSPMPSPTLKDHLSTPTGPLHLKVWEVICIALGAFMVLVLFATVWLTLRSKKRVRRRASANIPITQIPAISKEIKEVRVEQVPASDFVAHDGVLLTFQDKTSDRDSDKVMAHLGVSKSKRGDESHSGSFRYMDKDAGFQSAEEGGSGTFRQTSANAIVAPSPLVGLPEFSYLGWGHWFTLRDLELATNRFSKDNIIGEGGYGVVYRGQLINGSPVAVKKLLNNLGQAEKEFRVEVEAIGHVRHKNLVRLLGYCVEGTQRMLVYEYVNNGNLEQWLHGAMSQHGSLTWEARIKILLGTAKAYVAPEYANTGLLNEKSDIYSFGVVLLEAITGRDPVDYGRPPNEVNLVDWLKMMVASRRSEEVVDPTIETRPSTRALKRALLTALRCVDPDSEKRPKMGQVVRMLESDDPIPRGDRRSKHHRGGSTEMDSQKDNNSDTEKSDNADSKPSRTRASSSK

SEQ ID NO: 171700 - protein, 189 aa, Zea Mays
MESGLLDFLLIYIRHSIIRTRMKALSMLEHLVEPDHRRVVELNFRICLVYELVSKIGDAISYCAKAISLCKSRIQNLKSSKDALLDGIDGGDASAAEAEGGSEKSTIEKELEQLTSILPDLEKKLEDLSEANPSADMDEMVKAIVSRVTEVMPKAASFTSSQIATSSNGFDSSVMSTTATTGSSGSTVN

SEQ ID NO: 171701 - protein, 128 aa, Zea Mays
MSPTLPPSSRCLGLSSPSPSYRIVLRMRCSVRVPSLSIRRDPQQREGGVPDRPHLQVRQGHRALPLQEEDQSPDVHGVVGEVPEDPEGGTAGVPAVPRAGDQVPGRTELQGSRGGLKHPSFASFDVGC

SEQ ID NO: 171702 - protein, 72 aa, Zea Mays
MASTSSAGDVGDSGSKGAVADKTLTASANTSSSHQESHDVETSLLDIWVNKFVMHMYRLWTIFLLQCVPIHD

SEQ ID NO: 171703 - protein, 212 aa, Zea Mays
MAAGAALYYHPGAGKVSLEAVVPSSPSLALRLSQSKVLSVSSRARARASARPALFSPVAMDWQECTTELEVDVPCSVAYQCYSERESIPQWMPFISSVKILEDKPDLSRWTLKYEVLGRDVEFSWLARNMTPIKNQKIHWRSLEGLANRGAVRFFPKSSSSCRVQLTVAYEVPEILAPVASALKPFLESLLLKGLERFATFAKERNSKIPQA

SEQ ID NO: 171704 - protein, 332 aa, Zea Mays
MPPDGPASWPATDSRKQWIVFYKADRLTLAGEGTIEGNGEEWWDLPCKPHRGPNGSTLRGPCDSPALIRFFSSNDVTVCGLRIENSPQFHLRFDDCERVRVDGLFVSSPASSPNTDGVHVENTKSVQILNSRIYNGDDCVSIGAGCSDVHVENITCGHGHGISIGSLGVHNTHACVSNVTVRNVRILDSDNGVRIKTWQGGAGAVSAVEFTGVQMQNVKNCIVIDQYYCLGHGCANQTSAVRVAGVAYRDIHGTYNPQAGAPIRLACSDAVACTDITMSGVELLPAGGDDGALLADPYCWNAYGVMETLTLPPVYCLLEGSPESLQDPLTSC

SEQ ID NO: 171705 - protein, 295 aa, Zea Mays
MSAAGGSLARATSRPAAAAWLLLALAAAAASALALPAAAGGFSCRPGSRPVLFNFGDSNSDTGGMAAAKGWHLTRPEGRAFFPRPTGRFCDGRLAIDFLCESLNISYLSPFLKALGSNYSNGANFAIAGAATQPRDVPFALHIQVQEFLYFRDRSLELIDQGLSGPIDAQGFQNALYMIDIGQNDVNALLSNLPYDQVIAKFPPILAEIKDAVQTLYSNGSRNFWIHGTGALGCLPQKLAIPRKNDSDLDQYGCLKTYNRAAVAFNAALGSLCDELSAQMKDATLVYTDLFPIKF

SEQ ID NO: 171706 - protein, 204 aa, Zea Mays
MIDIGQNDVNALLSNLPYDQVIAKFPPILAEIKDAVQTLYSNGSRNFWIHGTGALGCLPQKLAIPRKNDSDLDQYGCLKTYNRAAVAFNAALGSLCDELSAQMKDATLVYTDLFPIKYGLVANHTKYGFDKPLMTCCGYGGPPYNYDFSKGCQSKDVAACDDGSKFVSWDGVHLTEAANAVVARAILSSQYSKPSLKFDQFCRA

SEQ ID NO: 171707 - protein, 372 aa, Zea Mays
MDGMEQTHRPLQTCATHVAFLPPIRCVLGGETDDDQLVMHSPSSQQGGTRAGMAAGGAGAAVAAVLTTAVAAVLVAVLTTTVSGQDDPAPEPAPAAACARRPVVFAFGDSNTDTGGVAAGLGHYYPLPEGRVFFRRSTGRLCDGRLVIDYLCESLNMSYLSPYLEAVGSDFTGGANFAISGSSTLPRNVPFALHVQVQQFLHLKQRSLDLAAHGGTAPVDADGFRNALYLIDIGQNDLSAAFGSGAPYDDVVHHRIPAIVLSTTTAPRTSGSTAPALWAACPRSSPRRGPTTATSTTTAASRPSTTAPTSSTVSCAPPATASGRSCAAPPSSTPTSCSSSTTSSPTTPPTGSRSRSWRAAATAGRPTTTTPT

SEQ ID NO: 171708 - protein, 53 aa, Zea Mays
MCDQLIVLDTCLQLNIFLCTCILWDNHSKTSRVFNIVSICGCFPCMLLNQLYI

SEQ ID NO: 171709 - protein, 414 aa, Zea Mays
MATMAGRLVARTSSSSAKRQRFSSAVLLLALFQSSWCYDDAAATTTVDYGYNNEHEADRVAFLPGQPRSPPVSQFAGYVTVNERNGRALFYWFFEAQTSPAHKPLLLWLNGGPGCSSVGYGAASELGPLRVNRHGAGLEFNNFAWNKEANLLFLESPAGVGFSYTNTSSDLTKLDDAFVAEDAYSFLVNWLKRFPQYRSHEFYISGESYAGHYVPQLAELVYDRNKGNTNTHINLKGFMVGNPLTDDYYDSKGLAEYAWSHSVVSDEVYERIKKVCDFRVSNWTDDCDTAMSAVFSQYQEIDIYNIYAPRCNLPPSSAALALAVDKAVVANRQEHFRRRIRMFSGYDPCYSSNAEKYFNDAGVQTAFHANASGARKWEVCSDSILRSYNFSVLSVLPIYSKLIKAGLRVWLYRW

SEQ ID NO: 171710 - protein, 365 aa, Zea Mays
MATMAGRLVARTSSSSAKRQRFSSAVLLLALFQSSWCYDDAAATTTVDYGYNNEHEADRVAFLPGQPRSPPVSQFAGYVTVNERNGRALFYWFFEAQTSPAHKPLLLWLNGGPGCSSVGYGAASELGPLRVNRHGAGLEFNNFAWNKEANLLFLESPAGVGFSYTNTSSDLTKLDDAFVAEDAYSFLVNWLKRFPQYRSHEFYISGESYAGHYVPQLAELVYDRNKGNTNTHINLKGFMVGNPLTDDYYDSKGLAEYAWSHSVVSDEVYERIKKVCDFRVSNWTDDCDTAMSAVFSQYQEIDIYNIYAPRCNLPPSSAALALAVDKAVVANRQEHFRRRIRMFSGYDPCYSSNAEKYFNDAVIQF

SEQ ID NO: 171711 - protein, 185 aa, Zea Mays
MATMAGRLVARTSSSSAKRQRFSSAVLLLALFQSSWCYDDAAATTTVDYGYNNEHEADRVAFLPGQPRSPPVSQFAGYVTVNERNGRALFYWFFEAQTSPAHKPLLLWLNGGPGCSSVGYGAASELGPLRVNRHGAGLEFNNFAWNKEANLLFLESPAGVGFSYTNTSSDLTKLDDAFLKMHTAS

SEQ ID NO: 171712 - protein, 59 aa, Zea Mays
MMRLWLMMKWCYENSRSIAGGDPCWRDWDRPIVIPTEAWKAHNCIPDEHYVQTLLALSQ

SEQ ID NO: 171713 - protein, 68 aa, Zea Mays
MMRLWLMMKWCYENSRSIAGEQIFFFRSACCWSCFRLFFLFYLVFQRRPLLAGLGSSYCNSYGGMESP

SEQ ID NO: 171714 - protein, 134 aa, Zea Mays
MQNPSGHHPATAAPTSAPSKGKSSAPNPSGNHAATPAPSGTPSKGKSAAAQAAALGHGSSSHHHSAGGGGGGADASATTLKRKRGVFQKDLQHMMYGFGDDPNKPLHLWKTLLWNMSLTWCTRRRTLPQRGGSS

SEQ ID NO: 171715 - protein, 314 aa, Zea Mays
MGRPQPARAGAINIEACARPIAVDHRISLPYYFRIAGSLLRQANIYRNESNLLDLYVILLRYSSLLCETIPKHRDYHAFKLREKAFFDKLIDIIKELETLKPVVQRQVVEHNRGSTVEFNTNSLNGNYGTTRRIEQCTPSSYTPQTFVGSSNGALQKPFHAGRQVASLSSVQKQFMNLPYPKEETLARHSILGPNGLNGRWNGPVTGIKVQYPSNFELTQNGITSLVPSILNQDDLHGSNTAPAPPPPSSSSNDNDNMKSVLSLDDGRCSCRGTKTNFSIKSCRSNTRTSDLRNCPISELACSDQVDGVFSKGC

SEQ ID NO: 171716 - protein, 490 aa, Zea Mays
MGRPQPARAGAINIEACARPIAVDHRISLPYYFRIAGSLLRQANIYRNESNLLDLYVILLRYSSLLCETIPKHRDYHAFKLREKAFFDRQVVEHNRGSTVEFNTNSLNGNYGTTRRIEQCTPSSYTPQTFVGSSNGALQKPFHAGRQVASLSSVQKQFMNLPYPKEETLARHSILGPNGLNGRWNGPVTGIKVQYPSNFELTQNGITSLVPSILNQDDLHGSNTAPAPPPPSSSSNDNDNMKSVLSLDDGRWSVPAEEHTPLPSANLEEELFQLNIKQPSPPPVLAEVQRPISPSRVADPTPGLPTSGTARFQNLHVPIKLMECFLRVAESNTKRSLETCGVLAGTLKNRTFYVTTLIIPKQKSTSDTCEATNEEELFEVQDTYSLFTLGWIHTHPTQSCFLSSIDVHNHYSYQVMLPEAIAIVMAPTDTRKHGIFHLTDPGGMGVIHDCQERGFHPHKAPLDGSPIYEQCSHVYMDTDIKFDMIDLRQR

SEQ ID NO: 171717 - protein, 313 aa, Zea Mays
MFGFILDLGNINACTSYAFFDTLSTHSVFTSLVPSILNQDDLHGSNTAPAPPPPSSSSNDNDNMKSVLSLDDGRWSVPAEEHTPLPSANLEEELFQLNIKQPSPPPVLAEVQRPISPSRVADPTPGLPTSGTARFQNLHVPIKLMECFLRVAESNTKRSLETCGVLAGTLKNRTFYVTTLIIPKQKSTSDTCEATNEEELFEVQDTYSLFTLGWIHTHPTQSCFLSSIDVHNHYSYQVMLPEAIAIVMAPTDTRKHGIFHLTDPGGMGVIHDCQERGFHPHKAPLDGSPIYEQCSHVYMDTDIKFDMIDLRQR

SEQ ID NO: 171718 - protein, 167 aa, Zea Mays
MCGYYLPPRQAGRQEHSSVSTTRSARPCSLTPLATGSMEQQQAPSSLHQASPFPVTSPSRASPLPVDEHAVSPCSNLPSPWSWTLRRCRRGDRPLELGGGPLAVVCMQRRPSSWLLARTLSVPEHANIQAASPNVFVDPDDLSFNCTLLASRSEALCHARPYKSLTR

SEQ ID NO: 171719 - protein, 70 aa, Zea Mays
MFLAYEYASSLHSIPAHEGVTQIRSSPGAAATGEEEHGSSCADCDVFLSFKESAIKFWRPSDQALRVLRG

SEQ ID NO: 171720 - protein, 308 aa, Zea Mays
MDSKKMYVCSLPLMPYVVFGFVGSQLPSAPNWQSYKVDDPNAPRMILLVILYIYVILLAKIKNDRIYIETATAVVISYVSLLQISWSYIWLVPFPIVAIGFIVALCKELSHEDEAGGSHSQEQSNEGEGEATTSSWEKFLLFFSFMLGALTMMMTRLVETGRAIAHRGIVPASELLWKASLVVLLVAVHAVAAELLGENALLLCMPEILPVLLWLSVRLDTADDRIKLVLDSNLLPAALPAVLAMLAKGEPLLYWCRKALVSCVVSALLTFYVYFMLCQWPGGQRDRTLTVLLQEPVVSSSADQIFDV

SEQ ID NO: 171721 - protein, 277 aa, Zea Mays
MNPCQSFPVCYATDMVAMGISDNVAKVGVCYGEVVSNEAVRRTKELWEDAYDEPYDMAGSEVDVGAVSTAREAFYWVPAASEEDANRLYKSLQPRFLIEVYVFLKGEFDKEPTSKEFLRLRTQRCHRSLKLNISMSNLSCKSWQKVWHLYCEFATRGLFIEFRRTLSGCFRKSKFLKNISFSWSDVLHEKALALTEELDVRMRAMASITPPVQAPYLLKCVPDRVTDDGGAMISDVILRMRNYRPQEGRWLTRTVLDHSGRECFVIRMRQRDLAERC

SEQ ID NO: 171722 - protein, 361 aa, Zea Mays
MNPCQSFPVCYATDMVAMGISDNVAKVGVCYGEVVSNEAVRRTKELWEDAYDEPYDMAGSEVDVGAVSTAREAFYWVPAASEEDANRLYKSLQPRFLIEVYVFLKGEFDKEPTSKEFLRLRTQRCHRSLKLNISMSNLSCKSWQKVWHLYCEFATRGLFIEFRRTLSGCFRKSKFLKNISFSWSDVLHEKALALTEELDVRMRAMASITPPVQAPYLLKCVPDRVTDDGGAMISDVILRMRNYRPQEGRWLTRTVLDHSGRECFVIRMRVGRGIWRRGAETPMAVKWEDRSIEVREGSWSYIASTSSVGYAPEKIVGTGTVMKDHQENKVVWSLSTGDTLTIRLGDELSFQLKNDSSEEEV

SEQ ID NO: 171723 - protein, 422 aa, Zea Mays
MIQQVYVFLKGEFDKEPTSKEFLRLRTQRCHRSLKLNISMSNLSCKSWQKVWHLYCEFATRGLFIEFRRTLSGCFRKSKFLKNISFSWSDVLHEKALALTEELDVRMRAMASITPPVQAPYLLKCVPDRVTDDGGAMISDVILRMRNYRPQEGRWLTRTVLDHSGRECFVIRMRVGRGIWRRGAETPMAVKWEDRSIEVREGSWSYIASTSSVGYAPEKIVGTGTVMKDHQENKVVWSLSTGDTLTIRLGDELSFQLKNDSSEEEARLLVGRRLSYRVNTDNASSNLVEEEQYLTLVRKSPYHHGDRATVLLNWKLLAVEFLPEEDAVFVLLLCMVIARTMTEIRREDVAGLLVRRRISEARAGQRDWGSVMLPGSLSPDPHLQPWYRNATQVLSSAETGPVLTKYSPADGKDMLYRQALIP

SEQ ID NO: 171724 - protein, 267 aa, Zea Mays
MAPPHFQPPSSAQQPSAQLLPSAAMASSPSSRPLLSTASYSREPSSKLPRRSSSTPPCSSSTQVGALSLALLPSAAMASFPFSRHILSRRDTAGSRAPSSHGARAPLLPVSLQPKSAPSRWLSSPSRPYWPCPSRWHTGAQASFPMALDSLFHGALWSPPSSPCGCAPLLPPWRPLLLPRRAVGVRQMRSSISPMAVACFSRRPAQHLPPPSPCARTAAARPTFPRCAAPRRNAAVPAAPTPSLASSLLALRACHVFGDLSKWGVEQ

SEQ ID NO: 171725 - protein, 54 aa, Zea Mays
MLVKNATFRTCLGAMECRVLAHPINFIPIAPKLCFSVSTTSVIEYLPSASSFFN

SEQ ID NO: 171726 - protein, 88 aa, Zea Mays
MSCAPLSIQVEGTDRRGMSRCSGREKWGVGDVSRDPPCARTGHAVVKPSGISPRNQAATAVPRVAMVRIQCCAVAGQGQVPQDEAHEG

SEQ ID NO: 171727 - protein, 92 aa, Zea Mays
MSCAPLSIQVEGTDRRGMSRCSGREKWGVGDVSRDPPCARTGHAVVKPSGISPRNQAATAVPRVAMVRIQCCAVAGEYPPICFLVSLVFFFS

SEQ ID NO: 171728 - protein, 87 aa, Zea Mays
MSCAPLSIQVEGTDRRGMSRCSGREKWGVGDVSRDPPCARTGHAVVKPSGISPRNQAATAVPRVAMVRIQCCAVAENEEKVVVEEEA

SEQ ID NO: 171729 - protein, 97 aa, Zea Mays
MSCAPLSIQVEGTDRRGMSRCSGREKWGVGDVSRDPPCARTGHAVVKPSGISPRNQAATAVPRVAMVRIQCCAVAGDETAKFCCFCSKVVPKEEVNQ

SEQ ID NO: 171730 - protein, 523 aa, Zea Mays
MPVAALRPPPVAVGAGRRSARLQARFALRASSLEASAAVTVTVNGSAEAAVERKEKVQEDKDNEGLPVKEEQERGLEVLYDDGFGSVTVKDYFAAAKVLCRDDGGPPRWFSPVECGHPAVDQAPLLLFLPGMDGVGTGLILHHKSLGKVFEVRCLHIPVNDRTPFEADRLFKALKNCRVRYFKDNGHTLLLEDGVNLLTVIKGANMYRRGRQRDSVTDYLPPTLSEFRQTFDVDHRLFHLALSPVMMSTLKDGKIVRGLAGVPDKGPVLFVGYHALMGIELSPLYEEFLREKRTVVRGMAHPFLFGKKFESSRQETSRFDTVSMYGGLPVTPINMYRLFQRNQFVLLYPGGVREALHRKGEEYKLFWPDQPEFVRMAARFGVTIIPFGCVGEDDVLELVLDYNDQKNIPGLREWIQSINKEAERVSVKGEDGNQDMYLPALLPKVPGRFYYLFGQPIEMKGMGNLVRDRKSANEVYLRIKSQVEEIMSYLKRKREEDPYRSLPQRALYQATWGASAQVPTFEP

SEQ ID NO: 171731 - protein, 396 aa, Zea Mays
MQILVSMPCKPRFYFLPEHRSIMLPVFSGKDNLLPSGEEADRLFKALKNCRVRYFKDNGHTLLLEDGVNLLTVIKGANMYRRGRQRDSVTDYLPPTLSEFRQTFDVDHRLFHLALSPVMMSTLKDGKIVRGLAGVPDKGPVLFVGYHALMGIELSPLYEEFLREKRTVVRGMAHPFLFGKKFESSRQETSRFDTVSMYGGLPVTPINMYRLFQRNQFVLLYPGGVREALHRKGEEYKLFWPDQPEFVRMAARFGVTIIPFGCVGEDDVLELVLDYNDQKNIPGLREWIQSINKEAERVSVKGEDGNQDMYLPALLPKVPGRFYYLFGQPIEMKGMGNLVRDRKSANEVYLRIKSQVEEIMSYLKRKREEDPYRSLPQRALYQATWGASAQVPTFEP

SEQ ID NO: 171732 - protein, 304 aa, Zea Mays
MAIVLLALLLFPSAYAQPWSVCGNTGNYTAASTYQDNLSQLAASLPKKASSNTSPLFATGTAGAVPDLVYALALCRGDINASACKDCVTIGFEDAQQLCAFNKEATVYYDSCLVSFSNEDFLSTTVNGNENEVTVLMDAQNFTESADYIRLLLFTLLNDTSESAINSIRRFTTARMDISSLPTIYCAVQCTPDLTADECAACLQDFPQVTLQYLDGQRGGRLLGVRCNMRYEIYKFYQGDPMLRIISLASAVPTIGKTPPGTPVTVYPQPPPAAPPAPQMITTPIAAQEETGRKGFDGTVILPN

SEQ ID NO: 171733 - protein, 335 aa, Zea Mays
MAIVLLALLLFPSAYAQPWSVCGNTGNYTAASTYQDNLSQLAASLPKKASSNTSPLFATGTAGAVPDLVYALALCRGDINASACKDCVTIGFEDAQQLCAFNKEATVYYDSCLVSFSNEDFLSTTVNGNENEVTVLMDAQNFTESADYIRLLLFTLLNDTSESAINSIRRFTTARMDISSLPTIYCAVQCTPDLTADECAACLQDFPQVTLQYLDGQRGGRLLGVRCNMRYEIYKFYQGDPMLRIISLASAVPTIGKTPPGTPVTVYPQPPPAAPPAPQMITTPIAAQEETGRKGKLWIIGIAIPLVAILLCSTFTFLWLRRPKKDLCTLTIQEC

SEQ ID NO: 171734 - protein, 610 aa, Zea Mays
MAIVLLALLLFPSAYAQPWSVCGNTGNYTAASTYQDNLSQLAASLPKKASSNTSPLFATGTAGAVPDLVYALALCRGDINASACKDCVTIGFEDAQQLCAFNKEATVYYDSCLVSFSNEDFLSTTVNGNENEVTVLMDAQNFTESADYIRLLLFTLLNDTSESAINSIRRFTTARMDISSLPTIYCAVQCTPDLTADECAACLQDFPQVTLQYLDGQRGGRLLGVRCNMRYEIYKFYQGDPMLRIISLASAVPTIGKTPPGTPVTVYPQPPPAAPPAPQMITTPIAAQEETGRKGKLWIIGIAIPLVAILLCSTFTFLWLRRPKKGVLSSQDRAGANRIEENALVWTIEQKSSEFTLFDLSELLEATKSFAEENRLGQGGFGPVYKGQLSDGQEIAVKRLASHSGQGFTEFRNEVELIAKLQHTNLVRLLGCCIQAEEKILVYEYLPNKSLDFFIFDERQSSLLNWYKRRAIIEGVAQGLLYLHKHSRLRVVHRDLKASNILLDQDMDPKISDFGLARICSSNDAEGNTKRVVGTYGYMSPEYASEGIYSVKSDVFSFGVLLLEILSAKRNSGFHQYGDFLNLLGYVSICFLRKMHASCYGTTAVQIMEA

SEQ ID NO: 171735 - protein, 233 aa, Zea Mays
MAIVLLALLLFPSAYAQPWSVCGNTGNYTAASTYQDNLSQLAASLPKKASSNTSPLFATGTAGAVPDLVYALALCRGDINASACKDCVTIGFEDAQQLCAFNKEATVYYDSCLVSFSNEDFLSTTVNGNENEVTVLMDAQNFTESADYIRLLLFTLLNDTSESAINSIRRFTTARMDISSLPTIYCAVQCTPDLTADECAACLQDFPQVTLQYLDGQRGGRLLGVRCNMRTQR

SEQ ID NO: 171736 - protein, 413 aa, Zea Mays
MASSATPYLGELDAKVSTEQLFYQTNARFMYAYNSGVLSSQDRAGANRIEENALVWTIEQKSSEFTLFDLSELLEATKSFAEENRLGQGGFGPVYKGQLSDGQEIAVKRLASHSGQGFTEFRNEVELIAKLQHTNLVRLLGCCIQAEEKILVYEYLPNKSLDFFIFDERQSSLLNWYKRRAIIEGVAQGLLYLHKHSRLRVVHRDLKASNILLDQDMDPKISDFGLARICSSNDAEGNTKRVVGTYGYMSPEYASEGIYSVKSDVFSFGVLLLEILSAKRNSGFHQYGDFLNLLGYLYRSWRLDELSAVLQTWHLWEIGRWLDLVEASISKEMHEAEARRYINIALMCVQENADDRPTMSDVVAALNSESVVLPEPKHPAYFNLRVSKSVESAVVVEACSLNEMTITQDPQGR

SEQ ID NO: 171737 - protein, 319 aa, Zea Mays
MASSATPYLGELDAKVSTEQLFYQTNARFMYAYNSGVLSSQDRAGANRIEENALVWTIEQKSSEFTLFDLSELLEATKSFAEENRLGQGGFGPVYKGQLSDGQEIAVKRLASHSGQGFTEFRNEVELIAKLQHTNLDMDPKISDFGLARICSSNDAEGNTKRVVGTYGYMSPEYASEGIYSVKSDVFSFGVLLLEILSAKRNSGFHQYGDFLNLLGYTWHLWEIGRWLDLVEASISKEMHEAEARRYINIALMCVQENADDRPTMSDVVAALNSESVVLPEPKHPAYFNLRVSKSVESAVVVEACSLNEMTITQDPQGR

SEQ ID NO: 171738 - protein, 182 aa, Zea Mays
MDPKISDFGLARICSSNDAEGNTKRVVGTYGYMSPEYASEGIYSVKSDVFSFGVLLLEILSAKRNSGFHQYGDFLNLLGYTWHLWEIGRWLDLVEASISKEMHEAEARRYINIALMCVQENADDRPTMSDVVAALNSESVVLPEPKHPAYFNLRVSKSVESAVVVEACSLNEMTITQDPQGR

SEQ ID NO: 171739 - protein, 400 aa, Zea Mays
MFNLYLSVAEEAKERFMYAYNSGVLSSQDRAGANRIEENALVWTIEQKSSEFTLFDLSELLEATKSFAEENRLGQGGFGPVYKGQLSDGQEIAVKRLASHSGQGFTEFRNEVELIAKLQHTNLVRLLGCCIQAEEKILVYEYLPNKSLDFFIFDERQSSLLNWYKRRAIIEGVAQGLLYLHKHSRLRVVHRDLKASNILLDQDMDPKISDFGLARICSSNDAEGNTKRVVGTYGYMSPEYASEGIYSVKSDVFSFGVLLLEILSAKRNSGFHQYGDFLNLLGYLYRSWRLDELSAVLQTWHLWEIGRWLDLVEASISKEMHEAEARRYINIALMCVQENADDRPTMSDVVAALNSESVVLPEPKHPAYFNLRVSKSVESAVVVEACSLNEMTITQDPQGR

SEQ ID NO: 171740 - protein, 290 aa, Zea Mays
MYAYNSGVLSSQDRAGANRIEENALVWTIEQKSSEFTLFDLSELLEATKSFAEENRLGQGGFGPVYKGQLSDGQEIAVKRLASHSGQGFTEFRNEVELIAKLQHTNLDMDPKISDFGLARICSSNDAEGNTKRVVGTYGYMSPEYASEGIYSVKSDVFSFGVLLLEILSAKRNSGFHQYGDFLNLLGYTWHLWEIGRWLDLVEASISKEMHEAEARRYINIALMCVQENADDRPTMSDVVAALNSESVVLPEPKHPAYFNLRVSKSVESAVVVEACSLNEMTITQDPQGR

SEQ ID NO: 171741 - protein, 355 aa, Zea Mays
MGCVFGRAAASSSAAPKKKWGKGRSSPQPEAGSPSAVAATDGDGRPRRRLGGRRASGPRQGCVPAAAAAEQLAAGWPPWLVAVAGEALRGWAPRRADTFEKLNKVEQLHKIFKLCGSPSEEYWKKSKLPHATIFKPQQPYKRCIRETFKDFPTSALPLVETLLAIDPAERQTASAALHSDFFSTEPYACNPSSLPTYPPSKEMDAKLRDEEARRLRAAAKAKGEQKRTRPRDRSRRAGPAPEANAEIQANLDRRRMITHANAKSKSEKFPPPHQDGGTGNPLGSYHHMEPMFEHQDASFSTVVPIEKGTSQTWSGPLFDPAALGQSRRKKQTTLDAKAAAYSKQLQKEKGGIRAR

SEQ ID NO: 171742 - protein, 257 aa, Zea Mays
MPGRTEVEQLHKIFKLCGSPSEEYWKKSKLPHATIFKPQQPYKRCIRETFKDFPTSALPLVETLLAIDPAERQTASAALHSDFFSTEPYACNPSSLPTYPPSKEMDAKLRDEEARRLRAAAKAKGEQKRTRPRDRSRRAGPAPEANAEIQANLDRRRMITHANAKSKSEKFPPPHQDGGTGNPLGSYHHMEPMFEHQDASFSTVVPIEKGTSQTWSGPLFDPAALGQSRRKKQTTLDAKAAAYSKQLQKEKGGIRAR

SEQ ID NO: 171743 - protein, 415 aa, Zea Mays
MAREILILRRLDHPNIIKLEGLVTSRMSCSLYLVFEYMEHDLAGLAASCDVKFTLPQIKCYIQQLLSGLEHCHDNNVLHRDIKGSNLLLDNNGILKIADFGLATFFDPRHKRPMTSRVVTLWYRPPELLLGATEYSVGVDLWSAGCILAELLYGKPIMPGRTEVEQLHKIFKLCGSPSEEYWKKSKLPHATIFKPQQPYKRCIRETFKDFPTSALPLVETLLAIDPAERQTASAALHSDFFSTEPYACNPSSLPTYPPSKEMDAKLRDEEARRLRAAAKAKGEQKRTRPRDRSRRAGPAPEANAEIQANLDQRRRMITHANAKSKSEKFPPPHQDGGTGNPLGSYHHMEPMFEHQDASFSTVVPIEKGTSQTWSGPLFDPAALGQSRRKKQTTLDAKAAAYSKQLQKEKGGIRAR

SEQ ID NO: 171744 - protein, 263 aa, Zea Mays
MGCVFGRAAASSSAAPKKKWGKGRSSPQPEAGSPSAVAATDGDGRPRRRLGGRRASGPRQGCVPAAAAAEQLAAGWPPWLVAVAGEALRGWAPRRADTFEKLNKIGSGTYSNVYRARDTVSGRIVALKKVRFDNLEPESVKFMAREILILRRLDHPNIIKLEGLVTSRMSCSLYLVFEYMEHDLAGLAASCDVKFTLPQIKCYIQQLLSGLEHCHDNNVLHRDIKGSNLLLDNNGILKIADFGLATFFDPRHKRPMTSRVVTL

SEQ ID NO: 171745 - protein, 356 aa, Zea Mays
MGCVFGRAAASSSAAPKKKWGKGRSSPQPEAGSPSAVAATDGDGRPRRRLGGRRASGPRQGCVPAAAAAEQLAAGWPPWLVAVAGEALRGWAPRRADTFEKLNKVEQLHKIFKLCGSPSEEYWKKSKLPHATIFKPQQPYKRCIRETFKDFPTSALPLVETLLAIDPAERQTASAALHSDFFSTEPYACNPSSLPTYPPSKEMDAKLRDEEARRLRAAAKAKGEQKRTRPRDRSRRAGPAPEANAEIQANLDQRRRMITHANAKSKSEKFPPPHQDGGTGNPLGSYHHMEPMFEHQDASFSTVVPIEKGTSQTWSGPLFDPAALGQSRRKKQTTLDAKAAAYSKQLQKEKGGIRAR

SEQ ID NO: 171746 - protein, 1102 aa, Zea Mays
MAKPVKYDDEEEISSSSAEEDDDQSAAAASGSGEEGDDDEEDAAALPTEEEEAEGEGQQEEEVDEEEIEAVTTGAGAEDGEDASAATAAEGEEESQSTEDDESVARDKDNGDETDAVVGKREKTRLKELQKMKKQKIQEILDTQNAAIDADMNNKGKGRLKYLLQQTEIFAHFAKGSQSNEKKPRGRGRHASKMTEEEEDEEYLKEEEDALAGAGGTRLVSQPSCIKGKMRDYQLAGLNWLIRLYENGINGILADEMGLGKTLQTISLLGYLHEFRGIAGPHMVVAPKSTLGNWMKEIQRFCPILRAVKFLGNPEERNHIRDNLLQPGKFDVCVTSFEMAIKEKSALRRFSWRYIIIDEAHRIKNENSLLSKTMRIYNTNYRLLITGTPLQNNLHELWALLNFLLPEIFSSAETFDEWFQISGENDQQEVVQQLHKVLRPFLLRRLKSDVEKGLPPKKETILKVGMSQMQKQYYRALLQKDLEVINAGGERKRLLNIAMQLRKCCNHPYLFQGAEPGPPYTTGEHLIENAGKMVLLDKLLPKLKERDSRVLIFSQMTRLLDILEDYLMYRGYQYCRIDGNTGGEDRDASIEAFNSPGSEKFVFLLSTRAGGLGINLATADVVVLYDSDWNPQADLQAQDRAHRIGQKKEVQVFRFCTEYTIEEKVIERAYKKLALDALVIQQGRLAEQKTVNKDDLLQMVRFGAEMVFSSKDSTITDEDIDRIIAKGEETTAELDAKMKKFTEDAIKFKMDDNAELYDFDDEKVDFKKLVSDNWIEPPRRERKRNYSESDYFKQALRQGAPAKPREPRIPRMPHLHDFQFFNNQRLNELYEKEVRYLMQANQKKDTIDGEDEDQLEPLTAEEQEEKEQLLEEGFASWTRRDFNTFIRACEKYGRNDIKSISSEMEGKTEEEVQRYARVFKERYKELSDYDRIIKNIERGEARISRKDEIMKAIGKKLDRYKNPWLELKIQYGQNKGKFYNEECDRFMLCMVHKLGYGNWDELKAAFRMSPLFRFDWFVKSRTTQELARRCDTLIRLVEKENQEYDEQERQARKEKRLAKNMTPTKRAALKNSEGENTPPSSFKRRRQSLMDDYVGSGKRKRG

SEQ ID NO: 171747 - protein, 808 aa, Zea Mays
MAKPVKYDDEEEISSSSAEEDDDQSAAAASGSGEEGDDDEEDAAALPTEEEEAEGEGQQEEEVDEEEIEAVTTGAGAEDGEDASAATAAEGEEESQSTEDDESVARDKDNGDETDAVVGKREKTRLKELQKMKKQKIQEILDTQNAAIDADMNNKGKGRLKYLLQQTEIFAHFAKGSQSNEKKPRGRGRHASKMTEEEEDEEYLKEEEDALAGAGGTRLVSQPSCIKGKMRDYQLAGLNWLIRLYENGINGILADEMGLGKTLQTISLLGYLHEFRGIAGPHMVVAPKSTLGNWMKEIQRFCPILRAVKFLGNPEERNHIRDNLLQPGKFDVCVTSFEMAIKEKSALRRFSWRYIIIDEAHRIKNENSLLSKTMRIYNTNYRLLITGTPLQNNLHELWALLNFLLPEIFSSAETFDEWFQISGENDQQEVVQQLHKVLRPFLLRRLKSDVEKGLPPKKETILKVGMSQMQKQYYRALLQKDLEVINAGGERKRLLNIAMQLRKCCNHPYLFQGAEPGPPYTTGEHLIENAGKMVLLDKLLPKLKERDSRVLIFSQMTRLLDILEDYLMYRGYQYCRIDGNTGGEDRDASIEAFNSPGSEKFVFLLSTRAGGLGINLATADVVVLYDSDWNPQADLQAQDRAHRIGQKKEVQVFRFCTEYTIEEKVIERAYKKLALDALVIQQGRLAEQKTVNKDDLLQMVRFGAEMVFSSKDSTITDEDIDRIIAKGEETTAELDAKMKKFTEDAIKFKMDDNAELYDFDDEKDENKVDFKKLVSDNWIEPPRRERKRNKRTRRKIPLMVKTKISWSL

SEQ ID NO: 171748 - protein, 1074 aa, Zea Mays
MAKPVKYDDEEEISSSSAEEDDDQSAAAASGSGEEGDDDEEDAAALPTEEEEAEGEGQQEEEVDEEEIEAVTTGAGAEDGEDASAATAAEGEEESQSTEDDESVARDKDNGDETDAVVGKREKTRLKELQKMKKQKIQEILDTQNAAIDADMNNKGKGRLKYLLQQTEIFAHFAKGSQSNEKKPRGRGRHASKMTEEEEDEEYLKEEEDALAGAGGTRLVSQPSCIKGKMRDYQLAGLNWLIRLYENGINGILADEMGLGKTLQTISLLGYLHEFRGIAGPHMVVAPKSTLGNWMKEIQRFCPILRAVKFLGNPEERNHIRDNLLQPGKFDVCVTSFEMAIKEKSALRRFSWRYIIIDEAHRIKNENSLLSKTMRIYNTNYRLLITGTPLQNNLHELWALLNFLLPEIFSSAETFDEWFQISGENDQQEVVQQLHKVLRPFLLRRLKSDVEKGLPPKKETILKVGMSQMQKQYYRALLQKDLEVINAGGERKRLLNIAMQLRKCCNHPYLFQGAEPGPPYTTGEHLIENAGKMVLLDKLLPKLKERDSRVLIFSQMTRLLDILEDYLMYRGYQYCRIDGNTGGEDRDASIEAFNSPGSEKFVFLLSTRAGGLGINLATADVVVLYDSDWNPQADLQAQDRAHRIGQKKEVQVFRFCTEYTIEEKVIERAYKKLALDALVIQQGRLAEQKTVNKDDLLQMVRFGAEMVFSSKDSTITDEDIDRIIAKGEETTAELDAKMKKFTEDAIKFKMDDNAELYDFDDEKDENKVDFKKLVSDNWIEPPRRERKRNYSESDYFKQALRQGAPAKPREPRIPRMPHLHDFQFFNNQRLNELYEKEVRYLMQANQKKDTIDGEDEDQLEPLTAEEQEEKEQLLEEGFASWTRRDFNTFIRACEKYGRNDIKSISSEMEGKTEEEVQRYARVFKERYKELSDYDRIIKNIERGEARISRKDEIMKAIGKKLDRYKNPWLELKIQYGQNKGKFYNEECDRFMSRTTQELARRCDTLIRLVEKENQEYDEQERQARKEKRLAKNMTPTKRAALKNSEGENTPPSSFKRRRQSLMDDYVGSGKRKRG

SEQ ID NO: 171749 - protein, 1106 aa, Zea Mays
MAKPVKYDDEEEISSSSAEEDDDQSAAAASGSGEEGDDDEEDAAALPTEEEEAEGEGQQEEEVDEEEIEAVTTGAGAEDGEDASAATAAEGEEESQSTEDDESVARDKDNGDETDAVVGKREKTRLKELQKMKKQKIQEILDTQNAAIDADMNNKGKGRLKYLLQQTEIFAHFAKGSQSNEKKPRGRGRHASKMTEEEEDEEYLKEEEDALAGAGGTRLVSQPSCIKGKMRDYQLAGLNWLIRLYENGINGILADEMGLGKTLQTISLLGYLHEFRGIAGPHMVVAPKSTLGNWMKEIQRFCPILRAVKFLGNPEERNHIRDNLLQPGKFDVCVTSFEMAIKEKSALRRFSWRYIIIDEAHRIKNENSLLSKTMRIYNTNYRLLITGTPLQNNLHELWALLNFLLPEIFSSAETFDEWFQISGENDQQEVVQQLHKVLRPFLLRRLKSDVEKGLPPKKETILKVGMSQMQKQYYRALLQKDLEVINAGGERKRLLNIAMQLRKCCNHPYLFQGAEPGPPYTTGEHLIENAGKMVLLDKLLPKLKERDSRVLIFSQMTRLLDILEDYLMYRGYQYCRIDGNTGGEDRDASIEAFNSPGSEKFVFLLSTRAGGLGINLATADVVVLYDSDWNPQADLQAQDRAHRIGQKKEVQVFRFCTEYTIEEKVIERAYKKLALDALVIQQGRLAEQKTVNKDDLLQMVRFGAEMVFSSKDSTITDEDIDRIIAKGEETTAELDAKMKKFTEDAIKFKMDDNAELYDFDDEKDENKVDFKKLVSDNWIEPPRRERKRNYSESDYFKQALRQGAPAKPREPRIPRMPHLHDFQFFNNQRLNELYEKEVRYLMQANQKKDTIDGEDEDQLEPLTAEEQEEKEQLLEEGFASWTRRDFNTFIRACEKYGRNDIKSISSEMEGKTEEEVQRYARVFKERYKELSDYDRIIKNIERGEARISRKDEIMKAIGKKLDRYKNPWLELKIQYGQNKGKFYNEECDRFMLCMVHKLGYGNWDELKAAFRMSPLFRFDWFVKSRTTQELARRCDTLIRLVEKENQEYDEQERQARKEKRLAKNMTPTKRAALKNSEGENTPPSSFKRRRQSLMDDYVGSGKRKRG

SEQ ID NO: 171750 - protein, 427 aa, Zea Mays
MINNISISNMEAKAKEFNEVIQEQYYTWFAQYMVMKRASIEPNFHDLYLKFFDKVNSKSMNKEILKATYENCKVLLRSDLIKSSSEERSLLKNLGSWLGKFTIGRNQALRAKEIDPKSLIVEAYEKGLMIAVIPFTSKILEPCQSSIAYRSPNPWTMGILSLLAEIYNLPNLKMNLKFDIEVLNIPFFDSFFIDFVSAMLPMAMLNVLLGFQVLFKNLTVDIKDVKPTSLLKDRLCEVEGNPDFSNKDVTASQTPVVAEVPSGTIPSLTHMEQQPEINITSRAMSLPNILNQYAAPVRLPTNSTVEDDKVALMMPEQVPSLTQVSPAQTQSTSPSPFSVNQLMAAIPREEIRFKINPKLGSLGPQLQYSKIMDLALDKANREIILPVIQRSVTGGRNTGRVGVIKNREKHKGSFETIHVLLGPFCYV

SEQ ID NO: 171751 - protein, 56 aa, Zea Mays
MRFLTRAREGPPAAPRRGQTSSRHHRRGWKGAAARCRLWEEMRRRPNLRKKTKLFL

SEQ ID NO: 171752 - protein, 107 aa, Zea Mays
MQVLSSTNLAADFSRALPPGAPIPMLRREVLHSFVFKLSPQGCASARCGEPADQGNRPWPPQALHLHWLLLVTSKNNQSKEVYIIAKNHLHPWGSGKAAAPRLGNLL

SEQ ID NO: 171753 - protein, 546 aa, Zea Mays
MECNREEALKAREIAVKKLESRDFVGAKRIALKAQRIFPEIENIPQLLTVCEVHCAAEAKVNGMLDFYGILQVEGTADEVTIKKQYRKLVLSLHPDKNSYAGAESAFKFVAEAYSTLSDRTKRYAYDVKWRAAPKVAPKQATQPTQPNQATQQKQDAKPKHVAKPKQAAQPKQATQPMWTTEPINKNSTNSSAAGYGPWTFWTVCIHCKTKYKYHGDILNRQIRCQNCRQNFFAHQTSTEDVPSAFSSKTANSAAQQGCSTNIFSRENKEGPVMEGVKFSAKNSTVPDFGDRKNLGGGVDTSAGPGSAEIPTPRRSSRRKACADANNILNSPKKKSRTLKDWFSNATSSSNKVVDDNVAHADGHVSEPHVSSKTDNQDSCVVNEGNKRNTKTTCDPPAEKPWNTGSFTYPDPEFFDFDKCRDVKLFAVDQIWALYDEFDAMPRFYARIRHVNTTNFRVKYTWLEHSTVNDDEEKWIDNKLPVACGNFTLGNTEESQDPLMFSHMVSWVKGRKRGSYVIYPNIGEVWALYKGWSMQWVSDADSHRSY

SEQ ID NO: 171754 - protein, 507 aa, Zea Mays
MTLLCVPLVGRTVEEMITDAAAAAATGGDMVEIRLDFIQGFRPREHLPPLLRGCPLPALVTYRPVWEGGQYEGDDTTRFETLRLAMELGVDYVDIELKVADKFMSFIAGHKPEKCKLIVSSHNYEYTPSCEEITNLVASIQAVGADIVKVATTAKDIVDVSRMFQVMVHCQVPMIGLVMSEKGLMSRVLAPKFGGYLTFGILNATKTSASGQPTVEDLLDIYNIKCIGPDTKILGLIANPVKQSKSPILHNKCLQSIGYNAVYLPLLGDNLASFLETYSSPDFSGFSCSLPFKVDAVQCCDEHDPVAKSIGAINTIIRRPDGKLVGYNTDYIGAISAIEDGIGGSKDAVISPLAGRLIVVVGAGGAGKAIAYGAKEKGARVVIANRTYEKAVRLANAIGGQALRLEDLETFRPEEGMILANATSLGMYPNVDGTPIPKKALGFYDVVFDAVYAPKVTRLLREAEECGVKVVSGVEMFIRQAMGQFEHFTGGIEAPESLMREIAAKYT

SEQ ID NO: 171755 - protein, 67 aa, Zea Mays
MHQRFITKLLSPNASNKVIKILKHQGGGECTGACLNNIRLVFVRRRSLDEYPSTEHLIDLTIFKLVH

SEQ ID NO: 171756 - protein, 127 aa, Zea Mays
MRRPSPRPRRAPLLPATKLPWPPSSAFAPPCVARLACSPAPVHARILFLPGARPHLHLPASALPKPSHGVVPPWCRVSLCQSPMAPSRLAFLVLALPQCPVPWPALRVCRVCHRSGPPISVGPRIPR

SEQ ID NO: 171757 - protein, 129 aa, Zea Mays
MRRPSPRPRRAPLLPGSRAQLPLFRAPPASPWPGLHPLPARHGWSSFFPATKLPWPPSSAFAPPCVARLACSPAPVHARILFLPGARPHLHLPASALPKPSHGVVPPWCRVSLCQSPMAPSRLAFLGQP

SEQ ID NO: 171758 - protein, 242 aa, Zea Mays
MSTNLGGASCFGFGLTQMQPAAVRLRLPPARAADTSSSQSPARLTAVLEQVDQLLSQGNDMAALSLVRSTQGGDGGLRAFGAARQVYFGGGVRNLVLDTIGHYLSQKYHNRVIQHEAGHFLIAYLLGVLPKGYTITSLDTLMNQGSLNVQAGAAFVDYEFLEEINTGKLSATMVNKFSCIALAGVAAEYLLYGRAEGGLADINKLDGLLKGLGFTQKKADSQDRSLQRQCLQGSRWALASKS

SEQ ID NO: 171759 - protein, 322 aa, Zea Mays
MSTNLGGASCFGFGLTQMQPAAVRLRLPPARAADTSSSQSPARLTAVLEQVDQLLSQGNDMAALSLVRSTQGGDGGLRAFGAARQVPQRLYKLDELKLNGIDTSAFLSPVDLTLGSIERNLQIAAVLGGFSVSAALELSQLQILFLILGLLSLWSVDFVYFGGGVRNLVLDTIGHYLSQKYHNRVIQHEAGHFLIAYLLGVLPKGYTITSLDTLMNQGSLNVQAGAAFVDYEFLEEINTGKLSATMVNKFSCIALAGVAAEYLLYGRAEGGLADINKLDGLLKGLGFTQKKADSQLAEAMSTGKSVGSCIQVIEECISTDDI

SEQ ID NO: 171760 - protein, 111 aa, Zea Mays
MNQGSLNVQAGAAFVDYEFLEEINTGKLSATMVNKFSCIALAGVAAEYLLYGRAEGGLADINKVRWAVLNTVLILRRHEKARSQLAEAMSTGKSVGSCIQVIEECISTDDI

SEQ ID NO: 171761 - protein, 58 aa, Zea Mays
MFTNVQYRTSSTSNSPSALAAYIPSQMSSSLQKAGISFLLLEKTNTDNKFQKCFSLFV

SEQ ID NO: 171762 - protein, 60 aa, Zea Mays
MEKKSLTFLGTWIAREAHRRDGSVLASQSHRILRDHASSFMLEMPRPPNSRGLQTIPQAT

SEQ ID NO: 171763 - protein, 84 aa, Zea Mays
MANLGRTSKGWKHLATVIAPEQPSTASSSYLCFRRLAVAAVWSQQACPAEKAGVRYSQSASMYGCKGWSQAAAVLLLGGGCTRT

SEQ ID NO: 171764 - protein, 114 aa, Zea Mays
MAYAACDVVISRAGAMTCTEILATGKPSILIPLPTILDHHQTRNAYIMADIMGAMVITEDELDSSSLTSAVDEIFGDEKLMADMSQKALTAARPNASADIIRHICSLIGSTYPS

SEQ ID NO: 171765 - protein, 279 aa, Zea Mays
MEFSPSATPPLGYALVLTSPPSTSTSSHHLPVFPSRGAQDADQGHQQPASQARAAAAPQRRHPPSFVSRSAAPLCSDASRAPPWRTSPAAENLQVQATSIFPHGAPAPISSPSSLFLAQTNFFSKADACFPPTSSPPRCKAVGKSLHPARPPPPVVVLVGSKPRRTLCALAASRPGLPWLPPWRTSRSSRDASSRSHVDLLASRPWHARRNAAASSSSDTLRCVVLARTGLTSSICAASARRRRNPRPCRRHASRIARRQRAQTNGMHARCESARTERW

SEQ ID NO: 171766 - protein, 83 aa, Zea Mays
MDRTAPVVAIAEVVDAARAAAVAAAEARCVALVAEKEARAGVESATIAAGKVELAVSAVKYGRFVEGDSMVESKDNVDLKYHV

SEQ ID NO: 171767 - protein, 766 aa, Zea Mays
MGCGQSKIDQEEAVFRCRERKRLMADAVASRNGFAAAHTGYTVRLKSTGGALSDFAQGEAPDPSLVSSHTHHAPAVATSSVSTPPGPSAASVNSPSPPPPPFADFSHSSLQRSSSTPNIPMPEPRAAAKNRPPADASIREEDEDEDEEEQDGHIKIDSDDDSDDDSDEDDDHHEHDDVSVDDMVHGQQSKRILMSSVGSSPVTPPPPPRLNHTPPTLATATPPPPVLESQMATWDYIFGPTPTPPPTLEQPAADTLWMERRDKEPVAEVKAPVAKTVVSKPAATEERPPETAVEKDKAIEEMMANLPPSKPIVRKPPKAPGPSQEAAHYQHASSMGAVEIRKGKVMVASGTASLLQIVTRLDDNFLRASESAHDVSKKLEATRMHYHSNHADSRGHIDHSTKIMHVITWNRSFKNLPDHEDLNDNFEIDDRFETHAAVLDRMLAWEKKLYDEVKKQKKRGVKLETLEKTKAAVSQLHTRYIVDMQSMDSTVSEINRLRDRQLFPKLMDLVDGMAKMWSSMYRHHRSQFLIISGIRGFEIPPIPRETTDSHYIQTCELRDIVREWHTQFEKLMDNQKAYIRALNAWLKLNLIPIESNIKEKVSSPPRLVDPPIKHLLHAWHDELERLPIELAKTAIKTFAEVISTIVHLQEEEVNLRRRCDETRRDLNRKKAQFEDWHQKYLERQTAETQNIDPVEDRKRTIEELEIRLREEEGHHLRHARQVREKSLANLRTHLPELFRNMSDFAYFCKDMYNNLRKTAALSKDEV

SEQ ID NO: 171768 - protein, 756 aa, Zea Mays
MGCGQSKIDQEEAVFRCRERKRLMADAVASRNGFAAAHTGYTVRLKSTGGALSDFAQGEAPDPSLVSSHTHHAPAVATSSVSTPPGPSAASVNSPSPPPPPFADFSHSSLQRSSSTPNIPMPEPRAAAKNRPPADASIREEDEDEDEEEQDGHIKIDSDDDSDDDSDEDDDHHEHDDVSVDDMVHGQQSKRILMSSVGSSPVTPPPPPRLNHTPPTLATATPPPPVLESQMATWDYIFGPTPTPPPTLEQPAADTLWMERRDKEPVAEVKAPVAKTVVSKPAATEERPPETAVEKDKAIEEMMANLPPSKPIVRKPPKAPGPSQEAAHYQHASSMGAVEIRKGKVMVASGTASLLQIVTRLDDNFLRASESAHDVSKKLEATRMHYHSNHADSRGHIDHSTKIMHVITWNRSFKNLPDHEDLNDNFEIDDRFETHAAVLDRMLAWEKKLYDEVKAGELMKTDYQKKVSLLQKQKKRGVKLETLEKTKAAVSQLHTRYIVDMQSMDSTVSEINRLRDRQLFPKLMDLVDGMAKMWSSMYRHHRSQFLIISGIRGFEIPPIPRETTDSHYIQTCELRDIVREWHTQFEKLMDNQKAYIRALNAWLKLNLIPIESNIKEKVSSPPRLVDPPIKHLLHAWHDELERLPIELAKTAIKTFAEVISTIVHLQEEEVNLRRRCDETRRDLNRKKAQFEDWHQKYLERQTAETQNIDPVEDRKRTIEELEIRLREEEGHHLRHARTFQEHVRFCLLLQRHVQQS

SEQ ID NO: 171769 - protein, 254 aa, Zea Mays
MAKMWSSMYRHHRSQFLIISGIRGFEIPPIPRETTDSHYIQTCELRDIVREWHTQFEKLMDNQKAYIRALNAWLKLNLIPIESNIKEKVSSPPRLVDPPIKHLLHAWHDELERLPIELAKTAIKTFAEVISTIVHLQEEEVNLRRRCDETRRDLNRKKAQFEDWHQKYLERQTAETQNIDPVEDRKRTIEELEIRLREEEGHHLRHARQVREKSLANLRTHLPELFRNMSDFAYFCKDMYNNLRKTAALSKDEV

SEQ ID NO: 171770 - protein, 176 aa, Zea Mays
MATAPWLLLSTSCAPGHFPRWPSALLHRAQPSLLPELLPCRTGAPSMAPERPALGFLLASRALVFSPVLISLLVFFNRRALSLTRSPMLRCPSSDSARPDLPCAAPLLLPVPARCPEPQRRSPVYSSPWHASSFTLRARSSQLAQSARRGFSPHGTIINHMMWRTKAESTTRGWKA

SEQ ID NO: 171771 - protein, 178 aa, Zea Mays
MATAPWLLLSTSCAPGHFPRWPSALLHRAQPSLLPELLPCRTGAPSMAPERPALGFLLASRALVFSPVLISLLVFFNRRALSLTRSPMLRCPSSDSARPDLPCAAPLLLPVPARCPEPQRRSPVYSSPWHASSFTLRARSSQLAQSARRGFSPHGAPPCPCSDFPSVLQPLSSLPQPR

SEQ ID NO: 171772 - protein, 574 aa, Zea Mays
MAPPPPPPLHPHHHCVLTRFRCPATGTARFLIRLGIKPFCCSSVPSRTPPPLHGPSLRRGRRPLDYPDPFARTFDLAALRVPAAACAPLERRLRGHLLNWPRVHNVIRLRNDQGLLSLSPPPPGYPAEEPGGPAPRATAVLRREKLVRELNARGFLRFPNLARLSRPSPLARKRRERKGDGGDEETCEPDKDKAYVVEVAGERREDDDDWKGLVGEEGIGRDTWRIGSTRLLLLEERYAERKVDELPEAVKDVLDHETQHDESSAFELIRCHLTLFYTYWSMSEVLEVLLPEGVIIPTGFETIGHIAHLNLRDEHMPYKKLIASVVLDKNKPKIQTVVNKTDVIQNNYRTMQLEVLAGNGSLRTMVIESGLRFQVDLGTVYWNSRLATERQRLVNIFRNLDVVCDMFSGVGPLAISAAKKVKYVYANDINPNAVGYLERNMVLNKLEKKIEVFNMDARRFVSAIYSSKHVQPITQIVMNLPNDAVEFLDVFKGILCNTKSELHCVMPMIHVYGFSKAEDPEHDFHERINLTLGENIDTVEMHRVRLVAPGKWMICATFTLPQSVASAQPNYITC

SEQ ID NO: 171773 - protein, 293 aa, Zea Mays
MSEVLEVLLPEGVIIPTGFETIGHIAHLNLRDEHMPYKKLIASVVLDKNKPKIQTVVNKTDVIQNNYRTMQLEVLAGNGSLRTMVIESGLRFQVDLGTVYWNSRLATERQRLVNIFRNLDVVCDMFSGVGPLAISAAKKVKYVYANDINPNAVGYLERNMVLNKLEKKIEVFNMDARRFVSAIYSSKHVQPITQIVMNLPNDAVEFLDVFKGILCNTKSELHCVMPMIHVYGFSKAEDPEHDFHERINLTLGENIDTVEMHRVRLVAPGKWMICATFTLPQSVASAQPNYITC

SEQ ID NO: 171774 - protein, 288 aa, Zea Mays
MAPPPPPPLHPHHHCVLTRFRCPATGTARFLIRLGIKPFCCSSVPSRTPPPLHGPSLRRGRRPLDYPDPFARTFDLAALRVPAAACAPLERRLRGHLLNWPRVHNVIRLRNDQGLLSLSPPPPGYPAEEPGGPAPRATAVLRREKLVRELNARGFLRFPNLARLSRPSPLARKRRERKGDGGDEETCEPDKDKAYVVEVAGERREDDDDWKGLVGEEGIGRDTWRIGSTRLLLLEERYAERKVDELPEAVKDVLDHETQHDESSAFELIRCHLTLFYTYWSMSELLEF

SEQ ID NO: 171775 - protein, 503 aa, Zea Mays
MAPPPPPPLHPHHHCVLTRFRCPATGTARFLIRLGIKPFCCSSVPSRTPPPLHGPSLRRGRRPLDYPDPFARTFDLAALRVPAAACAPLERRLRGHLLNWPRVHNVIRLRNDQGLLSLSPPPPGYPAEEPGGPAPRATAVLRREKLVRELNARGFLRFPNLARLSRPSPLARKRRERKGDGGDEETCEPDKDKAYVVEVAGERREDDDDWKGLVGEEGIGRDTWRIGSTRLLLLEERYAERKVDELPEAVKDVLDHETQHDESSAFELIRCHLTLFYTYWSMSEGSDGALEENDTRRREHDFFDVEEVDGVITAPKDEQNVLEVLLPEGVIIPTGFETIGHIAHLNLRDEHMPYKKLIASVVLDKNKPKIQTVVNKTDVIQNNYRTMQLEVLAGNGSLRTMVIESGLRFQVDLGTVYWNSRLATERQRLVNIFRNLDVVCDMFSGVGPLAISAAKKVKYVYANDINPNAVGYLERNMVLNKLEKKIEMCSKGFYAILNQNCIV

SEQ ID NO: 171776 - protein, 501 aa, Zea Mays
MAPPPPPPLHPHHHCVLTRFRCPATGTARFLIRLGIKPFCCSSVPSRTPPPLHGPSLRRGRRPLDYPDPFARTFDLAALRVPAAACAPLERRLRGHLLNWPRVHNVIRLRNDQGLLSLSPPPPGYPAEEPGGPAPRATAVLRREKLVRELNARGFLRFPNLARLSRPSPLARKRRERKGDGGDEETCEPDKDKAYVVEVAGERREDDDDWKGLVGEEGIGRDTWRIGSTRLLLLEERYAERKVDELPEAVKDVLDHETQHDESSAFELIRCHLTLFYTYWSMSEVLEVLLPEGVIIPTGFETIGHIAHLNLRDEHMPYKKLIASVVLDKNKPKIQTVVNKTDVIQNNYRTMQLEVLAGNGSLRTMVIESGLRFQVDLGTVYWNSRLATERQRLVNIFRNLDVVCDMFSGVGPLAISAAKKVKYVYANDINPNAVGYLERNMVLNKLEKKIEVFNMDARRFVSAIYSSKHVQPITQIVMNLPNDAVEFLEDKFNVRREHRHC

SEQ ID NO: 171777 - protein, 467 aa, Zea Mays
MAPPPPPPLHPHHHCVLTRFRCPATGTARFLIRLGIKPFCCSSVPSRTPPPLHGPSLRRGRRPLDYPDPFARTFDLAALRVPAAACAPLERRLRGHLLNWPRVHNVIRLRNDQGLLSLSPPPPGYPAEEPGGPAPRATAVLRREKLVRELNARGFLRFPNLARLSRPSPLARKRRERKGDGGDEETCEPDKDKAYVVEVAGERREDDDDWKGLVGEEGIGRDTWRIGSTRLLLLEERYAERKVDELPEAVKDVLDHETQHDESSAFELIRCHLTLFYTYWSMSEVLEVLLPEGVIIPTGFETIGHIAHLNLRDEHMPYKKLIASVVLDKNKPKIQTVVNKTDVIQNNYRTMQLEVLAGNGSLRTMVIESGLRFQVDLGTVYWNSRLATERQRLVNIFRNLDVVCDMFSGVGPLAISAAKKVKYVYANDINPNAVGYLERNMVLNKLEKKIEMCSKGFYAILNQNCIV

SEQ ID NO: 171778 - protein, 265 aa, Zea Mays
MSEVLEVLLPEGVIIPTGFETIGHIAHLNLRDEHMPYKKLIASVVLDKNKPKIQTVVNKTDVIQNNYRTMQLEVLAGNGSLRTMVIESGLRFQVDLGTVYWNSRLATERQRLVNIFRNLDVVCDMFSGVGPLAISAAKKVKYVYANDINPNAVGYLERNMVLNKLEKKIEVFNMDARRFVSAIYSSKHVQPITQIVMNLPNDAVEFLAEDPEHDFHERINLTLGENIDTVEMHRVRLVAPGKWMICATFTLPQSVASAQPNYITC

SEQ ID NO: 171779 - protein, 357 aa, Zea Mays
MRSGLQFSAYLQIELRVRMVLPGDSISHAGISLRMICLQLSMPSIKDVLDHETQHDESSAFELIRCHLTLFYTYWSMSEVLEVLLPEGVIIPTGFETIGHIAHLNLRDEHMPYKKLIASVVLDKNKPKIQTVVNKTDVIQNNYRTMQLEVLAGNGSLRTMVIESGLRFQVDLGTVYWNSRLATERQRLVNIFRNLDVVCDMFSGVGPLAISAAKKVKYVYANDINPNAVGYLERNMVLNKLEKKIEVFNMDARRFVSAIYSSKHVQPITQIVMNLPNDAVEFLELHCVMPMIHVYGFSKAEDPEHDFHERINLTLGENIDTVEMHRVRLVAPGKWMICATFTLPQSVASAQPNYITC

SEQ ID NO: 171780 - protein, 213 aa, Zea Mays
MPYKKLIASVVLDKNKPKIQTVVNKTDVIQNNYRTMQLEVLAGNGSLRTMVIESGLRFQVDLGTVYWNSRLATERQRLVNIFRNLDVVCDMFSGVGPLAISAAKKVKYVYANDINPNAVGYLERNMVLNKLEKKIEVFNMDARRFVSAIYSSKHVQPITQIVMNLPNDAVEFLDVFKGILCNTKSELHCVMPMIHVYGFSKAEDPEHDFHEHL

SEQ ID NO: 171781 - protein, 153 aa, Zea Mays
MTVREPCWELEKTPRPTGNKSYWNSRLATERQRLVNIFRNLDVVCDMFSGVGPLAISAAKKVKYVYANDINPNAVGYLERNMVLNKLEKKIEVFNMDARRFVSAIYSSKHVQPITQIVMNLPNDAVEFLDIYENLAQMCSKGFYAILNQNCIV

SEQ ID NO: 171782 - protein, 69 aa, Zea Mays
MPMIHVYGFSKAEDPEHDFHERINLTLGENIDTVEMHRVRLVAPGKWMICATFTLPQSVASAQPNYITC

SEQ ID NO: 171783 - protein, 100 aa, Zea Mays
MLNVAWRYISMQGTRSPLATVMVSLSRCWGYKYCCWHAVFGDEVVCGPGVEQGVEDNVAHGDANLHGGRGANAGYGTKGDERCFFLWIGLHAVVLIFGVI

SEQ ID NO: 171784 - protein, 79 aa, Zea Mays
MRKTTQVDPRIMRDWTSPQDDVVNRTNLKMDRLNECQGKGWSSSDHRLTRTNVVFIPGKPQCICHLLAVLKSFSPYMMH

SEQ ID NO: 171785 - protein, 76 aa, Zea Mays
MRKTTQVDPRIMRDWTSPQDDVVNRTNLKMDRLNECQGKGWSSSDHRLTRTNVVFIPGIFKLGSEPQWEKHEQYED

SEQ ID NO: 171786 - protein, 258 aa, Zea Mays
MALDAPVERRDEVQIAMGNGNGVAPSQPSRPAGRPTAAAAAAPYADRRLRLNPNADHKPEDYSDVRGEYAPAVYSALERHLPPSLIDADRDVKLHFMRDILARYWPQGERNKVQRHREYRQRILHLYKPLHEELYNMHPSVFFLPTFLEAVRSNTEECFRSIMTEPIPGVYSFAMLQPTFCEMLLEEVENFEKWVHAMKFKIMRPNTMNKYGAVLDDFGLEAMLNQFMEQFIAPISKGCLNDFYVVTYIDHFISVVSH

SEQ ID NO: 171787 - protein, 256 aa, Zea Mays
MRSSAILTLPEKCAFRALLVQRHREYRQRILHLYKPLHEELYNMHPSVFFLPTFLEAVRSNTEECFRSIMTEPIPGVYSFAMLQPTFCEMLLEEVENFEKWVHAMKFKIMRPNTMNKYGAVLDDFGLEAMLNQFMEQFIAPISKVLYPEVGGGTLDSHHAFIVEYGKDRDVELGFHVDDSEVTLNVCLGKQFFGGELYFRGIRCENHVNSETQHEEMYDYTHIPGWAVLHHGRHRHGARATSSGLRINLLLWCRRY

SEQ ID NO: 171788 - protein, 372 aa, Zea Mays
MSSQSSAGGPAIHHPHSNYHPYIFQHDPPLHSNSRRRRRNHDDPYQPYLPLPHAHSHGATAVVTGTVRCHVPRDPLVLSHLQERLFPTLPQHHPIAGPPPTKRARRAPDTPWDPPPPTLQPALVPVALERPPDVGHSAGALLSRDEIERRSPSRRDGIDSALEARLRASYCAYLHCLGNRLGPQTTIATAVVFCHRFFFHRSHACHDRFLVATAALFLAAKAEETACLLNTVLRASCEVSQNQEFNLLPYMLCGQDWFEQYRESVIQAEQMILTTLDFELEVAHPYASLSSALGKLGLTHTVLFNVAWNLINEGLRSSLWLQFKPHHIAAGAAFLAAKFLHYDITFHPNFWHEFKTSPYIVQDVVQQLKELL

SEQ ID NO: 171789 - protein, 326 aa, Zea Mays
MSSQSSAGGPAIHHPHSNYHPYIFQHDPPLHSNSRRRRRNHDDPYQPYLPLPHAHSHGATAVVTGTVRCHVPRDPLVLSHLQERLFPTLPQHHPIAGPPPTKRARRAPDTPWDPPPPTLQPALVPVALERPPDVGHSAGALLSRDEIERRSPSRRDGIDSALEARLRASYCAYLHCLGNRLGPQTTIATAVVFCHRFFFHRSHACHDRFLVATAALFLAAKAEETACLLNTVLRASCEVSQNQEFNLLPYMLCGQDWFEQYRESVIQAEQMILTTLDFELEVAHPYASLSSALGKLGLTHTVLFNVAWNLINEGRTTPETWCLTPL

SEQ ID NO: 171790 - protein, 371 aa, Zea Mays
MSSQSSAGGPAIHHPHSNYHPYIFQHDPPLHSNSRRRRRNHDDPYQPYLPLPHAHSHGATAVVTGTVRCHVPRDPLVLSHLQERLFPTLPQHHPIAGPPPTKRARRAPDTPWDPPPPTLQPALVPVALERPPDVGHSAGALLSRDEIERRSPSRRDGIDSALEARLRASYCAYLHCLGNRLGPQTTIATAVVFCHRFFFHRSHACHDRFLVATAALFLAAKAEETACLLNTVLRASCEVSQNQEFNLLPYMLCGDWFEQYRESVIQAEQMILTTLDFELEVAHPYASLSSALGKLGLTHTVLFNVAWNLINEGLRSSLWLQFKPHHIAAGAAFLAAKFLHYDITFHPNFWHEFKTSPYIVQDVVQQLKELL

SEQ ID NO: 171791 - protein, 241 aa, Zea Mays
MSSQSSAGGPAIHHPHSNYHPYIFQHDPPLHSNSRRRRRNHDDPYQPYLPLPHAHSHGATAVVTGTVRCHVPRDPLVLSHLQERLFPTLPQHHPIAGPPPTKRARRAPDTPWDPPPPTLQPALVPVALERPPDVGHSAGALLSRDEIERRSPSRRDGIDSALEARLRASYCAYLHCLGNRLGLPQTTIATAVVFCHRFFFHRSHACHDRFLVATAALFLAAKAEETACLLNTVLRASSGLV

SEQ ID NO: 171792 - protein, 372 aa, Zea Mays
MSSQSSAGGPAIHHPHSNYHPYIFQHDPPLHSNSRRRRRNHDDPYQPYLPLPHAHSHGATAVVTGTVRCHVPRDPLVLSHLQERLFPTLPQHHPIAGPPPTKRARRAPDTPWDPPPPTLQPALVPVALERPPDVGHSAGALLSRDEIERRSPSRRDGIDSALEARLRASYCAYLHCLGNRLGLPQTTIATAVVFCHRFFFHRSHACHDRFLVATAALFLAAKAEETACLLNTVLRASCEVSQNQEFNLLPYMLCGDWFEQYRESVIQAEQMILTTLDFELEVAHPYASLSSALGKLGLTHTVLFNVAWNLINEGLRSSLWLQFKPHHIAAGAAFLAAKFLHYDITFHPNFWHEFKTSPYIVQDVVQQLKELL

SEQ ID NO: 171793 - protein, 76 aa, Zea Mays
MLCGQDWFEQYRESVIQAEQMILTTLDFELEVAHPYASLSSALGKLGLTHTVLFNVAWNLINEGRTTPETWCLTPL

SEQ ID NO: 171794 - protein, 71 aa, Zea Mays
MLCGQDWFEQYRESVIQAEQMILTTLDFELEVAHPYASLSSALGKLGLTHTVLFNVAWNLINEGSGICPWR

SEQ ID NO: 171795 - protein, 62 aa, Zea Mays
MHHPQLATGYEVHFGFSSSPIILLLELHSLLQSSSTMTSHSIQISGMNSRQVHILFKMLSSS

SEQ ID NO: 171796 - protein, 187 aa, Zea Mays
MTCAHIPRIRRAGQSREPTPCGTDDNANSQSFPAAHRTPVRHHGRLQNINSEDHRTSRLGARDQRRAGEEIQRREQQPTMAEGAAQRPGEIRTGAKEMGVHAQSSRSDRARAGARREEDEGAGSSQRCSTTAITGVEQGHNLASWEAGRRKVCAPPTDRDMAQAGSAGLGEIRAKPWTRRGSSTAGG

SEQ ID NO: 171797 - protein, 239 aa, Zea Mays
MRSSVARLIRSSSASPSRLSGNAFFGNATPSDQRHIEKPFKVKEAEPVNVTKPSPHKLLVLGGSGFVGSHVCKEALDKGLVVSSLNRSGKPSLNEPWADKVIWNQGNLLEPASLKDAMDNVSAVVSCVGGFGSNSFMYKINGTANINAIRAAAEKGVKRFVYVSAADFGLVNYLLQGYYEGKRASEAELLSKFTYGGVILRPGFIHGTRRVGSVKIPLGLVGSPMQMVILLFPHFFESI

SEQ ID NO: 171798 - protein, 74 aa, Zea Mays
MSVSGAKLLGSWGVDLPIRPLHTLHLYWRVKPGQEQTVSTSAGFPTFSSYGDPPVYGAPSLELPGLIKISCIRS

SEQ ID NO: 171799 - protein, 56 aa, Zea Mays
MGSLFLPIIMCFWRLWIMWIEGLEVGLDVGLGFDLEFNFCRMADSTVSVHASFPWS

SEQ ID NO: 171800 - protein, 52 aa, Zea Mays
MHPQKRNRCHLNQCTMTDSYKPLQLKPMPNFSKQSRFSLVKHNRVSTDHLKM

SEQ ID NO: 171801 - protein, 732 aa, Zea Mays
MLRHLTNNPLLSRRCHRMFHHNRLCTTATSSAAAGEIAPDPAAYETTVGVEYDLAQELRSHLVRDTCRLLELRDSWSAKLEAQLRHFLRALTPSQVRAVLRAQAQRDARAAFEFFRWADRQWKYRHAPEVFDEMLALLSRTRLHDPARRVVRLMIRRGIRRGTRQFAHLMLSYSRAGKLRSAMRVLQLMQKDGCAPDICICNVAVNVLVVAGRVDKALEFAERMRRVGVDPDVVTYNCLIKGLCGARRIVEALEMIGSMLQNGCPPDKISYFTVMSFLCKEKRVAEVWNLLERMRNDAGIFPDQITYNMLIHGLAKHGHADEALTFLRESEGKRFRVDQVGYSAIVHSFCLNGRMSEAKEIIGEMISKGCRPDVVTYSAVVDGFCRIGELDQARKMMKHMYKNGCKPNTVTHTALLNGLCKVGKSSEAWELLNKSEEEWWTPSGITYSVIMHGFRREGKLVESCDVVMQMLQKGFFPTAVEINLLIHALCKEQKPARAKDFMEQCQSKGCFINVVNFTTVIHGFSRQGDLESALSLLDDMYLTNRHPDVVTYTVVVDALGRKGKMKEATALVEKMLNRGLLPTPVTYRTVIHRYCEKGAVEDLLNLLDKMLTKQGFSSAYNQVIEKLCAFGKLSEAYNLLSKVLRSASKRDAQTCHILMDSFLNRGLPLQSYNVACRMFQRNLIPDLKLCQKVDSQLALVGERHAAGKLITKFLERDCRCCDGLRSPHPPLA

SEQ ID NO: 171802 - protein, 390 aa, Zea Mays
MMQVGYSAIVHSFCLNGRMSEAKEIIGEMISKGCRPDVVTYSAVVDGFCRIGELDQARKMMKHMYKNGCKPNTVTHTALLNGLCKVGKSSEAWELLNKSEEEWWTPSGITYSVIMHGFRREGKLVESCDVVMQMLQKGFFPTAVEINLLIHALCKEQKPARAKDFMEQCQSKGCFINVVNFTTVIHGFSRQGDLESALSLLDDMYLTNRHPDVVTYTVVVDALGRKGKMKEATALVEKMLNRGLLPTPVTYRTVIHRYCEKGAVEDLLNLLDKMLTKQGFSSAYNQVIEKLCAFGKLSEAYNLLSKVLRSASKRDAQTCHILMDSFLNRGLPLQSYNVACRMFQRNLIPDLKLCQKVDSQLALVGERHAAGKLITKFLERGILEQEKQDS

SEQ ID NO: 171803 - protein, 593 aa, Zea Mays
MLALLSRTRLHDPARRVVRLMIRRGIRRGTRQFAHLMLSYSRAGKLRSAMRVLQLMQKDGCAPDICICNVAVNVLVVAGRVDKALEFAERMRRVGVDPDVVTYNCLIKGLCGARRIVEALEMIGSMLQNGCPPDKISYFTVMSFLCKEKRVAEVWNLLERMRNDAGIFPDQITYNMLIHGLAKHGHADEALTFLRESEGKRFRVDQVGYSAIVHSFCLNGRMSEAKEIIGEMISKGCRPDVVTYSAVVDGFCRIGELDQARKMMKHMYKNGCKPNTVTHTALLNGLCKVGKSSEAWELLNKSEEEWWTPSGITYSVIMHGFRREGKLVESCDVVMQMLQKGFFPTAVEINLLIHALCKEQKPARAKDFMEQCQSKGCFINVVNFTTVIHGFSRQGDLESALSLLDDMYLTNRHPDVVTYTVVVDALGRKGKMKEATALVEKMLNRGLLPTPVTYRTVIHRYCEKGAVEDLLNLLDKMLTKQGFSSAYNQVIEKLCAFGKLSEAYNLLSKVLRSASKRDAQTCHILMDSFLNRGLPLQSYNVACRMFQRNLIPDLKLCQKVDSQLALVGERHAAGKLITKFLERGILEQEKQDS

SEQ ID NO: 171804 - protein, 305 aa, Zea Mays
MDDPSSASNKHKHKRGRKPKASPPSPDHSSPSPSVAPAPAGRRGRKPRRHEALADVDATRPPSPPRRGEPKPVANGGDVVFCVHTEPNISLPWQRKRQYCSSSSGFIISGHHVLTNAHSVEYLATVLAIGTECDIVLQDAVTVVGYPIGGDTISVTSGVVSRIEMLLYVHGSIELLGLQIDAAINSGNSGGPAFNDRGKCVGIAFQSLKHEDAENIGYVIPTPVITHFIEDYKNLENTQAAIEYIHSLSRAQPAHSLNGVGLCPASRSLSTHAATMSSTPQLKAHHVKHPGCHYVKQNRRREELM

SEQ ID NO: 171805 - protein, 98 aa, Zea Mays
MYRQIVSMQIHRMIMLNYRPYYVPASPSSLASSLSLSLEKRKETRTHKKNILTRGSAGPVGTDTDTATATVPSEAWHRSFAKEQLQVQKNKAKQSASM

SEQ ID NO: 171806 - protein, 653 aa, Zea Mays
MLPPSLVNLTIWIQQILINGNKISGSIPTEIGKLSNLRVLAIADNALTGTIPDTIGGLHNMTGLDVSGNNLSGEIPSLLVANLTQLSFLDLSQNELEGSIPESFENMRNIAILDLSYNKFSGMIPKQLVSLSSLTLFLNLSHNTFSGPIPSQVGRLSSLGVLDLSNNRLSGEVPRALFQCQAMEYLFLQGNQLVGRIPQSLSSMKGLQYLDMSENNLSGSIPDYLSTLQYLHYLNLSYNQFDGPVPTSGVFNDSRNFFVAGNKVCGGVSELQLPKCSGGNMLHKSRTVLIVSIAIGSILALILATCTFVMYARKRLNQKLVQSNETPPVPKLMDQQLKLSYAELSRSTDGFSTANLIGVGSFGSVYRGTLSDEEQEVAVKVLNLLQHGAERSFLAECKVLKSIRHRNLVKVITACSTIDHSGRDFKALVYEFMPNRDLDRWLHPSTGEGGERSSRTLTMAERVSIALDVAEALDYLHNHGQVPIIHCDLKPSNVLLDHDMVARVGDFGLSRFVQGANSNSFQPIANTTGIKGTIGYIPPEYGMGGGVSVEGDVYSYGTLLLEMFTAKRPTDPLFQGGQSIRSYVAAAYPERVTAVADLSLLQHEERNLDEESLEESLVSVFRVALRCTEESPRARMLTRDAIRELAGVRDAYG

SEQ ID NO: 171807 - protein, 373 aa, Zea Mays
MLHKSRTVLIVSIAIGSILALILATCTFVMYARKRLNQKLVQSNETPPVPKLMDQQLKLSYAELSRSTDGFSTANLIGVGSFGSVYRGTLSDEEQEVAVKVLNLLQHGAERSFLAECKVLKSIRHRNLVKVITACSTIDHSGRDFKALVYEFMPNRDLDRWLHPSTGEGGERSSRTLTMAERVSIALDVAEALDYLHNHGQVPIIHCDLKPSNVLLDHDMVARVGDFGLSRFVQGANSNSFQPIANTTGIKGTIGYIPPEYGMGGGVSVEGDVYSYGTLLLEMFTAKRPTDPLFQGGQSIRSYVAAAYPERVTAVADLSLLQHEERNLDEESLEESLVSVFRVALRCTEESPRARMLTRDAIRELAGVRDAYG

SEQ ID NO: 171808 - protein, 69 aa, Zea Mays
MQFVERLGNIALLTSSSPELSRDEVDDEIGILKPSEPRGHAETGREYKTGKTTGSTTREATIVESATKR

SEQ ID NO: 171809 - protein, 524 aa, Zea Mays
MCRQTIIYMTELHPQSTNVVIRVRVIRKWEFRGATNDGPLQHINLVLADEQGTSIHAEIAAALAVDKGSLIEIEKVYELKRFRVTPSRNYFKPVDNNFMIQFTLYTQAKVVKDPPQMFPRYIYKLTSFENIEDNIDNRTYLIDVLGMLTQIDPPHLIGYNNSTIIRDIYIKNASDMSLKITLWGNQASNFSISDVYNQSSNQPIVILLVGFLAKRFKGQPYLSGTTASSWYFNPGIPEAQTYYNRLQNNDLQLIQPTAAKEEIQVSQPPNLEHKTVEELLDIDPDMFPPEGYRCTVTISRIVQNSKWWYPSCSRCHKSSSQTSTGYHCTSCGCTDINFRYKLSFIATDGTCEAEFFCFDSIARKIVGKPCDNLVTAVTTSQGPPAALAAIVCLKFTLAVAINMSAYSVTNRVFSILSILTNHGRQSFIPSNMPSHPQQELHTQDEIPSLPTTQDSPATSMAKLSTCSNEKNEARRVLIYSDMPHDTEHISEVNNQELSSPPKRIKHSHTNKGAPDLTDPKKKSS

SEQ ID NO: 171810 - protein, 89 aa, Zea Mays
MLRAQHMLTTLVDEVRPLEKPEETPKNTSAGCSTPSYPAKNVDAERSACSAPAPPTSTAELLPGATSRQTSAPSGWLHRAEVLPHAPTP

SEQ ID NO: 171811 - protein, 341 aa, Zea Mays
MPAPPDPPPLPPLDPSDPAAATPPAAAAADEEEDDRVFLVPLRWWKEAQQGLAINVPGLPYAAAPAGPTSYGMRVLSMFLSDQTYTLRRADELLQQTASFAARSYALLPADLFSKAREWYIVPAKSAVKNVSPAGEGSVNIYPIMLRVSASRDTYTLTVKIGKKDNSTENFKRACKILTADSEPVHIWDFSGRTTYIVMTELNRSPHDSKSADQEMPLQIHIYDLSEPMVNGSDGKRDELALTLGGSSSSNGGSMNMDLDSSSGSSKQVGSGLTGLDNLGNTCFMNSAVQCLAHTSKLVDYFLGDFHKEVNPHNPLGMKDPCCTSPIQGQTWTVCSPIQWL

SEQ ID NO: 171812 - protein, 812 aa, Zea Mays
MPAPPDPPPLPPLDPSDPAAATPPAAAAADEEEDDRVFLVPLRYIVPAKSAVKNVSPAGEGSVNIYPIMLRVSASRDTYTLTVKIGKKDNSTENFKRACKILTADSEPVHIWDFSGRTTYIVMTELNRSPHDSKSADQEMPLQIHIYDLSEPMVNGSDGKRDELALTLGGSSSSNGGSMNMDLDSSSGSSKQVGSGLTGLDNLGNTCFMNSAVQCLAHTSKLVDYFLGDFHKEVNPHNPLGMKGELAYAFGDLLRKLWAIDRTPVAPRQFKARLGRFAPQFSGFNQHDSQELLAFLLDGLHEDLNRVKCKPYSEAKDSDGRPDEEVADEYWGNHLARNDSIIVDICQGQYKSTLVCPICKKVSVTFDPFMYLSLPLPSTTMRTMTITVFSTDGTSGPSPYTISVPKSGDTRTLINALSSACSLRDDERLLVAEVYNNSLIRYLDEPSEVISLIRDGDRLVAYRLPKDNEDAPIVVFRNQRMESSLSSFGRKSWKTFGTPLVSSLPDTVTGSNIYNLFLKVMTPFRVSRGDAAVADQTLGESSLVDETEDINMSSDASEHTSINNNSVEDETGTEDVMQFFLTNERIPDQRMKIEMDLSITVNDPHKRLHVAVCWEDSGLDQYNFSSLNSLPEVYKAVLFSRRPQDTCSLYACLEAFIKEEPLGPEDMWYCPGCKEHRQASKKLDLWRLPEILIIHLKRFSYSRYTKNKLETFVDFPIHDLDLSKYIGHRCQDVPHNYRLYATSNHYGSLGGGHYTAYVYHEGKKGWYDFDDRHVGPITEDSIKTSAAYVLFYRRIQEDSLDTVTDIDSDIPT

SEQ ID NO: 171813 - protein, 719 aa, Zea Mays
MVNSRSYFSCIACLQVHIWDFSGRTTYIVMTELNRSPHDSKSADQEMPLQIHIYDLSEPMVNGSDGKRDELALTLGGSSSSNGGSMNMDLDSSSGSSKQVGSGLTGLDNLGNTCFMNSAVQCLAHTSKLVDYFLGDFHKEVNPHNPLGMKGELAYAFGDLLRKLWAIDRTPVAPRQFKARLGRFAPQFSGFNQHDSQELLAFLLDGLHEDLNRVKCKPYSEAKDSDGRPDEEVADEYWGNHLARNDSIIVDICQGQYKSTLVCPICKKVSVTFDPFMYLSLPLPSTTMRTMTITVFSTDGTSGPSPYTISVPKSGDTRTLINALSSACSLRDDERLLVAEVYNNSLIRYLDEPSEVISLIRDGDRLVAYRLPKDNEDAPIVVFRNQRMESSLSSFGRKSWKTFGTPLVSSLPDTVTGSNIYNLFLKVMTPFRVSRGDAAVADQTLGESSLVDETEDINMSSDASEHTSINNNSVEDETGTEDVMQFFLTNERIPDQRMKIEMDLSITVNDPHKRLHVAVCWEDSGLDQYNFSSLNSLPEVYKAVLFSRRPQDTCSLYACLEAFIKEEPLGPEDMWYCPGCKEHRQASKKLDLWRLPEILIIHLKRFSYSRYTKNKLETFVDFPIHDLDLSKYIGHRCQDVPHNYRLYATSNHYGSLGGGHYTAYVYHEGKKGWYDFDDRHVGPITEDSIKTSAAYVLFYRRIQEDSLDTVTDIDSDIPT

SEQ ID NO: 171814 - protein, 673 aa, Zea Mays
MPLQIHIYDLSEPMVNGSDGKRDELALTLGGSSSSNGGSMNMDLDSSSGSSKQVGSGLTGLDNLGNTCFMNSAVQCLAHTSKLVDYFLGDFHKEVNPHNPLGMKGELAYAFGDLLRKLWAIDRTPVAPRQFKARLGRFAPQFSGFNQHDSQELLAFLLDGLHEDLNRVKCKPYSEAKDSDGRPDEEVADEYWGNHLARNDSIIVDICQGQYKSTLVCPICKKVSVTFDPFMYLSLPLPSTTMRTMTITVFSTDGTSGPSPYTISVPKSGDTRTLINALSSACSLRDDERLLVAEVYNNSLIRYLDEPSEVISLIRDGDRLVAYRLPKDNEDAPIVVFRNQRMESSLSSFGRKSWKTFGTPLVSSLPDTVTGSNIYNLFLKVMTPFRVSRGDAAVADQTLGESSLVDETEDINMSSDASEHTSINNNSVEDETGTEDVMQFFLTNERIPDQRMKIEMDLSITVNDPHKRLHVAVCWEDSGLDQYNFSSLNSLPEVYKAVLFSRRPQDTCSLYACLEAFIKEEPLGPEDMWYCPGCKEHRQASKKLDLWRLPEILIIHLKRFSYSRYTKNKLETFVDFPIHDLDLSKYIGHRCQDVPHNYRLYATSNHYGSLGGGHYTAYVYHEGKKGWYDFDDRHVGPITEDSIKTSAAYVLFYRRIQEDSLDTVTDIDSDIPT

SEQ ID NO: 171815 - protein, 487 aa, Zea Mays
MPLQIHIYDLSEPMVNGSDGKRDELALTLGGSSSSNGGSMNMDLDSSSGSSKQVGSGLTGLDNLGNTCFMNSAVQCLAHTSKLVDYFLGDFHKEVNPHNPLGMKGELAYAFGDLLRKLWAIDRTPVAPRQFKARLGRFAPQFSGFNQHDSQELLAFLLDGLHEDLNRVKCKPYSEAKDSDGRPDEEVADEYWGNHLARNDSIIVDICQGQYKSTLVCPICKKVSVTFDPFMYLSLPLPSTTMRTMTITVFSTDGTSGPSPYTISVPKSGDTRTLINALSSACSLRDDERLLVAEVYNNSLIRYLDEPSEVISLIRDGDRLVAYRLPKDNEDAPIVVFRNQRMEYCPGCKEHRQASKKLDLWRLPEILIIHLKRFSYSRYTKNKLETFVDFPIHDLDLSKYIGHRCQDVPHNYRLYATSNHYGSLGGGHYTAYVYHEGKKGWYDFDDRHVGPITEDSIKTSAAYVLFYRRIQEDSLDTVTDIDSDIPT

SEQ ID NO: 171816 - protein, 654 aa, Zea Mays
MPLQIHIYDLSEPMVNGSDGKRDELALTLGGSSSSNGGSMNMDLDSSSGSSKQVGSGLTGLDNLGNTCFMNSAVQCLAHTSKLVDYFLGDFHKEVNPHNPLGMKGELAYAFGDLLRKLWAIDRTPVAPRQFKARLGRFAPQFSGFNQHDSQELLAFLLDGLHEDLNRVKCKPYSEAKDSDGRPDEEVAEGQYKSTLVCPICKKVSVTFDPFMYLSLPLPSTTMRTMTITVFSTDGTSGPSPYTISVPKSGDTRTLINALSSACSLRDDERLLVAEVYNNSLIRYLDEPSEVISLIRDGDRLVAYRLPKDNEDAPIVVFRNQRMESSLSSFGRKSWKTFGTPLVSSLPDTVTGSNIYNLFLKVMTPFRVSRGDAAVADQTLGESSLVDETEDINMSSDASEHTSINNNSVEDETGTEDVMQFFLTNERIPDQRMKIEMDLSITVNDPHKRLHVAVCWEDSGLDQYNFSSLNSLPEVYKAVLFSRRPQDTCSLYACLEAFIKEEPLGPEDMWYCPGCKEHRQASKKLDLWRLPEILIIHLKRFSYSRYTKNKLETFVDFPIHDLDLSKYIGHRCQDVPHNYRLYATSNHYGSLGGGHYTAYVYHEGKKGWYDFDDRHVGPITEDSIKTSAAYVLFYRRIQEDSLDTVTDIDSDIPT

SEQ ID NO: 171817 - protein, 176 aa, Zea Mays
MSSAQIAPADHVCYVHCSFCNTVLAVSVPGNSMLNIVTVRCGHCANLLSVNLRALMHSLPEQDHQLQENIKVHGINGTLHDDHQYCGHLDQLGSSSSSRFRRLPVMCSPQNEQHLLQEQTLNNNARQKRQRVPSAYNRFIKEEIRRIKANNPDINHREAFSTAAKNCEAPYIYMQW

SEQ ID NO: 171818 - protein, 306 aa, Zea Mays
MAFPLSLSLPSILLLPHTHTRPPQQIKALLLASIALLCLACPHTPSLSSLSLKPKRKEESGIAQSLLPSSFLSLLLLFARRGGGGDRSEGMSSAQIAPADHVCYVHCSFCNTVLAVSVPGNSMLNIVTVRCGHCANLLSVNLRALMHSLPEQDHQLQENIKVHGINGTLHDDHQYCGHLDQLGSSSSSRFRRLPVMCSPQNEQHLLQEQTLNNNARPPEKRQRVPSAYNRFIKEEIRRIKANNPDINHREAFSTAAKNWAHYPNIHFGLDDSGREGKKKLVDHEAAASVVAVAAAPTAAKKIQGFY

SEQ ID NO: 171819 - protein, 251 aa, Zea Mays
MDQSIRTACEFLSSVLNHAESSSRELADAVSQRPVHLEMARTSFLQKLEHRVEASAADLQHIESIALDTVSFEELLGHCGEALKVYARHADALQSHLASFGYEPPDAQHPEIDVDVEDGDVGKVGDPGDRCLSVSRSVLRSGKRRFDSHSDAIFEESLKDLGFSDACLATLSSEGAHYGESPKKLYKNAESTDDGEKIMNEAEIMTPLNERNGQGNSFEGVIRASKEDYEQLPPYMKSLASWEGAKEEPVC

SEQ ID NO: 171820 - protein, 279 aa, Zea Mays
MYSNYGNPSGMQMPPQNSQPVQFDNPLYGASSGLIRSGIGVYGEKFLGSSSEFMQSNINRYFSNPQYYFHVNDQYVRNKLKVILFPFFHRGHWTRISEPVGGRLSYKPPIYDINAPDLYIPFMAFGSFIILSGFTLGFMGNYKSAVYKGAHRLGLPAHGPERSALLDGWWRGATARLGSVRRLFIRRAIARRRREARVGVLVLCDDAVDEPVHGGVPGEDDEEGALHGDEKQREALVAAALLPSLHGNRTVPPVLLARQHRCMIHINVAKMILKCLDVL

SEQ ID NO: 171821 - protein, 578 aa, Zea Mays
MAGVPVLAPLIPMPELLSIVFSSPWYNATVKSGLQLTSNFPFLALAHLWCSPSLVLDEIVMWSSLLCAAPSATPSTPVRELTGKEARSVRRLPSVRWKVRTGNLAVLADLRVGLPSQPSHTTGFGTALNIETLVAAAEQRETPIEDKILFMINNISISNMEAKAKEFNEVIQEQHYPWFAQYMVMKRASIEPNFHDLYLKFFDKVNSKSLNKEILKATYENCKFRGALLAKNLGSWLGKFTIGRNQALRAKEIDPKSLIVEAYEKGLMIAVIPFTSKILEPCQSSIAYRPPNPWTMGILSLLAEIYNLPNLKMNLKFDIEVLFKNLTVDIKDVKPTSLLKDRLREVEGNPDFSNKDVTASQTPVVAEVPSGTIPSLTHMEQQPEINITSRAMSLPNILNQYAAPVRLPTNSTVEDDKVALMMPEQVPSLTQVSPAQTQSTSPSPFSVNQLMAAIPREEIRFKINPKLGSLGPQANREIILPVIQRSVTIASRTTKELILKDYALESDNNTITRSAHLMVGTLAGSLAHVTCKEPLRVALYSNLRNLIQNLMSGSETIEQLIHTLINDNLDLGCAIIEI

SEQ ID NO: 171822 - protein, 311 aa, Zea Mays
MIAVIPFTSKILEPCQSSIAYRPPNPWTMGILSLLAEIYNLPNLKMNLKFDIEVLFKNLTVDIKDVKPTSLLKDRLREVEGNPDFSNKDVTASQTPVVAEVPSGTIPSLTHMEQQPEINITSRAMSLPNILNQYAAPVRLPTNSTVEDDKVALMMPEQVPSLTQVSPAQTQSTSPSPFSVNQLMAAIPREEIRFKINPKLGSLGPQANREIILPVIQRSVTIASRTTKELILKDYALESDNNTITRSAHLMVGTLAGSLAHVTCKEPLRVALYSNLRNLIQNLMSGSETIEQLIHTLINDNLDLGCAIIEI

SEQ ID NO: 171823 - protein, 196 aa, Zea Mays
MRFLKVDRKTVDLVGNEKLKASASVKHLALPCNKAATAQVIPDIIRCYSHGGRTIIFTETKDSASELSGNTGVAVMLYEPRYKHSVSRLERESGVKFEHISAPQPTDVAQSAGSEAADAIASVSDSVIPIFRQQAEQLLSSSSLSAADLLAKALAKAVGYTDIKKRSLLSSLEDYSTLHLQTGRPMWSPGFAITFR

SEQ ID NO: 171824 - protein, 148 aa, Zea Mays
MRVDWTNMWMVISYQENTIYLQGIRSSLLVGMVVELLLLSETSLSTSNSSIAAVAVDSRVQAVLDSYPSIFIDPVGLLPTRPCDHSISLIPGAQLFHIRPYRYPPTLKDEIETQVKEMLSQGVIRKSSSPFASPILLSKRKTTHGDSV

SEQ ID NO: 171825 - protein, 235 aa, Zea Mays
MEDAGKGTSSAVPESPIDGSNTEDMAVGHGLGKPDDRTISDRVKETATRLSRDSPAQKEGHDREFKREFNWPKSNPGAGGNRNNPGQRGPRDVQPGMEKRVQDQGPVETNRYAARRQPIRGDSSQGIPPQGDRRNENGGRYENQRPLEQQHNRPLPRFNQGGLSQQDPRNERRSSFPLNNNQRQPAGGGDPNRASKSFGIFSSTQKSGSSEQRKLDGNPGNTDSPKRFGIFSSGK

SEQ ID NO: 171826 - protein, 52 aa, Zea Mays
MQYRLTAGSSFSATRCFTLPPETTTAPSLTRALSTGRSECSLPSSSEFLRQG

SEQ ID NO: 171827 - protein, 69 aa, Zea Mays
MSELLKNTNFKSQYSTFEEDMIGSITFATLFTTLSGCLFVVIILLIWQHEKCMLSTVNIELLYDFSTQL

SEQ ID NO: 171828 - protein, 396 aa, Zea Mays
MGAATAVDGSGSGSTARPPAALPGLKLLRRLLLVAVVGTGFLAVVVLLSSSWRYSSSMLPRVPAPDVRLPAPAGGGKVPLERWARGSASAWHNLTDEELLWAASWRPGVRRYPYRRTPKVAFMFLTRGPLPLAPLWDRFFTGAGDARLFSVYVHATPGYRPGFPPASAFYRRLVPSQVARWGEASMCDAERRLLANALLDPANERFVLLSESCVPLYGFPAVYSYLTRSRESFVGAFDDPGPHGRGRYRAGLGPEVTAGQFRKGAQWFELDRDLAVGVVADGRYYPKFRDHCRPPCYVDEHYLPTVLSIEAPARIANRSVTWVDWSPRAARTPATFGGRRTCTRRSSDGLTAPGKDQGNCTYNGQPAEVCFLFARKFAPSTLRPLLSLAPKLLGYG

SEQ ID NO: 171829 - protein, 788 aa, Zea Mays
MAIVGGRLVGPRPRFWWTEAHRLARIKRSAIRLEEDQAARKLFSRRCEDFFRRTVGRHALPKVRTQKLAAVINPWEGSLLKQSSSPVVTLGHVMASAKKAAARRICSPTLRKEVSHFDLIPLCRSNSNISPVHLERKQYVPLIPPCVLDDFTEGSRSRVVYQPSYSVGQTPAQELSPQKETGSQCFLASATLCWASRNPGLHLLRQKVFSTPKPGNPVLSPFYHQPPFPVLKTYADVLKSAINSSDMAKEETDPEGWRVMDRRRQQTEPACKQVADVTSGVADKGKKRRDELCCEICEDNHVPEECPVFNGPKPQAALCGFAGGESGFFQIHTWGCKGCYSKVGWCNCIHNREGRVELQRMIAMKYVHTLGGEGILVIQEVNQKIEPISYLQKAWVNVYGVPFEIRSFLPLWAVGSILGATQKVDMRYTRKMGVVRILVAVTDVNHIPESAEIIVGEGLYEIFFKVDKVLKDGRWIDKDNMDYRDGDDKEQGENEDYSEKHGNDSFPMEEVAEDTVMRDNSLQSDHNKPNDGALVMGMVVLQGNQNNYGSTIGTGVESEDSTFNEPTTLMPTSSSCSAQYALLVPKSAEALVLEPKIGLTDLSPGDLDQTPENVGEDANLSSLYDLVPSCSILAGMTDGAGGLNLADDSLQTQAASKPLSGGGAGLALIDASNNSQVDNELIDELIMSTDTQERAIHLGDVNSFAEVPRSVLQEAIMSNSLAKRVKTEKLSQGDSRISVKRTNTDEDILTKAQRLGAKRNLETSHFQRYSLVKVLETSTEEGNTSTNS

SEQ ID NO: 171830 - protein, 667 aa, Zea Mays
MQGRRCCSTPRSSFAPPPAGTAEAAATPPLMPRSASSSTPWPSPTLPALPSSSQSSALPYSADLFGAGPKIRTVPSLCNSTSSANSAESKETTTTTTQDYCKLVWDTCKDVSIASSPFQPPLQGTAPPPTSPSKLTDAWQSQSDFCGSFGGRSSVCLSGDTVSFNAAGPSPSPRPEPRGVCLERIDNGSYLSLAPHPDGSSRIFLGSQAGKIWLATVPEQGSGGALQFEGAGPFVDLTDQVHFDSALGLMGMAFHPGFATNGRFFASYNCDRTKSPSCTGRCSCNSDVGCDPSKLGTDSGAQPCQYQVVVSEYSARGSAAANVSQATSAADPSEVRRIFAMGLPYTSGHGGQVLFGPADGYLYLMLGDGGKGDPFNFAQNKKSLLGKIVRLDVDSTPSSSGGDLGNTSLWGNYSIPKDNPYADDSELEPEIWALGLRNPWRCSFDSERPSYFYCGDVGQDAYEEVDLISKGGNYGWRALEGPLVYHPQWAPGGNTSLSSIDAIPPIMGYSHSDVNKNIGSASIMGGYVYRGSADPCLYGRYLYADLYASAMWTGAEAPESSGNYTSALIPFSCSKESPIPCDAAAGSPLPSLGYVYSFGEDNSKDMYVLASKGVYRVVRPSLCSYTCPAERQETSPPAAPSSNKASMAEMGMGMLLVSVIVVWVLVT

SEQ ID NO: 171831 - protein, 252 aa, Zea Mays
MALAKASLVDDLQNKNQELMKQIEICQEENKILDRMHRQKVAEVEKLTQTVRELEESVLAGGAAANAVRDYQRKVQEMNEEMKTLDRELARAKVSANRVAVVVANEWKDGDDKVMPVKRWLEERRILQGEMQQLRDKLAIAERAARSEAQLKEKFQLRLKVLEEGLRMSTSRTNVSGTRRQSIGGADGLSKANGFLSKRPSFQMRSPVSTTTTLVNHAKGASKSFDGGCRSLERYKGHVNGNVGGLGVRCSI

SEQ ID NO: 171832 - protein, 246 aa, Zea Mays
MADSGGISADNAAAANDDDDTNTAPFPDTVQVGGSPEYKVERKLGKGGFGHVFLGRRLTAAHAARSAASAAQEVAIKFEHTSSKGCTYGPPAEWQIYTALGGTHGVPKVHYKGRQGDYYVMIMDMLGPSLWDSWNSLGQSMPSEMVACIAMESISILESMHSKGYVHGDVKPENFLLGQPSTPHEKKLYLVDLGLATKWRDTANGQHVSYDQRPDAFRGTVRYASVHAHLGRTASRRDDLESLAYR

SEQ ID NO: 171833 - protein, 183 aa, Zea Mays
MAAPVLLTIPTMDEEGAPPPAPASPSRTPPQQEPKPAVLRWRPPVRVTSEFDSERRLFSHRLSCRVLDGLAKLRLRISHGAGGGGILWGPTDVGLLARNFSVVVDPATRGAVLRGAADLAGSLRLRASHNTKNCQTGEQSYYIHVGCSALCLSMSCNYEYDKSIVSCIQLDRCFQFKYHSVKV

SEQ ID NO: 171834 - protein, 224 aa, Zea Mays
MAAPVLLTIPTMDEEGAPPPAPASPSRTPPQQEPKPAVLRWRPPVRVTSEFDSERRLFSHRLSCRVLDGLAKLRLRISHGAGGGGILWGPTDVGLLARNFSVVVDPATRGAVLRGAADLAGSLRLRASHNTKEQQGEVAITANLRDSPCKIELSSLVPPNGPPRATFFFPNGEVSIKEKILDERDRILSVNGLVKSRVLHGVCTAVYNDNVMSIKYRYKLLVQF

SEQ ID NO: 171835 - protein, 222 aa, Zea Mays
MAAPVLLTIPTMDEEGAPPPAPASPSRTPPQQEPKPAVLRWRPPVRVTSEFDSERRLFSHRLSCRVLDGLAKLRLRISHGAGGGGILWGPTDVGLLARNFSVVVDPATRGAVLRGAADLAGSLRLRASHNTKEQQGEVAITANLRDSPCKIELSSLVPPNGPPRATFFFPNGEVSIKEKILDERDRILSVNGLVKSRVLHGVCTAVYNDNVMSIKYRYKCIS

SEQ ID NO: 171836 - protein, 210 aa, Zea Mays
MLMCLFSQEQQGEVAITANLRDSPCKIELSSLVPPNGPPRATFFFPNGEVSIKEKILDERDRILSVNGLVKSRVLHGVCTAVYNDNVMSIKYRYKDDEVSFIPSISLPSNSLSFAFKRQLTPLDKLSYWYNFDTNYWGAIYKHKAHKHLKWKAGYESDNRLGWASLWVGDAGGSTKEAPLKAKIHLTLKVPQDNIQNSVVVFHVKKRWDF

SEQ ID NO: 171837 - protein, 116 aa, Zea Mays
MLPLLLECFQFKYHSVKEQQGEVAITANLRDSPCKIELSSLVPPNGPPRATFFFPNGEVSIKEKILDERDRILSVNGLVKSRVLHGVCTAVYNDNVMSIKYRYKVSLVSALFCFIN

SEQ ID NO: 171838 - protein, 231 aa, Zea Mays
MSCNYEYDKSIVSCIQLDRCFQFKYHSVKEQQGEVAITANLRDSPCKIELSSLVPPNGPPRATFFFPNGEVSIKEKILDERDRILSVNGLVKSRVLHGVCTAVYNDNVMSIKYRYKDDEVSFIPSISLPSNSLSFAFKRQLTPLDKLSYWYNFDTNYWGAIYKHKAHKHLKWKAGYESDNRLGWASLWVGDAGGSTKEAPLKAKIHLTLKVPQDNIQNSVVVFHVKKRWDF

SEQ ID NO: 171839 - protein, 91 aa, Zea Mays
MKLTPAPIASSSGRRNCRHRDLRLSLRAIRLQASRASHCPFPGRRGVVGGRRWCGRGLRCGQLLVGLRRATPPRGQTRPRNNPRRASHNGI

SEQ ID NO: 171840 - protein, 89 aa, Zea Mays
MKLTPAPIASSSGRRNCRHRDLRLSLRAIRLQASRASHCPFPGRRGVVGGRRWCGRGLRCGQLLVGLRRATPPRGQTRPRNNPRRASHN

SEQ ID NO: 171841 - protein, 1182 aa, Zea Mays
MDPSKVLFWNVRGLNNKARRDSVRVVIDNTKPDIVCLQETKKASISRHMILSLLGSDFVEYVVLPAAGTRGGIILAWRISVCKMLQTRIDNFSVSVQFQQQDGVAWWFTGVYGPQLDEHKIQFLNELRLIRSQCLGSWMIGGDFNLIYRAEDKSNDNLDRAMMGRFRRLLNDLLLKELPLSGRKFTWSNERASPTLARLDRIFCTADWEDMFPNCLLQSSASQISDHCPLLLGLHDLVQGKRRFHFESFWIRLEGFLEEVENSWSQPLEVCCPLQRFHAKLKRLARHLQAWSQKKVGNIKQQILLANEILHRLEIARDERNLSPSEEWLRRSLKHHSLALASLERTVARVRSGLHWLKEGDANTAYFHHHARHRKKKNFIGKLMVDNRVISEQQEKKEVIWDFYNKLLGTAAPRESTLNLEEFHRPALDLSALDQNFSMEEVWAAIKTLPADKAPGPDGYTGKFYKISWPIIKEDVMEALNRVLQGDVSKLHLLNSAYVTLLPKKAEALEVKDFRPISLIHSFAKIVTKTLANRLASRLPEIVSANQSAFIKGRCIHDNFILVQQTAKAVQKQRVPRILLKLDIGKAFDSISWPFLLEVLTHLGFGSVWCNIISKMLLSSSTRVLVNGEPGEIIHHHRGLRQGDPLSPMLFIIVMDVLNSLVLRAQELSLLQPVLRRGNGQRISLYAEDVVMFLQPSREELSVVKEILRIFGDASGLVTNVSKCSMTPIHCEEQDMVAAQEFFPCTEVAFPFKYLGLPLSVKKLPKNIFLELIDKIADKLTGWKSALIHTAGRLTLVKSVLTAIPIHHLIVLQCPKWVIKAIDKIRRGFLWKGRKDIRGGHCSVGWARVCRPLSMGGLGIHNLEVLGWALNLRWLWLKKTQPERPWADFLFKVHSNVEALFSASVHTTVGDGSRTLFWTDRWIHGQSISALAPTLVSHITVRIKKSRSVQEALVNNRWVNDISGSLSAQIIIDFLVIWDLVQGFQLHPGIPDVHRWSPSASGDYSTKSAYDLFLAGSVSFEPATRIWKSWAPPRCKFFIWLASLNRCWTADRLSRRGLAHPVRCPLCDQQEETVQHILVACVFARDTWWQTLHKVGLHRLTPGLATTTFQDWWREAECQVPKNQKRGFNSLVILVAWWLWKHRNECVFDGASPNISIIMQHIHEDAVRWGLAGARDLRRLWP

SEQ ID NO: 171842 - protein, 133 aa, Zea Mays
MTSNLSKNWKRRLVFTQKNKQSRRQKKLKAYDLSALSEFLPEPAAPEQKTEAKLNCKSRQTLVVQESAHLKAVLDNPQFQLDPFAAIHQHLLATQPPAAAKKDDAAGKQGKVSKDKKSRRKKGTSSISQAMDI

SEQ ID NO: 171843 - protein, 734 aa, Zea Mays
MLQEFVDNVIAVTKESVKTFTYESLNNIARFINGMSALLLTLLPGKGNILEGINGWELKPALRGPRLPRWMESGVSSFNEFIHELSVDSDADSIADSVAGDDDHEEFVCPPSPLSQSSRLSHASSFGRHDRRLRRHIRYAVSWILWPLRFFVSLIFILFNAIKFRMVRSTAKGAETPHLSRTGLAKKSFHIRDQFLQRTTDRRRGVFEDLHLAIEIFIESVFDIVHKAAHYILSPSEVWQNLFCWIQGSGHDTSSVVDVLTANVGSDNPVPTERKTVYRHSLNTDSRTCEDVITELGYPFEAIKVVTSDGYVVLLERIPRRDSQKVVLLQHGILDSSMGWVSNGVVGSPAFAAYDQGYDVFLGNLRGLVSREHIDKSISSYKYWKYSVNEHGTKDMPAIIEEIHKIKISELGKSQPQSAEGTGDQNDKLKSLEVQASQEDSIEDQPYKLCAVCHSLGGAVMLMYVVTSRITQKPHRLSRLVLLSPAGFHEDSNVVFSMVEKLILFVGPVLAPLIPGLYIPTRFFRMLLNKLARDFHNYPALGGLVQTLMGYVVGGDSSNWVGVLGLPHYNMDDMPGVSFHVALHLAQIKRAKKFQMYDYGSSAANIEAYGTPEPLDLGAHYGLIDIPVDLVAGQRDRVISPSMVKKHYKLMRKSGVEVSYNEFEYAHLDFTFSHREELLSYVMSRLLLVTDPGKGRIKQTTVRLRRQKKVQSEIEESIECRAKEESDELAGHLE

SEQ ID NO: 171844 - protein, 422 aa, Zea Mays
MSCITERQKYVTFCYHLLIKLSLYLHGIIIAFWLHQTETCNVAFVYFIDSYTYKSHDGKGFPPIIYSQIYIVHPGEKMGMWLALFPTIYLSAGTATALILVGGETMKLFFQIVCGPLCSPNPITTVEWYLVFTSLAVILSQLPNLNSIAGLSLIGGATAIMYCTMSWVLSVSQPRPPTVSYDPVTSNSFGLSLFSILNALGIIAFAFRGHNLALEIQATMPSTFKHPAHVPMWRGAKVAYLLIAMCLFPVAVGGYWAYGNMVPPGGMLAALYAFHSHDISQGVLATTCLLVVLNCLSSFQIYSMPVFDSFEAYYTGRTNRPCSAWVRSGFRVFYGFLSLFISVALPFLSSLAGLLGGLTLPVTFAYPCFMWICVKKPERFSFSWYLNWGLGLLGTAFSLAFSLGGVWSIVNNGMKLKFFKPN

SEQ ID NO: 171845 - protein, 291 aa, Zea Mays
MAHPSPSPSGSRRHRRLSEVLAEQQEPFSLDLYLLEKSCSPAFIDDAGCGDGACSTCWPTTKSTGRQAVRNRKGSRRSGVLRMLLSKILSSTTAPAVTKTRQRRTATEWRRVAEKRRTPDRFELTLRSASPRAIEEHMEEDEKQEEDDGDDESSKKQLSPVSVLEQPLFEHSSPPPHEPKALAIFGELLESAYTPNTLLDDVLVIAKDQSSDSSTSPRPRVRRKKKKHAHRKEDVTFEKDFARLTTSLVASKMAGETVCIEDLRPTLEDVGAAIAAAVLEALTEETAAELI

SEQ ID NO: 171846 - protein, 100 aa, Zea Mays
MPPQLRALDSGRLMLATVLSAEGGREWRNWGGTIVNCAQTPSEGPWAVPGSFPKPPRWCSSIVSGVCDGRRATISRRTLTLPHNDAPPWIAPVASSSVTS

SEQ ID NO: 171847 - protein, 82 aa, Zea Mays
MPRTAVLRSAQAGPGASPGRPTPAQRSSMPPPRAIVRATPHAPVQCPGHLDGSAQSCVWFNNFNFNQGTHLSQDVWLPNEYK

SEQ ID NO: 171848 - protein, 87 aa, Zea Mays
MPPPRAIVRATPHAPVQCPGHLDGSAQSWYLSGSTTSTSTKGRIYHKTYGCQMNISDMEIVLSIMKNEGYIEIVPHPESAYNIYQHL

SEQ ID NO: 171849 - protein, 89 aa, Zea Mays
MPPPRAIVRATPHAPVQCPGHLDGSAQSWYLSGSTTSTSTKGRIYHKTYGCQMNISDMEIVLSIMKNEAIRVCHLYMTFGCKWIMIIVE

SEQ ID NO: 171850 - protein, 61 aa, Zea Mays
MFTKCSTKSSNKSSIVILVYAKNSRRLGEERNKSVHGRRILDVDGEEVRVDAALTMCSVKC

SEQ ID NO: 171851 - protein, 1121 aa, Zea Mays
MTMMTPPPLEQQEDDEMLVPHQELPVAGPEAAPQPMEVVAQTEPATTAESQPPEDPQTTRFTWTIESFSRLNTKKHYSDVFVVGGYKWRVLIFPKGNNVDHFSMYLDVADSGNLPYGWSRYAQFSLAVVNQIHPKYTIRKDTQHQFNARESDWGFTSFMPLSDLYDPSRGYLVNDTIIVEAEVAVRRMVDYWTYDSKKETGFVGLKNQGATCYMNSLLQTLYHTPYFRKAVYHMPTTENDMPSGSIPLALQSLFYKLQYSDNSVATKELTKSFGWDTYDSFMQHDVQELNRVLCEKLEDKMKGTVVEGTIEQLFEGHHINYIECINVDYKSNRKESFYDLQLDVKGCRDVYASFDKYVEVESLEGDNKYHAERYGLQDARKGVLFLDFPPVLQLQLKRFEYDYMRDTMVKINDRYEFPLQLDLDRDNGKYLSPDADRSIRNLYTLHSVLVHSGGVHGGHYYAFIRPTLSDQWYKFDDERVTKEDTKKALEEQYGGEEELPQINPGFNNTPFKFTKYSNAYMLVYIRENDKDKIMCNVDEKDIAEHLRIRLKKEQEEKEHKKKEKSEAHLYTIIKIARDKDLKEQIGKNIYFDLVDHEKVCSFRIQKQLPFTAFQEEVAKEFGIPVQFQRFWLWAKRQNHTYRPNRPLTPHEEAQSVGQLREVSNKAHNAELKLFLEVELGPELCPIRPPEKSKEDILLFFKLYNAEKEELCFVGRLFVKALGKPSEILTKLNEMAGFSPNEEIELYEEIKFEPNVMCEHIDKKLTFRSSQLEDGDIICFQKAPVPDGDPQVRYPDVPSFLEYVHNRQVVHFRSLDKPKDDDFSLELSKLHTYDDVVERVAHKLGLDDPSKIRLTSHNCYSQQPKPQPIRYRGVEHLLDMLVHYNQTSDILYYEVLDIPLPELQCLKTLKVAFHHATKDEVVVHSIRLPRNSTISDVITDLKTKVELSNPDTELRLLEVFYHKIYKIFPPHEKIENINDQYWTLRAEEIPEEEKNLGPHDRLIHVYHFMKDPNQNQQIQNFGDPFLMVIREVETAAEVLERIQRKLRVPDEDFSKWKLAFISMNRPEYLQDTDVVSARFQRRDVYGAWEQYLGLEHTDTTSKRSYTANQNRHTYEKPVKIYN

SEQ ID NO: 171852 - protein, 872 aa, Zea Mays
MTMMTPPPLEQQQEDDEMLVPHQELPVAGPEAAPQPMEVVAQTEPATTAESQPPEDPQTTRFTWTIESFSRLNTKKHYSDVFVVGGYKWRVLIFPKGNNVDHFSMYLDVADSGNLPYGWSRYAQFSLAVVNQIHPKYTIRKDTQHQFNARESDWGFTSFMPLSDLYDPSRGYLVNDTIIVEAEVAVRRMVDYWTYDSKKETGFVGLKNQGATCYMNSLLQTLYHTPYFRKAVYHMPTTENDMPSGSIPLALQSLFYKLQYSDNSVATKELTKSFGWDTYDSFMQHDVQELNRVLCEKLEDKMKGTVVEGTIEQLFEGHHINYIECINVDYKSNRKESFYDLQLDVKGCRDVYASFDKYVEVESLEGDNKYHAERYGLQDARKGVLFLDFPPVLQLQLKRFEYDYMRDTMVKINDRYEFPLQLDLDRDNGKYLSPDADRSIRNLYTLHSVLVHSGGVHGGHYYAFIRPTLSDQWYKFDDERVTKEDTKKALEEQYGGEEELPQINPGFNNTPFKFTKYSNAYMLVYIRENDKDKIMCNVDEKDIAEHLRIRLKKEQEEKEHKKKEKSEAHLYTIIKIARDKDLKEQIGKNIYFDLVDHEKVCSFRIQKQLPFTAFQEEVAKEFGIPVQFQRFWLWAKRQNHTYRPNRPLTPHEEAQSVGQLREVSNKAHNAELKLFLEVELGPELCPIRPPEKSKEDILLFFKLYNAEKEELCFVGRLFVKALGKPSEILTKLNEMAGFSPNEEIELYEEIKFEPNVMCEHIDKKLTFRSSQLEDGDIICFQKAPVPDGDPQVRYPDVPSFLEYVHNRLCTFGLWTNQRMMIFLWNCQSFILMMMLLRELHINLGWMIHQRFGLHLTIVILSNLNHNLLDIGE

SEQ ID NO: 171853 - protein, 243 aa, Zea Mays
MLVHYNQTSDILYYEVLDIPLPELQCLKTLKVAFHHATKDEVVVHSIRLPRNSTISDVITDLKTKVELSNPDTELRLLEVFYHKIYKIFPPHEKIENINDQYWTLRAEEIPEEEKNLGPHDRLIHVYHFMKDPNQNQQIQNFGDPFLMVIREVETAAEVLERIQRKLRVPDEDFSKWKLAFISMNRPEYLQDTDVVSARFQRRDVYGAWEQYLGLEHTDTTSKRSYTANQNRHTYEKPVKIYN

SEQ ID NO: 171854 - protein, 135 aa, Zea Mays
MDHDKHPAPECPHQGWSKSHPLQERLFLVGQWAQALEERSYRFRPPLQPLRMGNQGLTLVTEGNRLFLSHLPCAAMWGRILSPSDVGDGRATGLTGDTSLGCADVRHSYHGSPSVISHRGGLRLSWWSFIRRLTR

SEQ ID NO: 171855 - protein, 67 aa, Zea Mays
MIFIQHPPSVFCLARSRGRGFTSCHRYRATFPNEAASTSRCKKPTTRNPDAEKRKHQQMATSRLRQT

SEQ ID NO: 171856 - protein, 165 aa, Zea Mays
MLTLNAHEESCLFAPSMCPIPGCGYRGFTGWWSGHFLTNHNSDGLRFSYGQCFDVSLEMSVPFLVLLAEDDHLFIFINKNVIPFGHALSVCCLRTGNLNWNFLYEMRATSKGNTKNSLQLKASVTNTREWRGLNPTEVFLLVPYAFSKSSKLTLNVSIERVADVK

SEQ ID NO: 171857 - protein, 169 aa, Zea Mays
MLTFYACRNAHEESCLFAPSMCPIPGCGYRGFTGWWSGHFLTNHNSDGLRFSYGQCFDVSLEMSVPFLVLLAEDDHLFIFINKNVIPFGHALSVCCLRTGNLNWNFLYEMRATSKGNTKNSLQLKASVTNTREWRGLNPTEVFLLVPYAFSKSSKLTLNVSIERVADVK

SEQ ID NO: 171858 - protein, 403 aa, Zea Mays
MLSEPWWSHAPGFVPKSHSIPSPDTHPLHRSHHRMDDAANPTPPPSTSAASAAAAAAQHQQLQRQLFLMQQAQSHPQQLSQQAMSRFPSNIDAHLRPLGPLRFQQPQPQPQPSHSQGPSQSPSQATQQASPQQQQQQAAAAAAAAQAQAQAQAQAARVRSPEMEMALQDAMRVCNPDVKTPFQSIEDAVNRLLPYHVVADYEAEEDDRILDSDTTGQIPSRLQQWDHNILVKIAEFTTTFDKQVLAYNIMTKKRAIGEFRSEERLMLEQALLQEEKQAMLGLRAEMESREKAGREAAEVKMRLAMEHARAEAQAHSEMMNHGPIRASAVASQGEDGPSHDMVQEHGEDGWGNSQRDDEDPSEDFLNDENEPENGNSDGQEDWRRSGEFDLNSSLHAAEWFWTL

SEQ ID NO: 171859 - protein, 144 aa, Zea Mays
MTKKRAIGEFRSEERLMLEQALLQEEKQAMLGLRAEMESREKAGREAAEVKMRLAMEHARAEAQAHSEMMNHGPIRASAVASQGEDGPSHDMVQEHGEDGWGNSQRDDEDPSEDFLNDENEPENGNSDGQEDWRRSGEFDLNSR

SEQ ID NO: 171860 - protein, 90 aa, Zea Mays
MDQLNILLGSPVLMLLFGIHFCSALRGTSRSGWNSPHNPPTSPTLLPATVCVPLYKQKDFMFFHLKGIPLHVYLKLKECKYIFRVFSRRY

SEQ ID NO: 171861 - protein, 528 aa, Zea Mays
MESQRYNYGSGAGTGGKIRRYPPSRAVAASPYARPATAPTHAPGTATAAVSHEGGWLSRIIAAGTSRFLPSLFSFSTSQPQQAAPAPSPTRDQLPVVEPPSPLPPPLVDDRPECEENGGVAANNLCTENPQSCTKEEEENMLRNSDDHGGTALEELLKQRTFTRSEFEYLANLLWSKTIGANSLKLEDGNVRKMIVYDKENASEYSNLPLNFSTTTFSADDQVATPAEIAKAYMGLKSSKGSPLRLRLHDPSSMPITSMEVSMSQKAKPPTIPLAQGSRLHTSKTSDCLESNYTTPNGVICKMSSSPYFKSGVSSKELFGSVSSHYQTSNSVHTFGRQVLKRKSTVSNEFVSAGPIRRIHQRYNRTSPLLETQLGYRRYPVGYGSKLEGSEQLARTQKRRCLDKVGDASLGSVEDKTNVNYPGQVPEKSAEMATKILKQLDTLVPSQKENTSETKQKHESAIYFEEDVSRQKKVQAERDLLEPSPSEVPDGIASNKSISQITLNKEKPPAFSSRGPSNTYIDISYTNS

SEQ ID NO: 171862 - protein, 572 aa, Zea Mays
MVSEASKKKAAQKKAAAAAKRGGKASVASSSSSSAAAAADKVANGVVALKLSDRTCTGVLASHPLSRDIHIESLSLTFHGHDLIVDSDLELNYGRRYGLLGLNGCGKSTLLTAIGCRELPIPEHMDIYHLSHEIEASDMSALDDGGGEALERVYERLDAMDAGTAEKRAAEILFGLGFDKQMQAKKTKDFSGGWRMRIALARALFMNPTILLLDEPTNHLDLEACVWLEETLKKFDRILVVISHSQDFLNGVCTNIIHMQNKKLKLYTGNYDQYVQTRSDLEENQMKQYKWEQEQIASMKEYIARFGHGSAKLARQAQSKEKTLAKMERGGLTEKVVRDRVLVFRFTDVGKLPPPVLQFVEVKFGYTPDNLIYKSLDFGVDLDSRIALVGPNGAGKSTLLKLMTGDLAPLDGMVRRHNHLRIAQYHQHLADKLDLDMPALAYMMKEYPGTEEEKMRAAVGRFGLSGKAQVMPMRNLSDGQRSRVIFAWLAYRQPQLLLLDEPTNHLDIETIDSLAEALNEWDGGLVLVSHDFRLINQVAQEIWVCENQAVTRWEGDIMDFKAHLKSKAGLSD

SEQ ID NO: 171863 - protein, 511 aa, Zea Mays
MSGFLAVVGKVGTFLLWVLFLVLQTATRIVGSLLASSAEQQDDHHQESAAARRRSPPASPHPELYEPASASLAQLWDPPPLPHLAFAPAADESSSSSSLRRRASAPLPRADEDFVVPSSAYSRPTVGVAHTHSVSAPPLRAIETRAVPSRLVTAGGKRPRLERKYSKIVDQYRSLDEVIEALAQAGLESSNLIIGIDFTKSNEWTGKNCFNGMSLHNISDNPNPYEQAISIIGKTLSAFDEDNLIPCFGFGDASTHDQDVFAFYPDERPCNGFQEALARYREIVPHLRLSGPTSFAPIIDMATTIVEQSGGQYHVLVIIADGQVTRSVDTEFGQLSTQEQMTVDAIVQASQFPLSIILVGVGDGPWDMMKEFDDNIPARSFDNFQFVNFTAIMSKKISQSKKETEFALSALMEIPLQYKATLELGILGRRIGESPERIPLPPPFASYSTVSRAEPSRANSYRSVPSHPREEPAVNSTITASVTSPSAAESRVLEPQGPHVVNIMSCNKELC

SEQ ID NO: 171864 - protein, 369 aa, Zea Mays
MSGFLVIEALAQAGLESSNLIIGIDFTKSNEWTGKNCFNGMSLHNISDNPNPYEQAISIIGKTLSAFDEDNLIPCFGFGDASTHDQDVFAFYPDERPCNGFQEALARYREIVPHLRLSGPTSFAPIIDMATTIVEQSGGQYHVLVIIADGQVTRSVDTEFGQLSTQEQMTVDAIVQASQFPLSIILVGVGDGPWDMMKEFDDNIPARSFDNFQFVNFTAIMSKKISQSKKETEFALSALMEIPLQYKATLELGILGRRIGESPERIPLPPPFASYSTVSRAEPSRANSYRSVPSHPREEPAVNSTITASVTSPSAAESRVLEPQMCPVCLSKPRDMAFGCGHQTCSECGPQVTDCPICRRPIDTRVKLY

SEQ ID NO: 171865 - protein, 530 aa, Zea Mays
MSGFLAVVGKVGTFLLWVLFLVLQTATRIVGSLLASSAEQQDDHHQESAAARRRSPPASPHPELYEPASASLAQLWDPPPLPHLAFAPAADESSSSSSLRRRASAPLPRADEDFVVPSSAYSRPTVGVAHTHSVSAPPLRAIETRAVPSRLVTAGGKRPRLERKYSKIVDQYRSLDEVIEALAQAGLESSNLIIGIDFTKSNEWTGKNCFNGMSLHNISDNPNPYEQAISIIGKTLSAFDEDNLIPCFGFGDASTHDQDVFAFYPDERPCNGFQEALARYREIVPHLRLSGPTSFAPIIDMATTIVEQSGGQYHVLVIIADGQVTRSVDTEFGQLSTQEQMTVDAIVQASQFPLSIILVGVGDGPWDMMKEFDDNIPARSFDNFQISQSKKETEFALSALMEIPLQYKATLELGILGRRIGESPERIPLPPPFASYSTVSRAEPSRANSYRSVPSHPREEPAVNSTITASVTSPSAAESRVLEPQMCPVCLSKPRDMAFGCGHQTCSECGPQVTDCPICRRPIDTRVKLY

SEQ ID NO: 171866 - protein, 329 aa, Zea Mays
MSLHNISDNPNPYEQAISIIGKTLSAFDEDNLIPCFGFGDASTHDQDVFAFYPDERPCNGFQEALARYREIVPHLRLSGPTSFAPIIDMATTIVEQSGGQYHVLVIIADGQVTRSVDTEFGQLSTQEQMTVDAIVQASQFPLSIILVGVGDGPWDMMKEFDDNIPARSFDNFQFVNFTAIMSKKISQSKKETEFALSALMEIPLQYKATLELGILGRRIGESPERIPLPPPFASYSTVSRAEPSRANSYRSVPSHPREEPAVNSTITASVTSPSAAESRVLEPQMCPVCLSKPRDMAFGCGHQTCSECGPQVTDCPICRRPIDTRVKLY

SEQ ID NO: 171867 - protein, 285 aa, Zea Mays
MSLHNISDNPNPYEQAISIIGKTLSAFDEDNLIPCFGFGDASTHDQDVFAFYPDERPCNGFQEALARYREIVPHLRLSGPTSFAPIIDMATTIVEQSGGQYHVLVIIADGQVTRSVDTEFGQLSTQEQMTVDAIVQASQFPLSIILVGVGDGPWDMMKEFDDNIPARSFDNFQFVNFTAIMSKKISQSKKETEFALSALMEIPLQYKATLELGILGRRIGESPERIPLPPPFASYSTVSRAEPSRANSYRSVPSHPREEPAVNSTITASVTSPSAAESRVLEPQR

SEQ ID NO: 171868 - protein, 364 aa, Zea Mays
MTVFCDQPDWLQVWAEIERHDSLNMLVYCGIRRGSTRRRSIWRGNIGGAPATATGNLGTPRLLGLWSGLPLKANSRCHRKWSESSAAGAVLAVVAIAAYQAHVGGAVRSTHDAASEQHVAEMSVVPHGCRDVVRHRTGACGGRATFGRDAGRAVDGIRGGQRLNMSRRVGRRRSESVVVPQGEVGQQGRRQGREVWEGVSNSRRVKDEETLDAPCGAAPFDGEAYYNSLNFGIVVSASDLAAVILVFTAVRFLQRIHGAPLPERCSSSGISTARMVMVPGGVAPLHSHPGGTELIFVIEGSVVSGFISATLNRVYTKTLSDNPGLQILDFALFANDLPTEVVNKVTNLDELQIVKLKALFGGRG

SEQ ID NO: 171869 - protein, 175 aa, Zea Mays
MSFPSLLIYLSHLSYPVIQTAPQGTAIQKQGPWPQRTWMAGLEELKKKLQPLLFDDLDRVGASTRVPLPEDTCDSYAVSDGGTVNLLSRSLGEYKINEHGFHKRSAGPDELDSDEKAYRCASHEMHIFGPIGNGASSVVERAIFIPVHRILALKKINIFEKIHLEAILLIRSVIL

SEQ ID NO: 171870 - protein, 774 aa, Zea Mays
MRDPVSIDSGVTFERDAILKYFNECLSSRRRLVCPVTKMELSNTELNPSIALRNTIDEWMNRNEVAKLDVARKSLTSDSTESDMVQALQYVDEICQRSRSSRQVVRRDGLIIMIADLLKKSSTKVRQMALETLRSIAKDDNDNKVEIAAGDNIRTIVKFLNHGQTQEKERAVSLLFELSENKALSERIGSVSGAILILVGLSSSKVENSLIVDRAEKTLENLESCEKNVRQMAENGRLQPLLRLLLEGSPDIQLSMAAYLGELVLSNDVKVLVAQKAGSTLVNIMKKGNREAREAALKALNQISSYDASAKILIEAGILPPLITDLFTVGSNQLPMRLKEVSATILANVVASGARFESIPLDHNRQTLVSEDIVHNLLHLISNTGPAIECKLLQVLVGLTDSSTSVQNIVDAIKGSGAIVSLIQFVEAPQREVRMNSIKLLNNISPYMGQELADAFRGNFSQLRSLVKVIVDNNGISEEQAAAAGLVADLPMRDSVLTRRLLQDGAFATIIPKVLRIRQGEIRGGRFVNPFLEGLVRIVSRITFVLDDDPDIIVVACDYNLTSLFTDLLQMNGLDIVQIVSANALEKLSQQSKHLTKILPAPSPGLCFSIFPCLSQKTVATGVCRVHCGICSARESFCLLEGKSVEKLVACLDNNNEKVVEAALSALSTLLEDGVDIDQGVMVLCDAEGINPILDVLCENRNEALRQRAVWAVERILRMDEIAYEISGNQNVGTALVEAFRHGDYRTRQVAERALKHVDKLPNFSGIFSKMGAQ

SEQ ID NO: 171871 - protein, 2577 aa, Zea Mays
MAAAAAAHRASFPLRLQQILAGSRAVSPAIKVESEPPANVKAFIDQVINIPLHDIAIPLSGFRWEFNKGNFHHWKPLFIHFDTYFKTYISSRKDLLLSDDMTEAEPMPKNAILKILIVMQIILENCQNRSSFTGLEATSELLFTMSRPPSSPMETDSKTGKDGKDMNSSWIYGPLISYGAIMDHLVTSSFILSSSTRQLLEQPIFNGSVRFPQDAERFMKLLQSKVLKTVLPIWAHPEFPECNIELISSVMSIMRHVCSGVEVKNTVGNDGARLTGPPPDESAISLIVEMGFSRARAEEALRQVGTNSVEIATDWLFSHPEDELARALAMSLGNSDTPAQEGNGRSNDLELEEVTVQLPPIDEMLHSCFQLLQTKEALAFPVRDMLVTISSQKDGQNRVKVLTYLIENLKQCVVASEPSNDTALSALLHVLALILHGDTAAREVASKAGIVKVALDLLSSWELELRESGMIEVPNWVSSCFLSVDQMLQLEPKLPDVTELDVLKRDNSNIKTSLVIDESKKKDSESLSSVGLLDMEDQYQLLKICCKCIEKQLPSASMHAILQLSATLTKVHAAAICFLESGGLNALLSLPTSSLFSGFNSVASTIIRHILEDPHTLQQAMELEIRHSLVTAANRHTNPRVTPRNFVQNLAFVIYRDPVIFMKAVQSVCQIEMVGDRPYVVLLKDREKERSKEKDKDKSVDKDKATGAVAKVVSGDTAAGSPANAQGKQSDLNSRNVKSHRKPPQSFVTVIEHLLDLVMSFVPPPRPEDQADVVSGTALSSDMDIDCSSAKGKGKAVSVPPEESKHAIQESTASLAKASFFLKLMTDVLLTYTSSIQVVLRHDADLSNMHGPNRTNSGLISGGIFNHILQHFLPHATKQKKERKSDGDWMYKLATRANQFLVASSIRSAEARKKVFSEICNILLDFTDSSAAYKAPVARMNVYVDLLNDILSARSPTGSSLSAESAVTFVEVGLAPSLLKMLQNLDLDHPDSAKIVTAIVKALELVSKEHVHSADNAKGENSSKIASDSNNVNSSPNRFQALDMTSQPTEMITDHRETFNADQTSQSSDSVADEMDHDRDMDGGFARDGEDDFMHEMAGDGTGNESTMEIRFEISRNRDDMADDDDDDDNTDEDMSAEDDEEVNEDDEDEDEENNNLEEDDAHQMSHPDTDQEDREMDEEEFDEDLLEDDDDEDEEGVILRLEEGINGINVFDHIEVFGGSNNLSGDTLRVMPLDIFGTRRQGRSTSIYNLLGRASDHGVLDHPLLEEPSSTLNFSHQEQPDDGPQRNGSAAPAVPEGIEELLISHLSRPTQQPGAQTVGGTQENDQPKHGSAAEAREGSPAQQNENSENTTNPVDLSESAGPAPPDSDALQRVVSNASIEHATEMQYERSDTITRDVEAVSQASSGSGATLGESLRSLEVEIGSVEGHDDGDRHGTSGASERLPLGDIQAAARSRRPSGNAVAVSSRDMSLESVSEVPQNPDQEPDHNASEGNQEPRGVGADTIDPTFLEALPEDLRAEVLSSRQNQVTQTSNDQPQNDGDIDPEFLAALPLDIREEVLAQQRSQRIQQQSQELEGQPVEMDAVSIIATFPSEIREEVLLTSPDTLLATLTPALVAEANMLRERFAHRYHSSSLFGMNSRNRRGESSRRDIMAAGLDRNTGDPSRSTSKPIEIEGAPLVDEDGLKALIRLLRVVQPLYKGQLQRLLVNLCTHRDNRQALVQILVDMLMLDLQGFSKKSVDASEPPFRLYGCHANITYSRPQSSNGVPPLVSRRVLETLTNLARSHPNVAKLLLFLEFPCPSRCRSEAHDHRHGKAVLEDGEERKAFAVVLLLTLLNQPLYMRSVAHLEQLLNLLEVVMHNAENEINQAKLEASSEKPSENAVKDVKDNTSISDSYGSKSNPEDGSKALAVDNKSNLRAVLRSLPQSELRLLCSLLAHDGLSDSAYLLVGEVLKKIVALAPFFCCHFINELARSMQSLTFCAMKELRLYENSEKALLSSTSANGTAILRVVQALSSLVSTLQDRKDPEQPAEKDHSDAVSQISEINTALDALWLELSNCISKIESSSEYASNLTPASASAATLTAGVAPPLPAGTQNILPYIESFFVTCEKLRPGQPDAVQEASTSDMEDASTSSGGQRSYSCQASLDEKQNAFVKFSEKHRRLLNAFIHQNPGLLEKSFSLMLKIPRLIDFDNKRAYFRSKIKHQYDHHHHNPVRISVRRSYILEDSYNQLRMRSPQDLKGRLTVHFQGEEGIDAGGLTREWYQSLSRVIFDKSALLFTTVGNDLTFQPNPNSVYQTEHLSYFKFAGRVVGKALFDGQLLDAHFTRSFYKHILGVRVTYHDIEAIDPAYYKNLKWMLENDISDVLDLTFSMDADEEKLILYEKAEVTDCELIPGGRNIRVTEENKHQYVDRVAEHRLTTAIRPQINAFLEGFNELIPRELISIFNDKELELLISGLPDIDLDDLKANTEYSGYSIASPVIQWFWEIVQGFSKEDKARFLQFVTGTSKVPLEGFSALQGISGPQRFQIHKAYGSTNHLPSAHTCFNQLDLPEYTSKEQLQERLLLAIHEANEGFGFG

SEQ ID NO: 171872 - protein, 3408 aa, Zea Mays
MAAAAAAHRASFPLRLQQILAGSRAVSPAIKSSNLCVIHIPDMHLQKEDDLSILKQCVDKFNVPPEHRFALLTRIRYARAFNSTRTCSIYSRISLLSFIVLVQSSDAHDELTYFFTNEPEYINELIRLVRSEDSVPGPIRALAMLALGAQLAAYASSHERARILSGSSIISAGGNRMVLLSVLQKAIFSLNSPNDASSPLIVDALLQFFLLHVLSSSSSGTTVRGSGMVPPLLPLLRDNDSSHMHLVCLAVKTLQKLMEYSSPAVSLFKDLGGVDLLSRRLHVEVQRVIGTADGHNSMVTDAVKSKEDHLYSQKRLIKALLKALGSSTYSPGIPARSQSSQDNSLPVSLSLIFQNVEKFGGDIYFSAVTVMSEIIHKDPTCFPALKELGLPDAFLSSVTAGVIPSCKALICVPNGLGAICLNNQGLEAVRETSALRFLVYTFTSRKYLIPLNEGVVLLANAAEELLRHVQSLRSIGVDIIIEIINKLSSSLKDRNNETAILEEKTDMETDVEGRDLVGGMDSSVEGSNDEQFSHLSIFHVMVLVHRTMENSETCRLFVEKGGLNALLTLLLRPSITLSSGGMPIALHSTMVFKGFTQHHSTPLARAFCSSLREHLKSALGELDKVSNSFEMTKIEKGAIPSLFVVEFLLFLAASKDNRWMNALLSEFGDASREVLEDIGRVHREVLWKISLFEENKIDAEISLSSSTSEAQQPDLSASDIGDSRYTSFRQYLDPILRRRGSGWNIESQVSDLINMYRDIGSAASDSQRVGSDRYSSLGLPSSSQDQSSSSSDANVSTRSEEEKKNSEHSSCFDMMRSLSYHINHLFMELGKAMLLTSRRENSPVNLSPSVISVANNIASIMLEHLNFEGHSVSSEREMTVTTKCQYLGKVAEFIDGILLDRPESCNPIMVNSFYCCGVIQAILTTFQATSELLFTMSRPPSSPMETDSKTGKDGKDMNSSWIYGPLISYGAIMDHLVTSSFILSSSTRQLLEQPIFNGSVRFPQDAERFMKLLQSKVLKTVLPIWAHPEFPECNIELISSVMSIMRHVCSGVEVKNTVGNDGARLTGPPPDESAISLIVEMGFSRARAEEALRQVGTNSVEIATDWLFSHPEDELARALAMSLGNSDTPAQEGNGRSNDLELEEVTVQLPPIDEMLHSCFQLLQTKEALAFPVRDMLVTISSQKDGQNRVKVLTYLIENLKQCVVASEPSNDTALSALLHVLALILHGDTAAREVASKAGIVKVALDLLSSWELELRESGMIEVPNWVSSCFLSVDQMLQLEPKLPDVTELDVLKRDNSNIKTSLVIDESKKKDSESLSSVGLLDMEDQYQLLKICCKCIEKQLPSASMHAILQLSATLTKVHAAAICFLESGGLNALLSLPTSSLFSGFNSVASTIIRHILEDPHTLQQAMELEIRHSLVTAANRHTNPRVTPRNFVQNLAFVIYRDPVIFMKAVQSVCQIEMVGDRPYVVLLKDREKERSKEKDKDKSVDKDKATGAVAKVVSGDTAAGSPANAQGKQSDLNSRNVKSHRKPPQSFVTVIEHLLDLVMSFVPPPRPEDQADVVSGTALSSDMDIDCSSAKGKGKAVSVPPEESKHAIQESTASLAKASFFLKLMTDVLLTYTSSIQVVLRHDADLSNMHGPNRTNSGLISGGIFNHILQHFLPHATKQKKERKSDGDWMYKLATRANQFLVASSIRSAEARKKVFSEICNILLDFTDSSAAYKAPVARMNVYVDLLNDILSARSPTGSSLSAESAVTFVEVGLAPSLLKMLQNLDLDHPDSAKIVTAIVKALELVSKEHVHSADNAKGENSSKIASDSNNVNSSPNRFQALDMTSQPTEMITDHRETFNADQTSQSSDSVADEMDHDRDMDGGFARDGEDDFMHEMAGDGTGNESTMEIRFEISRNRDDMADDDDDDDNTDEDMSAEDDEEVNEDDEDEDEENNNLEEDDAHQMSHPDTDQEDREMDEEEFDEDLLEDDDDEDEEGVILRLEEGINGINVFDHIEVFGGSNNLSGDTLRVMPLDIFGTRRQGRSTSIYNLLGRASDHGVLDHPLLEEPSSTLNFSHQEQPENLVEMAFSDRNHEGSSSRLDAIFRSLRSGRNGHRFNMWLDDGPQRNGSAAPAVPEGIEELLISHLSRPTQQPGAQTVGGTQENDQPKHGSAAEAREGSPAQQNENSENTTNPVDLSESAGPAPPDSDALQRVVSNASIEHATEMQYERSDTITRDVEAVSQASSGSGATLGESLRSLEVEIGSVEGHDDGDRHGTSGASERLPLGDIQAAARSRRPSGNAVAVSSRDMSLESVSEVPQNPDQEPDHNASEGNQEPRGVGADTIDPTFLEALPEDLRAEVLSSRQNQVTQTSNDQPQNDGDIDPEFLAALPLDIREEVLAQQRSQRIQQQSQELEGQPVEMDAVSIIATFPSEIREEVLLTSPDTLLATLTPALVAEANMLRERFAHRYHSSSLFGMNSRNRRGESSRRDIMAAGLDRNTGDPSRSTSKPIEIEGAPLVDEDGLKALIRLLRVVQPLYKGQLQRLLVNLCTHRDNRQALVQILVDMLMLDLQGFSKKSVDASEPPFRLYGCHANITYSRPQSSNGVPPLVSRRVLETLTNLARSHPNVAKLLLFLEFPCPSRCRSEAHDHRHGKAVLEDGEERKAFAVVLLLTLLNQPLYMRSVAHLEQLLNLLEVVMHNAENEINQAKLEASSEKPSENAVKDVKDNTSISDSYGSKSNPEDGSKALAVDNKSNLRAVLRSLPQSELRLLCSLLAHDGLSDSAYLLVGEVLKKIVALAPFFCCHFINELARSMQSLTFCAMKELRLYENSEKALLSSTSANGTAILRVVQALSSLVSTLQDRKDPEQPAEKDHSDAVSQISEINTALDALWLELSNCISKIESSSEYASNLTPASASAATLTAGVAPPLPAGTQNILPYIESFFVTCEKLRPGQPDAVQEASTSDMEDASTSSGGQRSYSCQASLDEKQNAFVKFSEKHRRLLNAFIHQNPGLLEKSFSLMLKIPRLIDFDNKRAYFRSKIKHQYDHHHHNPVRISVRRSYILEDSYNQLRMRSPQDLKGRLTVHFQGEEGIDAGGLTREWYQSLSRVIFDKSALLFTTVGNDLTFQPNPNSVYQTEHLSYFKFAGRVVGKALFDGQLLDAHFTRSFYKHILGVRVTYHDIEAIDPAYYKNLKWMLENDISDVLDLTFSMDADEEKLILYEKAEVTDCELIPGGRNIRVTEENKHQYVDRVAEHRLTTAIRPQINAFLEGFNELIPRELISIFNDKELELLISGLPDIDLDDLKANTEYSGYSIASPVIQWFWEIVQGFSKEDKARFLQFVTGTSKVPLEGFSALQGISGPQRFQIHKAYGSTNHLPSAHTCFNQLDLPEYTSKEQLQERLLLAIHEANEGFGFG

SEQ ID NO: 171873 - protein, 3578 aa, Zea Mays
MAAAAAAHRASFPLRLQQILAGSRAVSPAIKVESEPPANVKAFIDQVINIPLHDIAIPLSGFRWEFNKGNFHHWKPLFIHFDTYFKTYISSRKDLLLSDDMTEAEPMPKNAILKILIVMQIILENCQNRSSFTGLEHLKLLLASSDPEIVVAALETLVALVKINPSKLHMNGKLISCGSINTHLLSLAQGWGSKEEGLGIYSCVVANEGNQQGGLSLFPVDLESKYQHRLGSTLHFEYNLGSAQYPDQTSDKGKSSNLCVIHIPDMHLQKEDDLSILKQCVDKFNVPPEHRFALLTRIRYARAFNSTRTCSIYSRISLLSFIVLVQSSDAHDELTYFFTNEPEYINELIRLVRSEDSVPGPIRALAMLALGAQLAAYASSHERARILSGSSIISAGGNRMVLLSVLQKAIFSLNSPNDASSPLIVDALLQFFLLHVLSSSSSGTTVRGSGMVPPLLPLLRDNDSSHMHLVCLAVKTLQKLMEYSSPAVSLFKDLGGVDLLSRRLHVEVQRVIGTADGHNSMVTDAVKSKEDHLYSQKRLIKALLKALGSSTYSPGIPARSQSSQDNSLPVSLSLIFQNVEKFGGDIYFSAVTVMSEIIHKDPTCFPALKELGLPDAFLSSVTAGVIPSCKALICVPNGLGAICLNNQGLEAVRETSALRFLVYTFTSRKYLIPLNEGVVLLANAAEELLRHVQSLRSIGVDIIIEIINKLSSSLKDRNNETAILEEKTDMETDVEGRDLVGGMDSSVEGSNDEQFSHLSIFHVMVLVHRTMENSETCRLFVEKGGLNALLTLLLRPSITLSSGGMPIALHSTMVFKGFTQHHSTPLARAFCSSLREHLKSALGELDKVSNSFEMTKIEKGAIPSLFVVEFLLFLAASKDNRWMNALLSEFGDASREVLEDIGRVHREVLWKISLFEENKIDAEISLSSSTSEAQQPDLSASDIGDSRYTSFRQYLDPILRRRGSGWNIESQVSDLINMYRDIGSAASDSQRVGSDRYSSLGLPSSSQDQSSSSSDANVSTRSEEEKKNSEHSSCFDMMRSLSYHINHLFMELGKAMLLTSRRENSPVNLSPSVISVANNIASIMLEHLNFEGHSATSELLFTMSRPPSSPMETDSKTGKDGKDMNSSWIYGPLISYGAIMDHLVTSSFILSSSTRQLLEQPIFNGSVRFPQDAERFMKLLQSKVLKTVLPIWAHPEFPECNIELISSVMSIMRHVCSGVEVKNTVGNDGARLTGPPPDESAISLIVEMGFSRARAEEALRQVGTNSVEIATDWLFSHPEDELARALAMSLGNSDTPAQEGNGRSNDLELEEVTVQLPPIDEMLHSCFQLLQTKEALAFPVRDMLVTISSQKDGQNRVKVLTYLIENLKQCVVASEPSNDTALSALLHVLALILHGDTAAREVASKAGIVKVALDLLSSWELELRESGMIEVPNWVSSCFLSVDQMLQLEPKLPDVTELDVLKRDNSNIKTSLVIDESKKKDSESLSSVGLLDMEDQYQLLKICCKCIEKQLPSASMHAILQLSATLTKVHAAAICFLESGGLNALLSLPTSSLFSGFNSVASTIIRHILEDPHTLQQAMELEIRHSLVTAANRHTNPRVTPRNFVQNLAFVIYRDPVIFMKAVQSVCQIEMVGDRPYVVLLKDREKERSKEKDKDKSVDKDKATGAVAKVVSGDTAAGSPANAQGKQSDLNSRNVKSHRKPPQSFVTVIEHLLDLVMSFVPPPRPEDQADVVSGTALSSDMDIDCSSAKGKGKAVSVPPEESKHAIQESTASLAKASFFLKLMTDVLLTYTSSIQVVLRHDADLSNMHGPNRTNSGLISGGIFNHILQHFLPHATKQKKERKSDGDWMYKLATRANQFLVASSIRSAEARKKVFSEICNILLDFTDSSAAYKAPVARMNVYVDLLNDILSARSPTGSSLSAESAVTFVEVGLAPSLLKMLQNLDLDHPDSAKIVTAIVKALELVSKEHVHSADNAKGENSSKIASDSNNVNSSPNRFQALDMTSQPTEMITDHRETFNADQTSQSSDSVADEMDHDRDMDGGFARDGEDDFMHEMAGDGTGNESTMEIRFEISRNRDDMADDDDDDDNTDEDMSAEDDEEVNEDDEDEDEENNNLEEDDAHQMSHPDTDQEDREMDEEEFDEDLLEDDDDEDEEGVILRLEEGINGINVFDHIEVFGGSNNLSGDTLRVMPLDIFGTRRQGRSTSIYNLLGRASDHGVLDHPLLEEPSSTLNFSHQEQPENLVEMAFSDRNHEGSSSRLDAIFRSLRSGRNGHRFNMWLDDGPQRNGSAAPAVPEGIEELLISHLSRPTQQPGAQTVGGTQENDQPKHGSAAEAREGSPAQQNENSENTTNPVDLSESAGPAPPDSDALQRVVSNASIEHATEMQYERSDTITRDVEAVSQASSGSGATLGESLRSLEVEIGSVEGHDDGDRHGTSGASERLPLGDIQAAARSRRPSGNAVAVSSRDMSLESVSEVPQNPDQEPDHNASEGNQEPRGVGADTIDPTFLEALPEDLRAEVLSSRQNQVTQTSNDQPQNDGDIDPEFLAALPLDIREEVLAQQRSQRIQQQSQELEGQPVEMDAVSIIATFPSEIREEVLLTSPDTLLATLTPALVAEANMLRERFAHRYHSSSLFGMNSRNRRGESSRRDIMAAGLDRNTGDPSRSTSKPIEIEGAPLVDEDGLKALIRLLRVVQPLYKGQLQRLLVNLCTHRDNRQALVQILVDMLMLDLQGFSKKSVDASEPPFRLYGCHANITYSRPQSSNGVPPLVSRRVLETLTNLARSHPNVAKLLLFLEFPCPSRCRSEAHDHRHGKAVLEDGEERKAFAVVLLLTLLNQPLYMRSVAHLEQLLNLLEVVMHNAENEINQAKLEASSEKPSENAVKDVKDNTSISDSYGSKSNPEDGSKALAVDNKSNLRAVLRSLPQSELRLLCSLLAHDGLSDSAYLLVGEVLKKIVALAPFFCCHFINELARSMQSLTFCAMKELRLYENSEKALLSSTSANGTAILRVVQALSSLVSTLQDRKDPEQPAEKDHSDAVSQISEINTALDALWLELSNCISKIESSSEYASNLTPASASAATLTAGVAPPLPAGTQNILPYIESFFVTCEKLRPGQPDAVQEASTSDMEDASTSSGGQRSYSCQASLDEKQNAFVKFSEKHRRLLNAFIHQNPGLLEKSFSLMLKIPRLIDFDNKRAYFRSKIKHQYDHHHHNPVRISVRRSYILEDSYNQLRMRSPQDLKGRLTVHFQGEEGIDAGGLTREWYQSLSRVIFDKSALLFTTVGNDLTFQPNPNSVYQTEHLSYFKFAGRVVGKALFDGQLLDAHFTRSFYKHILGVRVTYHDIEAIDPAYYKNLKWMLENDISDVLDLTFSMDADEEKLILYEKAEVFAVTDCELIPGGRNIRVTEENKHQYVDRVAEHRLTTAIRPQINAFLEGFNELIPRELISIFNDKELELLISGLPDIDLDDLKANTEYSGYSIASPVIQWFWEIVQGFSKEDKARFLQFVTGTSKVPLEGFSALQGISGPQRFQIHKAYGSTNHLPSAHTCFNQLDLPEYTSKEQLQERLLLAIHEANEGFGFG

SEQ ID NO: 171874 - protein, 641 aa, Zea Mays
MDAFVAGSRGRPALSFLCPKISLFSPPSHSWFRWLVGAPRVLPPFTVAAVLRPIHGDHDAIDLPREADEIRGLLPRGFDIIGVLLVGGEGSDADVTRALEQARALRELLFGVAASHGLVGGHMDAATGEIRFVVSESGWTNSVEGSVVTWEDEPGRLLWEKGCLLRCELLLKLPLYLRPDVNSGIEGQFSSLIESTVAKLRDPHVYYLVEGPITSSQSHRSIILRGDDLSFDSHTHGNSRTDSCTTSIVTCSEFFTEKRYDLSLTRETADAIAITVNQSAPSLKPGGTPVVEYFPAPASLIVITLKLDILCYSSIDFPVAAAVSELVIPGLADQMIVMKRIIASEITQQAQLQPFHFIPSGWHVPVTAIYNTRYGETEERQSELRKELHLRLGLPLDRPLLRISNALTFGGMGRRKKSMPRSGSSLLRDIHRELPSSGVSGGVMSLIDGSYEYYHYLHDGIDDNGWGCAYRSLQTIVSWYRLQQYSSIDVPSHREIQQVLVEIGDKDPSFIGSCEWIGAIELSFVLDKLLGVSCKVINVRSGDELPEKCRELARHFETQGTPVMIGGGVLAYTLLGVDYNGASGDCAFLILDPHYTGTDDLKKIVNGGWCGWKKSVDSKGRSFFLKDKFYNLLLPQRPNMV

SEQ ID NO: 171875 - protein, 523 aa, Zea Mays
MDAFVAGSRGRPALSFLCPKISLFSPPSHSWFRWLVGAPRVLPPFTVAAVLRPIHGDHDAIDLPREADEIRGLLPRGFDIIGVLLVGGEGSDADVTRALEQARALRELLFGVAASHGLVGGHMDAATGEIRFVVSESGWTNSVEGSVVTWEDEPGRLLWEKGCLLRCELLLKLPLYLRPDVNSGIEGQFSSLIESTVAKLRDPHVYYLVEGPITSSQSHRSIILRGDDLSFDSHTHGNSRTDSCTTSIVTCSEFFTEKRYDLSLTRETADAIAITVNQSAPSLKPGGTPVVEYFPASAPASLIVITLKLDILCYSSIDFPVAAAVSELVIPGLADQMIVMKRIIASEITQQAQLQPFHFIPSGWHVPVTAIYNTRYGETEERQSELRKELHLRLGLPLDRPLLRISNALTFGGMGRRKKSMPRSGIHHAYVATYASLLCFPPKLHVGSCGNFVQKMFQSIIYIRTAKYHIILCEKLITSSNMKIRTYLCICNSSGSRICFHPLWYVITFRFFAASRHPQRTSI

SEQ ID NO: 171876 - protein, 523 aa, Zea Mays
MDAFVAGSRGRPALSFLCPKISLFSPPSHSWFRWLVGAPRVLPPFTVAAVLRPIHGDHDAIDLPREADEIRGLLPRGFDIIGVLLVGGEGSDADVTRALEQARALRELLFGVAASHGLVGGHMDAATGEIRFVVSESGWTNSVEGSVVTWEDEPGRLLWEKGCLLRCELLLKLPLYLRPDVNSGIEGQFSSLIESTVAKLRDPHVYYLVEGPITSSQSHRSIILRGDDLSFDSHTHGNSRTDSCTTSIVTCSEFFTEKRYDLSLTRETADAIAITVNQSAPSLKPGGTPVVEYFPASAPASLIVITLKLDILCYSSIDFPVAAAVSELVIPGLADQMIVMKRIIASEITQQAQLQPFHFIPSGWHVPVTAIYNTRYGETEERQSELRKELHLRLGLPLDRPLLRISNALTFGGMGRRKKSMPRSGSSLLRDIHRELPSSGVSGGVMSLIDGSYEYYHYLHDGIDDNGWGCAYRSLQTIVSWYRLQQYSSIDVPSHREIQQVLVEIGDKDPSFIGSCEWIGAIE

SEQ ID NO: 171877 - protein, 530 aa, Zea Mays
MDAFVAGSRGRPALSFLCPKISLFSPPSHSWFRWLVGAPRVLPPFTVAAVLRPIHGDHDAIDLPREADEIRGLLPRGFDIIGVLLVGGEGSDADVTRALEQARALRELLFGVAASHGLVGGHMDAATGEIRFVVSESGWTNSVEGSVVTWEDEPGRLLWEKGCLLRCELLLKLPLYLRPDVNSGIEGQFSSLIESTVAKLRDPHVYYLVEGPITSSQSHRSIILRGDDLSFDSHTHGNSRTDSCTTSIVTCSEFFTEKRYDLSLTRETADAIAITVNQSAPSLKPGGTPVVEYFPASAPASLIVITLKLDILCYSSIDFPVAAAVSELVIPGLADQMIVMKRIIASEITQQAQGWGCAYRSLQTIVSWYRLQQYSSIDVPSHREIQQVLVEIGDKDPSFIGSCEWIGAIELSFVLDKLLGVSCKVINVRSGDELPEKCRELARHFETQGTPVMIGGGVLAYTLLGVDYNGASGDCAFLILDPHYTGTDDLKKIVNGGWCGWKKSVDSKGRSFFLKDKFYNLLLPQRPNMV

SEQ ID NO: 171878 - protein, 607 aa, Zea Mays
MDAFVAGSRGRPALSFLCPKISLFSPPSHSWFRWLVGAPRVLPPFTVAAVLRPIHGDHDAIDLPREADEIRGLLPRGFDIIGVLLVGGEGSDADVTRALEQARALRELLFGVAASHGLVGGHMDAATGEIRFVVSESGWTNSVEGSVVTWEDEPGRLLWEKGCLLRCELLLKLPLYLRPDVNSGIEGQFSSLIESTVAKLRDPHVYYLVEGPITSSQSHRSIILRGDDLSFDSHTHGNSRTDSCTTSIVTCSEFFTEKRYDLSLTRETADAIAITVNQSAPSLKPGGTPVVEYFPGLADQMIVMKRIIASEITQQAQLQPFHFIPSGWHVPVTAIYNTRYGETEERQSELRKELHLRLGLPLDRPLLRISNALTFGGMGRRKKSMPRSGSSLLRDIHRELPSSGVSGGVMSLIDGSYEYYHYLHDGIDDNGWGCAYRSLQTIVSWYRLQQYSSIDVPSHREIQQVLVEIGDKDPSFIGSCEWIGAIELSFVLDKLLGVSCKVINVRSGDELPEKCRELARHFETQGTPVMIGGGVLAYTLLGVDYNGASGDCAFLILDPHYTGTDDLKKIVNGGWCGWKKSVDSKGRSFFLKDKFYNLLLPQRPNMV

SEQ ID NO: 171879 - protein, 611 aa, Zea Mays
MDAFVAGSRGRPALSFLCPKISLFSPPSHSWFRWLVGAPRVLPPFTVAAVLRPIHGDHDAIDLPREADEIRGLLPRGFDIIGVLLVGGEGSDADVTRALEQARALRELLFGVAASHGLVGGHMDAATGEIRFVVSESGWTNSVEGSVVTWEDEPGRLLWEKGCLLRCELLLKLPLYLRPDVNSVEGPITSSQSHRSIILRGDDLSFDSHTHGNSRTDSCTTSIVTCSEFFTEKRYDLSLTRETADAIAITVNQSAPSLKPGGTPVVEYFPASAPASLIVITLKLDILCYSSIDFPVAAAVSELVIPGLADQMIVMKRIIASEITQQAQLQPFHFIPSGWHVPVTAIYNTRYGELRKELHLRLGLPLDRPLLRISNALTFGGMGRRKKSMPRSGSSLLRDIHRELPSSGVSGGVMSLIDGSYEYYHYLHDGIDDNGWGCAYRSLQTIVSWYRLQQYSSIDVPSHREIQQVLVEIGDKDPSFIGSCEWIGAIELSFVLDKLLGVSCKVINVRSGDELPEKCRELARHFETQGTPVMIGGGVLAYTLLGVDYNGASGDCAFLILDPHYTGTDDLKKIVNGGWCGWKKSVDSKGRSFFLKDKFYNLLLPQRPNMV

SEQ ID NO: 171880 - protein, 453 aa, Zea Mays
MDAFVAGSRGRPALSFLCPKISLFSPPSHSWFRWLVGAPRVLPPFTVAAVLRPIHGDHDAIDLPREADEIRGLLPRGFDIIGVLLVGGEGSDADVTRALEQARALRELLFGVAASHGLVGGHMDAATGEIRFVVSESGWTNSVEGSVVTWEDEPGRLLWEKGCLLRCELLLKLPLYLRPDVNSGIEGQFSSLIESTVAKLRDPHVYYLVEGPITSSQSHRSIILRGDDLSFDSHTHGNSRTDSCTTSIVTCSEFFTEKRYDLSLTRETADAIAITVNQSAPSLKPGGTPVVEYFPASAPASLIVITLKLDILCYSSIDFPVAAAVSELVIPGLADQMIVMKRIIASEITQQAQLQPFHFIPSGWHVPVTAIYNTRYGETEERQSELRKELHLRLGLPLDRPLLRISNALTFGGMGRRKKSMPRSGSRICFHPLWYVITFRFFAASRHPQRTSI

SEQ ID NO: 171881 - protein, 634 aa, Zea Mays
MDAFVAGSRGRPALSFLCPKISLFSPPSHSWFRWLVGAPRVLPPFTVAAVLRPIHGDHDAIDLPREADEIRGLLPRGFDIIGVLLVGGEGSDADVTRALEQARALRELLFGVAASHGLVGGHMDAATGEIRFVVSESGWTNSVEGSVVTWEDEPGRLLWEKGCLLRCELLLKLPLYLRPDVNSGIEGQFSSLIESTVAKLRDPHVYYLVEGPITSSQSHRSIILRGDDLSFDSHTHGNSRTDSCTTSIVTCSEFFTEKRYDLSLTRETADAIAITVNQSAPSLKPGGTPVVEYFPAPASLIVITLKLDILCYSSIDFPVAAAVSELVIPGLADQMIVMKRIIASEITQQAQLQPFHFIPSGWHVPVTAIYNTRYGELRKELHLRLGLPLDRPLLRISNALTFGGMGRRKKSMPRSGSSLLRDIHRELPSSGVSGGVMSLIDGSYEYYHYLHDGIDDNGWGCAYRSLQTIVSWYRLQQYSSIDVPSHREIQQVLVEIGDKDPSFIGSCEWIGAIELSFVLDKLLGVSCKVINVRSGDELPEKCRELARHFETQGTPVMIGGGVLAYTLLGVDYNGASGDCAFLILDPHYTGTDDLKKIVNGGWCGWKKSVDSKGRSFFLKDKFYNLLLPQRPNMV

SEQ ID NO: 171882 - protein, 521 aa, Zea Mays
MDAFVAGSRGRPALSFLCPKISLFSPPSHSWFRWLVGAPRVLPPFTVAAVLRPIHGDHDAIDLPREADEIRGLLPRGFDIIGVLLVGGEGSDADVTRALEQARALRELLFGVAASHGLVGGHMDAATGEIRFVVSESGWTNSVEGSVVTWEDEPGRLLWEKGCLLRCELLLKLPLYLRPDVNSGIEGQFSSLIESTVAKLRDPHVYYLVEGPITSSQSHRSIILRGDDLSFDSHTHGNSRTDSCTTSIVTCSEFFTEKRYDLSLTRETADAIAITVNQSAPSLKPGGTPVVEYFPAPASLIVITLKLDILCYSSIDFPVAAAVSELVIPGLADQMIVMKRIIASEITQQAQLQPFHFIPSGWHVPVTAIYNTRYGETEERQSELRKELHLRLGLPLDRPLLRISNALTFGGMGRRKKSMPRSGIHHAYVATYASLLCFPPKLHVGSCGNFVQKMFQSIIYIRTAKYHIILCEKLITSSNMKIRTYLCICNSSGSRICFHPLWYVITFRFFAASRHPQRTSI

SEQ ID NO: 171883 - protein, 58 aa, Zea Mays
MRQCSTTRPLQSSTSFGKATMVSEESDIGIPCLKSHRSMMNPRTSLYRQLPYVVPLFG

SEQ ID NO: 171884 - protein, 185 aa, Zea Mays
MASFTCSQVGAAAAGGASPFLGYRRRSGPGGAIPSSSLFVGRRLAAVQMRAPSRGVRGGSALRVTCEKVVGIDLGTTNSAVAAMEGGKPTVVTNAEGARTTPSVVAYTKTGERLVGQIAKRQAVVNPENTFFSVKRFIGRKMSEVDDEAKQVSYGVVKDDNGNVKLDCPAIGKQFAAEEISAQFY

SEQ ID NO: 171885 - protein, 185 aa, Zea Mays
MASFTCSQVGAAAAGGASPFLGYRRRSGPGGAIPSSSLFVGRRLAAVQMRAPSRGVRGGSALRVTCEKVVGIDLGTTNSAVAAMEGGKPTVVTNAEGARTTPSVVAYTKTGERLVGQIAKRQAVVNPENTFFSVKRFIGRKMSEVDDEAKQVSYGVVKDDNGNVKLDCPAIGKQFAAEEISAQVF

SEQ ID NO: 171886 - protein, 203 aa, Zea Mays
MSSKESSNWKVVSPIFPIEQIVKILLPSMFDLILPKRCSLSSLMHLTWLKSLSSSHGPYPSYMSSPSFVLNRWQGSFYVLPFATLIACFAVFFTILYVSMMSILLPWYNHLQHSFFSLIALWTSLFYHQVSLVSPPLPLFSPHTCEAIFRMQVAIFSHMFASSSPFQVPSLMTLSLKTSVVSPFNFHQSPLCSRNLGFVYPYM

SEQ ID NO: 171887 - protein, 109 aa, Zea Mays
MNNKNALGSIPRLQKSLGYPSTRVPPRFRAALRSRQPWRLAALRLLPALVATPPLGYPGDVPDLLLLRLFVFPRSEIGFESPSPVGSGVIDIGFDNTGSIFSDCATWRG

SEQ ID NO: 171888 - protein, 286 aa, Zea Mays
MAAVPEDLRCKRSDGKQWRCSAPSMPDKTVCEKHYVQAKKRSASSALRASLRRSSASSLAPVFPFSSSPSSAARLRAADEDPPMAVARPLYGRVAGEAVYVAEPVPAPARREVAYEGLPRGNAAGGRTAAGLVGRGPLWFPGGGSEGIRSCHQCRKAGGVIWCTSCDRRGYCARCISRWYSDIPMDEVRNVCPACRGICNCKVCLQGDNLIKARVQEISAVDKLRYLHCLLVYVLPVLKGIYSDQCFEIGVETRSSGPKTDVLRAKITSDEQMCCDFCKVPVFDYH

SEQ ID NO: 171889 - protein, 266 aa, Zea Mays
MAAVPEDLRCKRSDGKQWRCSAPSMPDKTVCEKHYVQAKKRSASSALRASLRRSSASSLAPVFPFSSSPSSAARLRAADEDPPMAVARPLYGRVAGEAVYVAEPVPAPARREVAYEGLPRGNAAGGRTAAGLVGRGPLWFPGGGSEGIRSCHQCRKAGGVIWCTSCDRRGYCARCISRWYSDIPMDEVRNVCPACRGICNCKVCLQGDNLIKARVQEISAVDKLRYLHCLLVYVLPVLKGIYSDQCFEIGVETRSSDRCPQSKDNF

SEQ ID NO: 171890 - protein, 880 aa, Zea Mays
MITGIITKDIESTVLALELKQHKLQLQEQRVMFTDVLEELMALAEATLWKVNQHLENIAICTLHEENNEARVDLENLKQNCEEIMKKLHAMNEENTTLKCLMSSFQTNLDAKNKALMELECSHATICTELELTIDAMNRRSTRENYFISENETLKQEIRNILCKDQCMVELMDNIEADKLFSTIEGRLQLVTDHVHNYITEQINTMSKLSNDLDIIEVSAQELSTQNSLLKSELIRKEELTKGLSFDLSLLQESASVAKDQAAEITGLRKVIKSLELELASKSLELDDVVSDRQQLEAMILKCNQNVAALEEELGKKIDELNIVSMENAELKSQIQHIEEISCTMEELADKSEVIRRLEEKLIESRTLIDERSVCLQSLQNDFSKLSDEKTSCDTELLILKEKLEMAQALAEESEAIATESRQIAEEHKAYAEGKDEEVKVLERSIEELENTVCVLESKVEIVKEEAERQRMQREELEVELQKVRQQMLAVPPSGKARRYMEDGMIDLADSSRHPVDMHNELLSAQETIRILRKEVSEKESEIAQCNAHISELNIHAEAAAQEYKHKIFMLNAKLATTESMTHDVIRDMLGVKMNMTTWAALADNQQKLETKEPITSQAQEIKDSNELMNLKRQLDEFIEERQSWLDEINQKQSELGAARITIEKLRQREHFMVAEIELLKAENSNYKTIILNLEAEVKNLTRQQNLQLRINHHVKTKEENILLKRQNEELSAKLKQLGGILTRTKEELARYRVSNGRDPHELIEEEELLRKKLDESERDRSQLAENLSSLCSSILKVAGVSDSESDATLLKASECLDQLQCRIASLEGQVEDLNLKCKLVREKARLCELRSNSSSLRTGAKGNLTSPSPDTSPSISSFR

SEQ ID NO: 171891 - protein, 951 aa, Zea Mays
MITGIITKDIESTVLALELKQHKLQLQEQRVMFTDVLEELMALAEATLWKVNQHLENIAICTLHEENNEARVDLENLKQNCEEIMKKLHAMNEENTTLKCLMSSFQTNLDAKNKALMELECSHATICTELELTIDAMNRRSTRENYFISENETLKQEIRNILCKDQCMVELMDNIEADKLFSTIEGRLQLVTDHVHNYITEQINTMSKLSNDLDIIEVSAQELSTQNSLLKSELIRKEELTKGLSFDLSLLQESASVAKDQAAEITGLRKVIKSLELELASKSLELDDVVSDRQQLEAMILKCNQNVAALEEELGKKIDELNIVSMENAELKSQIQHIEEISCTMEELADKSEVIRRLEEKLIESRTLIDERSVCLQSLQNDFSKLSDEKTSCDTELLILKEKLEMAQALAEESEAIATESRQIAEEHKAYAEGKDEEVKVLERSIEELENTVEIVKEEAERQRMQREELEVELQKVRQQMLAVPPSGKARRYMEDGMIDLADSSRHPVDMHNELLSAQETIRILRKEVSEKESEIAQCNAHISELNIHAEAAAQEYKHKLMELETMAQQVKTDNSTAHACSGRQEKINSKPRGSGSPFKCIGIGFVQQMNSEKDEELSAAKQRIVELEGIAASRQREIFMLNAKLATTESMTHDVIRDMLGVKMNMTTWAALADNQQKLETKEPITSQAQEIKDSNELMNLKRQLDEFIEERQSWLDEINQKQSELGAARITIEKLRQREHFMVAEIELLKAENSNYKTIILNLEAEVKNLTRQQNLQLRINHHVKTKEENILLKRQNEELSAKLKQLGGILTRTKEELARYRVSNGRDPHELIEEEELLRKKLDESERDRSQLAENLSSLCSSILKVAGVSDSESDATLLKASECLDQLQCRIASLEGQVEDLNLKCKLVREKARLCELRSNSSSLRTGAKGNLTSPSPDTSPSISSFR

SEQ ID NO: 171892 - protein, 959 aa, Zea Mays
MITGIITKDIESTVLALELKQHKLQLQEQRVMFTDVLEELMALAEATLWKVNQHLENIAICTLHEENNEARVDLENLKQNCEEIMKKLHAMNEENTTLKCLMSSFQTNLDAKNKALMELECSHATICTELELTIDAMNRRSTRENYFISENETLKQEIRNILCKDQCMVELMDNIEADKLFSTIEGRLQLVTDHVHNYITEQINTMSKLSNDLDIIEVSAQELSTQNSLLKSELIRKEELTKGLSFDLSLLQESASVAKDQAAEITGLRKVIKSLELELASKSLELDDVVSDRQQLEAMILKCNQNVAALEEELGKKIDELNIVSMENAELKSQIQHIEEISCTMEELADKSEVIRRLEEKLIESRTLIDERSVCLQSLQNDFSKLSDEKTSCDTELLILKEKLEMAQALAEESEAIATESRQIAEEHKAYAEGKDEEVKVLERSIEELENTVCVLESKVEIVKEEAERQRMQREELEVELQKVRQQMLAVPPSGKARRYMEDGMIDLADSSRHPVDMHNELLSAQETIRILRKEVSEKESEIAQCNAHISELNIHAEAAAQEYKHKLMELETMAQQVKTDNSTAHACSGRQEKINSKPRGSGSPFKCIGIGFVQQMNSEKDEELSAAKQRIVELEGIAASRQREIFMLNAKLATTESMTHDVIRDMLGVKMNMTTWAALADNQQKLETKEPITSQAQEIKDQSNELMNLKRQLDEFIEERQSWLDEINQKQSELGAARITIEKLRQREHFMVAEIELLKAENSNYKTIILNLEAEVKNLTRQQNLQLRINHHVKTKEENILLKRQNEELSAKLKQLGGILTRTKEELARYRVSNGRDPHELIEEEELLRKKLDESERDRSQLAENLSSLCSSILKVAGVSDSESDATLLKASECLDQLQCRIASLEGQVEDLNLKCKLVREKARLCELRSNSSSLRTGAKGNLTSPSPDTSPSISSFR

SEQ ID NO: 171893 - protein, 96 aa, Zea Mays
MARSLLHAAGEPFSISNVVFAIIRGHKRALDVTSVVQGKARFFSVLMLTWGLVADVDIESEKYRWMGSARLDFYGRLLLYYLVASPNCRKWLFWLL

SEQ ID NO: 171894 - protein, 166 aa, Zea Mays
MAERLALPTAYEAIIIAHQNLQNPKIQKLIEPISRRASRPVVVNGLLQREDWETAITVPLGIIPAGTGNGMARSLLHAAGEPFSISNVVFAIIRGHKRALDVTSVVQGKARFFSVLMLTWGLVADVDIESEKYRWMGSARLDFYGRLLLYYLVASPNCRKWLFWLL

SEQ ID NO: 171895 - protein, 174 aa, Zea Mays
MITTTTTTMTAAPDLSLHISPPSPPEPRLLLGLELDDDTAAEAAAATKKADDAAAMREYNNLQVQRRQLHQPSQTAGHGFKRGTSGSAAAGAGGRRSSRAPRMRWTTALHAHFVHAVELLGGHERATPKSVLELMNVKDLTLAHVKSHLQMYRTVKQQGADRPCVAACAWSEDS

SEQ ID NO: 171896 - protein, 401 aa, Zea Mays
MITTTTTTMTAAPDLSLHISPPSPPEPRLLLGLELDDDTAAEAAAATKKADDAAAMREYNNLQVQRRQLHQPSQTAGHGFKRGTSGSAAAGAGGRRSSRAPRMRWTTALHAHFVHAVELLGGHERATPKSVLELMNVKDLTLAHVKSHLQMYRTVKQQGADRPCVAVAGHGHARDMVVLLTTGVGEGDAGFVDDVSNSNSNSNNSVVVNNTVPAAFNNNHTDSRTPQSPGGREQQQQPAPAVDRRRDDAAAAAAACAWVVGRQVQHQRSCSEGVTKLQGLKVGDERVDRHHGDDAIAAHRLVEDEARDDHAGSGGGFQQRRPSPNNTSGTVSSSEWLNQQHCSGVMSVRVLGLPPATPPSLEMSLGRQGWQMDQQCGGEFEFDFEPSPPSAAKELTLLRCL

SEQ ID NO: 171897 - protein, 84 aa, Zea Mays
MTKVTSADAEQLSSSREGVNPPPAEALSSALPRSGVPLHRPSRLAPVCRHGSSNDEAERQLQCPDWMSQMVEETVCRSSLFMWP

SEQ ID NO: 171898 - protein, 116 aa, Zea Mays
MQCRRGRHQLLSSNSVSFRLYDLKQQGYIERQEVKQMVVATLAESGMNLSDEIVESIIDKTFEEADTKHDGRIDKEEWRNLVIRHPSLLKNMTLQYLKDITTTFPSFVFHSQVDDN

SEQ ID NO: 171899 - protein, 80 aa, Zea Mays
MVVATLAESGMNLSDEIVESIIDKTFEEADTKHDGRIDKEEWRNLVIRHPSLLKNMTLQYLKDITTTFPSFVFHSQVDDN

SEQ ID NO: 171900 - protein, 707 aa, Zea Mays
MIKVRKTAQSRIQVAHQEAVALKRQEELIREEEEAGLAEIELKAKRSAAEKEKRAKKKQAKQKKNSRKGNKGKSGKSNINKEIIMDHSHSDDRILDDFCGQIEEMPLNADNPEEVSDISDSRDDNSDMLHVDIEDRESSPVNWEIDASETQTTIPGSSEVQNDHAGKRTSTVDDSSSSCSSDSVPSVTVNGSYKGGAWTSVRSSSNRGNNRRNKDTEARAGFAQGGSCSSHNGFIGSGSNASGHSKERHEPEDDKVVLQRKQHAQWNIDIISSSKSRMAESSFSSVSSIKKQPQPNFLLESTNSLNHRGSEASGTVTSTTTAGASSTPATQLVLNKGPVSSAATQNEKPLPLQVLVPSKSEVQKQASLTGSATTEAVSVSRPLTAPQVPAAKQSAPVTSTAQNAPFLSRSMSAVGRLGNEPSANAPSFVPRSRTYRNAMMEKSSGGGSCFTHQQGSSEQAVAPWQSMFTSQPFIRPSETLSWKEETLLRSGFTFGTVKPESLNPYQGREENSQQASSNSSDCAPSSSNIRSEIEKLNLSGRPRSKQLLSEISTRFTPYQPQGLVADEFPHLDIINDLLDEEQSDRRRVLQPDFVQQSYMPHGASTPDYGEPYLFDQSEQYFDEEPPRFYSPLSSAPRRLRDLSYSHFDLPSHSSSSQFDDLMMSQWPYSRTDISMPSFGSDTSGYPYQVWDLANGSSRVNSGYSPWT

SEQ ID NO: 171901 - protein, 850 aa, Zea Mays
MDPSVRRHMTREKTETILKVIVKQFFIEKEVTSTLVIDSLYSGLKALEYQSKNKKAIPKLTETDARSTPMVLIDQDMFVLADDVIFLLERAALDTLPHQHLPTKDDKSSQNRTKDGNSGQEFSKDSIERDDRRLIELGWKTLELFSLAHIFSRIQVAHQEAVALKRQEELIREEEEAGLAEIELKAKRSAAEKEKRAKKKQAKQKKNSRKGNKGKSGKSNINKEIIMDHSHSDDRILDDFCGQIEEMPLNADNPEEVSDISDSRDDNSDMLHVDIEDRESSPVNWEIDASETQTTIPGSSEVQNDHAGKRTSTVDDSSSSCSSDSVPSVTVNGSYKGGAWTSVRSSSNRGNNRRNKDTEARAGFAQGGSCSSHNGFIGSGSNASGHSKERHEPEDDKVVLQRKQHAQWNIDIISSSKSRMAESSFSSVSSIKKQPQPNFLLESTNSLNHRGSEASGTVTSTTTAGASSTPATQLVLNKGPVSSAATQNEKPLPLQVLVPSKSEVQKQASLTGSATTEAVSVSRPLTAPQVPAAKQSAPVTSTAQNAPFLSRSMSAVGRLGNEPSANAPSFVPRSRTYRNAMMEKSSGGGSCFTHQQGSSEQAVAPWQSMFTSQPFIRPSETLSWKEETLLRSGFTFGTVKPESLNPYQGREENSQQASSNSSDCAPSSSNIRSEIEKLNLSGRPRSKQLLSEISTRFTPYQPQGLVADEFPHLDIINDLLDEEQSDRRRVLQPDFVQQSYMPHGASTPDYGEPYLFDQSEQYFDEEPPRFYSPLSSAPRRLRDLSYSHFDLPSHSSSSQFDDLMMSQWPYSRTDISMPSFGSDTSGYPYQVWDLANGSSRYPSYRPANGH

SEQ ID NO: 171902 - protein, 382 aa, Zea Mays
MASDRIMVDTLTEDNGGDARSSSSEEMPSDQQSHPGDSLAEWRSSEQVENGTPSTSPAYSDNDDDDCGPRPSDLYGKFTWRIDNFSQINKRELRSNSFDVGGFKWYILIYPQGCDVCNHLSLFLCVANHDKLLPGWSHFAQFTIAVINRDPKKSKYSDTLHRFWKKEHDWGWKKFMELSKLHDGFIVEDVLTIKAQVQVIREKTDRPFRCLDGHYRRELIRVYLSNVEQVCRRFIDERRSKLSRLIEDKLGWSSFSGFWLAMDPSVRRHMTREKTETILKVIVKQFFIEKEVTSTLVIDSLYSGLKALEYQSKNKKAIPKLTETDARSTPMVLIDQDMFVLADDVIFLLERAALDTLPHQHLPTKDDKSSQNRTKYCSEMGP

SEQ ID NO: 171903 - protein, 562 aa, Zea Mays
MASDRIMVDTLTEDNGGDARSSSSEEMPSDQQSHPGDSLAEWRSSEQVENGTPSTSPAYSDNDDDDCGPRPSDLYGKFTWRIDNFSQINKRELRSNSFDVGGFKWYILIYPQGCDVCNHLSLFLCVANHDKLLPGWSHFAQFTIAVINRDPKKSKYSDTLHRFWKKEHDWGWKKFMELSKLHDGFIVEDVLTIKAQVQVIREKTDRPFRCLDGHYRRELIRVYLSNVEQVCRRFIDERRSKLSRLIEDKLGWSSFSGFWLAMDPSVRRHMTREKTETILKVIVKQFFIEKEVTSTLVIDSLYSGLKALEYQSKNKKAIPKLTETDARSTPMVLIDQDMFVLADDVIFLLERAALDTLPHQHLPTKDDKSSQNRTKDGNSGQEFSKDSIERDDRRLIELGWKTLELFSLAHIFSRIQVAHQEAVALKRQEELIREEEEAGLAEIELKAKRSAAEKEKRAKKKQAKQKKNSRKGNKGKSGKSNINKEIIMDHSHSDDRILDDFCGQIEEMPLNADNPEEVSDISDSRDDNSDMLHVDIEDRESSPLLWMIAHRLVHLTQCLQLL

SEQ ID NO: 171904 - protein, 623 aa, Zea Mays
MDHSHSDDRILDDFCGQIEEMPLNADNPEEVSDISDSRDDNSDMLHVDIEDRESSPVNWEIDASETQTTIPGSSEVQNDHAGKRTSTVDDSSSSCSSDSVPSVTVNGSYKGGAWTSVRSSSNRGNNRRNKDTEARAGFAQGGSCSSHNGFIGSGSNASGHSKERHEPEDDKVVLQRKQHAQWNIDIISSSKSRMAESSFSSVSSIKKQPQPNFLLESTNSLNHRGSEASGTVTSTTTAGASSTPATQLVLNKGPVSSAATQNEKPLPLQVLVPSKSEVQKQASLTGSATTEAVSVSRPLTAPQVPAAKQSAPVTSTAQNAPFLSRSMSAVGRLGNEPSANAPSFVPRSRTYRNAMMEKSSGGGSCFTHQQGSSEQAVAPWQSMFTSQPFIRPSETLSWKEETLLRSGFTFGTVKPESLNPYQGREENSQQASSNSSDCAPSSSNIRSEIEKLNLSGRPRSKQLLSEISTRFTPYQPQGLVADEFPHLDIINDLLDEEQSDRRRVLQPDFVQQSYMPHGASTPDYGEPYLFDQSEQYFDEEPPRFYSPLSSAPRRLRDLSYSHFDLPSHSSSSQFDDLMMSQWPYSRTDISMPSFGSDTSGYPYQVWDLANGSSRVNSGYSPWT

SEQ ID NO: 171905 - protein, 170 aa, Zea Mays
MARPPILSVALPSDTGRVLSIQSHTVQGYVGNKSAVFPLQLLGFDVDPINSVQFSNHTGYIGSVSFLDTVLQVVEKLRSVNPDLVYVCDPVLGDEGKLYVPQELISVYQQKVVPVASMLTPNQFEVELLTGLRITSEEDGLTACNTLHSAGPQKVVITSALIEGTTARTI

SEQ ID NO: 171906 - protein, 424 aa, Zea Mays
MAPTAKLARANLAPSSPSIYFPSQALIRIPIPDPSLPQLSSAAPPLFPLTSARSPATIMASDATDAPAQPVPAKRRGSYNCGRCGLPKKGHVCSVPGPASSAAAGGGDKAGEPQPQTKPRRALHFDDPAASAVVLDAVPLAVSAPPLQAGSKKAVDVEEDGDGDNDPPAERWVEVGAGRRAPGVVLVEVLRRLSPRSVAAAAGVSRGWHECARRVWRAAEEVRLCAAGVSSVGALMARCPALARLVLRMDCDVDATTLACIAFSCPNLQSLDISMANSAANRISGDELSRFVSEKRSLSVLKLDGCSSLGFINISSSSLSRLWMSGLSSLTKAVMNCPNLNELSLDFPKQNNDSTDLVALMDSLGRTCPNLRNMHISSDRLCNEAVFALESANLRFKNNRCSCRIDCSFLRELGAARFKRVWHH

SEQ ID NO: 171907 - protein, 323 aa, Zea Mays
MELSSSVSSTAAAAAQARLLRPPSFRQPGPAGFVSCRSYAIRSKLVRAMPPILASFQPASPRYPSFQDANGKRRNVPCYQRQQTPQVEARSMEEVYDTLAEHLLSVLKNIEHLDSKYIVGLAGPPGAGKSTVASEVVRRVNTFWSQKHTKGSGAPLPTKEIAAMLPMDGFHLYRAQLDAMEDPKEAHARRGAPWTFNPSLFLKCLHTLRTEGSVYAPSFDHGVGDPVENDIFVKPQHKIVIVEGNYLLLEEDVWTEIRDLFDEKWFIDIDIDISMQRVLKRHIATEPDVAAWRISYNDRPNAELILESRKNADLVIRSVDFSS

SEQ ID NO: 171908 - protein, 240 aa, Zea Mays
MPPILASFQPASPRYPSFQDANGKRRNVPCYQRQQTPQVEARSMEEVYDTLAEHLLSVLKNIEHLDSKYIVGLAGPPGAGKSTVASEVVRRVNTFWSQKHTKGSGAPLPTKEIAAMLPMDGFHLYRAQLDAMEDPKEAHARRGAPWTFNPSLFLKCLHTLRTEGSVYAPSFDHGVGDPVENDIFVKPQHKIVIVEGNYLLLEEDVWTEIRDLFDEKWFIDIDIDISMQRVLKRHIATGLL

SEQ ID NO: 171909 - protein, 197 aa, Zea Mays
MEEVYDTLAEHLLSVLKNIEHLDSKYIVGLAGPPGAGKSTVASEVVRRVNTFWSQKHTKGSGAPLPTKEIAAMLPMDGFHLYRAQLDAMEDPKEAHARRGAPWTFNPSLFLKCLHTLRTEGSVYAPSFDHGVGDPVENDIFVKPQHKIVIVEGNYLLLEEDVWTEIRDLFDEKWFIDIDIDISMQRVLKRHIATGLL

SEQ ID NO: 171910 - protein, 234 aa, Zea Mays
MEEVYDTLAEHLLSVLKNIEHLDSKYIVGLAGPPGAGKSTVASEVVRRVNTFWSQKHTKGSGAPLPTKEIAAMLPMDGFHLYRAQLDAMEDPKEAHARRGAPWTFNPSLFLKCLHTLRTEGSVYAPSFDHGVGDPVENDIFVKPQHKIVIVEGNYLLLEEDVWTEIRDLFDEKWFIDIDIDISMQRVLKRHIATGKEPDVAAWRISYNDRPNAELILESRKNADLVIRSVDFSS

SEQ ID NO: 171911 - protein, 89 aa, Zea Mays
MLLSPTSARMRFPRRDGVPDPSSHASRHCVRVRRRGGQPQPLRAVAQGLGGSYTLATVLAVRPGLSPSTSCIDFACYNLSDELKASPRL

SEQ ID NO: 171912 - protein, 114 aa, Zea Mays
MEVEQQHHHIKSIILFMLVHQCQQHSQPKNEELQSLHCCLMVQKSSPWTAVDVGQTKCRVQPWTGSQAGGWAEPLVVERAEPLAAGSPEALVQRSSWIDASTRFASRVWDLGAI

SEQ ID NO: 171913 - protein, 101 aa, Zea Mays
MVVQILYMWLCKTPKFEIGDTVDNSTLYARAADCTTSSSDALACHSSSCFLVRTSAIRQPHGSSPLQSSNSVTSSSERLILATNIVRKRRRTKENGSKCNK

SEQ ID NO: 171914 - protein, 51 aa, Zea Mays
MTASFLHNSGACIADDAAPSCFFAATLRKIDPSACFFPLLWCMVVCCRFWI

SEQ ID NO: 171915 - protein, 697 aa, Zea Mays
MEESDAAEGVAVQLIDGEGEFAAAAAERFMAAAGVAGCGLSYAVVSIMGPQSSGKSTLLNQLFGTNFREMDAFRGRSQTTKGIWIARCVGVEPCTVVLDLEGTDGRERGEDDTAFEKQSSLFALAISDIVLINMWCHDIGREQAANKPLLKTVFQVMMRLFSPRKTTLLFVIRDKTRTPLEHLEPVLREDIQKIWNSVAKPEAHKDTPISEFFNVQVTALSSFEEKEEQFREQVQQLRQRFSNSIAPGGLAGDRRGVVPASGFLFSSQQIWKVIRENKDLDLPAHKVMVATVRCDEIANEKFGCITSDTEWLDVESAVQSGPVPGFGKKLSNIVEVHLQEYDKEAFYFDEAVRKGKRQHLESRILNLVQPAFQKMLTHLRMKALEKFKAGLNSSLESGKEFAISARDNTECSLKDFEQGCADAIIKQANWDCSKILEKVRRDIEDHALSIRERKLSELTTHAKEKLRKALAEPVESLFDAADQTTWTSIRNIYKRETEAILPEFLKTICGFEMEYAQAEEMVSKLRDYARSVVQSKAKEESSKVLIHMKERFTTVFSHDKDSIPRVWTGKEDVHAIAKEARAAALKLLSVMAAIRWDDEPDRIESIITSTLLEGSVVSKIASAASADPLASTTWEQIPPEHTMITPSQCKLLWKQFKSETEFTITQAVSTQLTGVVIVSCLLLGQLWPLLFLVSMRS

SEQ ID NO: 171916 - protein, 479 aa, Zea Mays
MYKLLHCPVLKKKRSSLENRQRFSNSIAPGGLAGDRRGVVPASGFLFSSQQIWKVIRENKDLDLPAHKVMVATVRCDEIANEKFGCITSDTEWLDVESAVQSGPVPGFGKKLSNIVEVHLQEYDKEAFYFDEAVRKGKRQHLESRILNLVQPAFQKMLTHLRMKALEKFKAGLNSSLESGKEFAISARDNTECSLKDFEQGCADAIIKQANWDCSKILEKVRRDIEDHALSIRERKLSELTTHAKEKLRKALAEPVESLFDAADQTTWTSIRNIYKRETEAILPEFLKTICGFEMEYAQAEEMVSKLRDYARSVVQSKAKEESSKVLIHMKERFTTVFSHDKDSIPRVWTGKEDVHAIAKEARAAALKLLSVMAAIRWDDEPDRIESIITSTLLEGSVVSKIASAASADPLASTTWEQIPPEHTMITPSQCKLLWKQFKSETEFTITQAVSTQLTGVVIVSCLLLGQLWPLLFLVSMRS

SEQ ID NO: 171917 - protein, 475 aa, Zea Mays
MLTHLRMKALEKFKAGLNSSLESGKEFAISARDNTECSLKDFEQGCADAIIKQANWDCSKILEKVRRDIEDHALSIRERKLSELTTHAKEKLRKALAEPVESLFDAADQTTWTSIRNIYKRETEAILPEFLKTICGFEMEYAQAEEMVSKLRDYARSVVQSKAKEESSKVLIHMKERFTTVFSHDKDSIPRVWTGKEDVHAIAKEARAAALKLLSVMAAIRWDDEPDRIESIITSTLLEGSVVSKIASAASADPLASTTWEQIPPEHTMITPSQCKLLWKQFKSETEFTITQAVSTQQAHRRGNSKLPPPWAIVAIAILGFNEIMTLLRNPIYVFLLFVGYLMVKALAVQLDVSREFQNGVVPGIISVSAKLLPTIQNLVNKVAAEQQDEHRHPHQQHPQVAEPLQPQMQPPPLLLSPRSPMSELRRLHMPSSPRKVASSSSSPSSSSSSAVSSPRHVGEDQKPRPGAAAPENQS

SEQ ID NO: 171918 - protein, 135 aa, Zea Mays
MVEELQQQAMCLVSKAMRSELRCRFAQPQRLRISLHSIRASLIMMLMSPCLTKMSRHAHRFLDEMPKLSEHASVFRVDLVRLFDLYFCGLFYYDSVDVMHICVVVVVVEVCKLFNKTPPCIQCTCMCSAGPEGGR

SEQ ID NO: 171919 - protein, 294 aa, Zea Mays
MFLSSLYLQSERALPSAADSDSSVDRLDLEHDIQKECIEKDKVRNACHDQHRGDYKRNRMNDEYENEDLDAEQSGPKSQRKVEGTGDDTPGVVTMSSFNCNEGDNDPEEESKVRNDNKNAIMHSAMRAQTVQRERALLSAADSDSSVDRLDLEHDIRKGCIEKDKVRNACHGQHRRDYKRNRKNDEYENEDLDAERSGPKSQRKVEGTGDDSPGIAAMSSFNCNEGDSDPEKERYNERGKSERVLTFNSKEGAAHEASTFPSKEKYNLCKPISELDLSNCQWCTPSYRLLPKNV

SEQ ID NO: 171920 - protein, 466 aa, Zea Mays
MFLSSLYLQSERALPSAADSDSSVDRLDLEHDIQKECIEKDKVRNACHDQHRGDYKRNRMNDEYENEDLDAEQSGPKSQRKVEGTGDDTPGVVTMSSFNCNEGDNDPEEESKVRNDNKNAIMHSAMRAQTVQRERALLSAADSDSSVDRLDLEHDIRKGCIEKDKVRNACHGQHRRDYKRNRKNDEYENEDLDAERSGPKSQRKVEGTGDDSPGIAAMSSFNCNEGDSDPEKERYNERGKSERVLTFNSKEGAAHEASTFPSKEKYNLCKPISELDLSNCQWCTPSYRLLPKNYPVPSASKRTDIEASVLNDFCVLVTSGSGAFKHMRKNQYEEILFICEDDMFELDVLLESVSVTIKRVEELVESMEGNSLKPDSSIHLDEHLTSLNMRCIEWLYGDHGLDVVDVLQKNAGVTLPVILTRLKQKQEEWSMCQSDFNKVWAEVYSKNYHKSLDYGSFYSKQQNTRI

SEQ ID NO: 171921 - protein, 665 aa, Zea Mays
MARSPPPPPPSPAQGNGNGSGSGSLTARDALAYIKAVKDNFQEKRHTYEQFLQVMRDFKSNRLDSAGLIARVKTLFHGYPDLVLGINAFLPKGHAIRPQDLSEDKEPVDYPRAINLVNRIKIRFQQEEHVYKSFLGILSMYRMDNKPIQDVYDEVTLLFHGHPDLLEEFTHFLPDTPIPPPEAGTTSKVRNDDKNAITHSAMRAQTVQSERALPSAADSDSSVDRLDLEHDIQKECIEKDKVRNACHDQHRGDYKRNRMNDEYENEDLDAEQSGPKSQRKVEGTGDDTPGVVTMSSFNCNEGDNDPEEESKVRNDNKNAIMHSAMRAQTVQRERALLSAADSDSSVDRLDLEHDIRKGCIEKDKVRNACHGQHRRDYKRNRKNDEYENEDLDAERSGPKSQRKVEGTGDDSPGIAAMSSFNCNEGDSDPEKERYNERGKSERVLTFNSKEGAAHEASTFPSKEKYNLCKPISELDLSNCQWCTPSYRLLPKNYPVPSASKRTDIEASVLNDFCVLVTSGSGAFKHMRKNQYEEILFICEDDMFELDVLLESVSVTIKRVEELVESMEGNSLKPDSSIHLDEHLTSLNMRCIEWLYGDHGLDVVDVLQKNAGVTLPVILTRLKQKQEEWSMCQSDFNKVWAEVYSKNYHKSLDYGSFYSKQQNTRI

SEQ ID NO: 171922 - protein, 87 aa, Zea Mays
MGVRVGGVESLESSASTVPAESGGGRGASRDHVERVQIVLGSDYLLAWKELLTIDHGRPWNRRAPWAELGVPPVLKRQWLRIPVFSR

SEQ ID NO: 171923 - protein, 298 aa, Zea Mays
MVPRAVTCHVLSSDTLAAVTLDACKDDNGEHVRDTKTSTKKITQIQESTQGTPPLILAGLHACGDLSVNMLRVFVSCEQVKALVSIGCCYNLLSEDTYEDTDTCPGFPMSKAAKHSELVLGKSIRDLACQSAERWRNLTMDIALQNFDVHAFRAAFQMVLEKYFPEVSRLSPSIGRQGKALRRQRLRKVVESQMTTKKNDDFSCSTLKEQNKNTNDVHPVIHEVDTGPDDIHQNAHQKFILFKDFTLSGLGRLGCGSVEDTSLLEIWKDVQPFSVGIYRSLLVPSSCFRSTGGNIYFT

SEQ ID NO: 171924 - protein, 363 aa, Zea Mays
MAAAPASVGCGGAYSCETAERTREWMQAHVVNFFKDRLWELVDAEWMECLRREPVESLLKLPSGCVQEHWPATLREFVLTARSLVIPREQKAPQSLVSDIHVAPVGTVLAQGMNSKKKHEIENLAAVVHAIAKRCGAKTVVDVGSGQGYLAQALSFEYQLRVVAIDASSHHASVTIARAERIKKHYAAKCVEKQLLMVPRAVTCHVLSSDTLAAVTLDACKDDNGEHVRDTKTSTKKITQIQESTQGTPPLILAGLHACGDLSVNMLRVFVSCEQVKALVSIGCCYNLLSEDTYEDTDTCPGFPMSKAAKHSELVLGKSIRDLACQRDGEISPWTLHCKILMYMPSELHFKWYLRNIFQKCQG

SEQ ID NO: 171925 - protein, 283 aa, Zea Mays
MVPRAVTCHVLSSDTLAAVTLDACKDDNGEHVRDTKTSTKKITQIQESTQGTPPLILAGLHACGDLSVNMLRVFVSCEQVKALVSIGCCYNLLSEDTYEDTDTCPGFPMSKAAKHSELVLGKSIRDLACQSAERWRNLTMDIALQNFDVHAFRAAFQMVLEKYFPEVSRLSPSIGRQGKALRRQRLRKVVESQMTTKKNDDFSCSTLKEQNKNTNDVHPVIHEVDTGPDDIHQNAHQKFILFKDFTLSGLGRLGCGSVEDTSLLEIWKDVQPFSVPFGAFELL

SEQ ID NO: 171926 - protein, 204 aa, Zea Mays
MTTTDQRPVDRAVAALPSSNPYPDMRTRRCAAKPPVNSSCFSPMLPASSVGAGGEVTDGRHTALDLEAPRPRVDGSAISHGETRSGASFLSHCARKRPCACLARADWLVQVKSYCKWGVLMLLGRAETGTRVALSLSGLHSLPGRSQIGCINSPPAVAAAAAAAVRFHREARPCRNSWVSLLRACSVIPNTHGLDGIGKNCEEV

SEQ ID NO: 171927 - protein, 479 aa, Zea Mays
MAAAPASVGCGGAYSCETAERTREWMQAHVVNFFKDRLWELVDAEWMECLRREPVESLLKLPSGCVQEHWPATLREFVLTARSLVIPREQKAPQSLVSDIHVAPVGTVLAQGMNSKKKHEIENLAAVVHAIAKRCGAKTVVDVGSGQGYLAQALSFEYQLRVVAIDASSHHASVTIARAERIKKHYAAKCVEKQLLMVPRAVTCHVLSSDTLAAVTLDACKDDNGEHVRDTKTSTKKITQIQESTQGTPPLILAGLHACGDLSVNMLRVFVSCEQVKALVSIGCCYNLLSEDTYEDTDTCPGFPMSKAAKHSELVLGKSIRDLACQSAERWRNLTMDIALQNFDVHAFRAAFQMVLEKYFPEVSRLSPSIGRQGKALRRQRLRKVVESQMTTKKNDDFSCSTLKEQNKNTNDVHPVIHEVDTGPDDIHQNAHQKFILFKDFTLSGLGRLGCGSVEDTSLLEIWKDVQPFSVPFGAFELL

SEQ ID NO: 171928 - protein, 132 aa, Zea Mays
MMHLYRLDNYRVGAVLMQSGHPIAYLSKALGTKSQGLFTYEKEYLAILVAVDHWRHYLQLKEFHIYTDHRSFVQLDEQCLHTPWQQKMFTRLLGLQYKIIYKGLTIVRLMHCPGIRRFSSPVRHCLLALHNG

SEQ ID NO: 171929 - protein, 90 aa, Zea Mays
MAHVTRSGGICVFIHAHIVEMHVRIALAEDGEKNGVSRQRIDTATGTAQADMHAARRRQKTRCMTRNHLRIEGIKWEISSFPLQSSPILP

SEQ ID NO: 171930 - protein, 377 aa, Zea Mays
MDGEAKEKKQKKKKDKGDPSAANAASEGTTEIVKNADQKDDEAKEKKQKKKKDKGDPSAAGAGSGETTETVKEDDHKLDGKKKKKNKKQGKDDDVEARLEKAELAILNKFEAAEKLNGREVEPKGQNDSADDCSGAVERKKKKKEKSSAGTSEKTDAGSAPAEADGAKGKNGAVETVKDDNEKKAKKKRKKSNPEETVQVEGKEAAGKDSVPKQDDANKSVMEIEEGNQGKSSNENAVAGKKRKLEEVEGSIPPVTGKEDCTANESLSNGFAEDKKEESNTKPSKRQKHSSEPKTVTPFQRIKVDDVRFADDRLQDNSYWAKGGADTGYGAKAQEILGQVKGRGFRHEKTKKKRGTYRGGQIDLQTHSIKFENSDDE

SEQ ID NO: 171931 - protein, 477 aa, Zea Mays
MEPPPPPPPRSLARGPRWSPPSPPSSSPLGSRARSSPSNPRPASSNSTRAAAILGSDEQDKENDDIAGEVGKEKKRSGTEAGEPESKAIEPLAEEKPTENMDGEAKEKKQKKKKDKGDPSAANAASEGTTEIVKNADQKDDEAKEKKQKKKKDKGDPSAAGAGSGETTETVKEDDHKLDGKKKKKNKKQGKDDDVEARLEKAELAILNKFEAAEKLNGREVEPKGQNDSADDCSGAVERKKKKKEKSSAGTSEKTDAGSAPAEADGAKGKNGAVETVKDDNEKKAKKKRKKSNPEETVQVEGKEAAGKDSVPKQDDANKSVMEIEEGNQGKSSNENAVAGKKRKLEEVEGSIPPVTGKEDCTANESLSNGFAEDKKEESNTKPSKRQKHSSEPKTVTPFQRIKVDDVRFADDRLQDNSYWAKGGADTGYGAKAQEILGQVKGRGFRHEKTKKKRGTYRGGQIDLQTHSIKFENSDDE

SEQ ID NO: 171932 - protein, 590 aa, Zea Mays
MKRARSSEVFIGVGRLRARRGLAPLLAAAAFAYLLFVSVKLTYLGSAGPAPAVGRLATTGAGEPAARARSSGGGAVSGYGRITGEILRRHEAFEERRKRWGQLGNFTELERVAAEAWALGAAAWEEASAFDGDVDYIASRDVAGEGTAKCPGSLALGAGETTAFLPCGLAAGSAVTVVGTARTARPEYVEALERSGTGNGTVLVAQFAVELRGLRATDGEEPPRILHLNPRLRGDWSSRPVLEMNTCFRMQWGRAQRCDSTPSGDDDLDICICSCASSIVCGGWLKYKGFALEDATGLAVTGGIDVHSVYATALPKAHPSFSLQQVLEMSERWKARPVPEEPIHLFIGILSATNHFAERMAIRKTWMQFPAIQSGNAVARFFVALSHRKEINAALKKEAEYFGDIVILPFIDRYELVVLKTVAICQYGVHNVTADYIMKCDDDTFVRLDIVLHQISTYNKTSPLYLGNLNLLHRPLRRGKWAVTYEEWPEAVYPPYANGPGYVISAGIARDVASRHTNHSLRLFKMEDVSMGMWVEDYNASAPVQYVHSWRFCQFGCVDNYFTAHYQSPRQMLCLWEKLSAGRAHCCNYR

SEQ ID NO: 171933 - protein, 573 aa, Zea Mays
MKRARSSEVFIGVGRLRARRGLAPLLAAAAFAYLLFVSVKLTYLGSAGPAPAVGRLATTGAGEPAARARSSGGGAVSGYGRITGEILRRHEAFEERRKRWGQLGNFTELERVAAEAWALGAAAWEEASAFDGDVDYIASRDVAGEGTAKCPGSLALGAGETTAFLPCGLAAGSAVTVVGTARTARPEYVEALERSGTGNGTVLVAQFAVELRGLRATDGEEPPRILHLNPRLRGDWSSRPVLEMNTCFRMQWGRAQRCDSTPSGDDDLVDGLRKCEKWDWQDVVESKETKTSSWFNRFIGRAKKPEMRWPFPFSEGKMFVLTIQAGVEGYHINVGGRHVASFPHRMGFALEDATGLAVTGGIDVHSVYATALPKAHPSFSLQQVLEMSERWKARPVPEEPIHLFIGILSATNHFAERMAIRKTWMQFPAIQSGNAVARFFVALSHRKEINAALKKEAEYFGDIVILPFIDRYELVVLKTVAICQYGVHNVTADYIMKCDDDTFVRLDIVLHQISTYNKTSPLYLGNLNLLHRPLRRGKWAVTYERACRNGQKRCIPRTPMDLGTLSRPALRET

SEQ ID NO: 171934 - protein, 393 aa, Zea Mays
MESMDKELRSSRLSEQLNKHYAAIAIPKGLYCLSLRLTDEYSSNALARKQLPPPELVPCLSDNSYFHFVLASDNILAASVVVRSTIRSSLKPERIVFHVITDKKTYPAMHSWFALNSLSPAIVEVKGVHQFDWLTQENVPVLESIETQRAARDRYHGSRRPITSANDSPRVFAAKLQAGSPTYTNVLNHIRIYMPELFPSLNKVVFLDDDVVVQHDLSPLWDIDLSGKVNGAVETCRGGDSWVMSKRFRNYLNFSHPLIAKNFDPSECAWAYGMNIFDLNAWRKTTIKDKYHHWVKENLKSNFTLWRLGTLPPGLIAFKGHVHPIDPSWHLLGLGYQEKTDISSVEQAAVIHYNGQSKPWLEIGFKHLQPFWTKYVNYSNEFLRNCHIMEPQL

SEQ ID NO: 171935 - protein, 446 aa, Zea Mays
MRLVRDLYVMLDKVNSEEAPLDLKVPETFDEFIWDMKNNDYDLRSFAFKLKATMESMDKELRSSRLSEQLNKHYAAIAIPKGLYCLSLRLTDEYSSNALARKQLPPPELVPCLSDNSYFHFVLASDNILAASVVVRSTIRSSLKPERIVFHVITDKKTYPAMHSWFALNSLSPAIVEVKGVHQFDWLTQENVPVLESIETQRAARDRYHGSRRPITSANDSPRVFAAKLQAGSPTYTNVLNHIRIYMPELFPSLNKVVFLDDDVVVQHDLSPLWDIDLSGKVNGAVETCRGGDSWVMSKRFRNYLNFSHPLIAKNFDPSECAWAYGMNIFDLNAWRKTTIKDKYHHWVKENLKSNFTLWRLGTLPPGLIAFKGHVHPIDPSWHLLGLGYQEKTDISSVEQAAVIHYNGQSKPWLEIGFKHLQPFWTKYVNYSNEFLRNCHIMEPQL

SEQ ID NO: 171936 - protein, 471 aa, Zea Mays
MQIRLSPSMRSITISTSHGLLDLMRLKVAARHFSYRTVFHTVLILAFLLPFVFILTAIMTLEGFNKCSSLDCLGRRLGPRLLGRGNDGSMRLVRDLYVMLDKVNSEEAPLDLKVPETFDEFIWDMKNNDYDLRSFAFKLKATMESMDKELRSSRLSEQLNKHYAAIAIPKGLYCLSLRLTDEYSSNALARKQLPPPDPAIVEVKGVHQFDWLTQENVPVLESIETQRAARDRYHGSRRPITSANDSPRVFAAKLQAGSPTYTNVLNHIRIYMPELFPSLNKVVFLDDDVVVQHDLSPLWDIDLSGKVNGAVETCRGGDSWVMSKRFRNYLNFSHPLIAKNFDPSECAWAYGMNIFDLNAWRKTTIKDKYHHWVKENLKSNFTLWRLGTLPPGLIAFKGHVHPIDPSWHLLGLGYQEKTDISSVEQAAVIHYNGQSKPWLEIGFKHLQPFWTKYVNYSNEFLRNCHIMEPQL

SEQ ID NO: 171937 - protein, 65 aa, Zea Mays
MSAFSGLGTISQASIVMQIHNTMWTTHAVMLTRQDAFGSTSMHVSHDTVQSSPHTNLGSSVQNPH

SEQ ID NO: 171938 - protein, 62 aa, Zea Mays
MFCPGNSNPLQESFRIGATEFLHLLEIAQDSRTLSNEEAWLHNNIKKHCLALSSQAYCEEPL

SEQ ID NO: 171939 - protein, 62 aa, Zea Mays
MLVRDLGMFLGILTLYTKMKTRMMGRFRKFINDLALRDIPLQGRSFTWSNLQADPVLVRLDS

SEQ ID NO: 171940 - protein, 80 aa, Zea Mays
MHGPANSLLLGILDCVGYKFIGRSVRGTGQSDVPSSQRLAATSASGQRSSGAPDSPVPHTGRSGAPRTRKAANQRFSAHA

SEQ ID NO: 171941 - protein, 72 aa, Zea Mays
MKLYRRNYLLLSVQKFHARTSSARPNLDEQKRNQRVTPCGSKVGKMDIGGGPEVTLIGSLENAKGSQLPYLV

SEQ ID NO: 171942 - protein, 112 aa, Zea Mays
MGDGADEDSSMVATVTCRTCFRGRDRRQVEDMWLVVEKSQFPNITHEFIIAFSFHIWRNNFTESKQGHEELDGASLREHEEFTKVKNITKVELGRYEIDTSYMVFLSFSTRL

SEQ ID NO: 171943 - protein, 287 aa, Zea Mays
MSSVFPSAHLAFAGIDMNAHTLFAITTALAILPTVCLRNLSLLSYLSAGGVMATIAVIVCLFWVGIGEGIGFHFSGALVNVTHLPVALGLYGFCYSGHSVFPNIYSSMKERSQFPFVLLFCFTVVTVAYAGIAVSGFLMFGESTMSQFTLNLPQQYIPSKIAIWMTIVNPYTKYALTMTPVALSIEEALPKKMQNYLVGMSVRTCLVLSTVVVALLFPYFGLVMALLGSVFTMLVALILPCACYLSIKKGAVPLWEIILCIVIIMIGAVCASVGSYTSVSQMISSTR

SEQ ID NO: 171944 - protein, 490 aa, Zea Mays
MDRDEEMGHGDRSLLFVGDEDDDIGTYRDGGFMETSSDEGSFSDPSDGEARGGRRGGDGSKSAWPQSYRQSIDMLSVVPSPTVSMLMAASPNLTRFGSSFLKAGSSFFLRKGDDSVLPLARPLLPPSLPQLSQSSLRPQPPMRQSTDILAQPPRPPAGHEAQLPDRPSSACLRPDYIELPPPASKCSRNQSIINGFNVLCGVGILSTSYGIKEGGWSSLLLLPLLGGSSCYTGLLLKRCIDSSPNIGTYPDIGQAAFGVAGRIFVSVVLYLELYASCVEYITLLGDSMSSVFPSAHLAFAGIDMNAHTLFAITTALAILPTVCLRNLSLLSYLSAGGVMATIAVIVCLFWVGIGEGIGFHFSGALVNVTHLPVALGLYGFCYSGHSVFPNIYSSMKERSQFPFVLLFCFTVVTVAYAGIAVSGFLMFGESTMSQFTLNLPQQYIPSKIAIWMTRKPCQRRCRITWLECLLGHASSSPLLWWLCFFLISGW

SEQ ID NO: 171945 - protein, 574 aa, Zea Mays
MDRDEEMGHGDRSLLFVGDEDDDIGTYRDGGFMETSSDEGSFSDPSDGEARGGRRGGDGSKSAWPQSYRQSIDMLSVVPSPTVSMLMAASPNLTRFGSSFLKAGSSFFLRKGDDSVLPLARPLLPPSLPQLSQSSLRPQPPMRQSTDILAQPPRPPAGHEAQLPDRPSSACLRPDYIELPPPASKCSRNQSIINGFNVLCGVGILSTSYGIKEGGWSSLLLLPLLGGSSCYTGLLLKRCIDSSPNIGTYPDIGQAAFGVAGRIFVSVVLYLELYASCVEYITLLGDSMSSVFPSAHLAFAGIDMNAHTLFAITTALAILPTVCLRNLSLLSYLSAGGVMATIAVIVCLFWVGIGEGIGFHFSGALVNVTHLPVALGLYGFCYSGHSVFPNIYSSMKERSQFPFVLLFCFTVVTVAYAGIAVSGFLMFGESTMSQFTLNLPQQYIPSKIAIWMTIVNPYTKYALTMTPVALSIEEALPKKMQNYLVGMSVRTCLVLSTVVVALLFPYFGLVMALLGSVFTMLVALILPCACYLSIKKGAVPLWEIILCIVIIMIGAVCASVGSYTSVSQMISSTR

SEQ ID NO: 171946 - protein, 95 aa, Zea Mays
MAPPSVLLRATSASFTSAPKFDLHITTYGVYTATVSPSTLQRGSTLPDHLTASISVHGLVVPEPVQSSSACWCLCCDDDGCCRCGARAGATLDAG

SEQ ID NO: 171947 - protein, 77 aa, Zea Mays
MQDVCTIKSGSHLDSKDAYVTVMHVKFATKKGEHPLCKIDSYMKCSELKWVQLEETSLVIRHKTKASILTHLMPHSD

SEQ ID NO: 171948 - protein, 226 aa, Zea Mays
MLVVTSSVGMLHGVHGHTTDLGPAVPLHTVLVVGVASLQHRLLSPATTGNLPNHGTAAAGDNFLVPRGPGEDTAVTNVVLDVADDGTLGDPAERQDVADGERGAAAAVNELAGVHALGGDEELLLVLVPEGVAEGDLGERGAASGVVDHVGDYALEVPVALAEVEGAEPGGALAVVGVGLEHGSRTLTLRADHATHLARRRGGSGGGGGAAGRGCGSERGAASVGR

SEQ ID NO: 171949 - protein, 388 aa, Zea Mays
MDNNANLCDNGPSTCDQEKKRNRTLIIATVVPIVVAALLFVAGLLILRRMRNRQDTWMPNNSRFTSPQASSHIFENRKFTYKELKLMTANFREEIGRGGFGAVFLGYLENGNPVAVKMRSKTSSQGDKEFLAEVQHLTRVHHKNLVSLIGYCKDKKHLALVYEYMQGGSLEDCLRGEASAATPLTWHQRLKIALNSAQGLEYLHKSCQPPLIHRDVKTKNILLSADLEAKIADFGLMKAFADEFRTHPPAVPVSDAESVHVALWVRRRLSEGDIASVADPRMGGAYDVNSVWKVAELGLRCKEQPSRERPAMTDIVAELRESLQLEVSYAMGYYSSSVSTSAIDLSTASAGLQSDEKPSDRLGQKAALELQQQHVDSESSATVGPAPR

SEQ ID NO: 171950 - protein, 56 aa, Zea Mays
MHLAPHIGPRDDDRASDVVPPTRCSRWTTQGRMDITSGCSPSEYLPPSKHYLSVKN

SEQ ID NO: 171951 - protein, 64 aa, Zea Mays
MICCWCDLAFVPATGTDGRVGYCFRRRGPGGVAWPGFAMLLGSSPLVISAALKFMVIISETPIM

SEQ ID NO: 171952 - protein, 96 aa, Zea Mays
MAVTITWVKTRQIFISRGNPTVEVDVGLRDGSYARGAVPSGVSTVETKSCLSQGRISSPSLSNAWAHHQGISFFLLFYLFSLLPCLFSEIRQLVSF

SEQ ID NO: 171953 - protein, 149 aa, Zea Mays
MDKSPGAASHLRLSSLVNRGIYEALELRDGGSDYLGKGVLKEMAVTITWVKTRQIFISRGNPTVEVDVGLRDGSYARGAVPSGVSTGGIETICIMKAFEKFQYVDVLIPIVSFPLKYRCTSLLSMPSWATPIATTARLGAARPGRTVRS

SEQ ID NO: 171954 - protein, 118 aa, Zea Mays
MAVTITWVKTRQIFISRGNPTVEVDVGLRDGSYARGAVPSGVSTVETKSCLSQGRISSPSLSNAWAHHQGIEEKTLSVQPPPTIILLSVPISCGLHHCNACHRYRYCSVLLVPVEHVL

SEQ ID NO: 171955 - protein, 102 aa, Zea Mays
MGTSPGLPPVQVLLRSACSCGTCSLRNMTTTRYKHLSCQWMPWQWMRVTELLIPTHLHLEASDEPDQCDMYEADSKSSSTPQMHTNSKASSQRYKSSRTNDE

SEQ ID NO: 171956 - protein, 131 aa, Zea Mays
MAVTITWVKTRQIFISRGNPTVEVDVGLRDGSYARGAVPSGVSTGGIETICIMKAFEKFQYVDVLIPIVSFPLKYRCTSLLSMPSWATPIATTARLGAARPGRTLATGTGIAPFCLFLWNMFFKKHDHYKV

SEQ ID NO: 171957 - protein, 631 aa, Zea Mays
MEESFVPLRGIKNDLHGRLACYKQDWAGGFRAGIRILAPTTYIFFASAIPVISFGEQLERNTDGVLTAVQTLASTALCGVIHSIVGGQPLLILGVAEPTVLMYTFMFSFAKDRPDLGRSLFLAWTGWVCVWTAILLFLLAILGACSIINRFTRVAGELFGLLIAMLFMQQAIKGLIDEFRIPEREDRKALEFVPSWRFANGMFAIVLSFGLLLTALRSRKARSWRYGAGWLRGFIADYGVPLMVLVWTGVSYIPYGNVPKAIPRRLFSPNPWSPGAYDNWTVIKDMTQVPLLYIIGAFIPATMIAVLYYFDHSVASQLAQQKEFNLRKPPSFHYDLLLLGFLTLMCGLIGIPPSNGVIPQSPMHTKSLATLKHQLLRNRLVATARKSMSQNASLSQLYGSMQDAYQQMQTPLVYQQQSVRRGLNELKDSTVQLASSMGNIDAPVDETVFDIEKEIDDLLPIEVKEQRLSNLLQASMVGGCVAAMPLLKKIPTSVLWGYFAFMAIESLPGNQFWERILLLFTAPSRRYKVLEEYHTTFVETVPFKTIAMFTMFQTAYLLVCFGITWIPIAGVLFPLMIMLLVPVRQYILPKLFKGAHLTDLDAAEYEESPAIPFSLAATSMLHSETPRVQKS

SEQ ID NO: 171958 - protein, 666 aa, Zea Mays
MASSLVTTDRRWGATPARKSSMTVLGKVPKPINLPSQRLENNGLDPNLELVPKGTHTWGSKAPSTTPNAWSSSSILSSKNDGSSTSSSHFNVRPTSGGGSRPSTAGSESLGSPNAWGANSRPSSASGTFPSSHLPMATNRPQSAETRPGSSQISRFADNASDNVKASIRTIDRSESSSRGPGFTLSTGDFPTLGSEANSQRGHSSKGRPTSSLGKEVSQGEQVKSLATGTGEVISPSNNHPVDIMKTEHHAHTGGAPVPATSVPNEGLQQQPYPPNFPMPPLQFDSWRAPPGHPPEGMWHRGPVPGGPYRPVGPPGSFPVEPFGYYGQFPPNSEAAGRQGSGHGGYHTKNDVYHPMPHNSYIMNQPVIPVRPVYQGPVLYDGYYGPQANFNNTNVRDPHFVGGPGILNQFPNQNDRFHPGHPQNRPGKHETVPREQLESDKLHVFHQEHPGSLHDNPDRLGGSREFERNVQPAPPLLPHPDGKQTDMNMRADTRDTFSETERTVVLTKSVPNQRGSVGIDHLSVYENTRSHHRETCDGTLRKKFKEDSSVVLDQHPVIKKNAALIEKIESLNNKARNVYAQNLPEPASSKEFKKHKKTTDVSSNDVISTTCTSDQAVSVSHISAVVQRRPNVTIEGELILRETVTMVLVKIGQLINSEVVDVEKVT

SEQ ID NO: 171959 - protein, 1513 aa, Zea Mays
MASSLVTTDRRWGATPARKSSMTVLGKVPKPINLPSQRLENNGLDPNLELVPKGTHTWGSKAPSTTPNAWSSSSILSSKNDGSSTSSSHFNVRPTSGGGSRPSTAGSESLGSPNAWGANSRPSSASGTFPSSHLPMATNRPQSAETRPGSSQISRFADNASDNVKASIRTIDRSESSSRGPGFTLSTGDFPTLGSEANSQRGHSSKGRPTSSLGKEVSQGEQVKSLATGTGEVISPSNNHPVDIMKTEHHAHTGGAPVPATSVPNEGLQQQPYPPNFPMPPLQFDSWRAPPGHPPEGMWHRGPVPGGPYRPVGPPGSFPVEPFGYYGQFPPNSEAAGRQGSGHGGYHTKNDVYHPMPHNSYIMNQPVIPVRPVYQGPVLYDGYYGPQANFNNTNVRDPHFVGGPGILNQFPNQNDRFHPGHPQNRPGKHETVPREQLESDKLHVFHQEHPGSLHDNPDRLGGSREFERNVQPAPPLLPHPDGKQTDMNMRADTRDTFSETERTVVLTKSVPNQRGSVGIDHLSVYENTRSHHRETCDGTLRKKFKEDSSVVLDQHPVIKKNAALIEKIESLNNKARNVYAQNLPEPASSKEFKKHKKTTDVSSNDVISTTCTSDQAVSVSHISAVVQRRPNVTIEGTILGPAHSHLTEFSKAEKLGDSINNHLHRRVDSSRNSYHGPCKDRPANKFGSCGRGESYITNSLPVADLGNDIHHGQQPQIASQLQPVIVPDDMPASLDYESQRAKMKELAAERAKRMKAEEEERIKNQKAKALAKLEELNRRSSVLQKKSNDTKVETDDAHDKQQIGLDVNAKLDTSTEQHDVVTPDRLTALLPPNDPNHTMVQIQAQSTAQSNALDGGKAHDAHTTSSLVKNTHSNMEHVVQKSISQSHNISMVKTKQGYRKRQVVSEEKISGEKASASVTTDSSVQKNVDVPVDTVTAVVAPHDDPPTQNKKGTRHLRSKKKVDDASVISKHPPVVFNEQNTVKISTEPKTHTGGVIISSSIVPIEGTIVTVGSITVGGLSLTAMNQEHVNSADGTNSTESGLSRPQQARKSGKHQHVLRPVEKPHGNDGVLWAPDMLPLHNEQSDGAMPTAAVADVTQPAGKAINDGENVTRTKRAEMERYVPKPMSKELQQHNPSHDKEAIDKPGAAKSHPAAEPKKTSKGHGGKSNPSWRKRDPDQPAMVAPNSVDQADNSYESKEVQNCTDMNQPVELGKEDTQLKSNVDAAAENSSAPAQTVPLSAGGAKEHSAANRQRRQHFKAQRNEASSYSNESKVREGKNDSVYQSASPVIDSNSSNHKNVPRSDVKNSGIVSHSRAWKPKTNSHPQNSSDGKIAVEGKVDSHGGRLELNMPKGSDTITHQDTSSKPMKRSDGTDEASHSKQENLTQEDGNQKIETGQEQANPAPRRQGQPNARYHRGGGAHRGRGGYDTGRPNHGTNAERWKGGSHLEYQPVGSQNKAGGDFQLSQGMEDRTEGPPASGQAFGERGHSRGLRPAGRFVRRNTASTSTTNSHQHE

SEQ ID NO: 171960 - protein, 1492 aa, Zea Mays
MTVLGKVPKPINLPSQRLENNGLDPNLELVPKGTHTWGSKAPSTTPNAWSSSSILSSKNDGSSTSSSHFNVRPTSGGGSRPSTAGSESLGSPNAWGANSRPSSASGTFPSSHLPMATNRPQSAETRPGSSQISRFADNASDNVKASIRTIDRSESSSRGPGFTLSTGDFPTLGSEANSQRGHSSKGRPTSSLGKEVSQGEQVKSLATGTGEVISPSNNHPVDIMKTEHHAHTGGAPVPATSVPNEGLQQQPYPPNFPMPPLQFDSWRAPPGHPPEGMWHRGPVPGGPYRPVGPPGSFPVEPFGYYGQFPPNSEAAGRQGSGHGGYHTKNDVYHPMPHNSYIMNQPVIPVRPVYQGPVLYDGYYGPQANFNNTNVRDPHFVGGPGILNQFPNQNDRFHPGHPQNRPGKHETVPREQLESDKLHVFHQEHPGSLHDNPDRLGGSREFERNVQPAPPLLPHPDGKQTDMNMRADTRDTFSETERTVVLTKSVPNQRGSVGIDHLSVYENTRSHHRETCDGTLRKKFKEDSSVVLDQHPVIKKNAALIEKIESLNNKARNVYAQNLPEPASSKEFKKHKKTTDVSSNDVISTTCTSDQAVSVSHISAVVQRRPNVTIEGTILGPAHSHLTEFSKAEKLGDSINNHLHRRVDSSRNSYHGPCKDRPANKFGSCGRGESYITNSLPVADLGNDIHHGQQPQIASQLQPVIVPDDMPASLDYESQRAKMKELAAERAKRMKAEEEERIKNQKAKALAKLEELNRRSSVLQKKSNDTKVETDDAHDKQQIGLDVNAKLDTSTEQHDVVTPDRLTALLPPNDPNHTMVQIQAQSTAQSNALDGGKAHDAHTTSSLVKNTHSNMEHVVQKSISQSHNISMVKTKQGYRKRQVVSEEKISGEKASASVTTDSSVQKNVDVPVDTVTAVVAPHDDPPTQNKKGTRHLRSKKKVDDASVISKHPPVVFNEQNTVKISTEPKTHTGGVIISSSIVPIEGTIVTVGSITVGGLSLTAMNQEHVNSADGTNSTESGLSRPQQARKSGKHQHVLRPVEKPHGNDGVLWAPDMLPLHNEQSDGAMPTAAVADVTQPAGKAINDGENVTRTKRAEMERYVPKPMSKELQQHNPSHDKEAIDKPGAAKSHPAAEPKKTSKGHGGKSNPSWRKRDPDQPAMVAPNSVDQADNSYESKEVQNCTDMNQPVELGKEDTQLKSNVDAAAENSSAPAQTVPLSAGGAKEHSAANRQRRQHFKAQRNEASSYSNESKVREGKNDSVYQSASPVIDSNSSNHKNVPRSDVKNSGIVSHSRAWKPKTNSHPQNSSDGKIAVEGKVDSHGGRLELNMPKGSDTITHQDTSSKPMKRSDGTDEASHSKQENLTQEDGNQKIETGQEQANPAPRRQGQPNARYHRGGGAHRGRGGYDTGRPNHGTNAERWKGGSHLEYQPVGSQNKAGGDFQLSQGMEDRTEGPPASGQAFGERGHSRGLRPAGRFVRRNTASTSTTNSHQHE

SEQ ID NO: 171961 - protein, 1663 aa, Zea Mays
MALMMTPLLTRRGSCRLLSDDFIPPSARTPRSGGRTTPKAAVPLLLGRRAGEVAGNGNARRRRKGQGREEAEGDCEIPEYNRTAAAEDARIGRGSDGGMGRRRPLMAARMESRGGAEERERVRARRGEDGRGADGAEETEAMASVAERKASVAERRGRRQRWGATPARKSSMTVLGKVPKPINLPSQRLENNGLDPNLELVPKGTHTWGSKAPSTTPNAWSSSSILSSKNDGSSTSSSHFNVRPTSGGGSRPSTAGSESLGSPNAWGANSRPSSASGTFPSSHLPMATNRPQSAETRPGSSQISRFADNASDNVKASIRTIDRSESSSRGPGFTLSTGDFPTLGSEANSQRGHSSKGRPTSSLGKEVSQGEQVKSLATGTGEVISPSNNHPVDIMKTEHHAHTGGAPVPATSVPNEGLQQQPYPPNFPMPPLQFDSWRAPPGHPPEGMWHRGPVPGGPYRPVGPPGSFPVEPFGYYGQFPPNSEAAGRQGSGHGGYHTKNDVYHPMPHNSYIMNQPVIPVRPVYQGPVLYDGYYGPQANFNNTNVRDPHFVGGPGILNQFPNQNDRFHPGHPQNRPGKHETVPREQLESDKLHVFHQEHPGSLHDNPDRLGGSREFERNVQPAPPLLPHPDGKQTDMNMRADTRDTFSETERTVVLTKSVPNQRGSVGIDHLSVYENTRSHHRETCDGTLRKKFKEDSSVVLDQHPVIKKNAALIEKIESLNNKARNVYAQNLPEPASSKEFKKHKKTTDVSSNDVISTTCTSDQAVSVSHISAVVQRRPNVTIEGTILGPAHSHLTEFSKAEKLGDSINNHLHRRVDSSRNSYHGPCKDRPANKFGSCGRGESYITNSLPVADLGNDIHHGQQPQIASQLQPVIVPDDMPASLDYESQRAKMKELAAERAKRMKAEEEERIKNQKAKALAKLEELNRRSSVLQKKSNDTKVETDDAHDKQQIGLDVNAKLDTSTEQHDVVTPDRLTALLPPNDPNHTMVQIQAQSTAQSNALDGGKAHDAHTTSSLVKNTHSNMEHVVQKSISQSHNISMVKTKQGYRKRQVVSEEKISGEKASASVTTDSSVQKNVDVPVDTVTAVVAPHDDPPTQNKKGTRHLRSKKKVDDASVISKHPPVVFNEQNTVKISTEPKTHTGGVIISSSIVPIEGTIVTVGSITVGGLSLTAMNQEHVNSADGTNSTESGLSRPQQARKSGKHQHVLRPVEKPHGNDGVLWAPDMLPLHNEQSDGAMPTAAVADVTQPAGKAINDGENVTRTKRAEMERYVPKPMSKELQQHNPSHDKEAIDKPGAAKSHPAAEPKKTSKGHGGKSNPSWRKRDPDQPAMVAPNSVDQADNSYESKEVQNCTDMNQPVELGKEDTQLKSNVDAAAENSSAPAQTVPLSAGGAKEHSAANRQRRQHFKAQRNEASSYSNESKVREGKNDSVYQSASPVIDSNSSNHKNVPRSDVKNSGIVSHSRAWKPKTNSHPQNSSDGKIAVEGKVDSHGGRLELNMPKGSDTITHQDTSSKPMKRSDGTDEASHSKQENLTQEDGNQKIETGQEQANPAPRRQGQPNARYHRGGGAHRGRGGYDTGRPNHGTNAERWKGGSHLEYQPVGSQNKAGGDFQLSQGMEDRTEGPPASGQAFGERGHSRGLRPAGRFVRRNTASTSTTNSHQHE

SEQ ID NO: 171962 - protein, 350 aa, Zea Mays
MKAQISPYPSPRPHFISFGVPTRPHRKKDPGKNLALRRLRPIPMEATAVPRALFLFGTSPAPYRMRMNCLRVAIGGDVRRQGAVAVWAKKKRGRGRDSETEERVDTHSFTPKPGEAAGLFPEAVLLRKKMVREDGQVSPEFADADEEKLYDFLNIELESDLNLKRMRHYEVVYLIHEDRVEEVENVVSKVQDFIREKKGRIWRLNNWGLRRLAYKIKKATHANYILMNFEIESRYINDFKTLLDKDERIIRHLVMKRDEAITEDCPPPPVFHTLRAQQYFDDEYEDEGEEEEDEDARSEPKSANYDEDDVEADDEPEIIYVDEADEDNYEDTRRRNTKLKVKKYTSEKVM

SEQ ID NO: 171963 - protein, 216 aa, Zea Mays
MVKCHQNLLMQTKKLYDFLNIELESDLNLKRMRHYEVVYLIHEDRVEEVENVVSKVQDFIREKKGRIWRLNNWGLRRLAYKIKKATHANYILMNFEIESRYINDFKTLLDKDERIIRHLVMKRDEAITEDCPPPPVFHTLRAQQYFDDEYEDEGEEEEDEDARSEPKSANYDEDDVEADDEPEIIYVDEADEDNYEDTRRRNTKLKVKKYTSEKVM

SEQ ID NO: 171964 - protein, 452 aa, Zea Mays
MSGIFLPMPYYGFRAMRAGLVADTYLEAMSVTHFKKKYEEYDLKGDEQEQIDRLAEDGDIYSKLARSLAPEIFGHEDVKKALLLLLVGAPHRKLADGMKIRGDLHICMMGDPGVAKSQLLKHIINVAPRGVYTTGRGSSGVGLTAAVQKDPVTNEFVLEGGALVLADMGICAIDEFDKMEESDRTAIHEVMEQQTVSIAKAGITTSLNARTAILAAANPAWGRYDMRRTPAENINLPPALLSRFDLLWLILDRADMETDLEMARHIVHVHQNLESPALGFTPLEPSVLRAYISAARRVIPSVPRELEEYIATAYSSIRQEEAKSNAPTSYTTIRTLLSILRISIALARLRFSETVAQSDVDEALRLMQMSKYSLYSDDRQRSGLDAISDIYSILRDEAARTSSMDVRYAHALNLISRKGYSEAQLKECLEEYASLNVWQIHPSTFDIHFIDA

SEQ ID NO: 171965 - protein, 149 aa, Zea Mays
MNQKSNLPRHMFGNLQSKMFPAYFTLISACAAISVAAFAYLHPWKTASTVQRYQLGFLLSALGCNLSNLLVFTPMTIEMMKKRHKIERDLSIGEEVGWSKNQQVAKSNPTLAAMNKKFGMIHGLSSLANIMSFGSLAMHSWYLASKLEL

SEQ ID NO: 171966 - protein, 308 aa, Zea Mays
MNQKAHEAIIKQLNLARSAGPPELRDWTDMAESYDNLNNSVKVALVGKYTNLTDSYLSVVKALLHASVACSLKPSIQWIAASDLEDATAISAPDAHAEAWETLKGSSCILIPGGFGDRGISGMILAAKYARENRVPYLGICLGMQISVIEISRHVLGLEDADSEEFNKDTPNHVVMYMPEVSKTHMGNTMRLGCRRTFFSKPDCLTSKLYGSPPHVDERHRHRYEVNPSFVPMLESAGLHFVGCDESRNRMEIVELQDHPFYVGVQFHPEFKSRPRRPSPPFTGLIMAATKQLGANSNSSNGFVGASD

SEQ ID NO: 171967 - protein, 529 aa, Zea Mays
MVHYPYLNTDAGTMSPFEHGEVFVLDDGGEVDLDLGNYERFIDVTLTRDNNITTGKIYQSVIEKERRGDYLGKTVQVIPHVTDEIKQWIQSVSSVPVDGQTRPADVCVIELGGTVGDIESMPFIEALRQLSFSLGKENFCLIHVSLVPVLGVVGEQKTKPTQHSVRELRALGLTPDLLACRSAQPLIGSVKEKLSQFCHVPVENILNIHDVPNLWHVPLILRNQKAHEAIIKQLNLARSAGPPELRDWTDMAESYDNLNNSVKVALVGKYTNLTDSYLSVVKALLHASVACSLKPSIQWIAASDLEDATAISAPDAHAEAWETLKGSSCILIPGGFGDRGISGMILAAKYARENRVPYLGICLGMQISVIEISRHVLGLEDADSEEFNKDTPNHVVMYMPEVSKTHMGNTMRLGCRRTFFSKPDCLTSKLYGSPPHVDERHRHRYEVNPSFVPMLESAGLHFVGCDESRNRMEIVELQDHPFYVGVQFHPEFKSRPRRPSPPFTGLIMAATKQLGANSNSSNGFVGASD

SEQ ID NO: 171968 - protein, 358 aa, Zea Mays
MVVAARWIARQAIPGLSKAIEQFPEYEVKVIGHSMGAGIATILTYILRENEKLSSSTCIAFGPAACMTWDLAESGKDFVTTIVNRNDLVPSLGIVSAAKLRIEVMSSSWAHDLGRQIQQTRFLGFVNRSVSFIRSHVPFVSDPRSKVVDVDMLQSQSPEAGSKPSADTHAVVKKRPALVCWSYVATPNPKQSMESSIQMQGTEVQTDTAVETEKNSEAAAAELVSIHLGELNIQESDKDDDKRGEKGSETDEEETMEILESLADEKHMPSSSSFAQEPQQLYPPGKILHMVGLAAAEVATTSQQGAQEEVVALYETPRHLYSKIRLARSMIGEHYMPKYIKTMEKLIHKLAEDQLDSL

SEQ ID NO: 171969 - protein, 315 aa, Zea Mays
MGAKGMATAAGTAVLLYLVLSGRLCGDAAGDGGALEDQLISSALEARRRRKEDTRARREQRRAPPPCTKRRWPERPPDGWGEAAALTARTVGFTWAETLGKWTLGEVAFGIKYYMRQQGNLQHEYAGSDSVLLDGAEVRQVLISLLRYLKQCMYFSKKPYNVFLEYGGYGHNDVLIRKPKARLLKPAFTIVRDRSSQCFLLFIRGAISVKERLTAATGTEVPFHHVVVQEGRVSNLVLGYAHCGMVVAARWIARQAIPGLSKAIEQFPEYEVKVIGHSMGAGIATILTYILRENEKLSSSTCIAFGPGYVIVLGT

SEQ ID NO: 171970 - protein, 796 aa, Zea Mays
MRLAYLIGYGAEIEKSPVNSASLSMLPWPKPATWPSIPPDSSAEIMEKEKMVLQVNSREKLFSIHRKPLPLEPSLLLREANRRRAFLSAGNLSELYDSSDGSGLDANSKLPPNRSASNLMTRTMSGPATSETSLPVDRPMRLSEIHVAAEHALKQTISDPDFMTSLSSLEEFEKRYMELTKGAADNYHRSWWKRHGVVLDGEIAALFFKHGNYDLAVKSYEKVCALYSAEGWEELLADVLPDLAECQKILNDEAGYLASCVKLLSLDSGLFSSKERQGFQSEVVRLAHSEMKHLVPLDVSSLITFAGNAGPPLELCDGDPGTLSVAVWNGFPDDITLESLSLRLSASSSADEGIKAIKSSDSHVLVPGRNIISFDIPRQKPGSYVLGALTGQIGKLSFRSHGFSQDGPVETDEFMSFEKPTRPVLKVRKPRALVDITPAVSSALLMNELQWIGLIVKPIDYSLKGGILHIDAGAELKIEESQMIEIEIYVSDMECANSANSSIKAGKVEKVPIENGKIELPDWASDVTTLVWFPVRAIDDTIARGESLVSQKQSVVDGMRMIALKLEFGVFRNQVFERTIAVHFTNPFHVSTRVVDKCNDGALLLQVILSSGVKATLHVKDVRLDLQSGFDHLGKGDGRPALSLFPLVIAPSSKAGILFMLRLSGTKDVDDAENADSTLNITYGISGDRKTGAHSPIPVKSGDSEELVFKIALRLKRPVLDPCVAVGFLPFSTDCLRVGQLVNMRWRVERLKTPEDASISIDEILYQVEANPQNWMVAGRKCGHVSLSNEQGWRSR

SEQ ID NO: 171971 - protein, 50 aa, Zea Mays
MRVSSLLGSTCTDVFFLIRAPYTCSKLVISHCKYQSSIEFAYEVFVVPHC

SEQ ID NO: 171972 - protein, 60 aa, Zea Mays
MRVSSLLGSTCTDVFFLIRAPYTCSKLTGFINFNIFTQGKKGCLIKSKEEDEESEEMRKG

SEQ ID NO: 171973 - protein, 59 aa, Zea Mays
MYGCLFPYQSSIHLLEIVNSNLSFGNTGFINFNIFTQGKKGCLIKSKEEDEESEEMRKG

SEQ ID NO: 171974 - protein, 115 aa, Zea Mays
MRKRCANPAKRDAETSCLHGSTTRLLLTNSRAGDTTWGQQRALRGILSSRLSEEESGLGLAVVVRMVSRAPPWLHMGELMHELLLGFRWGGQRGRTCWQRCAGRAMRGKAGAHVI

SEQ ID NO: 171975 - protein, 790 aa, Zea Mays
MDDFEGLLARDFGLRPQGKAAPMSAARSSGPSGSAWANTRSAAAPSYDELFGSAPPLPKATPSPSPSLDHIFDSFKEPASTAPPPKPKHSSMPVFDKPVYDDDIFVGVPGVKSSSARYDDVFGGSHSREAPPAFDDLLGGFGKSSQVREEVDDKRKQEAAMGPAAGTGFDYLIPGFGGRSSPRQRDTVGAKQQKISMSTSKQPASLSDPFVVLETTSSSAHPFADPLDEFGKAAKYQGKSRESTNVGSNLFEDSSTSIQAPKSEPIFTSEVDNGLKDKNESSRARDANPVQSFSKGNSSQQPSVEDFENIFSKPQSARYADVHVDIGSDKYSGNGINDQSPRSDESEDEIWLTASEIPLFTQPTSAPPPSRPPPPLAAKQKKHGSKSKRKDDEHLKQSRKNNDHQRSSSNHAGVSTVDELEDFAMGKPQSVHALNAEEFERSTAAAASAAAMKEAMDKAEAKFKHAKEVRERERDAKIRNREQREQDSVTRSYAQDREDKERKERLEQEREMKQNEEKEREQRRLEEERELERHKERERARQAVERATKEARERAAVEARAKAEREARQRSERAAVQRAQQEARERAAVEAKERAERATAEAKERAAAEGKEKAASQARDRAAAERAAVERAQQEARKRAERAAVERAAAEARERQAAAARDKTSKPDDLESFFGMGARANSAPKQRAPTVDSMFHSQTQNRGSSTSTSMKKASSTTNIADDLSAIFGGAPTSEEFQEVDGESEERRRARMERHQRTRERAAKALAEKNERDMQQQREQAERHACGNTGL

SEQ ID NO: 171976 - protein, 77 aa, Zea Mays
MRIVYMAAVMFLVLATMSSTSPSFCQAGGCIGCPRAPPPPSDETCYEDLKCSASRCHLGCIHRGYKALRRRPWTPAL

SEQ ID NO: 171977 - protein, 52 aa, Zea Mays
MRAVRLRLNEGWRLVLEGSRGYRSVGGERGHWRSAIWQPPEANSHTYSTAAS

SEQ ID NO: 171978 - protein, 136 aa, Zea Mays
MLYNNINHPSKLIVGADFHCFKNKIEPKWEDPICANGGKWTISCGRGKSDTFWLHTLLAMIGEQFDYGDEICGAVVSVRGKQERIAIWTKNAANEAAQVSIGKQWKELLDYKDSIGFIVHDDAKKMDKGLKNRYTV

SEQ ID NO: 171979 - protein, 281 aa, Zea Mays
MTWDEFETTGTPPSPRSEHAAACFAERYLLIFGGGSHSTCFSDLHLLDTQTMEWSRPKQQGVTPESRAGHAGVTIGEYWFITGGGNSRKGVSDTLVLNLSTYEWSVLTNLEARAPPVSEGSSLVMHTINGENFLVSFGGYSGRYSNQAYALKASLKPSVPSQQINESDTNGFSPLSVAENSSRKVIFEIEELKDEKPGNRADNSKTLGQVVMVEQNEIENRLNQEHLQSLRLKQELTGLENRNAELTEELHLVQDQLSIEQTRASKFEWGAAAARLIGNRA

SEQ ID NO: 171980 - protein, 266 aa, Zea Mays
MTWDEFETTGTPPSPRSEHAAACFAERYLLIFGGGSHSTCFSDLHLLDTQTMEWSRPKQQGVTPESRAGHAGVTIGEYWFITGGGNSRKGVSDTLVLNLSTYEWSVLTNLEARAPPGSSLVMHTINGENFLVSFGGYSGRYSNQAYALKASLKPSVPSQQINESDTNGFSPLSVAENSSRKVIFEIEELKDEKELHLVQDQLSIEQTRASKFENEISDIQQRLQKMDTLEKEIESLRYELDSTVSEEESSSGNELHRSRGFWRWNG

SEQ ID NO: 171981 - protein, 151 aa, Zea Mays
MDRSINFRGIAGSAGNIMQGMGKFVFGNEGLDSKEDSYVERYLDRISNGTIPDDRRSAMTELQSLVAESRLAQMSFGAMGFPILLNIFKEDREDVELVRGALETFVSALTPIEMSQGPKTEVQPASVNSDLLSRETENISLLLSLLRKTFM

SEQ ID NO: 171982 - protein, 818 aa, Zea Mays
MDRSINFRGIAGSAGNIMQGMGKFVFGNEGLDSKEDSYVERYLDRISNGTIPDDRRSAMTELQSLVAESRLAQMSFGAMGFPILLNIFKEDREDVELVRGALETFVSALTPIEMSQGPKTEVQPASVNSDLLSRETENISLLLSLLSEEDFYVRYYTIQLLTALLTNSLKRLQEAILLIPRGITVLMDMLMDREVIRNEALLLLTYLTRDAEEIQKIVVFEGVFEKIFSIIREEGYSDGGVVVQDCLELLNNLIRHNASNQMLLKETMGFDPLISILKIRRGSAFNFTQQKTVNLLAALNTVELLLMVGPSGEAGKDANKNANQTALAQKNILDHLLLLGVESQWAPVALRCMRNPNGQALLASTIAPHPNQGDIHEPASDMPFGSVLLQALVSSDVNGDMEACCRASSVLSHIIKDNLQSKDRVLQIQLETSTASLGRTEPVLHRIVTCLSIAASMEGENDQNNQLEEPYIQPFILRLLIIWLVDCSNAVNCLLESAVHLNFIIELASNKRYAACVRGLAAVVLGACILYNASREKGRDAFAVADAISQKIGLTTYFLRFDELRKSLAHPLSEQHHRKELSRSSANSMSDFQEIEEDETNKGDQHPVLSEIFDSQFVNLLTKLEADIRENIMDIFSRTKTATAVLPTELEQKNGEVDEEYIKRLKSFVEKQCNEMQDLLARNAMLAEELLRTGGGTTTDTSQKPSSGRERVQIEALRQELEGAKRQIGALKSEKSQIEAEANNQRNLSVKLESDLKSLSEAYNSIEQANYRLDAEEQTKVEKLSTRLAELGEDVDTLLQGIGDDTAIPDDDDEDDEE

SEQ ID NO: 171983 - protein, 619 aa, Zea Mays
MLLKETMGFDPLISILKIRRGSAFNFTQQKTVNLLAALNTVELLLMVGPSGEAGKDANKNANQTALAQKNILDHLLLLGVESQWAPVALRCMALRCIGNLVLRNPQNLDSLARKQVGEEPHVQPALNAILSIILRTSIAQEFVAADYVFKCFCERNPNGQALLASTIAPHPNQGDIHEPASDMPFGSVLLQALVSSDVNGDMEACCRASSVLSHIIKDNLQSKDRVLQIQLETSTASLGRTEPVLHRIVTCLSIAASMEGENDQNNQLEEPYIQPFILRLLIIWLVDCSNAVNCLLESAVHLNFIIELASNKRYAACVRGLAAVVLGACILYNASREKGRDAFAVADAISQKIGLTTYFLRFDELRKSLAHPLSEQHHRKELSRSSANSMSDFQEIEEDETNKGDQHPVLSEIFDSQFVNLLTKLEADIRENIMDIFSRTKTATAVLPTELEQKNGEVDEEYIKRLKSFVEKQCNEMQDLLARNAMLAEELLRTGGGTTTDTSQKPSSGRERVQIEALRQELEGAKRQIGALKSEKSQIEAEANNQRNLSVKLESDLKSLSEAYNSIEQANYRLDAEEQTKVEKLSTRLAELGEDVDTLLQGIGDDTAIPDDDDEDDEE

SEQ ID NO: 171984 - protein, 694 aa, Zea Mays
MDMLMDREVIRNEALLLLTYLTRDAEEIQKIVVFEGVFEKIFSIIREEGYSDGGVVVQDCLELLNNLIRHNASNQMLLKETMGFDPLISILKIRRGSAFNFTQQKTVNLLAALNTVELLLMVGPSGEAGKDANKNANQTALAQKNILDHLLLLGVESQWAPVALRCMALRCIGNLVLRNPQNLDSLARKQVGEEPHVQPALNAILSIILRTSIAQEFVAADYVFKCFCERNPNGQALLASTIAPHPNQGDIHEPASDMPFGSVLLQALVSSDVNGDMEACCRASSVLSHIIKDNLQSKDRVLQIQLETSTASLGRTEPVLHRIVTCLSIAASMEGENDQNNQLEEPYIQPFILRLLIIWLVDCSNAVNCLLESAVHLNFIIELASNKRYAACVRGLAAVVLGACILYNASREKGRDAFAVADAISQKIGLTTYFLRFDELRKSLAHPLSEQHHRKELSRSSANSMSDFQEIEEDETNKGDQHPVLSEIFDSQFVNLLTKLEADIRENIMDIFSRTKTATAVLPTELEQKNGEVDEEYIKRLKSFVEKQCNEMQDLLARNAMLAEELLRTGGGTTTDTSQKPSSGRERVQIEALRQELEGAKRQIGALKSEKSQIEAEANNQRNLSVKLESDLKSLSEAYNSIEQANYRLDAEEQTKVEKLSTRLAELGEDVDTLLQGIGDDTAIPDDDDEDDEE

SEQ ID NO: 171985 - protein, 150 aa, Zea Mays
MLLKETMGFDPLISILKIRRGSAFNFTQQKTVNLLAALNTVELLLMVGPSGEAGKDANKNANQTALAQKNILDHLLLLGVESQWAPVALRCMALRCIGNLVLRNPQNLDSLARKQVGEEPHVQPALNAILSIILRTSIAQEFVAADYVFK

SEQ ID NO: 171986 - protein, 721 aa, Zea Mays
MLILVHIWPWRLACRPLHHRDSVNIRRTIHQHLKEVIRNEALLLLTYLTRDAEEIQKIVVFEGVFEKIFSIIREEGYSDGGVVVQDCLELLNNLIRHNASNQMLLKETMGFDPLISILKIRRGSAFNFTQQKTVNLLAALNTVELLLMVGPSGEAGKDANKNANQTALAQKNILDHLLLLGVESQWAPVALRCMALRCIGNLVLRNPQNLDSLARKQVGEEPHVQPALNAILSIILRTSIAQEFVAADYVFKCFCERNPNGQALLASTIAPHPNQGDIHEPASDMPFGSVLLQALVSSDVNGDMEACCRASSVLSHIIKDNLQSKDRVLQIQLETSTASLGRTEPVLHRIVTCLSIAASMEGENDQNNQLEEPYIQPFILRLLIIWLVDCSNAVNCLLESAVHLNFIIELASNKRYAACVRGLAAVVLGACILYNASREKGRDAFAVADAISQKIGLTTYFLRFDELRKSLAHPLSEQHHRKELSRSSANSMSDFQEIEEDETNKGDQHPVLSEIFDSQFVNLLTKLEADIRENIMDIFSRTKTATAVLPTELEQKNGEVDEEYIKRLKSFVEKQCNEMQDLLARNAMLAEELLRTGGGTTTDTSQKPSSGRERVQIEALRQELEGAKRQIGALKSEKSQIEAEANNQRNLSVKLESDLKSLSEAYNSIEQANYRLDAEEQTKVEKLSTRLAELGEDVDTLLQGIGDDTAIPDDDDEDDEE

SEQ ID NO: 171987 - protein, 725 aa, Zea Mays
MDGRGSRGQPIEAMDAVAVIRNEALLLLTYLTRDAEEIQKIVVFEGVFEKIFSIIREEGYSDGGVVVQDCLELLNNLIRHNASNQMLLKETMGFDPLISILKIRRGSAFNFTQQKTVNLLAALNTVELLLMVGPSGEAGKDANKNANQTALAQKNILDHLLLLGVESQWAPVALRCMALRCIGNLVLRNPQNLDSLARKQVGEEPHVQPALNAILSIILRTSIAQEFVAADYVFKCFCERNPNGQALLASTIAPHPNQGDIHEPASDMPFGSVLLQALVSSDVNGDMEVLQIQLETSTASLGRTEPVLHRIVTCLSIAASMEGENDQNNQLEEPYIQPFILRLLIIWLVDCSNAVNCLLESAVHLNFIIELASNKRYAACVRGLAAVVLGACILYNASREKGRDAFAVADAISQKIGLTTYFLRFDELRKSLAHPLSEQHHRKELSRSSANSMSDFQEIEEDETNKGDQHPVLSEIFDSQFVNLLTKLEADIRENIMDIFSRTKTATAVLPTELEQKNGEVDEEYIKRLKSFVEKQCNEMQDLLARNAMLAEELLRTGGGTTTDTSQKPSSGRERVQIEALRQELEGAKRQIGALKSEKSQIEAEANNQRNLSVKLESDLKSLSEAYNSIEQANYRLDAEVKALRQGGSVPYPDVEAIKAQAKEEAEKDSEAELNDLLVCLGQEQTKVEKLSTRLAELGEDVDTLLQGIGDDTAIPDDDDEDDEE

SEQ ID NO: 171988 - protein, 571 aa, Zea Mays
MALRCIGNLVLRNPQNLDSLARKQVGEEPHVQPALNAILSIILRTSIAQEFVAADYVFKCFCERNPNGQALLASTIAPHPNQGDIHEPASDMPFGSVLLQALVSSDVNGDMEACCRASSVLSHIIKDNLQSKDRVLQIQLETSTASLGRTEPVLHRIVTCLSIAASMEGENDQNNQLEEPYIQPFILRLLIIWLVDCSNAVNCLLESAVHLNFIIELASNKRYAACVRGLAAVVLGACILYNASREKGRDAFAVADAISQKIGLTTYFLRFDELRKSLAHPLSEQHHRKELSRSSANSMSDFQEIEEDETNKGDQHPVLSEIFDSQFVNLLTKLEADIRENIMDIFSRTKTATAVLPTELEQKNGEVDEEYIKRLKSFVEKQCNEMQDLLARNAMLAEELLRTGGGTTTDTSQKPSSGRERVQIEALRQELEGAKRQIGALKSEKSQIEAEANNQRNLSVKLESDLKSLSEAYNSIEQANYRLDAEVKALRQGGSVPYPDVEAIKAQAKEEAEKDSEAELNDLLVCLGQEQTKVEKLSTRLAELGEDVDTLLQGIGDDTAIPDDDDEDDEE

SEQ ID NO: 171989 - protein, 495 aa, Zea Mays
MQAAPGSVSWAASQPSVLGRCGGGAPSASLKWRAGGVGGGECRVRGRDVVVPRSCARAQEKRLPRVRKSKEERREMVESFIKSYRVSNEGKFPSINLTHKEVGGSYYIVREIMRDIIQENRVLGPGGLDAMTLSFEDCADSSKSSMKLELGQDSIEILDMSGSEVSKSHVPEISSTDESFPLQGNAISNHRLLGSSNILEVGVLNSVVQNGSVADAIFMETNLAKQDEVPSRGSIEFDLNTSEEQARLFAQVSDSDEEVTLNNQADAQDGTTNSGTDRVILPLESFAVYENNASLLRDHETLPDDNHDGSTDRVADDASLLAATNGVQAKQASLHEHDASTRSVLIDNAQSLDGQFSTTVSTDPINGFKLETEIATKTVETSQVHRLQDEFEQPLVDASYDGQENSDSPVSHPALDTKGLLHTEDQLNVVQVDETEFKNSTSGITKEEVHAADFRHEQGINTTMAISRHALCLLTLRSMLTVYNFLHLSQKAAVY

SEQ ID NO: 171990 - protein, 362 aa, Zea Mays
MQAAPGSVSWAASQPSVLGRCGGGAPSASLKWRAGGVGGGECRVRGRDVVVPRSCARAQEKRLPRVRKSKEERREMVESFIKSYRVSNEGKFPSINLTHKEVGGSYYIVREIMRDIIQENRVLGPGGLDAMTLSFEDCADSSKSSMKLELGQDSIEILDMSGSEVSKSHVPEISSTDESFPLQGNAISNHRLLGSSNILEVGVLNSVVQNGSVADAIFMETNLAKQDEVPSRGSIEFDLNTSEEQARLFAQVSDSDEEVTLNNQADAQDGTTNSGTDRVILPLESFAVYENNASLLRDHETLPDDNHDGSTDRVADDASLLAATNGVQAKQASLHEHDASTRSVLIDNAQSLDGCKMSLSNH

SEQ ID NO: 171991 - protein, 151 aa, Zea Mays
MDGNFLQNALSKTRQVDDFTSRLLEIHRKMMEINKEENIRLGLHRSDYMLDSETSSLLQIELNTISASFPGLGSLVSDLHRSLIKQYGTSLSLEHKRVPANAASTQFSEALAQAWSEFNIDSAVIMMIVQPEERNMYDQYWLSKHLQDSMA

SEQ ID NO: 171992 - protein, 149 aa, Zea Mays
MPQSSYGIEGLSHITVAGALNHGMKEVEVWLQTISPGQRTPIHRHSCEEVFTVLKGKGTLLMGSSSLKYPGQPQEIPFFQNTTFSIPVNDPHQVWNSDEHEDLQVLVIISRPPAKIFLYDDWSMPHTAAVLKFPFVWDEDCFEAAKDEL

SEQ ID NO: 171993 - protein, 191 aa, Zea Mays
MSDVVEEEELNKMNARNVAMVFAPNMTQMSDPLTALMHAVQVMNFLKTLILRTLRERDDAATTGEYTPYSSPASSSKHDDAECCYGSEQDMDRSCEMSDMHSQISKSGRHADYLVRYNTCFDSEQEVDDHLSEVEEGFLRRLERDLGADRPEVSCRKISEIMALEDAEPKAETRAVEKGIQNENEEVAEQL

SEQ ID NO: 171994 - protein, 211 aa, Zea Mays
MTGVVVVSSAGCKGGGGAKRAAGGRGGGEEERRRRAAVLELLLAAVRRSVVACRVERGAAGAGWPAREEDAAVALEEMEIGWPTDVRHVAHVTFDRFHGFLGLPVEFEDEMPCRVPSASASVFGVSAELMQCTYDGKGNSVPTILLLLQERLYAHGGLKSEGIFRINPENDQEEHVRDQLNKGIVPDDIDVHCLASLIKFHEIRELKLLHI

SEQ ID NO: 171995 - protein, 437 aa, Zea Mays
MTGVVVVSSAGCKGGGGAKRAAGGRGGGEEERRRRAAVLELLLAAVRRSVVACRVERGAAGAGWPAREEDAAVALEEMEIGWPTDVRHVAHVTFDRFHGFLGLPVEFEDEMPCRVPSASVFGVSAELMQCTYDGKGNSVPTILLLLQERLYAHGGLKSEGIFRINPENDQEEHVRDQLNKGIVPDDIDVHCLASLIKAWFRELPEGVLDGLSPQQVLQCNSEGEFLELVTLLRPTQAALLNWAVELMSDVVEEEELNKMNARNVAMVFAPNMTQMSDPLTALMHAVQVMNFLKTLILRTLRERDDAATTGEYTPYSSPASSSKHDDAECCYGSEQDMDRSCEMSDMHSQISKSGRHADYLVRYNTCFDSEQEVDDHLSEVEEGFLRRLERDLGADRPEVSCRKISEIMALEDAEPKAETRAVEKGIQNENEEVAEQL

SEQ ID NO: 171996 - protein, 74 aa, Zea Mays
MTQAKSAPGRKEMGRGRSPEPLDFFIWTVEEFPCSYLGLPLSVHKLSRAELHKIVDKVADNLPKWKGALINKAA

SEQ ID NO: 171997 - protein, 136 aa, Zea Mays
MTQAKSAPGRKEMGRGRSPEPLDFFIWTVEDVGLWLEEINLGGYRQVFEENGVNGEYLESLSMFTTEQILRFIRRCHMKWGDFITLCKELRRIKVPLPRYRSSLKLELIMTPLPNSPASKGSKKSAGHGGRRHASP

SEQ ID NO: 171998 - protein, 135 aa, Zea Mays
MTQAKSAPGRKEMGRGRSPEPLDFFIWTVEDVGLWLEEINLGGYRQVFEENGVNGEYLESLSMFTTEQILRFIRRCHMKWGDFITLCKELRRIKGLYNYCSYLAFHIKDSIYNPFLLCSTCSIYTHFPFQFYLTS

SEQ ID NO: 171999 - protein, 155 aa, Zea Mays
MTQAKSAPGRKEMGRGRSPEPLDFFIWTVEDVGLWLEEINLGGYRQVFEENGVNGEYLESLSMFTTEQILRFIRRCHMKWGDFITLCKELRRIKVLLDFIITCKVVCLKEILVSSQMLLFLAFTKASKLLVFEVSPASKGSKKSAGHGGRRHASP

SEQ ID NO: 172000 - protein, 368 aa, Zea Mays
MLGASRRSLSAAAAARSRVAAGAASAVSADAAASIPPRPASNGAPGVHQQQKRLLSVLVAPKVAGTSNVVSLKLMGGALTGRRYESSAAAVDSTDPPAEKHEYQAEVNRLMDLIVHSLYSNKEVFLRELVSNASDALDKLRYLSVTDPELLKDGPQLDIRIQTDKDNGIITITDSGIGMTKQELIDSLGTIASSGTAKFLKALKESQEAGMDNNLIGQFGVGFYSAFLVSEKVVVSTKSPKSDKQYVWEGQADSGSYTIREEKDPEQLIPRGTRLTLYLKCDDKGFAHPERIQKLLKTYSQFVSFPIYTWEEKGFTKEVEVDEDPAEAQKKGDDSAETKTEPKKKTKTVIEKYWDWELSNETQPIWVR

SEQ ID NO: 172001 - protein, 306 aa, Zea Mays
MFWENFGKFLKLGAMEDKENHKRIAPLLRFFSSQSNNELISLDEYVENMKPEQKDIYFIAADSMSSAINAPFLERLTEKDYEVLLLVDPMDELAIQNLSSYKDKKFVDISKEDLDLGDNNEEREKEIKQEFSQACDWIKNRLGDKVARVDISNRLRSSPCVLVAAKFGWSANMERLMRAQSMGDTASLDFMRSRKVFEINPEHEIIKALNVACRNNPDDPEALKALDVLFETAMISSGFSPDNPAELSGKIYEMMTSAIAGKWSSQPQAQAQPADPIPQHDAPVRSDEPLEAQVVEAEPVEAGQQK

SEQ ID NO: 172002 - protein, 137 aa, Zea Mays
MSSAADEDALSSDKGKKREEDGTDGRSQRQEGVEVADGKVDLGDLYGAAAGWVEARTSCPHIGTMPPAGADDLARVPSPDSPCSRCNHPAENWLCFICKDVLCSRFINKHMLCHHQETGHCLALSFRWAPDQTSDHW

SEQ ID NO: 172003 - protein, 138 aa, Zea Mays
MSSAADEDALSSDKGKKREEDGTDGRSQRQEGVEVADGKVDLGDLYGAAAGWVEARTSCPHIGTMPPAGADDLARVPSPDSPCSRCNHPAENWLCFICKDVLCSRFINKHMLCHHQETGHCLALSFRKRADPMLEAPT

SEQ ID NO: 172004 - protein, 127 aa, Zea Mays
MSSAADEDALSSDKGKKREEDGTDGRSQRQEGVEVADGKVDLGDLYGAAAGWVEARTSCPHIGTMPPAGADDLARVPSPDSPCSRCNHPAENWLCFICKDVLCSRFINKHMLCHHQETGHCLALSFR

SEQ ID NO: 172005 - protein, 127 aa, Zea Mays
MSSAADEDALSSDKGKKREEDGTDGRSQRQEGVEVADGKVDLGDLYGAAAGWVEARTSCPHIGTMPPAGADDLARVPSPDSPCSRCNHPAENWLCFICKDVLCSRFINKHMLCHHQETGHCLALSFS

SEQ ID NO: 172006 - protein, 130 aa, Zea Mays
MEKEHIKMAMLRQEQTFRQQVQKQLMTQTQITQHHQQRCGSSGKTEEEEDFNLELTLATGAGRTRQEKPSTSDSEATMSSSTSAESEQAQRFMPSSNVTNLRFQGESNRHDDHQVMQSAWRYQCLSLKMA

SEQ ID NO: 172007 - protein, 117 aa, Zea Mays
MEKSRVLVVGGTGYIGRRLVRASLAQGHPTLVLLRPEIGLDIDKLQMLLSFKAQGARLVEASLEDHAGLVAAVAQADVVVSAMSGAHIRSHNLSLQHKLVEAIKEAGNIKFVKGLFG

SEQ ID NO: 172008 - protein, 563 aa, Zea Mays
MSRGKCAHRPAYAPRGRECREESEDNQTNRAGCCGNIFLVDRAGTGNLSKCSPDLESKDTALFGLSIPASKNTSSCRPRNSASIAGAAERETHAGYQFSSSGHLSTQGGDTTWLFFLSGAARRVRPILSQVLQEQVPSTRSRLGMFVIEDKGGAIALMLASLLFLGTWPAVLTLLERRGRLPQHTYLDYSITNLLAAVLIALTFGQLGDSRRGMPNFFTQLGQDNWPSVLFAMAGGVVLSVGNLSTQYAWAYVGLSVTEVISSSMVVVIGTTLNYFLDNRINRAEILFPGVACFLVAVILGSAVHSSNAADNEQKLGASTNAYKLGTSGNVEPSKQAVDREERTNLISDAPKDLEESGASGIRQPDKAEAGTAEYLIELEERRSIKVFGSNTFIGLGIVFFAGVCFSLFSPAFNLATNDQWHTLRDGVPHLVVYTAFFYFSISCFVVGVGLNVLFLYRPMAGVPRSSLGAYLRDWDGRQWALLAGLLCGFGNGFQFMGGQAAGYAAADAVQALPLVSTFWGVLLFGEYRKSSRKTYVLLGFMLFMFVAAVAVLMASSGHRSTE

SEQ ID NO: 172009 - protein, 451 aa, Zea Mays
MNRVLALACASSLLTCREVLQEQVPSTRSRLGMFVIEDKGGAIALMLASLLFLGTWPAVLTLLERRGRLPQHTYLDYSITNLLAAVLIALTFGQLGDSRRGMPNFFTQLGQDNWPSVLFAMAGGVVLSVGNLSTQYAWAYVGLSVTEVISSSMVVVIGTTLNYFLDNRINRAEILFPGVACFLVAVILGSAVHSSNAADNEQKLGASTNAYKLGTSGNVEPSKQAVDREERTNLISDAPKDLEESGASGIRQPDKAEAGTAEYLIELEERRSIKVFGSNTFIGLGIVFFAGVCFSLFSPAFNLATNDQWHTLRDGVPHLVVYTAFFYFSISCFVVGVGLNVLFLYRPMAGVPRSSLGAYLRDWDGRQWALLAGLLCGFGNGFQFMGGQAAGYAAADAVQALPLVSTFWGVLLFGEYRKSSRKTYVLLGFMLFMFVAAVAVLMASSGHRSTE

SEQ ID NO: 172010 - protein, 468 aa, Zea Mays
MHVYMSLGRKSPQDRIDHLLGYCCLLLQVLQEQVPSTRSRLGMFVIEDKGGAIALMLASLLFLGTWPAVLTLLERRGRLPQHTYLDYSITNLLAAVLIALTFGQLGDSRRGMPNFFTQLGQDNWPSVLFAMAGGVVLSVGNLSTQYAWAYVGLSVTEVISSSMVVVIGTTLNYFLDNRINRAEILFPGVACFLVAVILGSAVHSSNAADNEQKLGASTNAYKLGTSGNVEPSKQAVDRGVHCLSEEERTNLISDAPKDLEESGASGIRQPDKAEAGTAEYLIELEERRSIKVFGSNTFIGLGIVFFAGVCFSLFSPAFNLATNDQWHTLRDGVPHLVVYTAFFYFSISCFVVGVGLNVLFLYRPMAGVPRSSLGAYLRDWDGRQWALLAGLLCGFGNGFQFMGGQAAGYAAADAVQALPLVSTFWGVLLFGEYRKSSRKTYVLLGFMLFMFVAAVAVLMASSGHRSTE

SEQ ID NO: 172011 - protein, 159 aa, Zea Mays
MCHIFRRLNPNSPKSKAPKTQNPATPRYQSQQQKPMPMQPQAPSMTPAAGITTEQIQKYLDENKQLILAILENQNLGKLAECAQYQSQLQKNLLYLAAIADAQPETAVSRPQEINWEACTTFMALSWWKHVYGNDEKAMCQVSEIALKNRAMLACAHVK

SEQ ID NO: 172012 - protein, 487 aa, Zea Mays
MEDEEAYDLPAFQEFTFEQLRLATSGFAVENIVSEQGEKAPNVVYKGKLDAQRRIAVKRFNRSAWPDPRQFLIPYDEVGKLCLPERNMGAWAGFLYEKGLLTLSIRLLFIYQGTVLVMDQMGYNADRTPFTNISNTIITGTNTNPQSYIVGNQNESNSLGPIVDAREHSFPDDCSTIDFKILSTQGIAGGDEQVNVDPDDDSDWLHRNETFQANNIVASNDLLTTGCVHESVDNTPNHTMKRAAYFSERYKNLTPVERESRRERLRLYNKTPRRKDAKTEYGRKRRALQSDTFNQESIAMEDPTYTPEVGRHRTDATQPYGSSVTTCDWVIPEFVGTPFLPTSIQTEDVGSLTMSTEPLSRKHHVLSGARPAILGSRNQQFEAAISRNVATVTEDTISDAVEGDDWTQPHTTTEIHNNGDDDEGVIFEEDDDDNDGYLFAGQYDETDEDIKIDGFELETGIHKVIDCCILLPCIPTERNVGVHSSCS

SEQ ID NO: 172013 - protein, 562 aa, Zea Mays
MDQMGYNADRTPFTNISNTIITGTNTNPQSYIVGNQNESNSLGPIVDAREHSFPDDCSTIDFKILSTQGIAGGDEQVNVDPDDDSDWLHRNETFQANNIVASNDLLTTGCVHESVDNTPNHTMKRAAYFSERYKNLTPVERESRRERLRLYNKTPRRKDAKTEYGRKRRALQSDTFNQESIAMEDPTYTPEVGRHRTDATQPYGSSVTTCDWVIPEFVGTPFLPTSIQTEDVGSLTMSTEPLSRKHHVLSGARPAILGSRNQQFEAAISRNVATVTEDTISDAVEGDDWTQPHTTTEIHNNGDDDEGVIFEEDDDDNDGYLFAGQYDETDEDIKIDGFELETAQSPLVLKYGEEGKVVERVNLATQQLRLLPKPVVRICGLLALDVSRDQLKVRYSIPRRQHRQDPRTTVPVASAPSPTRKTPPKGEEAEGSPRNKAPRLDDAARTTVPVASAPSPTQKTTLKGGRRRREACRRNLHGPRRLCLWLRDPERGYCFKCNTEVLMLGKCGEDNNEGGLELICDIVSQLPDQPSVESVSLCVEAESLNEEDSSLHRPRAQPVPLS

SEQ ID NO: 172014 - protein, 442 aa, Zea Mays
MEDEEAYDLPAFQEFTFEQLRLATSGFAVENIVSEQGEKAPNVVYKGKLDAQRRIAVKRFNRSAWPDPRQFLIPYDEVGKLCLPERNMGAWAGFLYEKGLLTLSIRLLFIYQGTVLVMDQMGYNADRTPFTNISNTIITGTNTNPQSYIVGNQNESNSLGPIVDAREHSFPDDCSTIDFKILSTQGIAGGDEQVNVDPDDDSDWLHRNETFQANNIVASNDLLTTGCVHESVDNTPNHTMKRAAYFSERYKNLTPVERESRRERLRLYNKTPRRKDAKTEYGRKRRALQSDTFNQESIAMEDPTYTPEVGRHRTDATQPYGSSVTTCDWVIPEFVGTPFLPTSIQTEDVGSLTMSTEPLSRKHHVLSGARPAILGSRNQQFEAAISRNVATVTEDTISDAVEGDDWTQPHTTTEIHNNVQCTNPCQGATLATNVSEGMAEQR

SEQ ID NO: 172015 - protein, 325 aa, Zea Mays
MDQMGYNADRTPFTNISNTIITGTNTNPQSYIVGNQNESNSLGPIVDAREHSFPDDCSTIDFKILSTQGIAGGDEQVNVDPDDDSDWLHRNETFQANNIVASNDLLTTGCVHESVDNTPNHTMKRAAYFSERYKNLTPVERESRRERLRLYNKTPRRKDAKTEYGRKRRALQSDTFNQESIAMEDPTYTPEVGRHRTDATQPYGSSVTTCDWVIPEFVGTPFLPTSIQTEDVGSLTMSTEPLSRKHHVLSGARPAILGSRNQQFEAAISRNVATVTEDTISDAVEGDDWTQPHTTTEIHNNVQCTNPCQGATLATNVSEGMAEQR

SEQ ID NO: 172016 - protein, 226 aa, Zea Mays
MSSSSAHQKASPPIEEEATEHGPFPIEQLQASGIAALDVKKLKDAGLCTVESVAYSPRKDLLQIKGISEAKVDKIIEAASKLVPLGFTSASQLHAQRLEIIQLTTGSRELDQILDGGIETGSITEMYGEFRSGKTQLCHTLCVTCQLPLDQGGGEGKALYIDAEGTFRPQRILQIADRFGLNGADVLENVAYARAYNTDHQSRLLLEAASMMRGAISKADASGEVS

SEQ ID NO: 172017 - protein, 252 aa, Zea Mays
MSSSSAHQKASPPIEEEATEHGPFPIEQLQASGIAALDVKKLKDAGLCTVESVAYSPRKDLLQIKGISEAKVDKIIEAASKLVPLGFTSASQLHAQRLEIIQLTTGSRELDQILDGGIETGSITEMYGEFRSGKTQLCHTLCVTCQLPLDQGGGEGKALYIDAEGTFRPQRILQIADRAYNTDHQSRLLLEAASMMVETRFALMVVDSATALYRTDFSGRGELSARQMHLAKFLRSLQKLADEVTSLSFHRS

SEQ ID NO: 172018 - protein, 268 aa, Zea Mays
MSSSSAHQKASPPIEEEATEHGPFPIEQLQASGIAALDVKKLKDAGLCTVESVAYSPRKDLLQIKGISEAKVDKIIEAASKLVPLGFTSASQLHAQRLEIIQLTTGSRELDQILDGGIETGSITEMYGEFRSGKTQLCHTLCVTCQLPLDQGGGEGKALYIDAEGTFRPQRILQIADRFGLNGADVLENVAYARAYNTDHQSRLLLEAASMMVETRFALMVVDSATALYRTDFSGRGELSARQMHLAKFLRSLQKLADEVTSLSFHRS

SEQ ID NO: 172019 - protein, 416 aa, Zea Mays
MDGPKRHLRVRLRVTARRRGAYGDGAGGALGPRRRKCRMETPVLNSAAKLQRREIGGRQLAARGGGPAAAVPERFRNMQLQEEFDTYDDNANLFVKLQFLKRRSKINEIVAAKDIIFALANSGLCAAFNRVTNKRIGFLNLSPDEVIRSLFYNKNNDSLITVSVYASDNFSTLKCRTTPVEYIRRNQLDAGFPLFESESLKWPGFVEFDDVNGKVLTYSAQDGIYKVFDLKNYYFLYSIPDENVQEIKISPGIMLLIYDRTPSYVPLKILSIEDGKQLKFFKHLLHRNKKIDFIEQFNEKLLVKQEDENFQILDVRSSELIEVNVSKFMTPSAFIFLYENNLFLTFRNRTVAVWNFRGDLVTSFEDHLLWHHDCSTNNIYITSDQDLIISYCKSEAVAEDGTAMARMTEWLTLRSS

SEQ ID NO: 172020 - protein, 409 aa, Zea Mays
MDGPKRHLRVRLRVTARRRGAYGDGAGGALGPRRRKCRMETPVLNSAAKLQRREIGGRQLAARGGGPAAAVPERFRNMQLQEEFDTYDDNANLFVKLQFLKRRSKINEIVAAKDIIFALANSGLCAAFNRVTNKRIGFLNLSPDEVIRSLFYNKNNDSLITVSVYASDNFSTLKCRTTPVEYIRRNQLDAGFPLFESESLKWPGFVEFDDVNGKVLTYSAQDGIYKVFDLKNYYFLYSIPDENVQEIKISPGIMLLIYDRTPSYVPLKILSIEDGKQLKFFKHLLHRNKKIDFIEQFNEKLLVKQEDENFQILDVRSSELIEVNVSKFMTPSAFIFLYENNLFLTFRNRTVAVWNFRGDLVTSFEDHLLWHHDCSTNNIYITSDQDLIISYCKSEAVAEDGTAMARMTE

SEQ ID NO: 172021 - protein, 353 aa, Zea Mays
MREVTNKRIGFLNLSPDEVIRSLFYNKNNDSLITVSVYASDNFSTLKCRTTPVEYIRRNQLDAGFPLFESESLKWPGFVEFDDVNGKVLTYSAQDGIYKVFDLKNYYFLYSIPDENVQEIKISPGIMLLIYDRTPSYVPLKILSIEDGKQLKFFKHLLHRNKKIDFIEQFNEKLLVKQEDENFQILDVRSSELIEVNVSKFMTPSAFIFLYENNLFLTFRNRTVAVWNFRGDLVTSFEDHLLWHHDCSTNNIYITSDQDLIISYCKSEAVAEDGTVGSINMSEIMTGKCIAKITANDPALSAPPRRNGRSKRRSSVWSTVPEALEDVTALFYDEDRNEIYTGNSHGLVHVWSN

SEQ ID NO: 172022 - protein, 227 aa, Zea Mays
MLLIYDRTPSYVPLKILSIEDGKQLKFFKHLLHRNKKIDFIEQFNEKLLVKQEDENFQILDVRSSELIEVNVSKFMTPSAFIFLYENNLFLTFRNRTVAVWNFRGDLVTSFEDHLLWHHDCSTNNIYITSDQDLIISYCKSEAVAEDGTVGSINMSEIMTGKCIAKITANDPALSAPPRRNGRSKRRSSVWSTVPEALEDVTALFYDEDRNEIYTGNSHGLVHVWSN

SEQ ID NO: 172023 - protein, 318 aa, Zea Mays
MPDRNVNSWNMAIAAYSQERSWADAVAVFNRMRLARFQPDPATMAVLMSACAQLGSLSVARQVHGILRKGCVEMNFHVLNSLIDMYAKCGSISQAHLLFVETHLKDTVSYNVMICALARHGHGRDALQVFDEMSKERLQPDAVTLLGVLSACAHAGLVHDGKFYFESMKTNYAIEQSPDHYACMVDLYGRAGLIKEAYELARAMPMEPHAGVWGALINACRKHCNVEVGKVAARELIAIEPRNPGTYVLLANTLARGQQWEFVETVWQSMRGKGIEKTAGCSWLEVENVVHEFLMGESSHPNSDEIYSILEHLYLQLT

SEQ ID NO: 172024 - protein, 209 aa, Zea Mays
MNSPKMELSPWLVFSLGFLAQALVILADTNAQDASGLNGIQDSWNKKPSNWRVGTDPCGDKWNGISCTTSRVTAIRLSSLGLSGSLSGDIQSLSELQTLDFSYNKDLGGPLPASIGSLSNLENLILVGCSFSGEIPKELGQLTKLRFLSLNSNKFSGSIPASLGRLSNLYWFDLADNKLSGGLPVFDGTNPGLDNLTNTKHLVVVHLMA

SEQ ID NO: 172025 - protein, 185 aa, Zea Mays
MEAPPVALFDTLKAAKPFFLLAGPNVIESEEHVLKMAKHIKAITTKLGIPLVFKSSFDKANRTSSKSFRGPGLEEGLKILQKVKATYDLPIVTDVHESHQCEAVGRVADIIQIPAFLCRQTDLLVAAAKTGKIINIKKGQFCAPSRRMAVECRGSRSRRLSTWEGKDGTTGWPARCPSSMVVQKN

SEQ ID NO: 172026 - protein, 175 aa, Zea Mays
MEAPPVALFDTLKAAKPFFLLAGPNVIESEEHVLKMAKHIKAITTKLGIPLVFKSSFDKANRTSSKSFRGPGLEEGLKILQKVKATYDLPIVTDVHESHQCEAVGRVADIIQIPAFLCRQTDLLVAAAKTGKIINIKKGQFCAPSVMVNSTEKVRLAGNPNVMMIYLLTQGTLSG

SEQ ID NO: 172027 - protein, 149 aa, Zea Mays
MQEVMVNSTEKVRLAGNPNVMVCERGTMFGYNDLFVDPRNLEWLRESNCPVVADVTHALQQPAGRKLDGGGVASGGLRELIPCIARTSVAVGVDGIFMEVHDDPLNAPCDGPTQWPLRNLEELLEELIAIARVTKGKKPFKIDLTPFQE

SEQ ID NO: 172028 - protein, 135 aa, Zea Mays
MNRQGKTRLAKYYVALEDSEKHKVEYEVHRLVVNRDPKFTNFVEFRTHKVIYRRYAGLFFSICVDITDNELAYLECIHLFVEILDHFFSNVCELDLVFNFHKVYLILDEFILAGELQETSKRAIIERMGELEKLE

SEQ ID NO: 172029 - protein, 475 aa, Zea Mays
MVVLAASIVSKSGKGLYLLLITNKQSNILEDLDTLRLLSKLVPEYSPSLDEDGICKTAFEIIFAFDEAISLGNKENVTVQQVKQYCEMESHEEKAHKLMMQAKINETKDLMKKRANELDKMRMERGKLDKGGYSSISGPRVIEKTFSDMSISGSGFGSGSGLGGLSTDMDSFASKPKGRPSTAATAPGKGFGMKLGKTQKTNQFLESLKAEGEVILEDVQPSAVSTRSSALPPSDPVTVNIEEKLNVVVKRDGGISNFDVQGTLALQVLNDTDGFIHLQIESQDMPGLSFKTHPNINKDLFNSQQILGAKDPNRPFPSGQNETPLVKWRIQGMDESSLPLSVNCWPSVSGNETYVNIEYEASEMFDLHNVVISIPLPALREAPSVRQIDGEWKFDSRNSVLEWSILLIDQSNRSGSMEFVVPPADPSSFFPISVGFSASSTFSDLKVTGILPLKEGNPPKFSQRARLLTANYQVV

SEQ ID NO: 172030 - protein, 507 aa, Zea Mays
MVVLAASIVSKSGKGLLAAFPKLVGTGKQHTYVETENVRYVYQPIEGLYLLLITNKQSNILEDLDTLRLLSKLVPEYSPSLDEDGICKTAFEIIFAFDEAISLGNKENVTVQQVKQYCEMESHEEKAHKLMMQAKINETKDLMKKRANELDKMRMERGKLDKGGYSSISGPRVIEKTFSDMSISGSGFGSGSGLGGLSTDMDSFASKPKGRPSTAATAPGKGFGMKLGKTQKTNQFLESLKAEGEVILEDVQPSAVSTRSSALPPSDPVTVNIEEKLNVVVKRDGGISNFDVQGTLALQVLNDTDGFIHLQIESQDMPGLSFKTHPNINKDLFNSQQILGAKDPNRPFPSGQNETPLVKWRIQGMDESSLPLSVNCWPSVSGNETYVNIEYEASEMFDLHNVVISIPLPALREAPSVRQIDGEWKFDSRNSVLEWSILLIDQSNRSGSMEFVVPPADPSSFFPISVGFSASSTFSDLKVTGILPLKEGNPPKFSQRARLLTANYQVV

SEQ ID NO: 172031 - protein, 422 aa, Zea Mays
MVVLAASIVSKSGKAISLGNKENVTVQQVKQYCEMESHEEKAHKLMMQAKINETKDLMKKRANELDKMRMERGKLDKGGYSSISGPRVIEKTFSDMSISGSGFGSGSGLGGLSTDMDSFASKPKGRPSTAATAPGKGFGMKLGKTQKTNQFLESLKAEGEVILEDVQPSAVSTRSSALPPSDPVTVNIEEKLNVVVKRDGGISNFDVQGTLALQVLNDTDGFIHLQIESQDMPGLSFKTHPNINKDLFNSQQILGAKDPNRPFPSGQNETPLVKWRIQGMDESSLPLSVNCWPSVSGNETYVNIEYEASEMFDLHNVVISIPLPALREAPSVRQIDGEWKFDSRNSVLEWSILLIDQSNRSGSMEFVVPPADPSSFFPISVGFSASSTFSDLKVTGILPLKEGNPPKFSQRARLLTANYQVV

SEQ ID NO: 172032 - protein, 500 aa, Zea Mays
MSRIRIEGLLAAFPKLVGTGKQHTYVETENVRYVYQPIEGLYLLLITNKQSNILEDLDTLRLLSKLVPEYSPSLDEDGICKTAFEIIFAFDEAISLGNKENVTVQQVKQYCEMESHEEKAHKLMMQAKINETKDLMKKRANELDKMRMERGKLDKGGYSSISGPRVIEKTFSDMSISGSGFGSGSGLGGLSTDMDSFASKPKGRPSTAATAPGKGFGMKLGKTQKTNQFLESLKAEGEVILEDVQPSAVSTRSSALPPSDPVTVNIEEKLNVVVKRDGGISNFDVQGTLALQVLNDTDGFIHLQIESQDMPGLSFKTHPNINKDLFNSQQILGAKDPNRPFPSGQNETPLVKWRIQGMDESSLPLSVNCWPSVSGNETYVNIEYEASEMFDLHNVVISIPLPALREAPSVRQIDGEWKFDSRNSVLEWSILLIDQSNRSGSMEFVVPPADPSSFFPISVGFSASSTFSDLKVTGILPLKEGNPPKFSQRARLLTANYQVV

SEQ ID NO: 172033 - protein, 91 aa, Zea Mays
MKGLLMWKKPFRSTFPPGLRSILQVCVLSREKTLMMTYMHWHANRICEFEFFLHVLLMVSGTTSLTVREIEEPKTVESWLRAPIIMNALIF

SEQ ID NO: 172034 - protein, 483 aa, Zea Mays
MSASSVVPTLLPDERPDILSLLDAAARPLADVVADFLARFPRERRLRVCGALCFLLEDKMMLHPTGRLIAFAILHQSYSPQTANPYIPILLNAACDETSEKSERAFVQLLLTSSSGNSNNEVLNQSALDYINGSVSASQVFLPREQLEKQYCSTGVHSSPQTSSFTAPAVRSAIPDPDVRQSCANSSESSISPPGSKQKSASDDRDTTISVLLEDIPGGRLGPQWIRPTPPRLPLFDGELQWLNPDNNHELLWDYSMCADTNRGAAIRDLIARALKGPLAPIQQEQVVVELAKDPKLVYYCGMTPQKLPDLVEHNPLIAVEVLSKLIHSPDISGYFDVLVHMEMSLHSMEVVNRLTTAVDLPTEFVHEYITNCIQSCQNIKDKYMQNRLVRLVCVFLQSLIRNKIINVQDLFIEVQAFCIEFSRIREAAASEHSPFTNAELLCIGSMVAQSCTGATDVAVAVASGFDRQFKHLNTKYRKLLNS

SEQ ID NO: 172035 - protein, 125 aa, Zea Mays
MRSILLKRLHVWSSTPGSRADSPLLKTHSMASATGVSSSEMAVDHATGPGAVEKPRFDALTPNEMSGGRPQFRKVPMPQHRFAPLKRCWMEIYKPVYEHMKIDIRMNLKVLDWSLPILGFLVLCE

SEQ ID NO: 172036 - protein, 554 aa, Zea Mays
MVPSGQPNPMGPGQQVGASLLRTTSSLLGGAGGDQPGMGMVGAGGVLPSQSSPFSSLVSPRTQYGGGSGNGLLAGASSVASMLSRQHSYGNGGTGAMPGSGAGLPIGGLQHRGGLDGVGDLVGTGGPDSMVFSSSSSAPGSFGNQLGADGLQQQQMQLDAPHDSQNQQQQQQQMPMTYNQQHMMPQTQQQQQPAVKLENGGVLGGVKLEQQMGQPDQSVSTQMQRSSSGGVKLEPQLQALRSLGAVKMEHQSSDPSVVLQQQQHQQQRHMLQLSKQNPQAAATQLSLLQQQQLFLQLQQQQQQHQQQQQILKNLPLQRNQLQQQQQQQQQQQHQHQQLLRQQSLNMRAGKTPAYEPGTCAKRLTHYMYHQQNRPQDNNIEYWRNFVNEYFAPSAKKRWCVSLYGNGRQTTGVFPQDVWHCEICSRKPGRGFETTVEVLPRLCQIKYASGTLEELLYVDMPKESQNSSGQIVLDYTKAIQESVFEQLRVVREGHLRIVFNQDLKIASWEFCARRHEELIPRRSIIPQSTWCCGAKVPVFRSKFSVTLKSGLAKQL

SEQ ID NO: 172037 - protein, 397 aa, Zea Mays
MLYLQKGPNPSPTTEKKTTLGGLSCKFRGRRSTRASTSAVAAAASMSGSNGNGGGASSALYGLYGPNVKPDVVFKEAALNSTLNLQDVQGLVTWVIGDGMLPSWVFVKNKPLIPKVVLLYVPGLDAALYMSQTRLLSSLKELCGNPKPVLASSCIPDDRHTIDALLTCRVKRKLDVKTSNQSSKPDRDGKLSSLDDLGDIPFPVTYYTLSEKDLEDNGYPFNLPGFVPTVSAPSGSLPHKVLALDCEMCITEAGFELTRVTLIDIKGSVVLDRLVKPANPIIDYNTSGITAEMLADVSTSLHEIQEEFVGLVYTETILVGHSLENDLMALQISHGLIIDTAVLYKYNRGSRCKIALRVLTKRFLGREIQNTGSGHDSVEDARAALELAILKIRHGKN

SEQ ID NO: 172038 - protein, 300 aa, Zea Mays
MLPSWVFVKNKPLIPKVVLLYVPGLDAALYMSQTRLLSSLKELCGNPKPVLASSCIPDDRHTIDALLTCRVKRKLDVKTSNQSSKPDRDGKLSSLDDLGDIPFPVTYYTLSEKDLEDNGYPFNLPGFVPTVSAPSGSLPHKVLALDCEMCITEAGFELTRVTLIDIKGSVVLDRLVKPANPIIDYNTRFSGITAEMLADVSTSLHEIQEEFVGLVYTETILVGHSLENDLMALQISHGLIIDTAVLYKYNRGSRCKIALRVLTKRFLGREIQNTGSGHDSVEDARAALELAILKIRHGGN

SEQ ID NO: 172039 - protein, 301 aa, Zea Mays
MLADVSTSLHEIQEEFVGLVYTETILVGHSLENDLMALQISHGLIIDTAVLYKYNRGSRCKIALRVLTKRFLGREIQNTGSGHDSVEDARAALELAILKIRHGPDFGSQPSLSRRKLTSILHESGKKCSLIDDMSILDRYSDTSCNSIAVFSDDDALSRSMKEVKNDKVAFIWTQFSGLISYFRRRAEDPEKLKSCVAEAIALKTCDTKTASKKAKSQICPELKEILCELDKKIKQLYGALPDNSMLIVCTGHGDTPLVRRLRKMLHHEEETIDSRENIVQALGDLQAQAEVALCFCCVKH

SEQ ID NO: 172040 - protein, 152 aa, Zea Mays
MAGVNSSVVGLKPAAAVPQAAAASSPAKRVQLAAPEGRRAALLGLAAVFAVTATTGSAKATIFDEYLEKSKANKELNDKKRLATSGANFARAYTVEFGSCQFPYNFTGCQDLAKQKKSPSSATTSRLSARGRRSSSAAPTFSGSGEAASSSV

SEQ ID NO: 172041 - protein, 62 aa, Zea Mays
MGKPEPGYSICEKTIAHWEWRDGGSSVYPLDTWLDGGVPYSWVARTGSRSGGPVGMVDICKG

SEQ ID NO: 172042 - protein, 489 aa, Zea Mays
MAKPRGAPKLLYPRHRRLLRSPISRCACLFLAFAALLLVSSLHQVVRVDLLRPDPPHQVSNDQLWASNGYGYHACVTPTSRYKVQGKSDSYMTVRSNGGLNQMRTGICDMVAVARLVNATLVIPQLDKRSFWQDTSTFKDIFDEPHFIKALEGDVHIVSDLPGSLQSAPRARKHFTSWSGASYYEEVKELWKNQKVVHIPKSDSRLANNGLPIDIQRLRCRCLYQALRFSDLIEDLGKKLVERLRSHGKYIALHLRYEKDMLAFTGCTYGLSDLEANELRIMRERTSHWKLKDINSTEQRYEGNCPLTPNEVGIFLRAMGYPESTWIYLAAGEIYGGEKYISKLRSYFPNLVSKDMLATEEELAKFSNHASQVAALDYIIAVESDVFIPSHSGNMAKAVEGHRRFLGHRKTITPDRKGLVELFDLLEKGDLTEGPKLSALVTDMHKYRQGTPRKRYGSLPGSKGRARLRTEESFYENPFPECICLTGRS

SEQ ID NO: 172043 - protein, 157 aa, Zea Mays
MLAFTGCTYGLSDLEANELRIMRERTSHWKLKDINSTEQRYEGNCPLTPNEVGIFLRAMGYPESTWIYLAAGEIYGGEKYISKLRSYFPNLVSKDMLATEEELAKFSNHASQVAALDYIIAVESDVFIPSHSGNMAKAVEGHRRFLGHRKTITPDSL

SEQ ID NO: 172044 - protein, 63 aa, Zea Mays
MMRSSPARLRKKNNTRGMKLKLHAHVRFAFFRMTCDLRLVSIPFLSFDVFYNNLTLLLCATSS

SEQ ID NO: 172045 - protein, 323 aa, Zea Mays
MMANGRFQKQALLPPRSPFPVAAPHAELGPIARPRETPHRHGHQRTSSESFLADEQSSSDSFALFEGGSAAGGMYEFDNVLDGMRGGGQVASLAGAPEFFPEPASFGRPWESRQMYRQGGGMPMPGREKNGGRHGPSSSFGEHELGHVPNGVNRKAHGDAAYDQRIVIERKEGLRHSQSETDTKRAKQQYAQRSRVRKLQYIAELERRVQSLQTEGIEVTAEMDFLGQQNIMLDLENKALKQRLESLSQEHLIKRYQQEMFEREIGRLRTLFQQQQQQQHVPQQQAPTHSRSNSRDLDSQFANLSLKHSDPSSGRDAISGLRI

SEQ ID NO: 172046 - protein, 310 aa, Zea Mays
MMANGRFQKQALLPPRSPFPVAAPHAELGPIARPRETPHRHGHQRTSSESFLADEHAAGGMYEFDNVLDGMRGGGQVASLAGAPEFFPEPASFGRPWESRQMYRQGGGMPMPGREKNGGRHGPSSSFGEHELGHVPNGVNRKAHGDAAYDQRIVIERKEGLRHSQSETDTKRAKQQYAQRSRVRKLQYIAELERRVQSLQTEGIEVTAEMDFLGQQNIMLDLENKALKQRLESLSQEHLIKRYQQEMFEREIGRLRTLFQQQQQQQHVPQQQAPTHSRSNSRDLDSQFANLSLKHSDPSSGRDAISGLRI

SEQ ID NO: 172047 - protein, 379 aa, Zea Mays
MHQHLQHQLVSLNFYMKCLDSSQNVDVVEDLAAGATAETSRCSLGVWIDVFWWESCLLTPHEPGVVKRAVNHFLLKSEGDIMVTDVCCVAPDFHARYKSLERTYHYRLLAGPESTSVFEKNSVWHISEDLDIQSMKKACSILVGHHDFSSFRAAGCQANSPVRTLDELSVTEVFPFMFFPSSVERSELELSNVSLVYSRKPDMESSGKGSDGSCTSSVKSDFENGKDFGKRSRHRCFVVTARARSFLYHQVRLMVGLLKSVGTGDLTTADVERILDAKTVTAAPSMAPSCDFVSCWLSKELYAATCQSFQLPVLSTESCMVIENLELSLSVSTRAGFILFLYTELFCMFRNKIGSFILVKFNYPLFKFQLDPPDFVGCT

SEQ ID NO: 172048 - protein, 266 aa, Zea Mays
MTDRNPAAASSKRHCDLSLDDPTPSAKLQRCSEPSEPTPAGKPNGGAATGEESEMMAGARNPRAQRYLVAVEYIGTRFSGSQKQPNQRTVTGVLEEAFHRFIGQPVSIIFSSRTDAGVHALSNVCHVDVERISKRKPGEVLTPHEPGVVKRAVNHFLLKSEGDIMVTDVCCVAPDFHARYKSLERTYHYRLLAGPESTSVFEKNSVWHISEDLDIQSMKKACSILVGHHDFSSFRAAGCQANSPVRTLDELSVTEETRHGIFWERI

SEQ ID NO: 172049 - protein, 386 aa, Zea Mays
MTDRNPAAASSKRHCDLSLDDPTPSAKLQRCSEPSEPTPAGKPNGGAATGEESEMMAGARNPRAQRYLVAVEYIGTRFSGSQKQPNQRTVTGVLEEAFHRFIGQPVSIIFSSRTDAGVHALSNVCHVDVERISKRKPGEVLTPHEPGVVKRAVNHFLLKSEGDIMVTDVCCVAPDFHARYKSLERTYHYRLLAGPESTSVFEKNSVWHISEDLDIQSMKKACSILVGHHDFSSFRAAGCQANSPVRTLDELSVTEVFPFMFFPSSVERSELELSNVSLVYSRKPDMESSGKGSDGSCTSSVKSDFENGKDFGKRSRHRCFVVTARARSFLYHQVRLMVGLLKSVGTGDLTTADVERILDAKTVTAAPSMAPSCGLYLANVKYDLNT

SEQ ID NO: 172050 - protein, 303 aa, Zea Mays
MHQHLQHQLVSLNFYMKCLDSSQNVDVVEDLAAGATAETSRCSLGVWIDVFWWESCLLTPHEPGVVKRAVNHFLLKSEGDIMVTDVCCVAPDFHARYKSLERTYHYRLLAGPESTSVFEKNSVWHISEDLDIQSMKKACSILVGHHDFSSFRAAGCQANSPVRTLDELSVTEVFPFMFFPSSVERSELELSNVSLVYSRKPDMESSGKGSDGSCTSSVKSDFENGKDFGKRSRHRCFVVTARARSFLYHQVRLMVGLLKSVGTGDLTTADVERILDAKTVTAAPSMAPSCGLYLANVKYDLNT

SEQ ID NO: 172051 - protein, 203 aa, Zea Mays
MFFPSSVERSELELSNVSLVYSRKPDMESSGKGSDGSCTSSVKSDFENGKDFGKRSRHRCFVVTARARSFLYHQVRLMVGLLKSVGTGDLTTADVERILDAKTVTAAPSMAPSCDFVSCWLSKELYAATCQSFQLPVLSTESCMVIENLELSLSVSTRAGFILFLYTELFCMFRNKIGSFILVKFNYPLFKFQLDPPDFVGCT

SEQ ID NO: 172052 - protein, 247 aa, Zea Mays
MKKACSILVGHHDFSSFRAAGCQANSPVRTLDELSVTEVFPFMFFPSSVERSELELSNVSLVYSRKPDMESSGKGSDGSCTSSVKSDFENGKDFGKRSRHRCFVVTARARSFLYHQVRLMVGLLKSVGTGDLTTADVERILDAKTVTAAPMASVGGPPDFVSCWLSKELYAATCQSFQLPVLSTESCMVIENLELSLSVSTRAGFILFLYTELFCMFRNKIGSFILVKFNYPLFKFQLDPPDFVGCT

SEQ ID NO: 172053 - protein, 188 aa, Zea Mays
MSAWWDGAEYSVSAEARRELNSFITFGTWTIWKFRNDCVFNEANSPVRTLDELSVTEVFPFMFFPSSVERSELELSNVSLVYSRKPDMESSGKGSDGSCTSSVKSDFENGKDFGKRSRHRCFVVTARARSFLYHQVRLMVGLLKSVGTGDLTTADVERILDAKTVTAAPSMAPSCGLYLANVKYDLNT

SEQ ID NO: 172054 - protein, 169 aa, Zea Mays
MKKACSILVGHHDFSSFRAAGCQANSPVRTLDELSVTEVFPFMFFPSSVERSELELSNVSLVYSRKPDMESSGKGSDGSCTSSVKSDFENGKDFGKRSRHRCFVVTARARSFLYHQVRLMVGLLKSVGTGDLTTADVERILDAKTVTAAPSMAPSCGLYLANVKYDLNT

SEQ ID NO: 172055 - protein, 129 aa, Zea Mays
MTDRNPAAASSKRHCDLSLDDPTPSAKLQRCSEPSEPTPAGKPNGGAATGEESEMMAGARNPRAQRYLVAVEYIGTRFSGSQKQPNQRTVTGVLEEAFHRFIGQPVSIIFSSRTVFMLYQMFVMLMLSG

SEQ ID NO: 172056 - protein, 211 aa, Zea Mays
MTDRNPAAASSKRHCDLSLDDPTPSAKLQRCSEPSEPTPAGKPNGGAATGEESEMMAGARNPRAQRYLVAVEYIGTRFSGSQKQPNQRTVTGVLEEAFHRFIGQPVSIIFSSRTSGMILADSSKVCMRYCIFKTIANIQMLKGSGYLILVLDAGVHALSNVCHVDVERISKRKPGEVVCTQNSFFFLTLITDQALSTSLDTLNLFLFLIFA

SEQ ID NO: 172057 - protein, 144 aa, Zea Mays
MTDRNPAAASSKRHCDLSLDDPTPSAKLQRCSEPSEPTPAGKPNGGAATGEESEMMAGARNPRAQRYLVAVEYIGTRFSGSQKQPNQRTVTGVLEEAFHRFIGQPVSIIFSSRTSGMILADSSKVCMRYCIFKTIANIQMLKGV

SEQ ID NO: 172058 - protein, 300 aa, Zea Mays
MVTDVCCVAPDFHARYKSLERTYHYRLLAGPESTSVFEKNSVWHISEDLDIQSMKKACSILVGHHDFSSFRAAGCQANSPVRTLDELSVTEVFPFMFFPSSVERSELELSNVSLVYSRKPDMESSGKGSDGSCTSSVKSDFENGKDFGKRSRHRCFVVTARARSFLYHQVRLMVGLLKSVGTGDLTTADVERILDAKTVTAAPMASVGGPPDFVSCWLSKELYAATCQSFQLPVLSTESCMVIENLELSLSVSTRAGFILFLYTELFCMFRNKIGSFILVKFNYPLFKFQLDPPDFVGCT

SEQ ID NO: 172059 - protein, 60 aa, Zea Mays
MVIENLELSLSVSTRAGFILFLYTELFCMFRNKIGSFILVKFNYPLFKFQLDPPDFVGCT

SEQ ID NO: 172060 - protein, 306 aa, Zea Mays
MGVGVAIPLRRRLCPPLWARMATPPRLSLAACERPPRVFSTWRHLSPGTLASSAGCLASVFGPQPVEEERMDLVSRWLFQESLSFGDLPSLFYFVYALFSIFCLVLLVVCVVIFSLKIGKRLLHDRRVDGTTYKAVLEDGTTVVVKRLKEVVAGKREFEQQMELIGKVPLCCFACYFTCFANLLSESLTRHIIHISVEMKLYGNKAAGRTPLDWETRVKITLGIARGMAYLHSVGSGVKFIHGNIKSSNILLSQELGACVTEFGLAQLMSTPHVHPLHTEWLTFTPCVSIEGESPTNDPQLEFEQD

SEQ ID NO: 172061 - protein, 338 aa, Zea Mays
MLPSTVGGRGRYLMLGIALALAALLALASASESDHKYKTEEPVKLWVNKVGPYNNPQETYNYYSLPFCQPSENPTHKWGGLGEVLGGNELIDSQLEIKFLKNVEKGFICTLELDAKKVQQFADAIESSYWFEFFIDDLPLWGFVGETDKNSENKHYLYTHKNILVKYNDNRIIHVNLTQESPTLLEDGKKLEMTYSVKWVATDVSFARRFEVYLDYPFFEHQIHWFSIFNSFMMVIFLTGLVSMILMRTLRNDYAKYAREDDDLESLERDVNEESGWKLVHGEGLSSQPSLCAMLLHLLFLDMLVVVFTQGMVAKTGLKRWFLQRPCFRSCVSQLASR

SEQ ID NO: 172062 - protein, 242 aa, Zea Mays
MLMRAAAALPRRSSRPSEPGSSSSRAPAPGASSSRAPAPGASFDPFDVDTDPPSRPELTPEQIGLCVDALAHFEYKGKRRDDLSDEFRSLSVSDIRHMKTISVAHYPVNREKNRYIDVLPFDDTRVQLKSSARPPNNDYINASFIKATENNRVATFISTQGPLVKTFGDFWEMVFEYQCPAIVMLTHFDSIKCDKYLPLGSERRTYGDYDIKITKTRTDSHHLQLRDVKVQNIEARFILYSI

SEQ ID NO: 172063 - protein, 179 aa, Zea Mays
MVFEYQCPAIVMLTHFDSIKCDKYLPLGSERRTYGDYDIKITKTRTDSHHLQLRDVKVQNIETGKVHSVLHIEYPDWPDHGVATNTDAVREIWKRLHHIPTEHPIVIHCSAGIGRTGTYITIHTTIERILLGDKSSYDLAKTVKNFRSQRPGMVQTEEQYKFCYRAIADELKDLLNSDH

SEQ ID NO: 172064 - protein, 296 aa, Zea Mays
MLMRAAAALPRRSSRPSEPGSSSSRAPAPGASSSRAPAPGASFDPFDVDTDPPSRPELTPEQIGLCVDALAHFEYKGKRRDDLSDEFRSLSVSDIRHMKTISVAHYPVNREKNRYIDVLPFDDTRVQLKSSARPPNNDYINASFIKATENNRVATFISTQGPLVKTFGDFWEMVFEYQCPAIVMLTHFDSIKCDKYLPLGSERRTYGDYDIKITKTRTDSHHLQLRDVKVQNIETGKVHSVLHIEYPDWPDHGVATNTDAVREIWKRLHHIPTEHPIVIHCRNRKDRYLHHNPYYN

SEQ ID NO: 172065 - protein, 164 aa, Zea Mays
MPFFMCDKYLPLGSERRTYGDYDIKITKTRTDSHHLQLRDVKVQNIETGKVHSVLHIEYPDWPDHGVATNTDAVREIWKRLHHIPTEHPIVIHCSAGIGRTGTYITIHTTIERILLGDKSSYDLAKTVKNFRSQRPGMVQTEEQYKFCYRAIADELKDLLNSDH

SEQ ID NO: 172066 - protein, 177 aa, Zea Mays
MVLLQRVIAALQKDFPMKCDKYLPLGSERRTYGDYDIKITKTRTDSHHLQLRDVKVQNIETGKVHSVLHIEYPDWPDHGVATNTDAVREIWKRLHHIPTEHPIVIHCSAGIGRTGTYITIHTTIERILLGDKSSYDLAKTVKNFRSQRPGMVQTEEQYKFCYRAIADELKDLLNSDH

SEQ ID NO: 172067 - protein, 132 aa, Zea Mays
MPWWPLATPFQYSSLCSQSASSTCCGTVANQHRDHATPDCVVSSSLAPKDRFTPRYYVAALTDNMSLQKAEVYEQSLIQSDGMKTAESAHFMQIYRSREVGQSYITSIATTLLATLHAMWLVIRIRPQVVCT

SEQ ID NO: 172068 - protein, 213 aa, Zea Mays
MLAMGLTLQLSDFAALLRDRPLAILFGCAAQYTIMPAFGAIISHALGLPPSLSAGLILLGCCPGGTASNVVVVAPILLGSLIQTAFPSVAQFLSPFAPLMAVLASSLLASSVFSENFVRLRSTIADASPVNGMFFGDVGTVIFSVFLLHFAGFFVGYAAAAIGGFKEKQRRAISIEDTEIDESSKSSSGLTLKLMGVKYLGGSTSWLIINIRL

SEQ ID NO: 172069 - protein, 208 aa, Zea Mays
MMTLEWKKSCCLNYWRTQVTCLNYVGGECPGYIWVPFFSTANRGKTHFACDLVHYNAVLCLQTKPRAHCFHLYVRARAMASGKGRKAKCHLHPCALVAVVLPTNDDDQSSRLPHRERFAEPLDEIHSRNHEEQAGREKQISPQLQDHDHRLVFSWDLNHAAYFLKVWIWSTVNRVVGSWLPFYFIFLVWASFSSCSSTATTWSVQLCL

SEQ ID NO: 172070 - protein, 234 aa, Zea Mays
MLAMGLTLQLSDFAALLRDRPLAILFGCAAQYTIMPAFGAIISHALGLPPSLSAGLILLGCCPGGTASNVVVVAPILLGSLIQTAFPSVAQFLSPFAPLMAVLASSLLASSVFSENFVRLRSTIADASPVNGMFFGDVGTVIFSVFLLHFAGFFVGYAAAAIGGFKEKQRRAISIEVGMQNSSLGVVLATAHFSSPLVALPPAVSAVVMNMMGSTLGLVWQYTSTSVSENETSA

SEQ ID NO: 172071 - protein, 596 aa, Zea Mays
MLAMGLTLQLSDFAALLRDRPLAILFGCAAQYTIMPAFGAIISHALGLPPSLSAGLILLGCCPGGTASNVVTLVAQGDVPLSVVMTVCSTLAAVFLTPLLTKILAGAYIPVDAVKLSLSTLQVVVAPILLGSLIQTAFPSVAQFLSPFAPLMAVLASSLLASSVFSENFVRLRSTIADASPVNGMFFGDVGTVIFSVFLLHFAGFFVGYAAAAIGGFKEKQRRAISIEVGMQNSSLGVVLATAHFSSPLVALPPAVSAVVMNMMGSTLGLVWQYTSTSVSENETSDKFSDVVGSPYYVAPEVLQKCYGPESDVWSAGVILYILLCGVPPFWAESEAGIFRQILRGKLDLESEPWPSISDSAKDLVRKMLIRDPTKRFTAHEVLCHPWIVDDAVAPDKPIDSAVLSRLKNFSAMNKLKKMALRVIAESLSEEEIGGLKELFKMIDTDNSGTITYDELKDGLKRVGSDLMEPEIQALMDAADIDNSGTIDYGEFLAATLHMNKLEREESLVSAFAFFDKDGSGFITIDELSQACEQFGLSDVHLEDMIKDVDQNNDGQIDYSEFAAMMRKGNAGGAGRRTMRNSLHVNLGELLKPTET

SEQ ID NO: 172072 - protein, 591 aa, Zea Mays
MYFGGTNFERTAGGPLQITSYDYDAPIDEYGILRQPKWGHLKDLHAAIKLCESALTAVDGSPHYVKLGPMQEAHVYSSENVHTNGSISGNSQFCSAFLANIDEHKYASVWIFGKSYSLPPWSVSILPDCETVAFNTARVGTQTSFFNVESGSPSYSSRHKPRILSLIGVPYLSTTWWTFKEPVGIWGEGIFTAQGILEHLNVTKDISDYLSYTTRVNISEEDVLYWNSKGFLPSLTIDQIRDVARVFVNGKLAGSKVGHWVSLNQPLQLVQGLNELTLLSEIVGLQNYGAFLEKDGAGFRGQVKLTGLSNGDIDLTNSLWTYQIGLKGEFSRIYSPEYQGSAEWSSMQNDDTVSPFTWFKTMFDAPEGNGPVTIDLGSMGKGQAWVNGHLIGRYWSLVAPESGCPSSCNYAGTYSDSKCRSNCGIATQSWYHIPREWLQESGNLLVLFEETGGDPSQISLEVHYTKTICSKISETYYPPLSAWSRAANGRPSVNTVAPELRLQCDDGHVISKITFASYGTPTGGCQNFSVGNCHASTTLDLVVEACEGKNRCAISVTNEVFGDPCRKVVKDLAVEAECSPPSVNQEPRYDI

SEQ ID NO: 172073 - protein, 888 aa, Zea Mays
MTASPYPTTPWLRPPPPMAFLSLLLLLGCLSPSISLAGAEAAGVLRQVVGGDDGGTFFEPFNVTYDHRALILGGKRRMLVSAGLHYPRATPEMWPSLIAKCKEGGVDAIETYVFWNGHEPAKGQYYFEGRFDIVRFAKLVAAEGLFLFLRIGPYACAEWNFGGFPVWLRDVPGIEFRTDNEPYKAEMQIFVTKIVDIMKEEKLYSWQGGPIILQQIENEYGNIQGHYGQAGKRYMLWAAQMALALDTGVPWVMCRQTDAPEQILNTCNAFYCDGFKPNSYNKPTIWTEDWDGWYADWGESLPHRPAQDSAFAVARFYQRGGSLQNYYMYFGGTNFERTAGGPLQITSYDYDAPIDEYGILRQPKWGHLKDLHAAIKLCESALTAVDGSPHYVKLGPMQEAHVYSSENVHTNGSISGNSQFCSAFLANIDEHKYASVWIFGKSYSLPPWSVSILPDCETVAFNTARVGTQTSFFNVESGSPSYSSRHKPRILSLIGVPYLSTTWWTFKEPVGIWGEGIFTAQGILEHLNVTKDISDYLSYTTRVNISEEDVLYWNSKGFLPSLTIDQIRDVARVFVNGKLAGSKVGHWVSLNQPLQLVQGLNELTLLSEIVGLQNYGAFLEKDGAGFRGQVKLTGLSNGDIDLTNSLWTYQIGLKGEFSRIYSPEYQGSAEWSSMQNDDTVSPFTWFKTMFDAPEVAPESGCPSSCNYAGTYSDSKCRSNCGIATQSWYHIPREWLQESGNLLVLFEETGGDPSQISLEVHYTKTICSKISETYYPPLSAWSRAANGRPSVNTVAPELRLQCDDGHVISKITFASYGTPTGGCQNFSVGNCHASTTLDLVVEACEGKNRCAISVTNEVFGDPCRKVVKDLAVEAECSPPSVNQEPRYDI

SEQ ID NO: 172074 - protein, 699 aa, Zea Mays
MTASPYPTTPWLRPPPPMAFLSLLLLLGCLSPSISLAGAEAAGVLRQVVGGDDGGTFFEPFNVTYDHRALILGGKRRMLVSAGLHYPRATPEMWPSLIAKCKEGGVDAIETYVFWNGHEPAKGQYYFEGRFDIVRFAKLVAAEGLFLFLRIGPYACAEWNFGGFPVWLRDVPGIEFRTDNEPYKAEMQIFVTKIVDIMKEEKLYSWQGGPIILQQIENEYGNIQGHYGQAGKRYMLWAAQMALALDTGVPWVMCRQTDAPEQILNTCNAFYCDGFKPNSYNKPTIWTEDWDGWYADWGESLPHRPAQDSAFAVARFYQRGGSLQNYYMYFGGTNFERTAGGPLQITSYDYDAPIDEYGILRQPKWGHLKDLHAAIKLCESALTAVDGSPHYVKLGPMQEAHVYSSENVHTNGSISGNSQFCSAFLANIDEHKYASVWIFGKSYSLPPWSVSILPDCETVAFNTARVGTQTSFFNVESGSPSYSSRHKPRILSLIGVPYLSTTWWTFKEPVGIWGEGIFTAQGILEHLNVTKDISDYLSYTTRVNISEEDVLYWNSKGFLPSLTIDQIRDVARVFVNGKLAGSKVGHWVSLNQPLQLVQGLNELTLLSEIVGLQNYGAFLEKDGAGFRGQVKLTGLSNGDIDLTNSLWTYQIGLKGEFSRIYSPEYQGSAEWSSMQNDDTVSPFTWFKPMHHLPSKAQLV

SEQ ID NO: 172075 - protein, 555 aa, Zea Mays
MQLRHMCFGMGMSRPKASGFPVWLRDVPGIEFRTDNEPYKAEMQIFVTKIVDIMKEEKLYSWQGGPIILQQIENEYGNIQGHYGQAGKRYMLWAAQMALALDTGVPWVMCRQTDAPEQILNTCNAFYCDGFKPNSYNKPTIWTEDWDGWYADWGESLPHRPAQDSAFAVARFYQRGGSLQNYYMYFGGTNFERTAGGPLQITSYDYDAPIDEYGILRQPKWGHLKDLHAAIKLCESALTAVDGSPHYVKLGPMQEAHVYSSENVHTNGSISGNSQFCSAFLANIDEHKYASVWIFGKSYSLPPWSVSILPDCETVAFNTARVGTQTSFFNVESGSPSYSSRHKPRILSLIGVPYLSTTWWTFKEPVGIWGEGIFTAQGILEHLNVTKDISDYLSYTTRVNISEEDVLYWNSKGFLPSLTIDQIRDVARVFVNGKLAGSKVGHWVSLNQPLQLVQGLNELTLLSEIVGLQNYGAFLEKDGAGFRGQVKLTGLSNGDIDLTNSLWTYQIGLKGEFSRIYSPEYQGSAEWSSMQNDDTVSPFTWFKPMHHLPSKAQLV

SEQ ID NO: 172076 - protein, 758 aa, Zea Mays
MSGFPVWLRDVPGIEFRTDNEPYKAEMQIFVTKIVDIMKEEKLYSWQGGPIILQQIENEYGNIQGHYGQAGKRYMLWAAQMALALDTGVPWVMCRQTDAPEQILNTCNAFYCDGFKPNSYNKPTIWTEDWDGWYADWGESLPHRPAQDSAFAVARFYQRGGSLQNYYMYFGGTNFERTAGGPLQITSYDYDAPIDEYGILRQPKWGHLKDLHAAIKLCESALTAVDGSPHYVKLGPMQEAHVYSSENVHTNGSISGNSQFCSAFLANIDEHKYASVWIFGKSYSLPPWSVSILPDCETVAFNTARVGTQTSFFNVESGSPSYSSRHKPRILSLIGVPYLSTTWWTFKEPVGIWGEGIFTAQGILEHLNVTKDISDYLSYTTRVNISEEDVLYWNSKGFLPSLTIDQIRDVARVFVNGKLAGSKVGHWVSLNQPLQLVQGLNELTLLSEIVGLQNYGAFLEKDGAGFRGQVKLTGLSNGDIDLTNSLWTYQIGLKGEFSRIYSPEYQGSAEWSSMQNDDTVSPFTWFKTMFDAPEGNGPVTIDLGSMGKGQAWVNGHLIGRYWSLVAPESGCPSSCNYAGTYSDSKCRSNCGIATQSWYHIPREWLQESGNLLVLFEETGGDPSQISLEVHYTKTICSKISETYYPPLSAWSRAANGRPSVNTVAPELRLQCDDGHVISKITFASYGTPTGGCQNFSVGNCHASTTLDLVVEACEGKNRCAISVTNEVFGDPCRKVVKDLAVEAECSPPSVNQEPRYDI

SEQ ID NO: 172077 - protein, 702 aa, Zea Mays
MQIFVTKIVDIMKEEKLYSWQGGPIILQQIENEYGNIQGHYGQAGKRYMLWAAQMALALDTGVPWVMCRQTDAPEQILNTCNAFYCDGFKPNSYNKPTIWTEDWDGWYADWGESLPHRPAQDSAFAVARFYQRGGSLQNYYMYFGGTNFERTAGGPLQITSYDYDAPIDEYGILRQPKWGHLKDLHAAIKLCESALTAVDGSPHYVKLGPMQEAHVYSSENVHTNGSISGNSQFCSAFLANIDEHKYASVWIFGKSYSLPPWSVSILPDCETVAFNTARVGTQTSFFNVESGSPSYSSRHKPRILSLIGVPYLSTTWWTFKEPVGIWGEGIFTAQGILEHLNVTKDISDYLSYTTRVNISEEDVLYWNSKGFLPSLTIDQIRDVARVFVNGKLAGSKVGHWVSLNQPLQLVQGLNELTLLSEIVGLQNYGAFLEKDGAGFRGQVKLTGLSNGDIDLTNSLWTYQIGLKGEFSRIYSPEYQGSAEWSSMQNDDTVSPFTWFKTMFDAPEVAPESGCPSSCNYAGTYSDSKCRSNCGIATQSWYHIPREWLQESGNLLVLFEETGGDPSQISLEVHYTKTICSKISETYYPPLSAWSRAANGRPSVNTVAPELRLQCDDGHVISKITFASYGTPTGGCQNFSVGNCHASTTLDLVVEACEGKNRCAISVTNEVFGDPCRKVVKDLAVEAECSPPSVNQEPRYDI

SEQ ID NO: 172078 - protein, 433 aa, Zea Mays
MQIFVTKIVDIMKEEKLYSWQGGPIILQQIENEYGNIQGHYGQAGKRYMLWAAQMALALDTGVPWVMCRQTDAPEQILNTCNAFYCDGFKPNSYNKPTIWTEDWDGWYADWGESLPHRPAQDSAFAVARFYQRGGSLQNYYMYFGGTNFERTAGGPLQITSYDYDAPIDEYGILRQPKWGHLKDLHAAIKLCESALTAVDGSPHYVKLGPMQEAHVYSSENVHTNGSISGNSQFCSAFLANIDEHKYASVWIFGKSYSLPPWSVSILPDCETVAFNTARVGTQTSFFNVESGSPSYSSRHKPRILSLIGVPYLSTTWWTFKEPVGIWGEGIFTAQGILEHLNVTKDISDYLSYTTRVNISEEDVLYWNSKGFLPSLTIDQIRDVARVFVNGKLAGSKVGHWVSLNQPLQLVQGLNELTLLSEIVGLQPERKAQ

SEQ ID NO: 172079 - protein, 245 aa, Zea Mays
MQNDDTVSPFTWFKTMFDAPEGNGPVTIDLGSMGKGQAWVNGHLIGRYWSLVAPESGCPSSCNYAGTYSDSKCRSNCGIATQSWYHIPREWLQESGNLLVLFEETGGDPSQISLEVHYTKTICSKISETYYPPLSAWSRAANGRPSVNTVAPELRLQCDDGHVISKITFASYGTPTGGCQNFSVGNCHASTTLDLVVEACEGKNRCAISVTNEVFGDPCRKVVKDLAVEAECSPPSVNQEPRYDI

SEQ ID NO: 172080 - protein, 172 aa, Zea Mays
MAEGKRWRFAMVCSSNMNRSMEAHSQLGRAGLDVESYGTGTHVKLPGPSLHEPNVYDFGTPYGAIYDDLRRKDPELYKRNGLLPMLKRNTSVKLAPQRWQDNAGDGVFDMIMTFEERVFDLVVEDMNNREPRLMKCVLIINMDVKDNHEEAGVGAKLAVELCQKRVNLYMLF

SEQ ID NO: 172081 - protein, 126 aa, Zea Mays
MAEGKRWRFAMVCSSNMNRSMEAHSQLGRAGLDVESYGTGTHVKLPGPSLHEPNVYDFGTPYGAIYDDLRRKDPELYKRNGLLPMLKRNTSVKLAPQRWQDNAGDGVFDMIMTFEERVFDLVVEDE

SEQ ID NO: 172082 - protein, 1917 aa, Zea Mays
MDLAGMKRRELQALCKRHGLPAGGTNADLVGRLDAVLSGPAVVEEEVAGVPARKGCLKQTGGGATEAKKVTFGAEVGKARRLRSRVIWSPVVAKTRGKSARAGTDSAAEDGISADVGADVPVRRSRRNSFNPAEAEEAGEAVAVDRKPKRKNQENDEGVAVIAQARVTRRSNLEWSATVLPPAVEKKRGRQNAAESDVQKSALVEVTARTTRSRSIVPVVVPPTVVENKRRKTGDPQTTVELTMLSDVPRSDFPATRSLRNKIVHVNNSVVDETHTTRQLENKMRPSTRRHQQVASSPEDKGQKIPATSKSPLLRWSRRNYSEANSANSVNIKLAKDSSTAQPLAHHNSHSEDLEKQPAVKEPIKRSTRKSIALAALEKEKDVIEGKNPEAHVRRSTRKSVVQVKDTKSIVEETQYANSEDVAKQPATKGPARGLRRKSVITELHEKEKSLIAEKNMETDEAILTRKPVIPVKNIKAVGEGIQIGKGKDVDKQFVVKQPTRRSSRKSVLPDMLENNSGLLAPKMNAEMNVRRSTRKSVLPDMHNEKQDHHKMARNENLQSGKYQDGEKQQKVKDSIRQSRRSIATVLLEGQNNDEGKKFKNPTRRTTHKSHALNAVEEVSMDHIEVGEEGLKLRKRSRFLLEISSSANVSWKHQNAQISNEKDNTEGSQQASNCTTSKRRSSKKRRTTAPEEVMPFKVANDDIVIMEETKDTLEYNNESSSKVQEICQVNAAREEFSSGPLLVTVAPSDEICTVQSVAVVIPGSESGDDANQSSDKSKQPQEHSVTQTVDDHLSETRSGKLDQSTCITGLVSDNCVVSEDKTLMSEDREEQSPVSGEQRVSLEANANEPEEKNLANVTSTDLHTKSLQHDIDRIAKETDKEVLAQENCNDQPVPAQTDQEIKLNDELADPDVLAQENCNDQPVPAQTDLEIKLHDELADPDVLAQENCNDQPVPAQTDLEMKLNDELADPEVLAQENCNDQPVLAQTDLETKLNDELADLAMESGCSITERNEGLVAHNLDQEGFLEATPECKQECGLPEETVISSKETGSLLCADQSPIGLESLFSQESIVESVGHCALASATTHTENGFDDSKDCHNKSALENVHVPEPCSHNDTKGGIFKNVDCMHTSQRDDRMEGVPEANTDEEHVLSAFLLDANHLNVVINSEEVVCEGEDSKELLHSEDCKASSEKTDVNDGNVYGISDAVVRCALHAPADDNYEIFLGPNTDVPRQVYNDGCSDVKEDRFASKPWTIDIIEDASVKERSNLKDWQLDSKLEGTEIVESGLYFNKDIGNILHSGSIGEITPSGSGLSKDSSVDYRGEVLDGFSMEASLERSSTRGEQNGCRLDAIENPSITLATSGYKHEGALSEEAVYTKKNYAGTCLSNPRELIMELQSHFSKENINESDPHDSLVFPTAENSADEQLVKVHHGSNLSQLGLTDLLDGPIGCSNTDVLCQCDNHKNQSNEDKVEEVEAVSAAKYIESEVVLLPSQERSNLNNEQLNTKLESPNIMGSCLNCDNDVCNTSDNGSVFVIGKRTPSASGLPEDYPKDSDLQQPVLDSFSVVSSFQDNISGKKTVSGVAGSEILSLSLATPDYKHEDGFSEEAVCRTKNYTGTSSVDPRHLDMEGHSIYSEGDTYQGPCQDLGRHEEQESCMSIPMQAKESGGVLRSSHTKGSVTAAQIDLAGDAHLIVSDNAAAKQVFSEEKEETKSISSSDIDILHEKSYSSGHDDHAACAAETQFYHPQKASISDGLHLGPSSLQVESLDALDSDILYVNTGVLEQHHKEGYYEPSVYQITSGICTMSEAEPFEVLETGKDVKTPSKLDEQLNPGLDGDEAEKHSLDCGTDTSPVMSKRTLSSPGSGPCQQYVNESTTSTQSTDNHPNDLPAPRSPEQSACFQNDNDSGSAFVKAAGEEV

SEQ ID NO: 172083 - protein, 2461 aa, Zea Mays
MDLAGMKRRELQALCKRHGLPAGGTNADLVGRLDAVLSGPAVVEEEVAGVPARKGCLKQTGGGATEAKKVTFGAEVGKARRLRSRVIWSPVVAKTRGKSARAGTDSAAEDGISADVGADVPVRRSRRNSFNPAEAEEAGEAVAVDRKPKRKNQENDEGVAVIAQARVTRRSNLEWSATVLPPAVEKKRGRQNAAESDVQKSALVEVTARTTRSRSIVPVVVPPTVVENKRRKTGDPQTTVELTMLSDVPRSDFPATRSLRNKIVHVNNSVVDETHTTRQLENKMRPSTRRHQQVASSPEDKGQKIPATSKSPLLRWSRRNYSEANSANSVNIKLAKDSSTAQPLAHHNSHSEDLEKQPAVKEPIKRSTRKSIALAALEKEKDVIEGKNPEAHVRRSTRKSVVQVKDTKSIVEETQYANSEDVAKQPATKGPARGLRRKSVITELHEKEKSLIAEKNMETDEAILTRKPVIPVKNIKAVGEGIQIGKGKDVDKQFVVKQPTRRSSRKSVLPDMLENNSGLLAPKMNAEMNVRRSTRKSVLPDMHNEKQDHHKMARNENLQSGKYQDGEKQQKVKDSIRQSRRSIATVLLEGQNNDEGKKFKNPTRRTTHKSHALNAVEEVSMDHIEVGEEGLKLRKRSRFLLEISSSANVSWKHQNAQISNEKDNTEGSQQASNCTTSKRRSSKKRRTTAPEEVMPFKVANDDIVIMEETKDTLEYNNESSSKVQEICQVNAAREEFSSGPLLVTVAPSDEICTVQSVAVVIPGSESGDDANQSSDKSKQPQEHSVTQTVDDHLSETRSGKLDQSTCITGLVSDNCVVSEDKTLMSEDREEQSPVSGEQRVSLEANANEPEEKNLANVTSTDLHTKSLQHDIDRIAKETDKEHEEKYGVSPIAVEKCVCREASACESARKPLTVIFSNNLHTKHLQHDCDVLIKETGEEVLAQENCNDQPVPAQTDQEIKLNDELADPDVLAQENCNDQPVPAQTDLEIKLHDELADPDHEEQSPVSGERRVSLEANANEPEEKNLANVISIDLHTKSLQHDNGRIAEETDKEHEEKYAVSPIAVEKSFRQEASAIESAGKPLTVIFSNDLHTKHLQHDCDVLIKETGEEVLAQENCNDQPVPAQTDLEIKLNDELADPDVLAQENCNDQPVPANEPEEKNLANVISTDLHTKTLQHDNDRIAEETDKDHEEQSNVFGERRVSLEANANEPEEKNLANVISTDLHTKTLQHDNDRIAEETDKDHEEQSNVSGERRVSLEANANEPEEKNLANVISTDLHTKTLQHDNDRIAEETDKDVSSLVFPIEEHEEKYAVSPIAVEKSVSREASACESAGKPLTVIFSNDLHTKHLQHDCDVLIKETGEDVLAQENCNDQPVPAQTDLEMKLNDELADPEVLAQENCNDQPVLAQTDLETKLNDELADLAMESGCSITERNEGLVAHNLDQEGFLEATPECKQECGLPEETVISSKETGSLLCADQSPIGLESLFSQESIVESVGHCALASATTHTENGFDDSKDCHNKSALENVHVPEPCSHNDTKGGIFKNVDCMHTSQRDDRMEGVPEANTDEEHVLSAFLLDANHLNVVINSEEVVCEGEDSKELLHSEDCKASSEKTDVNDGNVYGISDAVVRCALHAPADDNYEIFLGPNTDVPRQVYNDGCSDVKEDRFASKPWTIDIIEDASVKERSNLKDWQLDSKLEGTEIVESGLYFNKDIGNILHSGSIGEITPSGSGLSKDSSVDYRGEVLDGFSMEASLERSSTRGEQNGCRLDAIENPSITLATSGYKHEGALSEEAVYTKKNYAGTCLSNPRELIMELQSHFSKENINESDPHDSLVFPTAENSADEQLVKVHHGSNLSQLGLTDLLDGPIGCSNTDVLCQCDNHKNQSNEDKVEEVEAVSAAKYIESEVVLLPSQERSNLNNEQLNTKLESPNIMGSCLNCDNDVCNTSDNGSVFVIGKRTPSASGLPEDYPKDSDLQQPVLDSFSVVSSFQDNISGKKTVSGVAGSEILSLSLATPDYKHEDGFSEEAVCRTKNYTGTSSVDPRHLDMEGHSIYSEGGTEKSNLQDNLAFLSAESGKDEPIICHVEKLVDAHASSDTYQGPCQDLGRHEEQESCMSIPMQAKESGGVLRSSHTKGSVTAAQIDLAGDAHLIVSDNAAAKQVFSEEKEETKSISSSDIDILHEKSYSSGHDDHAACAAETQFYHPQKASISDGLHLGPSSLQVESLDALDSDILYVNTGVLEQHHKEGYYEPSVYQITSGICTMSEAEPFEVLETGKDVKTPSKLDEQLNPGLDGDEAEKHSLDCGTDTSPVMSKRTLSSPGSGPCQQYVNESTTSTQSTDNHPNDLPAPRSPEQSACFQNDNDSGSVGICQSSRRRGIDELCGKLQSFKVSSAVKGSYVAMGAPRPKPGDSTSRSAAALLRNIENTTAVKAGRPPVKPNADGKDSSRRALQPISGRPDSR

SEQ ID NO: 172084 - protein, 2414 aa, Zea Mays
MDLAGMKRRELQALCKRHGLPAGGTNADLVGRLDAVLSGPAVVEEEVAGVPARKGCLKQTGGGATEAKKVTFGAEVGKARRLRSRVIWSPVVAKTRGKSARAGTDSAAEDGISADVGADVPVRRSRRNSFNPAEAEEAGEAVAVDRKPKRKNQENDEGVAVIAQARVTRRSNLEWSATVLPPAVEKKRGRQNAAESDVQKSALVEVTARTTRSRSIVPVVVPPTVVENKRRKTGDPQTTVELTMLSDVPRSDFPATRSLRNKIVHVNNSVVDETHTTRQLENKMRPSTRRHQQVASSPEDKGQKIPATSKSPLLRWSRRNYSEANSANSVNIKLAKDSSTAQPLAHHNSHSEDLEKQPAVKEPIKRSTRKSIALAALEKEKDVIEGKNPEAHVRRSTRKSVVQVKDTKSIVEETQYANSEDVAKQPATKGPARGLRRKSVITELHEKEKSLIAEKNMETDEAILTRKPVIPVKNIKAVGEGIQIGKGKDVDKQFVVKQPTRRSSRKSVLPDMLENNSGLLAPKMNAEMNVRRSTRKSVLPDMHNEKQDHHKMARNENLQSGKYQDGEKQQKVKDSIRQSRRSIATVLLEGQNNDEGKKFKNPTRRTTHKSHALNAVEEVSMDHIEVGEEGLKLRKRSRFLLEISSSANVSWKHQNAQISNEKDNTEGSQQASNCTTSKRRSSKKRRTTAPEEVMPFKVANDDIVIMEETKDTLEYNNESSSKVQEICQVNAAREEFSSGPLLVTVAPSDEICTVQSVAVVIPGSESGDDANQSSDKSKQPQEHSVTQTVDDHLSETRSGKLDQSTCITGLVSDNCVVSEDKTLMSEDREEQSPVSGEQRVSLEANANEPEEKNLANVTSTDLHTKSLQHDIDRIAKETDKEVLAQENCNDQPVPAQTDQEIKLNDELADPDVLAQENCNDQPVPAQTDLEIKLHDELADPDHEEQSPVSGERRVSLEANANEPEEKNLANVISIDLHTKSLQHDNGRIAEETDKDVLSFVFPIEEHEEKYAVSPIAVEKSFRQEASAIESAGKPLTVIFSNDLHTKHLQHDCDVLIKETGEEVLAQENCNDQPVPAQTDLEIKLNDELADPDVLAQENCNDQPVPANEPEEKNLANVISTDLHTKTLQHDNDRIAEETDKDHEEQSNVFGERRVSLEANANEPEEKNLANVISTDLHTKTLQHDNDRIAEETDKDHEEQSNVSGERRVSLEANANEPEEKNLANVISTDLHTKTLQHDNDRIAEETDKDVSSLVFPIEEHEEKYAVSPIAVEKSVSREASACESAGKPLTVIFSNDLHTKHLQHDCDVLIKETGEDVLAQENCNDQPVPAQTDLEMKLNDELADPEVLAQENCNDQPVLAQTDLETKLNDELADLAMESGCSITERNEGLVAHNLDQEGFLEATPECKQECGLPEETVISSKETGSLLCADQSPIGLESLFSQESIVESVGHCALASATTHTENGFDDSKDCHNKSALENVHVPEPCSHNDTKGGIFKNVDCMHTSQRDDRMEGVPEANTDEEHVLSAFLLDANHLNVVINSEEVVCEGEDSKELLHSEDCKASSEKTDVNDGNVYGISDAVVRCALHAPADDNYEIFLGPNTDVPRQVYNDGCSDVKEDRFASKPWTIDIIEDASVKERSNLKDWQLDSKLEGTEIVESGLYFNKDIGNILHSGSIGEITPSGSGLSKDSSVDYRGEVLDGFSMEASLERSSTRGEQNGCRLDAIENPSITLATSGYKHEGALSEEAVYTKKNYAGTCLSNPRELIMELQSHFSKENINESDPHDSLVFPTAENSADEQLVKVHHGSNLSQLGLTDLLDGPIGCSNTDVLCQCDNHKNQSNEDKVEEVEAVSAAKYIESEVVLLPSQERSNLNNEQLNTKLESPNIMGSCLNCDNDVCNTSDNGSVFVIGKRTPSASGLPEDYPKDSDLQQPVLDSFSVVSSFQDNISGKKTVSGVAGSEILSLSLATPDYKHEDGFSEEAVCRTKNYTGTSSVDPRHLDMEGHSIYSEGGTEKSNLQDNLAFLSAESGKDEPIICHVEKLVDAHASSDTYQGPCQDLGRHEEQESCMSIPMQAKESGGVLRSSHTKGSVTAAQIDLAGDAHLIVSDNAAAKQVFSEEKEETKSISSSDIDILHEKSYSSGHDDHAACAAETQFYHPQKASISDGLHLGPSSLQVESLDALDSDILYVNTGVLEQHHKEGYYEPSVYQITSGICTMSEAEPFEVLETGKDVKTPSKLDEQLNPGLDGDEAEKHSLDCGTDTSPVMSKRTLSSPGSGPCQQYVNESTTSTQSTDNHPNDLPAPRSPEQSACFQNDNDSGSVGICQSSRRRGIDELCGKLQSFKVSSAVKGSYVAMGAPRPKPGDSTSRSAAALLRNIENTTAVKAGRPPVKPNADGKDSSRRALQPISGRPDSR

SEQ ID NO: 172085 - protein, 2433 aa, Zea Mays
MDLAGMKRRELQALCKRHGLPAGGTNADLVGRLDAVLSGPAVVEEEVAGVPARKGCLKQTGGGATEAKKVTFGAEVGKARRLRSRVIWSPVVAKTRGKSARAGTDSAAEDGISADVGADVPVRRSRRNSFNPAEAEEAGEAVAVDRKPKRKNQENDEGVAVIAQARVTRRSNLEWSATVLPPAVEKKRGRQNAAESDVQKSALVEVTARTTRSRSIVPVVVPPTVVENKRRKTGDPQTTVELTMLSDVPRSDFPATRSLRNKIVHVNNSVVDETHTTRQLENKMRPSTRRHQQVASSPEDKGQKIPATSKSPLLRWSRRNYSEANSANSVNIKLAKDSSTAQPLAHHNSHSEDLEKQPAVKEPIKRSTRKSIALAALEKEKDVIEGKNPEAHVRRSTRKSVVQVKDTKSIVEETQYANSEDVAKQPATKGPARGLRRKSVITELHEKEKSLIAEKNMETDEAILTRKPVIPVKNIKAVGEGIQIGKGKDVDKQFVVKQPTRRSSRKSVLPDMLENNSGLLAPKMNAEMNVRRSTRKSVLPDMHNEKQDHHKMARNENLQSGKYQDGEKQQKVKDSIRQSRRSIATVLLEGQNNDEGKKFKNPTRRTTHKSHALNAVEEVSMDHIEVGEEGLKLRKRSRFLLEISSSANVSWKHQNAQISNEKDNTEGSQQASNCTTSKRRSSKKRRTTAPEEVMPFKVANDDIVIMEETKDTLEYNNESSSKVQEICQVNAAREEFSSGPLLVTVAPSDEICTVQSVAVVIPGSESGDDANQSSDKSKQPQEHSVTQTVDDHLSETRSGKLDQSTCITGLVSDNCVVSEDKTLMSEDREEQSPVSGEQRVSLEANANEPEEKNLANVTSTDLHTKSLQHDIDRIAKETDKDVLSLVFPIEEHEEKYGVSPIAVEKCVCREASACESARKPLTVIFSNNLHTKHLQHDCDVLIKETGEEVLAQENCNDQPVPAQTDQEIKLNDELADPDVLAQENCNDQPVPAQTDLEIKLHDELADPDHEEQSPVSGERRVSLEANANEPEEKNLANVISIDLHTKSLQHDNGRIAEETDKEHEEKYAVSPIAVEKSFRQEASAIESAGKPLTVIFSNDLHTKHLQHDCDVLIKETGEEVLAQENCNDQPVPAQTDLEIKLNDELADPDVLAQENCNDQPVPANEPEEKNLANVISTDLHTKTLQHDNDRIAEETDKDHEEQSNVFGERRVSLEANANEPEEKNLANVISTDLHTKTLQHDNDRIAEETDKDHEEQSNVSGERRVSLEANANEPEEKNLANVISTDLHTKTLQHDNDRIAEETDKDVSSLVFPIEEHEEKYAVSPIAVEKSVSREASACESAGKPLTVIFSNDLHTKHLQHDCDVLIKETGEDVLAQENCNDQPVPAQTDLEMKLNDELADPEVLAQENCNDQPVLAQTDLETKLNDELADLAMESGCSITERNEGLVAHNLDQEGFLEATPECKQECGLPEETVISSKETGSLLCADQSPIGLESLFSQESIVESVGHCALASATTHTENGFDDSKDCHNKSALENVHVPEPCSHNDTKGGIFKNVDCMHTSQRDDRMEGVPEANTDEEHVLSAFLLDANHLNVVINSEEVVCEGEDSKELLHSEDCKASSEKTDVNDGNVYGISDAVVRCALHAPADDNYEIFLGPNTDVPRQVYNDGCSDVKEDRFASKPWTIDIIEDASVKERSNLKDWQLDSKLEGTEIVESGLYFNKDIGNILHSGSIGEITPSGSGLSKDSSVDYRGEVLDGFSMEASLERSSTRGEQNGCRLDAIENPSITLATSGYKHEGALSEEAVYTKKNYAGTCLSNPRELIMELQSHFSKENINESDPHDSLVFPTAENSADEQLVKVHHGSNLSQLGLTDLLDGPIGCSNTDVLCQCDNHKNQSNEDKVEEVEAVSAAKYIESEVVLLPSQERSNLNNEQLNTKLESPNIMGSCLNCDNDVCNTSDNGSVFVIGKRTPSASGLPEDYPKDSDLQQPVLDSFSVVSSFQDNISGKKTVSGVAGSEILSLSLATPDYKHEDGFSEEAVCRTKNYTGTSSVDPRHLDMEGHSIYSEGDTYQGPCQDLGRHEEQESCMSIPMQAKESGGVLRSSHTKGSVTAAQIDLAGDAHLIVSDNAAAKQVFSEEKEETKSISSSDIDILHEKSYSSGHDDHAACAAETQFYHPQKASISDGLHLGPSSLQVESLDALDSDILYVNTGVLEQHHKEGYYEPSVYQITSGICTMSEAEPFEVLETGKDVKTPSKLDEQLNPGLDGDEAEKHSLDCGTDTSPVMSKRTLSSPGSGPCQQYVNESTTSTQSTDNHPNDLPAPRSPEQSACFQNDNDSGSVGICQSSRRRGIDELCGKLQSFKVSSAVKGSYVAMGAPRPKPGDSTSRSAAALLRNIENTTAVKAGRPPVKPNADGKDSSRRALQPISGRPDSR

SEQ ID NO: 172086 - protein, 2347 aa, Zea Mays
MDLAGMKRRELQALCKRHGLPAGGTNADLVGRLDAVLSGPAVVEEEVAGVPARKGCLKQTGGGATEAKKVTFGAEVGKARRLRSRVIWSPVVAKTRGKSARADVGADVPVRRSRRNSFNPAEAEEAGEAVAVDRKPKRKNQENDEGVAVIAQARVTRRSNLEWSATVLPPAVEKKRGRQNAAESDVQKSALVEVTARTTRSRSIVPVVVPPTVVENKRRKTGDPQTTVELTMLSDVPRSDFPATRSLRNKIVHVNNSVVDETHTTRQLENKMRPSTRRHQQVASSPEDKGQKIPATSKSPLLRWSRRNYSEANSANSVNIKLAKDSSTAQPLAHHNSHSEDLEKQPAVKEPIKRSTRKSIALAALEKEKDVIEGKNPEAHVRRSTRKSVVQVKDTKSIVEETQYANSEDVAKQPATKGPARGLRRKSVITELHEKEKSLIAEKNMETDEAILTRKPVIPVKNIKAVGEGIQIGKGKDVDKQFVVKQPTRRSSRKSVLPDMLENNSGLLAPKMNAEMNVRRSTRKSVLPDMHNEKQDHHKMARNENLQSGKYQDGEKQQKVKDSIRQSRRSIATVLLEGQNNDEGKKFKNPTRRTTHKSHALNAVEEVSMDHIEVGEEGLKLRKRSRFLLEISSSANVSWKHQNAQISNEKDNTEGSQQASNCTTSKRRSSKKRRTTAPEEVMPFKVANDDIVIMEETKDTLEYNNESSSKVQEICQVNAAREEFSSGPLLVTVAPSDEICTVQSVAVVIPGSESGDDANQSSDKSKQPQEHSVTQTVDDHLSETRSGKLDQSTCITGLVSDNCVVSEDKTLMSEDREEQSPVSGEQRVSLEANANEPEEKNLANVTSTDLHTKSLQHDIDRIAKETDKDVLSLVFPIEEHEEKYGVSPIAVEKCVCREASACESARKPLTVIFSNNLHTKHLQHDCDVLIKETGEEVLAQENCNDQPVPAQTDQEIKLNDELADPDVLAQENCNDQPVPAQTDLEIKLHDELADPDHEEQSPVSGERRVSLEANANEPEEKNLANVISIDLHTKSLQHDNGRIAEETDKDVLSFVFPIEEHEEKYAVSPIAVEKSFRQEASAIESAGKPLTVIFSNDLHTKHLQHDCDVLIKETGEEVLAQENCNDQPVPAQTDLEIKLNDELADPDVLAQENCNDQPVPANEPEEKNLANVISTDLHTKTLQHDNDRIAEETDKDHEEQSNVFGERRVSLEANANEPEEKNLANVISTDLHTKTLQHDNDRIAEETDKDHEEQSNVSGERRVSLEANANEPEEKNLANVISTDLHTKTLQHDNDRIAEETDKDVSSLVFPIEEHEEKYAVSPIAVEKSVSREASACESAGKPLTVIFSNDLHTKHLQHDCDVLIKETGEDVLAQENCNDQPVPAQTDLEMKLNDELADPEVLAQENCNDQPVLAQTDLETKLNDELADLAMESGCSITERNEGLVAHNLDQEGFLEATPECKQECGLPEETVISSKETGSLLCADQSPIGLESLFSQESIVESVGHCALASATTHTENGFDDSKDCHNKSALENVHVPEPCSHNDTKGGIFKNVDCMHTSQRDDRMEGVPEANTDEEHVLSAFLLDANHLNVVINSEEVVCEGEDSKELLHSEDCKASSEKTDVNDGNVYGISDAVVRCALHAPADDNYEIFLGPNTDVPRQVYNDGCSDVKEDRFASKPWTIDIIEDASVKERSNLKDWQLDSKLEGTEIVESGLYFNKDIGNILHSGSIGEITPSGSGLSKDSSVDYRGEVLDGFSMEASLERSSTRGEQNGCRLDAIENPSITLATSGYKHEGALSEEAVYTKKNYAGTCLSNPRELIMELQSHFSKENINESDPHDSLVFPTAENSADEQLVKVHHGSNLSQLGLTDLLDGPIGCSNTDVLCQCDNHKNQSNEDKVEEVEAVSAAKYIESEVVLLPSQERSNLNNEQLNTKLESPNIMGSCLNCDNDVCNTSDNGSVFVIGKRTPSASGLPEDYPKDSDLQQPVLDSFSVVSSFQDNISGKKTVSGVAGSEILSLSLATPDYKHEDGFSEEAVCRTKNYTGTSSVDPRHLDMEGHSIYSEGDTYQGPCQDLGRHEEQESCMSIPMQAKESGGVLRSSHTKGSVTAAQIDLAGDAHLIVSDNAAAKQVFSEEKEETKSISSSDIDILHEKSYSSGHDDHAACAAETQFYHPQKASISDGLHLGPSSLQVESLDALDSDILYVNTGVLEQHHKEGYYEPSVYQITSGICTMSEAEPFEVLETGKDVKTPSKLDEQLNPGLDGDEAEKHSLDCGTDTSPVMSKRTLSSPGSGPCQQYVNESTTSTQSTDNHPNDLPAPRSPEQSACFQNDNDSGSAFVKAAGEEV

SEQ ID NO: 172087 - protein, 1092 aa, Zea Mays
MDLAGMKRRELQALCKRHGLPAGGTNADLVGRLDAVLSGPAVVEEEVAGVPARKGCLKQTGGGATEAKKVTFGAEVGKARRLRSRVIWSPVVAKTRGKSARAGTDSAAEDGISADVGADVPVRRSRRNSFNPAEAEEAGEAVAVDRKPKRKNQENDEGVAVIAQARVTRRSNLEWSATVLPPAVEKKRGRQNAAESDVQKSALVEVTARTTRSRSIVPVVVPPTVVENKRRKTGDPQTTVELTMLSDVPRSDFPATRSLRNKIVHVNNSVVDETHTTRQLENKMRPSTRRHQQVASSPEDKGQKIPATSKSPLLRWSRRNYSEANSANSVNIKLAKDSSTAQPLAHHNSHSEDLEKQPAVKEPIKRSTRKSIALAALEKEKDVIEGKNPEAHVRRSTRKSVVQVKDTKSIVEETQYANSEDVAKQPATKGPARGLRRKSVITELHEKEKSLIAEKNMETDEAILTRKPVIPVKNIKAVGEGIQIGKGKDVDKQFVVKQPTRRSSRKSVLPDMLENNSGLLAPKMNAEMNVRRSTRKSVLPDMHNEKQDHHKMARNENLQSGKYQDGEKQQKVKDSIRQSRRSIATVLLEGQNNDEGKKFKNPTRRTTHKSHALNAVEEVSMDHIEVGEEGLKLRKRSRFLLEISSSANVSWKHQNAQISNEKDNTEGSQQASNCTTSKRRSSKKRRTTAPEEVMPFKVANDDIVIMEETKDTLEYNNESSSKVQEICQVNAAREEFSSGPLLVTVAPSDEICTVQSVAVVIPGSESGDDANQSSDKSKQPQEHSVTQTVDDHLSETRSGKLDQSTCITGLVSDNCVVSEDKTLMSEGEGDFVGPKSPNGLSISFIVADREEQSPVSGEQRVSLEANANEPEEKNLANVTSTDLHTKSLQHDIDRIAKETDKDVLSLVFPIEEHEEKYGVSPIAVEKCVCREASACESARKPLTVIFSNNLHTKHLQHDCDVLIKETGEEVLAQENCNDQPVPAQTDQEIKLNDELADPDVLAQENCNDQPVPAQTDLEIKLHDELADPDHEEQSPVSGERRVSLEANANEPEEKNLANVISIDLHTKSLQHDNGRIAEETDKGTTELILYPQ

SEQ ID NO: 172088 - protein, 2233 aa, Zea Mays
MDLAGMKRRELQALCKRHGLPAGGTNADLVGRLDAVLSGPAVVEEEVAGVPARKGCLKQTGGGATEAKKVTFGAEVGKARRLRSRVIWSPVVAKTRGKSARAGTDSAAEDGISADVGADVPVRRSRRNSFNPAEAEEAGEAVAVDRKPKRKNQENDEGVAVIAQARVTRRSNLEWSATVLPPAVEKKRGRQNAAESDVQKSALVEVTARTTRSRSIVPVVVPPTVVENKRRKTGDPQTTVELTMLSDVPRSDFPATRSLRNKIVHVNNSVVDETHTTRQLENKMRPSTRRHQQVASSPEDKGQKIPATSKSPLLRWSRRNYSEANSANSVNIKLAKDSSTAQPLAHHNSHSEDLEKQPAVKEPIKRSTRKSIALAALEKEKDVIEGKNPEAHVRRSTRKSVVQVKDTKSIVEETQYANSEDVAKQPATKGPARGLRRKSVITELHEKEKSLIAEKNMETDEAILTRKPVIPVKNIKAVGEGIQIGKGKDVDKQFVVKQPTRRSSRKSVLPDMLENNSGLLAPKMNAEMNVRRSTRKSVLPDMHNEKQDHHKMARNENLQSGKYQDGEKQQKVKDSIRQSRRSIATVLLEGQNNDEGKKFKNPTRRTTHKSHALNAVEEVSMDHIEVGEEGLKLRKRSRFLLEISSSANVSWKHQNAQISNEKDNTEGSQQASNCTTSKRRSSKKRRTTAPEEVMPFKVANDDIVIMEETKDTLEYNNESSSKVQEICQVNAAREEFSSGPLLVTVAPSDEICTVQSVAVVIPGSESGDDANQSSDKSKQPQEHSVTQTVDDHLSETRSGKLDQSTCITGLVSDNCVVSEDKTLMSEDREEQSPVSGEQRVSLEANANEPEEKNLANVTSTDLHTKSLQHDIDRIAKETDKEVLAQENCNDQPVPAQTDLEIKLNDELADPDVLAQENCNDQPVPANEPEEKNLANVISTDLHTKTLQHDNDRIAEETDKDHEEQSNVFGERRVSLEANANEPEEKNLANVISTDLHTKTLQHDNDRIAEETDKDHEEQSNVSGERRVSLEANANEPEEKNLANVISTDLHTKTLQHDNDRIAEETDKDVSSLVFPIEEHEEKYAVSPIAVEKSVSREASACESAGKPLTVIFSNDLHTKHLQHDCDVLIKETGEDVLAQENCNDQPVPAQTDLEMKLNDELADPEVLAQENCNDQPVLAQTDLETKLNDELADLAMESGCSITERNEGLVAHNLDQEGFLEATPECKQECGLPEETVISSKETGSLLCADQSPIGLESLFSQESIVESVGHCALASATTHTENGFDDSKDCHNKSALENVHVPEPCSHNDTKGGIFKNVDCMHTSQRDDRMEGVPEANTDEEHVLSAFLLDANHLNVVINSEEVVCEGEDSKELLHSEDCKASSEKTDVNDGNVYGISDAVVRCALHAPADDNYEIFLGPNTDVPRQVYNDGCSDVKEDRFASKPWTIDIIEDASVKERSNLKDWQLDSKLEGTEIVESGLYFNKDIGNILHSGSIGEITPSGSGLSKDSSVDYRGEVLDGFSMEASLERSSTRGEQNGCRLDAIENPSITLATSGYKHEGALSEEAVYTKKNYAGTCLSNPRELIMELQSHFSKENINESDPHDSLVFPTAENSADEQLVKVHHGSNLSQLGLTDLLDGPIGCSNTDVLCQCDNHKNQSNEDKVEEVEAVSAAKYIESEVVLLPSQERSNLNNEQLNTKLESPNIMGSCLNCDNDVCNTSDNGSVFVIGKRTPSASGLPEDYPKDSDLQQPVLDSFSVVSSFQDNISGKKTVSGVAGSEILSLSLATPDYKHEDGFSEEAVCRTKNYTGTSSVDPRHLDMEGHSIYSEGGTEKSNLQDNLAFLSAESGKDEPIICHVEKLVDAHASSDTYQGPCQDLGRHEEQESCMSIPMQAKESGGVLRSSHTKGSVTAAQIDLAGDAHLIVSDNAAAKQVFSEEKEETKSISSSDIDILHEKSYSSGHDDHAACAAETQFYHPQKASISDGLHLGPSSLQVESLDALDSDILYVNTGVLEQHHKEGYYEPSVYQITSGICTMSEAEPFEVLETGKDVKTPSKLDEQLNPGLDGDEAEKHSLDCGTDTSPVMSKRTLSSPGSGPCQQYVNESTTSTQSTDNHPNDLPAPRSPEQSACFQNDNDSGSVGICQSSRRRGIDELCGKLQSFKVSSAVKGSYVAMGAPRPKPGDSTSRSAAALLRNIENTTAVKAGRPPVKPNADGKDSSRRALQPISGRPDSR

SEQ ID NO: 172089 - protein, 1421 aa, Zea Mays
MDLAGMKRRELQALCKRHGLPAGGTNADLVGRLDAVLSGPAVVEEEVAGVPARKGCLKQTGGGATEAKKVTFGAEVGKARRLRSRVIWSPVVAKTRGKSARAGTDSAAEDGISADVGADVPVRRSRRNSFNPAEAEEAGEAVAVDRKPKRKNQENDEGVAVIAQARVTRRSNLEWSATVLPPAVEKKRGRQNAAESDVQKSALVEVTARTTRSRSIVPVVVPPTVVENKRRKTGDPQTTVELTMLSDVPRSDFPATRSLRNKIVHVNNSVVDETHTTRQLENKMRPSTRRHQQVASSPEDKGQKIPATSKSPLLRWSRRNYSEANSANSVNIKLAKDSSTAQPLAHHNSHSEDLEKQPAVKEPIKRSTRKSIALAALEKEKDVIEGKNPEAHVRRSTRKSVVQVKDTKSIVEETQYANSEDVAKQPATKGPARGLRRKSVITELHEKEKSLIAEKNMETDEAILTRKPVIPVKNIKAVGEGIQIGKGKDVDKQFVVKQPTRRSSRKSVLPDMLENNSGLLAPKMNAEMNVRRSTRKSVLPDMHNEKQDHHKMARNENLQSGKYQDGEKQQKVKDSIRQSRRSIATVLLEGQNNDEGKKFKNPTRRTTHKSHALNAVEEVSMDHIEVGEEGLKLRKRSRFLLEISSSANVSWKHQNAQISNEKDNTEGSQQASNCTTSKRRSSKKRRTTAPEEVMPFKVANDDIVIMEETKDTLEYNNESSSKVQEICQVNAAREEFSSGPLLVTVAPSDEICTVQSVAVVIPGSESGDDANQSSDKSKQPQEHSVTQTVDDHLSETRSGKLDQSTCITGLVSDNCVVSEDKTLMSEDREEQSPVSGEQRVSLEANANEPEEKNLANVTSTDLHTKSLQHDIDRIAKETDKEVLAQENCNDQPVPAQTDQEIKLNDELADPDVLAQENCNDQPVPAQTDLEIKLHDELADPDHEEQSPVSGERRVSLEANANEPEEKNLANVISIDLHTKSLQHDNGRIAEETDKEHEEKYAVSPIAVEKSFRQEASAIESAGKPLTVIFSNDLHTKHLQHDCDVLIKETGEEVLAQENCNDQPVPAQTDLEIKLNDELADPDVLAQENCNDQPVPANEPEEKNLANVISTDLHTKTLQHDNDRIAEETDKDVSSLVFPIEEHEEKYAVSPIAVEKSVSREASACESAGKPLTVIFSNDLHTKHLQHDCDVLIKETGEDVLAQENCNDQPVPAQTDLEMKLNDELADPEVLAQENCNDQPVLAQTDLETKLNDELADLAMESGCSITERNEGLVAHNLDQEGFLEATPECKQECGLPEETVISSKETGSLLCADQSPIGLESLFSQESIVESVGHCALASATTHTENGFDDSKDCHNKSALENVHVPEPCSHNDTKGGIFKNVDCMHTSQRDDRMEGVPEANTDEEHVLSAFLLDANHLNVH

SEQ ID NO: 172090 - protein, 2059 aa, Zea Mays
MDLAGMKRRELQALCKRHGLPAGGTNADLVGRLDAVLSGPAVVEEEVAGVPARKGCLKQTGGGATEAKKVTFGAEVGKARRLRSRVIWSPVVAKTRGKSARAGTDSAAEDGISADVGADVPVRRSRRNSFNPAEAEEAGEAVAVDRKPKRKNQENDEGVAVIAQARVTRRSNLEWSATVLPPAVEKKRGRQNAAESDVQKSALVEVTARTTRSRSIVPVVVPPTVVENKRRKTGDPQTTVELTMLSDVPRSDFPATRSLRNKIVHVNNSVVDETHTTRQLENKMRPSTRRHQQVASSPEDKGQKIPATSKSPLLRWSRRNYSEANSANSVNIKLAKDSSTAQPLAHHNSHSEDLEKQPAVKEPIKRSTRKSIALAALEKEKDVIEGKNPEAHVRRSTRKSVVQVKDTKSIVEETQYANSEDVAKQPATKGPARGLRRKSVITELHEKEKSLIAEKNMETDEAILTRKPVIPVKNIKAVGEGIQIGKGKDVDKQFVVKQPTRRSSRKSVLPDMLENNSGLLAPKMNAEMNVRRSTRKSVLPDMHNEKQDHHKMARNENLQSGKYQDGEKQQKVKDSIRQSRRSIATVLLEGQNNDEGKKFKNPTRRTTHKSHALNAVEEVSMDHIEVGEEGLKLRKRSRFLLEISSSANVSWKHQNAQISNEKDNTEGSQQASNCTTSKRRSSKKRRTTAPEEVMPFKVANDDIVIMEETKDTLEYNNESSSKVQEICQVNAAREEFSSGPLLVTVAPSDEICTVQSVAVVIPGSESGDDANQSSDKSKQPQEHSVTQTVDDHLSETRSGKLDQSTCITGLVSDNCVVSEDKTLMSEGEGDFVGPKSPNGLSISFIVADREEQSPVSGEQRVSLEANANEPEEKNLANVTSTDLHTKSLQHDIDRIAKETDKDVLSLVFPIEEHEEKYGVSPIAVEKCVCREASACESARKPLTVIFSNNLHTKHLQHDCDVLIKETGEEVLAQENCNDQPVPAQTDQEIKLNDELADPDVLAQENCNDQPVPAQTDLEIKLHDELADPDHEEQSPVSGERRVSLEANANEPEEKNLANVISIDLHTKSLQHDNGRIAEETDKDVLAQENCNDQPVPAQTDLEMKLNDELADPEVLAQENCNDQPVLAQTDLETKLNDELADLAMESGCSITERNEGLVAHNLDQEGFLEATPECKQECGLPEETVISSKETGSLLCADQSPIGLESLFSQESIVESVGHCALASATTHTENGFDDSKDCHNKSALENVHVPEPCSHNDTKGGIFKNVDCMHTSQRDDRMEGVPEANTDEEHVLSAFLLDANHLNVVINSEEVVCEGEDSKELLHSEDCKASSEKTDVNDGNVYGISDAVVRCALHAPADDNYEIFLGPNTDVPRQVYNDGCSDVKEDRFASKPWTIDIIEDASVKERSNLKDWQLDSKLEGTEIVESGLYFNKDIGNILHSGSIGEITPSGSGLSKDSSVDYRGEVLDGFSMEASLERSSTRGEQNGCRLDAIENPSITLATSGYKHEGALSEEAVYTKKNYAGTCLSNPRELIMELQSHFSKENINESDPHDSLVFPTAENSADEQLVKVHHGSNLSQLGLTDLLDGPIGCSNTDVLCQCDNHKNQSNEDKVEEVEAVSAAKYIESEVVLLPSQERSNLNNEQLNTKLESPNIMGSCLNCDNDVCNTSDNGSVFVIGKRTPSASGLPEDYPKDSDLQQPVLDSFSVVSSFQDNISGKKTVSGVAGSEILSLSLATPDYKHEDGFSEEAVCRTKNYTGTSSVDPRHLDMEGHSIYSEGDTYQGPCQDLGRHEEQESCMSIPMQAKESGGVLRSSHTKGSVTAAQIDLAGDAHLIVSDNAAAKQVFSEEKEETKSISSSDIDILHEKSYSSGHDDHAACAAETQFYHPQKASISDGLHLGPSSLQVESLDALDSDILYVNTGVLEQHHKEGYYEPSVYQITSGICTMSEAEPFEVLETGKDVKTPSKLDEQLNPGLDGDEAEKHSLDCGTDTSPVMSKRTLSSPGSGPCQQYVNESTTSTQSTDNHPNDLPAPRSPEQSACFQNDNDSGSAFVKAAGEEV

SEQ ID NO: 172091 - protein, 2484 aa, Zea Mays
MDLAGMKRRELQALCKRHGLPAGGTNADLVGRLDAVLSGPAVVEEEVAGVPARKGCLKQTGGGATEAKKVTFGAEVGKARRLRSRVIWSPVVAKTRGKSARAGTDSAAEDGISADVGADVPVRRSRRNSFNPAEAEEAGEAVAVDRKPKRKNQENDEGVAVIAQARVTRRSNLEWSATVLPPAVEKKRGRQNAAESDVQKSALVEVTARTTRSRSIVPVVVPPTVVENKRRKTGDPQTTVELTMLSDVPRSDFPATRSLRNKIVHVNNSVVDETHTTRQLENKMRPSTRRHQQVASSPEDKGQKIPATSKSPLLRWSRRNYSEANSANSVNIKLAKDSSTAQPLAHHNSHSEDLEKQPAVKEPIKRSTRKSIALAALEKEKDVIEGKNPEAHVRRSTRKSVVQVKDTKSIVEETQYANSEDVAKQPATKGPARGLRRKSVITELHEKEKSLIAEKNMETDEAILTRKPVIPVKNIKAVGEGIQIGKGKDVDKQFVVKQPTRRSSRKSVLPDMLENNSGLLAPKMNAEMNVRRSTRKSVLPDMHNEKQDHHKMARNENLQSGKYQDGEKQQKVKDSIRQSRRSIATVLLEGQNNDEGKKFKNPTRRTTHKSHALNAVEEVSMDHIEVGEEGLKLRKRSRFLLEISSSANVSWKHQNAQISNEKDNTEGSQQASNCTTSKRRSSKKRRTTAPEEVMPFKVANDDIVIMEETKDTLEYNNESSSKVQEICQVNAAREEFSSGPLLVTVAPSDEICTVQSVAVVIPGSESGDDANQSSDKSKQPQEHSVTQTVDDHLSETRSGKLDQSTCITGLVSDNCVVSEDKTLMSEDREEQSPVSGEQRVSLEANANEPEEKNLANVTSTDLHTKSLQHDIDRIAKETDKDVLSLVFPIEEHEEKYGVSPIAVEKCVCREASACESARKPLTVIFSNNLHTKHLQHDCDVLIKETGEEVLAQENCNDQPVPAQTDQEIKLNDELADPDVLAQENCNDQPVPAQTDLEIKLHDELADPDHEEQSPVSGERRVSLEANANEPEEKNLANVISIDLHTKSLQHDNGRIAEETDKEHEEKYAVSPIAVEKSFRQEASAIESAGKPLTVIFSNDLHTKHLQHDCDVLIKETGEEVLAQENCNDQPVPAQTDLEIKLNDELADPDVLAQENCNDQPVPANEPEEKNLANVISTDLHTKTLQHDNDRIAEETDKDHEEQSNVFGERRVSLEANANEPEEKNLANVISTDLHTKTLQHDNDRIAEETDKDHEEQSNVSGERRVSLEANANEPEEKNLANVISTDLHTKTLQHDNDRIAEETDKDVSSLVFPIEEHEEKYAVSPIAVEKSVSREASACESAGKPLTVIFSNDLHTKHLQHDCDVLIKETGEDVLAQENCNDQPVPAQTDLEMKLNDELADPEVLAQENCNDQPVLAQTDLETKLNDELADLAMESGCSITERNEGLVAHNLDQEGFLEATPECKQECGLPEETVISSKETGSLLCADQSPIGLESLFSQESIVESVGHCALASATTHTENGFDDSKDCHNKSALENVHVPEPCSHNDTKGGIFKNVDCMHTSQRDDRMEGVPEANTDEEHVLSAFLLDANHLNVVINSEEVVCEGEDSKELLHSEDCKASSEKTDVNDGNVYGISDAVVRCALHAPADDNYEIFLGPNTDVPRQVYNDGCSDVKEDRFASKPWTIDIIEDASVKERSNLKDWQLDSKLEGTEIVESGLYFNKDIGNILHSGSIGEITPSGSGLSKDSSVDYRGEVLDGFSMEASLERSSTRGEQNGCRLDAIENPSITLATSGYKHEGALSEEAVYTKKNYAGTCLSNPRELIMELQSHFSKENINESDPHDSLVFPTAENSADEQLVKVHHGSNLSQLGLTDLLDGPIGCSNTDVLCQCDNHKNQSNEDKVEEVEAVSAAKYIESEVVLLPSQERSNLNNEQLNTKLESPNIMGSCLNCDNDVCNTSDNGSVFVIGKRTPSASGLPEDYPKDSDLQQPVLDSFSVVSSFQDNISGKKTVSGVAGSEILSLSLATPDYKHEDGFSEEAVCRTKNYTGTSSVDPRHLDMEGHSIYSEGGTEKSNLQDNLAFLSAESGKDEPIICHVEKLVDAHASSDTYQGPCQDLGRHEEQESCMSIPMQAKESGGVLRSSHTKGSVTAAQIDLAGDAHLIVSPFDHVIRQSLYHSDNAAAKQVFSEEKEETKSISSSDIDILHEKSYSSGHDDHAACAAETQFYHPQKASISDGLHLGPSSLQVESLDALDSDILYVNTGVLEQHHKEGYYEPSVYQITSGICTMSEAEPFEVLETGKDVKTPSKLDEQLNPGLDGDEAEKHSLDCGTDTSPVMSKRTLSSPGSGPCQQYVNESTTSTQSTDNHPNDLPAPRSPEQSACFQNDNDSGSVGICQSSRRRGIDELCGKLQSFKVSSAVKGSYVAMGAPRPKPGDSTSRSAAALLRNIENTTAVKAGRPPVKPNADGKDSSRRALQPISGRPDSR

SEQ ID NO: 172092 - protein, 1276 aa, Zea Mays
MYSFPFSEVLAQENCNDQPVPAQTDLEIKLNDELADPDVLAQENCNDQPVPANEPEEKNLANVISTDLHTKTLQHDNDRIAEETDKDHEEQSNVFGERRVSLEANANEPEEKNLANVISTDLHTKTLQHDNDRIAEETDKDHEEQSNVSGERRVSLEANANEPEEKNLANVISTDLHTKTLQHDNDRIAEETDKDVSSLVFPIEEHEEKYAVSPIAVEKSVSREASACESAGKPLTVIFSNDLHTKHLQHDCDVLIKETGEDVLAQENCNDQPVPAQTDLEMKLNDELADPEVLAQENCNDQPVLAQTDLETKLNDELADLAMESGCSITERNEGLVAHNLDQEGFLEATPECKQECGLPEETVISSKETGSLLCADQSPIGLESLFSQESIVESVGHCALASATTHTENGFDDSKDCHNKSALENVHVPEPCSHNDTKGGIFKNVDCMHTSQRDDRMEGVPEANTDEEHVLSAFLLDANHLNVVINSEEVVCEGEDSKELLHSEDCKASSEKTDVNDGNVYGISDAVVRCALHAPADDNYEIFLGPNTDVPRQVYNDGCSDVKEDRFASKPWTIDIIEDASVKERSNLKDWQLDSKLEGTEIVESGLYFNKDIGNILHSGSIGEITPSGSGLSKDSSVDYRGEVLDGFSMEASLERSSTRGEQNGCRLDAIENPSITLATSGYKHEGALSEEAVYTKKNYAGTCLSNPRELIMELQSHFSKENINESDPHDSLVFPTAENSADEQLVKVHHGSNLSQLGLTDLLDGPIGCSNTDVLCQCDNHKNQSNEDKVEEVEAVSAAKYIESEVVLLPSQERSNLNNEQLNTKLESPNIMGSCLNCDNDVCNTSDNGSVFVIGKRTPSASGLPEDYPKDSDLQQPVLDSFSVVSSFQDNISGKKTVSGVAGSEILSLSLATPDYKHEDGFSEEAVCRTKNYTGTSSVDPRHLDMEGHSIYSEGGTEKSNLQDNLAFLSAESGKDEPIICHVEKLVDAHASSDTYQGPCQDLGRHEEQESCMSIPMQAKESGGVLRSSHTKGSVTAAQIDLAGDAHLIVSDNAAAKQVFSEEKEETKSISSSDIDILHEKSYSSGHDDHAACAAETQFYHPQKASISDGLHLGPSSLQVESLDALDSDILYVNTGVLEQHHKEGYYEPSVYQITSGICTMSEAEPFEVLETGKDVKTPSKLDEQLNPGLDGDEAEKHSLDCGTDTSPVMSKRTLSSPGSGPCQQYVNESTTSTQSTDNHPNDLPAPRSPEQSACFQNDNDSGSAFVKAAGEEV

SEQ ID NO: 172093 - protein, 2142 aa, Zea Mays
MDLAGMKRRELQALCKRHGLPAGGTNADLVGRLDAVLSGPAVVEEEVAGVPARKGCLKQTGGGATEAKKVTFGAEVGKARRLRSRVIWSPVVAKTRGKSARADVGADVPVRRSRRNSFNPAEAEEAGEAVAVDRKPKRKNQENDEGVAVIAQARVTRRSNLEWSATVLPPAVEKKRGRQNAAESDVQKSALVEVTARTTRSRSIVPVVVPPTVVENKRRKTGDPQTTVELTMLSDVPRSDFPATRSLRNKIVHVNNSVVDETHTTRQLENKMRPSTRRHQQVASSPEDKGQKIPATSKSPLLRWSRRNYSEANSANSVNIKLAKDSSTAQPLAHHNSHSEDLEKQPAVKEPIKRSTRKSIALAALEKEKDVIEGKNPEAHVRRSTRKSVVQVKDTKSIVEETQYANSEDVAKQPATKGPARGLRRKSVITELHEKEKSLIAEKNMETDEAILTRKPVIPVKNIKAVGEGIQIGKGKDVDKQFVVKQPTRRSSRKSVLPDMLENNSGLLAPKMNAEMNVRRSTRKSVLPDMHNEKQDHHKMARNENLQSGKYQDGEKQQKVKDSIRQSRRSIATVLLEGQNNDEGKKFKNPTRRTTHKSHALNAVEEVSMDHIEVGEEGLKLRKRSRFLLEISSSANVSWKHQNAQISNEKDNTEGSQQASNCTTSKRRSSKKRRTTAPEEVMPFKVANDDIVIMEETKDTLEYNNESSSKVQEICQVNAAREEFSSGPLLVTVAPSDEICTVQSVAVVIPGSESGDDANQSSDKSKQPQEHSVTQTVDDHLSETRSGKLDQSTCITGLVSDNCVVSEDKTLMSEDREEQSPVSGEQRVSLEANANEPEEKNLANVTSTDLHTKSLQHDIDRIAKETDKDVLSLVFPIEEHEEKYGVSPIAVEKCVCREASACESARKPLTVIFSNNLHTKHLQHDCDVLIKETGEEVLAQENCNDQPVPAQTDQEIKLNDELADPDVLAQENCNDQPVPAQTDLEIKLHDELADPDHEEQSPVSGERRVSLEANANEPEEKNLANVISIDLHTKSLQHDNGRIAEETDKDVLAQENCNDQPVPANEPEEKNLANVISTDLHTKTLQHDNDRIAEETDKDVSSLVFPIEEHEEKYAVSPIAVEKSVSREASACESAGKPLTVIFSNDLHTKHLQHDCDVLIKETGEDVLAQENCNDQPVPAQTDLEMKLNDELADPEVLAQENCNDQPVLAQTDLETKLNDELADLAMESGCSITERNEGLVAHNLDQEGFLEATPECKQECGLPEETVISSKETGSLLCADQSPIGLESLFSQESIVESVGHCALASATTHTENGFDDSKDCHNKSALENVHVPEPCSHNDTKGGIFKNVDCMHTSQRDDRMEGVPEANTDEEHVLSAFLLDANHLNVVINSEEVVCEGEDSKELLHSEDCKASSEKTDVNDGNVYGISDAVVRCALHAPADDNYEIFLGPNTDVPRQVYNDGCSDVKEDRFASKPWTIDIIEDASVKERSNLKDWQLDSKLEGTEIVESGLYFNKDIGNILHSGSIGEITPSGSGLSKDSSVDYRGEVLDGFSMEASLERSSTRGEQNGCRLDAIENPSITLATSGYKHEGALSEEAVYTKKNYAGTCLSNPRELIMELQSHFSKENINESDPHDSLVFPTAENSADEQLVKVHHGSNLSQLGLTDLLDGPIGCSNTDVLCQCDNHKNQSNEDKVEEVEAVSAAKYIESEVVLLPSQERSNLNNEQLNTKLESPNIMGSCLNCDNDVCNTSDNGSVFVIGKRTPSASGLPEDYPKDSDLQQPVLDSFSVVSSFQDNISGKKTVSGVAGSEILSLSLATPDYKHEDGFSEEAVCRTKNYTGTSSVDPRHLDMEGHSIYSEGDTYQGPCQDLGRHEEQESCMSIPMQAKESGGVLRSSHTKGSVTAAQIDLAGDAHLIVSDNAAAKQVFSEEKEETKSISSSDIDILHEKSYSSGHDDHAACAAETQFYHPQKASISDGLHLGPSSLQVESLDALDSDILYVNTGVLEQHHKEGYYEPSVYQITSGICTMSEAEPFEVLETGKDVKTPSKLDEQLNPGLDGDEAEKHSLDCGTDTSPVMSKRTLSSPGSGPCQQYVNESTTSTQSTDNHPNDLPAPRSPEQSACFQNDNDSGSAFVKAAGEEV

SEQ ID NO: 172094 - protein, 2320 aa, Zea Mays
MDLAGMKRRELQALCKRHGLPAGGTNADLVGRLDAVLSGPAVVEEEVAGVPARKGCLKQTGGGATEAKKVTFGAEVGKARRLRSRVIWSPVVAKTRGKSARAGTDSAAEDGISADVGADVPVRRSRRNSFNPAEAEEAGEAVAVDRKPKRKNQENDEGVAVIAQARVTRRSNLEWSATVLPPAVEKKRGRQNAAESDVQKSALVEVTARTTRSRSIVPVVVPPTVVENKRRKTGDPQTTVELTMLSDVPRSDFPATRSLRNKIVHVNNSVVDETHTTRQLENKMRPSTRRHQQVASSPEDKGQKIPATSKSPLLRWSRRNYSEANSANSVNIKLAKDSSTAQPLAHHNSHSEDLEKQPAVKEPIKRSTRKSIALAALEKEKDVIEGKNPEAHVRRSTRKSVVQVKDTKSIVEETQYANSEDVAKQPATKGPARGLRRKSVITELHEKEKSLIAEKNMETDEAILTRKPVIPVKNIKAVGEGIQIGKGKDVDKQFVVKQPTRRSSRKSVLPDMLENNSGLLAPKMNAEMNVRRSTRKSVLPDMHNEKQDHHKMARNENLQSGKYQDGEKQQKVKDSIRQSRRSIATVLLEGQNNDEGKKFKNPTRRTTHKSHALNAVEEVSMDHIEVGEEGLKLRKRSRFLLEISSSANVSWKHQNAQISNEKDNTEGSQQASNCTTSKRRSSKKRRTTAPEEVMPFKVANDDIVIMEETKDTLEYNNESSSKVQEICQVNAAREEFSSGPLLVTVAPSDEICTVQSVAVVIPGSESGDDANQSSDKSKQPQEHSVTQTVDDHLSETRSGKLDQSTCITGLVSDNCVVSEDKTLMSEDREEQSPVSGEQRVSLEANANEPEEKNLANVTSTDLHTKSLQHDIDRIAKETDKEVLAQENCNDQPVPAQTDQEIKLNDELADPDVLAQENCNDQPVPAQTDLEIKLHDELADPDHEEQSPVSGERRVSLEANANEPEEKNLANVISIDLHTKSLQHDNGRIAEETDKEHEEKYAVSPIAVEKSFRQEASAIESAGKPLTVIFSNDLHTKHLQHDCDVLIKETGEEVLAQENCNDQPVPAQTDLEIKLNDELADPDVLAQENCNDQPVPANEPEEKNLANVISTDLHTKTLQHDNDRIAEETDKDHEEQSNVFGERRVSLEANANEPEEKNLANVISTDLHTKTLQHDNDRIAEETDKDHEEQSNVSGERRVSLEANANEPEEKNLANVISTDLHTKTLQHDNDRIAEETDKDVSSLVFPIEEHEEKYAVSPIAVEKSVSREASACESAGKPLTVIFSNDLHTKHLQHDCDVLIKETGEDVLAQENCNDQPVPAQTDLEMKLNDELADPEVLAQENCNDQPVLAQTDLETKLNDELADLAMESGCSITERNEGLVAHNLDQEGFLEATPECKQECGLPEETVISSKETGSLLCADQSPIGLESLFSQESIVESVGHCALASATTHTENGFDDSKDCHNKSALENVHVPEPCSHNDTKGGIFKNVDCMHTSQRDDRMEGVPEANTDEEHVLSAFLLDANHLNVVINSEEVVCEGEDSKELLHSEDCKASSEKTDVNDGNVYGISDAVVRCALHAPADDNYEIFLGPNTDVPRQVYNDGCSDVKEDRFASKPWTIDIIEDASVKERSNLKDWQLDSKLEGTEIVESGLYFNKDIGNILHSGSIGEITPSGSGLSKDSSVDYRGEVLDGFSMEASLERSSTRGEQNGCRLDAIENPSITLATSGYKHEGALSEEAVYTKKNYAGTCLSNPRELIMELQSHFSKENINESDPHDSLVFPTAENSADEQLVKVHHGSNLSQLGLTDLLDGPIGCSNTDVLCQCDNHKNQSNEDKVEEVEAVSAAKYIESEVVLLPSQERSNLNNEQLNTKLESPNIMGSCLNCDNDVCNTSDNGSVFVIGKRTPSASGLPEDYPKDSDLQQPVLDSFSVVSSFQDNISGKKTVSGVAGSEILSLSLATPDYKHEDGFSEEAVCRTKNYTGTSSVDPRHLDMEGHSIYSEGGTEKSNLQDNLAFLSAESGKDEPIICHVEKLVDAHASSDTYQGPCQDLGRHEEQESCMSIPMQAKESGGVLRSSHTKGSVTAAQIDLAGDAHLIVSDNAAAKQVFSEEKEETKSISSSDIDILHEKSYSSGHDDHAACAAETQFYHPQKASISDGLHLGPSSLQVESLDALDSDILYVNTGVLEQHHKEGYYEPSVYQITSGICTMSEAEPFEVLETGKDVKTPSKLDEQLNPGLDGDEAEKHSLDCGTDTSPVMSKRTLSSPGSGPCQQYVNESTTSTQSTDNHPNDLPAPRSPEQSACFQNDNDSGSAFVKAAGEEV

SEQ ID NO: 172095 - protein, 2141 aa, Zea Mays
MLSDVPRSDFPATRSLRNKIVHVNNSVVDETHTTRQLENKMRPSTRRHQQVASSPEDKGQKIPATSKSPLLRWSRRNYSEANSANSVNIKLAKDSSTAQPLAHHNSHSEDLEKQPAVKEPIKRSTRKSIALAALEKEKDVIEGKNPEAHVRRSTRKSVVQVKDTKSIVEETQYANSEDVAKQPATKGPARGLRRKSVITELHEKEKSLIAEKNMETDEAILTRKPVIPVKNIKAVGEGIQIGKGKDVDKQFVVKQPTRRSSRKSVLPDMLENNSGLLAPKMNAEMNVRRSTRKSVLPDMHNEKQDHHKMARNENLQSGKYQDGEKQQKVKDSIRQSRRSIATVLLEGQNNDEGKKFKNPTRRTTHKSHALNAVEEVSMDHIEVGEEGLKLRKRSRFLLEISSSANVSWKHQNAQISNEKDNTEGSQQASNCTTSKRRSSKKRRTTAPEEVMPFKVANDDIVIMEETKDTLEYNNESSSKVQEICQVNAAREEFSSGPLLVTVAPSDEICTVQSVAVVIPGSESGDDANQSSDKSKQPQEHSVTQTVDDHLSETRSGKLDQSTCITGLVSDNCVVSEDKTLMSEDREEQSPVSGEQRVSLEANANEPEEKNLANVTSTDLHTKSLQHDIDRIAKETDKDVLSLVFPIEEHEEKYGVSPIAVEKCVCREASACESARKPLTVIFSNNLHTKHLQHDCDVLIKETGEEVLAQENCNDQPVPAQTDQEIKLNDELADPDVLAQENCNDQPVPAQTDLEIKLHDELADPDHEEQSPVSGERRVSLEANANEPEEKNLANVISIDLHTKSLQHDNGRIAEETDKDVLAQENCNDQPVPANEPEEKNLANVISTDLHTKTLQHDNDRIAEETDKDHEEQSNVFGERRVSLEANANEPEEKNLANVISTDLHTKTLQHDNDRIAEETDKDHEEQSNVSGERRVSLEANANEPEEKNLANVISTDLHTKTLQHDNDRIAEETDKDVSSLVFPIEEHEEKYAVSPIAVEKSVSREASACESAGKPLTVIFSNDLHTKHLQHDCDVLIKETGEDVLAQENCNDQPVPAQTDLEMKLNDELADPEVLAQENCNDQPVLAQTDLETKLNDELADLAMESGCSITERNEGLVAHNLDQEGFLEATPECKQECGLPEETVISSKETGSLLCADQSPIGLESLFSQESIVESVGHCALASATTHTENGFDDSKDCHNKSALENVHVPEPCSHNDTKGGIFKNVDCMHTSQRDDRMEGVPEANTDEEHVLSAFLLDANHLNVVINSEEVVCEGEDSKELLHSEDCKASSEKTDVNDGNVYGISDAVVRCALHAPADDNYEIFLGPNTDVPRQVYNDGCSDVKEDRFASKPWTIDIIEDASVKERSNLKDWQLDSKLEGTEIVESGLYFNKDIGNILHSGSIGEITPSGSGLSKDSSVDYRGEVLDGFSMEASLERSSTRGEQNGCRLDAIENPSITLATSGYKHEGALSEEAVYTKKNYAGTCLSNPRELIMELQSHFSKENINESDPHDSLVFPTAENSADEQLVKVHHGSNLSQLGLTDLLDGPIGCSNTDVLCQCDNHKNQSNEDKVEEVEAVSAAKYIESEVVLLPSQERSNLNNEQLNTKLESPNIMGSCLNCDNDVCNTSDNGSVFVIGKRTPSASGLPEDYPKDSDLQQPVLDSFSVVSSFQDNISGKKTVSGVAGSEILSLSLATPDYKHEDGFSEEAVCRTKNYTGTSSVDPRHLDMEGHSIYSEGGTEKSNLQDNLAFLSAESGKDEPIICHVEKLVDAHASSDTYQGPCQDLGRHEEQESCMSIPMQAKESGGVLRSSHTKGSVTAAQIDLAGDAHLIVSDNAAAKQVFSEEKEETKSISSSDIDILHEKSYSSGHDDHAACAAETQFYHPQKASISDGLHLGPSSLQVESLDALDSDILYVNTGVLEQHHKEGYYEPSVYQITSGICTMSEAEPFEVLETGKDVKTPSKLDEQLNPGLDGDEAEKHSLDCGTDTSPVMSKRTLSSPGSGPCQQYVNESTTSTQSTDNHPNDLPAPRSPEQSACFQNDNDSGSVGICQSSRRRGIDELCGKLQSFKVSSAVKGSYVAMGAPRPKPGDSTSRSAAALLRNIENTTAVKAGRPPVKPNADGKDSSRRALQPISGRPDSR

SEQ ID NO: 172096 - protein, 1618 aa, Zea Mays
MEETKDTLEYNNESSSKVQEICQVNAAREEFSSGPLLVTVAPSDEICTVQSVAVVIPGSESGDDANQSSDKSKQPQEHSVTQTVDDHLSETRSGKLDQSTCITGLVSDNCVVSEDKTLMSEGEGDFVGPKSPNGLSISFIVADREEQSPVSGEQRVSLEANANEPEEKNLANVTSTDLHTKSLQHDIDRIAKETDKDVLSLVFPIEEHEEKYGVSPIAVEKCVCREASACESARKPLTVIFSNNLHTKHLQHDCDVLIKETGEEVLAQENCNDQPVPAQTDQEIKLNDELADPDVLAQENCNDQPVPAQTDLEIKLHDELADPDHEEQSPVSGERRVSLEANANEPEEKNLANVISIDLHTKSLQHDNGRIAEETDKDVLSFVFPIEEHEEKYAVSPIAVEKSFRQEASAIESAGKPLTVIFSNDLHTKHLQHDCDVLIKETGEEVLAQENCNDQPVPAQTDLEIKLNDELADPDVLAQENCNDQPVPANEPEEKNLANVISTDLHTKTLQHDNDRIAEETDKDVSSLVFPIEEHEEKYAVSPIAVEKSVSREASACESAGKPLTVIFSNDLHTKHLQHDCDVLIKETGEDVLAQENCNDQPVPAQTDLEMKLNDELADPEVLAQENCNDQPVLAQTDLETKLNDELADLAMESGCSITERNEGLVAHNLDQEGFLEATPECKQECGLPEETVISSKETGSLLCADQSPIGLESLFSQESIVESVGHCALASATTHTENGFDDSKDCHNKSALENVHVPEPCSHNDTKGGIFKNVDCMHTSQRDDRMEGVPEANTDEEHVLSAFLLDANHLNVVINSEEVVCEGEDSKELLHSEDCKASSEKTDVNDGNVYGISDAVVRCALHAPADDNYEIFLGPNTDVPRQVYNDGCSDVKEDRFASKPWTIDIIEDASVKERSNLKDWQLDSKLEGTEIVESGLYFNKDIGNILHSGSIGEITPSGSGLSKDSSVDYRGEVLDGFSMEASLERSSTRGEQNGCRLDAIENPSITLATSGYKHEGALSEEAVYTKKNYAGTCLSNPRELIMELQSHFSKENINESDPHDSLVFPTAENSADEQLVKVHHGSNLSQLGLTDLLDGPIGCSNTDVLCQCDNHKNQSNEDKVEEVEAVSAAKYIESEVVLLPSQERSNLNNEQLNTKLESPNIMGSCLNCDNDVCNTSDNGSVFVIGKRTPSASGLPEDYPKDSDLQQPVLDSFSVVSSFQDNISGKKTVSGVAGSEILSLSLATPDYKHEDGFSEEAVCRTKNYTGTSSVDPRHLDMEGHSIYSEGGTEKSNLQDNLAFLSAESGKDEPIICHVEKLVDAHASSDTYQGPCQDLGRHEEQESCMSIPMQAKESGGVLRSSHTKGSVTAAQIDLAGDAHLIVSPFDHVIRQSLYHSDNAAAKQVFSEEKEETKSISSSDIDILHEKSYSSGHDDHAACAAETQFYHPQKASISDGLHLGPSSLQVESLDALDSDILYVNTGVLEQHHKEGYYEPSVYQITSGICTMSEAEPFEVLETGKDVKTPSKLDEQLNPGLDGDEAEKHSLDCGTDTSPVMSKRTLSSPGSGPCQQYVNESTTSTQSTDNHPNDLPAPRSPEQSACFQNDNDSGSAFVKAAGEEV

SEQ ID NO: 172097 - protein, 1446 aa, Zea Mays
MYSFPFSEVLAQENCNDQPVPAQTDQEIKLNDELADPDVLAQENCNDQPVPAQTDLEIKLHDELADPDHEEQSPVSGERRVSLEANANEPEEKNLANVISIDLHTKSLQHDNGRIAEETDKDVLSFVFPIEEHEEKYAVSPIAVEKSFRQEASAIESAGKPLTVIFSNDLHTKHLQHDCDVLIKETGEEVLAQENCNDQPVPAQTDLEIKLNDELADPDVLAQENCNDQPVPANEPEEKNLANVISTDLHTKTLQHDNDRIAEETDKDVSSLVFPIEEHEEKYAVSPIAVEKSVSREASACESAGKPLTVIFSNDLHTKHLQHDCDVLIKETGEDVLAQENCNDQPVPAQTDLEMKLNDELADPEVLAQENCNDQPVLAQTDLETKLNDELADLAMESGCSITERNEGLVAHNLDQEGFLEATPECKQECGLPEETVISSKETGSLLCADQSPIGLESLFSQESIVESVGHCALASATTHTENGFDDSKDCHNKSALENVHVPEPCSHNDTKGGIFKNVDCMHTSQRDDRMEGVPEANTDEEHVLSAFLLDANHLNVVINSEEVVCEGEDSKELLHSEDCKASSEKTDVNDGNVYGISDAVVRCALHAPADDNYEIFLGPNTDVPRQVYNDGCSDVKEDRFASKPWTIDIIEDASVKERSNLKDWQLDSKLEGTEIVESGLYFNKDIGNILHSGSIGEITPSGSGLSKDSSVDYRGEVLDGFSMEASLERSSTRGEQNGCRLDAIENPSITLATSGYKHEGALSEEAVYTKKNYAGTCLSNPRELIMELQSHFSKENINESDPHDSLVFPTAENSADEQLVKVHHGSNLSQLGLTDLLDGPIGCSNTDVLCQCDNHKNQSNEDKVEEVEAVSAAKYIESEVVLLPSQERSNLNNEQLNTKLESPNIMGSCLNCDNDVCNTSDNGSVFVIGKRTPSASGLPEDYPKDSDLQQPVLDSFSVVSSFQDNISGKKTVSGVAGSEILSLSLATPDYKHEDGFSEEAVCRTKNYTGTSSVDPRHLDMEGHSIYSEGGTEKSNLQDNLAFLSAESGKDEPIICHVEKLVDAHASSDTYQGPCQDLGRHEEQESCMSIPMQAKESGGVLRSSHTKGSVTAAQIDLAGDAHLIVSPFDHVIRQSLYHSDNAAAKQVFSEEKEETKSISSSDIDILHEKSYSSGHDDHAACAAETQFYHPQKASISDGLHLGPSSLQVESLDALDSDILYVNTGVLEQHHKEGYYEPSVYQITSGICTMSEAEPFEVLETGKDVKTPSKLDEQLNPGLDGDEAEKHSLDCGTDTSPVMSKRTLSSPGSGPCQQYVNESTTSTQSTDNHPNDLPAPRSPEQSACFQNDNDSGSVGICQSSRRRGIDELCGKLQSFKVSSAVKGSYVAMGAPRPKPGDSTSRSAAALLRNIENTTAVKAGRPPVKPNADGKDSSRRALQPISGRPDSR

SEQ ID NO: 172098 - protein, 957 aa, Zea Mays
MKLNDELADPEVLAQENCNDQPVLAQTDLETKLNDELADLAMESGCSITERNEGLVAHNLDQEGFLEATPECKQECGLPEETVISSKETGSLLCADQSPIGLESLFSQESIVESVGHCALASATTHTENGFDDSKDCHNKSALENVHVPEPCSHNDTKGGIFKNVDCMHTSQRDDRMEGVPEANTDEEHVLSAFLLDANHLNVVINSEEVVCEGEDSKELLHSEDCKASSEKTDVNDGNVYGISDAVVRCALHAPADDNYEIFLGPNTDVPRQVYNDGCSDVKEDRFASKPWTIDIIEDASVKERSNLKDWQLDSKLEGTEIVESGLYFNKDIGNILHSGSIGEITPSGSGLSKDSSVDYRGEVLDGFSMEASLERSSTRGEQNGCRLDAIENPSITLATSGYKHEGALSEEAVYTKKNYAGTCLSNPRELIMELQSHFSKENINESDPHDSLVFPTAENSADEQLVKVHHGSNLSQLGLTDLLDGPIGCSNTDVLCQCDNHKNQSNEDKVEEVEAVSAAKYIESEVVLLPSQERSNLNNEQLNTKLESPNIMGSCLNCDNDVCNTSDNGSVFVIGKRTPSASGLPEDYPKDSDLQQPVLDSFSVVSSFQDNISGKKTVSGVAGSEILSLSLATPDYKHEDGFSEEAVCRTKNYTGTSSVDPRHLDMEGHSIYSEGDTYQGPCQDLGRHEEQESCMSIPMQAKESGGVLRSSHTKGSVTAAQIDLAGDAHLIVSDNAAAKQVFSEEKEETKSISSSDIDILHEKSYSSGHDDHAACAAETQFYHPQKASISDGLHLGPSSLQVESLDALDSDILYVNTGVLEQHHKEGYYEPSVYQITSGICTMSEAEPFEVLETGKDVKTPSKLDEQLNPGLDGDEAEKHSLDCGTDTSPVMSKRTLSSPGSGPCQQYVNESTTSTQSTDNHPNDLPAPRSPEQSACFQNDNDSGSAFVKAAGEEV

SEQ ID NO: 172099 - protein, 737 aa, Zea Mays
MMMTEEDKRGKEIEKGGYMDLMMEQIRNSQGESVSEVGNEMQSGLCTQNETMNKNLLVAPCETYTQMILEEDSTLANADISKRQQDVLTGYVSNQGGYMDLMMEQIYNSQGESVSEVGNEMQSGLCTQNETMNNNLLEAPCEAYTQMILEEDSPLANADISKETFGECNEADTSKYGETIYHRDLFEIMHVQQLTECAQNDDGKETKTSSASANFDDAEAETTNAGDEELTEDQIDAFIMSEQIATTEGNNASIDSKYTPQVGMEFKTRGDAEHFLFFYGFLAGFKPAITHTFRTSNKKRSNEVTKVELKCNKHGKTKKTNQQEQDICIEKKRCEKGPKRNTNVQVKTDCRVFMVIKEHGQKWVIDKLDLEHNHELRPADNNNMFSGHKYMTDMEKGIIRTLNYNNIPTRKMIAILSYLRGGMPEDFKDIVNYSLTVSEFERDWKQMVEDYHLENNKYFSKMWETRARFIPVYFKNDFFPFLQSTGRSEGTNSRFKDNVTSTYSVISFLREYQRIVEQVNVSEEYEDNESNRKRPKELMFGYTIERQAQEVYNRNIFKKFQFQLQSTPRLSYNRTSNLHTFEVYPKSNQEEKPHKIRRYLVMANLTYGMEEFTCVCGKFDKDGILCSHILKVIIEEGLTKIPEQYILNRWKKKHKQIDGPLLRASMPTHPVLRHNLLSRKAALLTSATAKTEKTMEFICEELDKLQEKVCQMLSSEEDVIAGPSTGREKEDNAAKHT

SEQ ID NO: 172100 - protein, 657 aa, Zea Mays
MMMTEEDKRGKEIEKGGYMDLMMEQIYNSQGESVSEVGNEMQSGLCTQNETMNNNLLEAPCEAYTQMILEEDSPLANADISKETFGECNEADTSKYGETIYHRDLFEIMHVQQLTECAQNDDGKETKTSSASANFDDAEAETTNAGDEELTEDQIDAFIMSEQIATTEGNNASIDSKYTPQVGMEFKTRGDAEHFLFFYGFLAGFKPAITHTFRTSNKKRSNEVTKVELKCNKHGKTKKTNQQEQDICIEKKRCEKGPKRNTNVQVKTDCRVFMVIKEHGQKWVIDKLDLEHNHELRPADNNNMFSGHKYMTDMEKGIIRTLNYNNIPTRKMIAILSYLRGGMPEDFKDIVNYSLTVSEFERDWKQMVEDYHLENNKYFSKMWETRARFIPVYFKNDFFPFLQSTGRSEGTNSRFKDNVTSTYSVISFLREYQRIVEQVNVSEEYEDNESNRKRPKELMFGYTIERQAQEVYNRNIFKKFQFQLQSTPRLSYNRTSNLHTFEVYPKSNQEEKPHKIRRYLVMANLTYGMEEFTCVCGKFDKDGILCSHILKVIIEEGLTKIPEQYILNRWKKKHKQIDGPLLRASMPTHPVLRHNLLSRKAALLTSATAKTEKTMEFICEELDKLQEKVCQMLSSEEDVIAGPSTGREKEDNAAKHT

SEQ ID NO: 172101 - protein, 279 aa, Zea Mays
MHRVGSAGNTAGSTRPRKEKRFTYVLNDADDKKHCAGINCMAYLNGSTFSTSDYLFSGSRDGTLKRWELNNGDASFSATFESHVDWVNDAIIVGEKLVSCSSDTTIKVWNCFSDGACTRTFRQHSDYVICLAAAEKNSNIVASGGLGGEVFVWDLDAALAPVAKSVDAKEDEVPNGNSGPPLTTLCSVNSSSNIASSNSQSHGYSPIAAKGHKDSVYALAMNDTGTLLLSGGTEKVVRVWDPRTGSKNMKLRGHTDNIRALLVDSTGRLVFRKFSNELF

SEQ ID NO: 172102 - protein, 623 aa, Zea Mays
MHRVGSAGNTAGSTRPRKEKRFTYVLNDADDKKHCAGINCMAYLNGSTFSTSDYLFSGSRDGTLKRWELNNGDASFSATFESHVDWVNDAIIVGEKLVSCSSDTTIKVWNCFSDGACTRTFRQHSDYVICLAAAEKNSNIVASGGLGGEVFVWDLDAALAPVAKSVDAKEDEVPNGNSGPPLTTLCSVNSSSNIASSNSQSHGYSPIAAKGHKDSVYALAMNDTGTLLLSGGTEKVVRVWDPRTGSKNMKLRGHTDNIRALLVDSTGRYCLSGSSDSMIRLWDLGQQRCVHSYAVHTDSVWALATTHSFGHVYSGGRDQSVYLTDLSTRESVLLCTNECPILQLSLQDDTIWVATTDSSVYGWPAEGLTPQKVFQKGGSFLAGNLSFSRARASLEGSAPVPVYKEPSFVVPGVPAIVQHEIMNNRRHVLTKDTTGSVKLWEITRGAVIEDFGKVSFEDKKKELFEMVSIPAWFTMDARLGCLSVHLDTPQCFSAEIYAVDLNVSGAQEDLKINLAHDTLCGLLVHWSKRKQKSSSHGLPNGDSSIGKDVPSKDSHRSRTEVDDTTENHTTHVLPSFEFSTVSPPSIITEGSSGGPWRKRITDLDGTEGVAFIYILLKVRLRQT

SEQ ID NO: 172103 - protein, 519 aa, Zea Mays
MHRVGSAGNTAGSTRPRKEKRFTYVLNDADDKKHCAGINCMAYLNGSTFSTSDYLFSGSRDGTLKRWELNNGDASFSATFESHVDWVNDAIIVGEKLVSCSSDTTIKVWNCFSDGACTRTFRQHSDYVICLAAAEKNSNIVASGGLGGEVFVWDLDAALAPVAKSVDAKEDEVPNGNSGPPLTTLCSVNSSSNIASSNSQSHGYSPIAAKGHKDSVYALAMNDTGTLLLSGGTEKVVRVWDPRTGSKNMKLRGHTDNIRALLVDSTGRYCLSGSSDSMIRLWDLGQQRCVHSYAVHTDSVWALATTHSFGHVYSGGRDQSVYLTDLSTRESVLLCTNECPILQLSLQDDTIWVATTDSSVYGWPAEGLTPQKVFQKGGSFLAGNLSFSRARASLEGSAPVPVYKEPSFVVPGVPAIVQHEIMNNRRHVLTKDTTGSVKLWEITRGAVIEDFGKVSFEDKKKELFEMVSIPAWFTMDARLGCLSVHLDTPQCFSAEIYAVDLNVSGAQEDLKVWLLFTSC

SEQ ID NO: 172104 - protein, 494 aa, Zea Mays
MHRVGSAGNTAGSTRPRKEKRFTYVLNDADDKKHCAGINCMAYLNGSTFSTSDYLFSGSRDGTLKRWELNNGDASFSATFESHVDWVNDAIIVGEKLVSCSSDTTIKVWNCFSDGACTRTFRQHSDYVICLAAAEKNSNIVASGGLGGEVFVWDLDAALAPVAKSVDAKEDEVPNGNSGPPLTTLCSVNSSSNIASSNSQSHGYSPIAAKGHKDSVYALAMNDTGTLLLSGGTEKVVRVWDPRTGSKNMKLRGHTDNIRALLVDSTGRYCLSGSSDSMIRLWDLGQQRCVHSYAVHTDSVWALATTHSFGHVYSGGRDQSVYLTDLSTRESVLLCTNECPILQLSLQDDTIWVATTDSSVYGWPAEGLTPQKVFQKGGSFLAGNLSFSRARASLEGSAPVPVYKEPSFVVPGVPAIVQHEIMNNRRHVLTKDTTGSVKLWEITRGAVIEDFGKVSFEDKKKELFEMVLLKCHDFRVLFKKSLPMYCLIYQLIIR

SEQ ID NO: 172105 - protein, 534 aa, Zea Mays
MNDTGTLLLSGGTEKVVRVWDPRTGSKNMKLRGHTDNIRALLVDSTGRYCLSGSSDSMIRLWDLGQQRCVHSYAVHTDSVWALATTHSFGHVYSGGRDQSVYLTDLSTRESVLLCTNECPILQLSLQDDTIWVATTDSSVYGWPAEGLTPQKVFQKGGSFLAGNLSFSRARASLEGSAPVPVYKEPSFVVPGVPAIVQHEIMNNRRHVLTKDTTGSVKLWEITRGAVIEDFGKVSFEDKKKELFEMVSIPAWFTMDARLGCLSVHLDTPQCFSAEIYAVDLNVSGAQEDLKINLAHDTLCGLLVHWSKRKQKSSSHGLPNGDSSIGKDVPSKDSHRSRTEVDDTTENHTTHVLPSFEFSTVSPPSIITEGSSGGPWRKRITDLDGTEGDLPWWCVDCVTHNRYPKENTKCGFYLHPAEGSPAPNITQGKLSAPRILRIHKVANYVVEKLVLDKPLDGGSDSTFVMGLSSAQSQLSQLDSSSRLGLKPWQKTKPCIEVLCNNQVLSPDMSLATVRTYIWKKPEDLILHYRVVQSR

SEQ ID NO: 172106 - protein, 403 aa, Zea Mays
MNDTGTLLLSGGTEKVVRVWDPRTGSKNMKLRGHTDNIRALLVDSTGRYCLSGSSDSMIRLWDLGQQRCVHSYAVHTDSVWALATTHSFGHVYSGGRDQSVYLTDLSTRESVLLCTNECPILQLSLQDDTIWVATTDSSVYGWPAEGLTPQKVFQKGGSFLAGNLSFSRARASLEGSAPVPVYKEPSFVVPGVPAIVQHEIMNNRRHVLTKDTTGSVKLWEITRGAVIEDFGKVSFEDKKKELFEMVSIPAWFTMDARLGCLSVHLDTPQCFSAEIYAVDLNVSGAQEDLKINLAHDTLCGLLVHWSKRKQKSSSHGLPNGDSSIGKDVPSKDSHRSRTEVDDTTENHTTHVLPSFEFSTVSPPSIITEGSSGGPWRKRITDLDGTEGVAFIYILLKVRLRQT

SEQ ID NO: 172107 - protein, 499 aa, Zea Mays
MHRVGSAGNTAGSTRPRKEKRFTYVLNDADDKKHCAGINCMAYLNGSTFSTSDYLFSGSRDGTLKRWELNNGDASFSATFESHVDWVNDAIIVGEKLVSCSSDTTIKVWNCFSDGACTRTFRQHSDYVICLAAAEKNSNIVASGGLGGEVFVWDLDAALAPVAKSVDAKEDEVPNGNSGPPLTTLCSVNSSSNIASSNSQSHGYSPIAAKGHKDSVYALAMNDTGTLLLSGGTEKVVRVWDPRTGSKNMKLRGHTDNIRALLVDSTGRYCLSGSSDSMIRLWDLGQQRCVHSYAVHTDSVWALATTHSFGHVYSGGRDQSVYLTDLSTRESVLLCTNECPILQLSLQDDTIWVATTDSSVYGWPAEGLTPQKVFQKGGSFLAGNLSFSRARASLEGSAPVPVYKEPSFVVPGVPAIVQHEIMNNRRHVLTKDTTGSVKLWEITRGAVIEDFGKVSFEDKKKELFEMGKHTCLVHHGCSIRMLVCPPGYSTMLFCRNICS

SEQ ID NO: 172108 - protein, 487 aa, Zea Mays
MHRVGSAGNTAGSTRPRKEKRFTYVLNDADDKKHCAGINCMAYLNGSTFSTSDYLFSGSRDGTLKRWELNNGDASFSATFESHVDWVNDAIIVGEKLVSCSSDTTIKVWNCFSDGACTRTFRQHSDYVICLAAAEKNSNIVASGGLGGEVFVWDLDAALAPVAKSVDAKEDEVPNGNSGPPLTTLCSVNSSSNIASSNSQSHGYSPIAAKGHKDSVYALAMNDTGTLLLSGGTEKVVRVWDPRTGSKNMKLRGHTDNIRALLVDSTGSANELMRKWLVRLCDTLYNYDGYNKVAYLEAAVLDGQITDFLDDNTEYCLSGSSDSMIRLWDLGQQRCVHSYAVHTDSVWALATTHSFGHVYSGGRDQSVYLTDLSTRESVLLCTNECPILQLSLQDDTIWVATTDSSVYGWPAEGLTPQKVFQKGGSFLAGNLSFSRARASLEGSAPVPVYKEPSFVVPGVPAIVQHEIMNNRRHVLTKVRFLLLIFYY

SEQ ID NO: 172109 - protein, 616 aa, Zea Mays
MHRVGSAGNTAGSTRPRKEKRFTYVLNDADDKKHCAGINCMAYLNGSTFSTSDYLFSGSRDGTLKRWELNNGDASFSATFESHVDWVNDAIIVGEKLVSCSSDTTIKVWNCFSDGACTRTFRQHSDYVICLAAAEKNSNIVASGGLGGEVFVWDLDAALAPVAKSVDAKEDEVPNGNSGPPLTTLCSVNSSSNIASSNSQSHGYSPIAAKGHKDSVYALAMNDTGTLLLSGGTEKVVRVWDPRTGSKNMKLRGHTDNIRALLVDSTGRYCLSGSSDSMIRLWDLGQQRCVHSYAVHTDSVWALATTHSFGHVYSGGRDQSVYLTDLSTRESVLLCTNECPILQLSLQDDTIWVATTDSSVYGWPAEGLTPQKVFQKGGSFLAGNLSFSRARASLEGSAPVPVYKEPSFVVPGVPAIVQHEIMNNRRHVLTKDTTGSVKLWEITRGAVIEDFGKVSFEDKKKELFEMVSIPAWFTMDARLGCLSVHLDTPQCFSAEIYAVDLNVSGAQEDLKINLAHDTLCGLLVHWSKRKQKSSSHGLPNGDSSIGKDVPSKDSHRSRTEKVLVEGLGERELLIWMEPKVIYLGGVWTVLLTIDIQRKIQSVAFIYILLKVRLRQT

SEQ ID NO: 172110 - protein, 528 aa, Zea Mays
MNDTGTLLLSGGTEKVVRVWDPRTGSKNMKLRGHTDNIRALLVDSTGRYCLSGSSDSMIRLWDLGQQRCVHSYAVHTDSVWALATTHSFGHVYSGGRDQSVYLTDLSTRESVLLCTNECPILQLSLQDDTIWVATTDSSVYGWPAEGLTPQKVFQKGGSFLAGNLSFSRARASLEGSAPVPVYKEPSFVVPGVPAIVQHEIMNNRRHVLTKDTTGSVKLWEITRGAVIEDFGKVSFEDKKKELFEMVSIPAWFTMDARLGCLSVHLDTPQCFSAEIYAVDLNVSGAQEDLKINLAHDTLCGLLVHWSKRKQKSSSHGLPNGDSSIGKDVPSKDSHRSRTEVDDTTENHTTHVLPSFEFSTVSPPSIITEGSSGGPWRKRITDLDGTEGDLPWWCVDCVTHNRYPKENTKCGFYLHPAEGSPAPNITQGKLSAPRILRIHKVANYVVEKLVLDKPLDGGSDSTFVMGLSSAQSQLSQLDSSSRLGLKPWQKTKPCIEVLSPDMSLATVRTYIWKKPEDLILHYRVVQSR

SEQ ID NO: 172111 - protein, 559 aa, Zea Mays
MTSSTLLCSLSSPPPEGIVALFLSSAAPVRPLPPRRAAPLPPRCPLSPCLCLLAAGSQHPAIDSSHPLCSLFWYCLSGSSDSMIRLWDLGQQRCVHSYAVHTDSVWALATTHSFGHVYSGGRDQSVYLTDLSTRESVLLCTNECPILQLSLQDDTIWVATTDSSVYGWPAEGLTPQKVFQKGGSFLAGNLSFSRARASLEGSAPVPVYKEPSFVVPGVPAIVQHEIMNNRRHVLTKDTTGSVKLWEITRGAVIEDFGKVSFEDKKKELFEMVSIPAWFTMDARLGCLSVHLDTPQCFSAEIYAVDLNVSGAQEDLKINLAHDTLCGLLVHWSKRKQKSSSHGLPNGDSSIGKDVPSKDSHRSRTEVDDTTENHTTHVLPSFEFSTVSPPSIITEGSSGGPWRKRITDLDGTEGDLPWWCVDCVTHNRYPKENTKCGFYLHPAEGSPAPNITQGKLSAPRILRIHKVANYVVEKLVLDKPLDGGSDSTFVMGLSSAQSQLSQLDSSSRLGLKPWQKTKPCIEVLCNNQVLSPDMSLATVRTYIWKKPEDLILHYRVVQSR

SEQ ID NO: 172112 - protein, 545 aa, Zea Mays
MLLEELNKISGAIGKTVEDLDVADLNLGKYESFNPSKSWLPNSSKVFPETGKGVGQLAGILHDFLERPNDMVNGTDDSLLYTLPHEELFELFLTLSGQLSLLWNAFLKFHRLNKTKILDYLHDAWAIGRKAEWSIWTIHSKIEIPHRYLQSMSDDSPHRYSLRVSGSRKFHDDHVQSSASRAELHRKSIAQMKINPHYVQDMHIYGDPSRVPVVLIEQHVMVVPQHSSSKDMASNVSEQKDTIVVPKLQGEPLVPKSSAGKKSGRILRAVIFVHGFQGHHLDLRLVRNQWLLLDPGADCLMSEANEDKTSGDFKEMGSRLAGEVVAFLKKKMDKLSRYGGCKELKLSFVGHSIGNVIIRSALAEPALQPYLKNLYTYMSISGPHLGYWYSSNSLFNSGLWLLKKLKGAQCIHQLTFSDDQDPQNTYFYKLCKLKTLENFQNIILLSSPQDGYVPYHSARIELCPAASSDTSKKGQVFTEMLNNCLDQIRTPSSDTRTFMRCDVNFDQSNQGRSLNTMIGRAAHIEFLETDLYAKFIMWSFPDLFR

SEQ ID NO: 172113 - protein, 475 aa, Zea Mays
MVNGTDDSLLYTLPHEELFELFLTLSGQLSLLWNAFLKFHRLNKTKILDYLHDAWAIGRKAEWSIWTIHSKIEIPHRYLQSMSDDSPHRYSLRVSGSRKFHDDHVQSSASRAELHRKSIAQMKINPHYVQDMHIYGDPSRVPVVLIEQHVMVVPQHSSSKDMASNVSEQKDTIVVPKLQGEPLVPKSSAGKKSGRILRAVIFVHGFQGHHLDLRLVRNQWLLLDPGADCLMSEANEDKTSGDFKEMGSRLAGEVVAFLKKKMDKLSRYGGCKELKLSFVGHSIGNVIIRSALAEPALQPYLKNLYTYMSISGPHLGYWYSSNSLFNSGLWLLKKLKGAQCIHQLTFSDDQDPQNTYFYKLCKLKTLENFQNIILLSSPQDGYVPYHSARIELCPAASSDTSKKGQVFTEMLNNCLDQIRTPSSDTRTFMRCDVNFDQSNQGRSLNTMIGRAAHIEFLETDLYAKFIMWSFPDLFR

SEQ ID NO: 172114 - protein, 369 aa, Zea Mays
MLLEELNKISGAIGKTVEDLDVADLNLGKYESFNPSKSWLPNSSKVFPETGKGVGQLAGILHDFLERPNDMVNGTDDSLLYTLPHEELFELFLTLSGQLSLLWNAFLKFHRLNKTKILDYLHDAWAIGRKAEWSIWTIHSKIEIPHRYLQSMSDDSPHRYSLRVSGSRKFHDDHVQSSASRAELHRKSIAQMKINPHYVQDMHIYGDPSRVPVVLIEQHVMVVPQHSSSKDMASNVSEQKDTIVVPKLQGEPLVPKSSAGKKSGRILRAVIFVHGFQGHHLDLRLVRNQWLLLDPGADCLMSEANEDKTSGDFKEMGSRLAGEVVAFLKKKMDKLSRYGGCKELKLSFVGHSIGNVIIRSALNLHCNHT

SEQ ID NO: 172115 - protein, 694 aa, Zea Mays
MILIIASTHSRSGSSMPDKISICRLWCLSTYSTVKRSLLYLFKGPAASDVMMKFELIYAPTLDNGSELHASSATSSAAVHEFRIPHRALLGLHSYCPVHFDAFHSVLVDLTLHIVYLKAGAAKSSLKVPEQGLRPTSYHIVKALLTSRKMLLEELNKISGAIGKTVEDLDVADLNLGKYESFNPSKSWLPNSSKVFPETGKGVGQLAGILHDFLERPNDMVNGTDDSLLYTLPHEELFELFLTLSGQLSLLWNAFLKFHRLNKTKILDYLHDAWAIGRKAEWSIWTIHSKIEIPHRYLQSMSDDSPHRYSLRVSGSRKFHDDHVQSSASRAELHRKSIAQMKINPHYVQDMHIYGDPSRVPVVLIEQHVMVVPQHSSSKDMASNVSEQKDTIVVPKLQGEPLVPKSSAGKKSGRILRAVIFVHGFQGHHLDLRLVRNQWLLLDPGADCLMSEANEDKTSGDFKEMGSRLAGEVVAFLKKKMDKLSRYGGCKELKLSFVGHSIGNVIIRSALAEPALQPYLKNLYTYMSISGPHLGYWYSSNSLFNSGLWLLKKLKGAQCIHQLTFSDDQDPQNTYFYKLCKLKTLENFQNIILLSSPQDGYVPYHSARIELCPAASSDTSKKGQVFTEMLNNCLDQIRTPSSDTRTFMRCDVNFDQSNQGRSLNTMIGRAAHIEFLETDLYAKFIMWSFPDLFR

SEQ ID NO: 172116 - protein, 615 aa, Zea Mays
MMKFELIYAPTLDNGSELHASSATSSAAVHEFRIPHRALLGLHSYCPVHFDAFHSVLVDLTLHIVYLKAGAAKSSLKVPEQGLRPTSYHIVKALLTSRKMLLEELNKISGAIGKTVEDLDVADLNLGKYESFNPSKSWLPNSSKVFPETGKGVGQLAGILHDFLERPNDMVNGTDDSLLYTLPHEELFELFLTLSGQLSLLWNAFLKFHRLNKTKILDYLHDAWAIGRKAEWSIWTIHSKIEIPHRYLQSMSDDSPHRYSLRVSGSRKFHDDHVQSSASRAELHRKSIAQMKINPHYVQDMHIYGDPSRVPVVLIEQHVMVVPQHSSSKDMASNVSEQKDTIVVPKLQGEPLVPKSSAGKKSGRILRAVIFVHGFQGHHLDLRLVRNQWLLLDPGADCLMSEANEDKTSGDFKEMGSRLAGEVVAFLKKKMDKLSRYGGCKELKLSFVGHSIGNVIIRSALAEPALQPYLKNLYTYMSISGPHLGYCDDQDPQNTYFYKLCKLKTLENFQNIILLSSPQDGYVPYHSARIELCPAASSDTSKKGQVFTEMLNNCLDQIRTPSSDTRTFMRCDVNFDQSNQGRSLNTMIGRAAHIEFLETDLYAKFIMWSFPDLFR

SEQ ID NO: 172117 - protein, 516 aa, Zea Mays
MLLEELNKISGAIGNKVFPETGKGVGQLAGILHDFLERPNDMVNGTDDSLLYTLPHEELFELFLTLSGQLSLLWNAFLKFHRLNKTKILDYLHDAWAIGRKAEWSIWTIHSKIEIPHRYLQSMSDDSPHRYSLRVSGSRKFHDDHVQSSASRAELHRKSIAQMKINPHYVQDMHIYGDPSRVPVVLIEQHVMVVPQHSSSKDMASNVSEQKDTIVVPKLQGEPLVPKSSAGKKSGRILRAVIFVHGFQGHHLDLRLVRNQWLLLDPGADCLMSEANEDKTSGDFKEMGSRLAGEVVAFLKKKMDKLSRYGGCKELKLSFVGHSIGNVIIRSALAEPALQPYLKNLYTYMSISGPHLGYWYSSNSLFNSGLWLLKKLKGAQCIHQLTFSDDQDPQNTYFYKLCKLKTLENFQNIILLSSPQDGYVPYHSARIELCPAASSDTSKKGQVFTEMLNNCLDQIRTPSSDTRTFMRCDVNFDQSNQGRSLNTMIGRAAHIEFLETDLYAKFIMWSFPDLFR

SEQ ID NO: 172118 - protein, 562 aa, Zea Mays
MKVDCAASDVGGDDALGIWKIDDIDNSFHTQPFRIKYARQDIYLSVMVSFNIFNSEEEGPAASDVMMKFELIYAPTLDNGSELHASSATSSAAVHEFRIPHRALLGLHSYCPVHFDAFHSVLVDLTLHIVYLKAGAAKSSLKVPEQGLRPTSYHIVKALLTSRKMLLEELNKISGAIGKTVEDLDVADLNLGKYESFNPSKSWLPNSSKVFPETGKGVGQLAGILHDFLERPNDMVNGTDDSLLYTLPHEELFELFLTLSGQLSLLWNAFLKFHRLNKTKILDYLHDAWAIGRKAEWSIWTIHSKIEIPHRYLQSMSDDSPHRYSLRVSGSRKFHDDHVQSSASRAELHRKSIAQMKINPHYVQDMHIYGDPSRVPVVLIEQHVMVVPQHSSSKDMASNVSEQKDTIVVPKLQGEPLVPKSSAGKKSGRILRAVIFVHGFQGHHLDLRLVRNQWLLLDPGADCLMSEANEDKTSGDFKEMGSRLAGEVVAFLKKKMDKLSRYGGCKELKTCIATILEEPLHLHVNIRASLGLLVQFKFFVQFWTLAAEKAQGCAMHPSTHFQ

SEQ ID NO: 172119 - protein, 326 aa, Zea Mays
MRCLVGGGVQDSPRAAAKRVSPASWRLDTAAAEAETGAGGAAAKGPRVCFRPPDVMETVHEVAIYIHRFHNLDLFQQGWYQMKISALWEEGGNRTPASPARVVQYEASDVGGDDALGIWKIDDIDNSFHTQPFRIKYARQDIYLSVMVSFNIFNSEEEGPAASDVMMKFELIYAPTLDNGSELHASSATSSAAVHEFRIPHRALLGLHSYCPVHFDAFHSVLVDLTLHIVYLKAGAAKSSLKVPEQGLRPTSYHIVKALLTSRKMLLEELNKISGAIVKCSPKLAKVWDSWLEFYMTSWRDPTIWLMVQMILYCILFPMKSCLNCF

SEQ ID NO: 172120 - protein, 165 aa, Zea Mays
MVDGTTIDWKVFMQVLNSPWDVCYDPAEEAVYIAMAGQHQIWKHNLHDGVTKVISGDGYERNLNGSSATSTSFAQPSGIPLAFEMHELLVADSESSSIRVVNLKTGGSRLLAGGDPVFPENLFRFGDYDGTGSDVLLQHPLGVVYANDNQVYIADSYNHKVVTLF

SEQ ID NO: 172121 - protein, 85 aa, Zea Mays
MAQEMHELLVADSESSSIRVVNLKTGGSRLLAGGDPVFPENLFRFGDYDGTGSDVLLQHPLGVVYANDNQVYIADSYNHKVVTLF

SEQ ID NO: 172122 - protein, 175 aa, Zea Mays
MGQSIDALLEKTIKHMLFLQSVTKHADNLKDSNKSDILGGENGPLKDYFEGGATWALDVGSRSMTCPIIVEDLERPRQMLVEMLCEDRGIFLEIADFIKGLGLTILRGVMEARKNKIWARFTVEANRNVTRMEIFLSLMRMLEPSCGAGENSNNNIKMPLGIVQYPIIPATGHLR

SEQ ID NO: 172123 - protein, 716 aa, Zea Mays
MAVGDALRRLCEEVGWSYAVFWKAIGAADPVHLVWEDGSCGHASCYTGSDAPEAGCEPGTSVCTLVGKVMASQIHVIGEGTIGRAAFTGNHQWIVHDPATASDHNLRPEVVAEMNHQFAAGIQTIAIIPVLPRGVLQLGATSVVVENTNLVLQYKKLCSQLNNRSSMASSSSVKNDLNPKVQSHPLNGPTSIYPADTRSKFFSGSPMSYQQCYGPDGTTVSSSILTNMGSNASMLMVAQRNAQVGKEHILYAPDMRFRLQNPYCDRRVESNTQSSVVSSGFISSISASMERHPWMTNSQQLEQGNTGEPSDLRNVLLKSLAYRHPLFNDNTNMVLVHGKGQVPGFVNGHGGFDFLPEGTMVFKGNLYGSTANQILDQRCSSTSEMSGHRPTISYKMPQSTQCVRKTESPKRETCETSAALSSGSDIQVSGGLKTVISQENNMSSSDLISPKKPNEVHAPTGAIVKAVKNMDSRRLPDISNERSPPLRMDAAAESDLFDMFDSEVHHLCRNVDNDLTCKAAKPENSNRDVPESSVRLGSSSSFNSVDDKFPYSGIFSLTDTDQLLDAVVSNVNPGGKQISGDSTSCKTSAADIPTTSYCRLKEPKQSESSSPLLIKNELAVSNFVKQSSFQEKAEDGCLSQNNAIQKSQIRLWIENGQNMKCESASASNSKGVDMSSKASRKRSRPGENPKPRPKDRQLIQDRIKELRELVPNGAKY

SEQ ID NO: 172124 - protein, 722 aa, Zea Mays
MASSSSVKNDLNPKVQSHPLNGPTSIYPADTRSKFFSGSPMSYQQCYGPDGTTVSSSILTNMGSNASMLMVAQRNAQVGKEHILYAPDMRFRLQNPYCDRRVESNTQSSVVSSGFISSISASMERHPWMTNSQQLEQGNTGEPSDLRNVLLKSLAYRHPLFNDNTNMVLVHGKGQVPGFVNGHGGFDFLPEGTMVFKGNLYGSTANQILDQRCSSTSEMSGHRPTISYKMPQSTQCVRKTESPKRETCETSAALSSGSDIQVSGGLKTVISQENNMSSSDLISPKKPNEVHAPTGAIVKAVKNMDSRRLPDISNERSPPLRMDAAAESDLFDMFDSEVHHLCRNVDNDLTCKAAKPENSNRDVPESSVRLGSSSSFNSVDDKFPYSGIFSLTDTDQLLDAVVSNVNPGGKQISGDSTSCKTSAADIPTTSYCRLKEPKQSESSSPLLIKNELAVSNFVKQSSFQEKAEDGCLSQNNAIQKSQIRLWIENGQNMKCESASASNSKGVDMSSKASRKRSRPGENPKPRPKDRQLIQDRIKELRELVPNGAKCSIDALLEKTIKHMLFLQSVTKHADNLKDSNKSDILGGENGPLKDYFEGGATWALDVGSRSMTCPIIVEDLERPRQMLVEMLCEDRGIFLEIADFIKGLGLTILRGVMEARKNKIWARFTVEANRNVTRMEIFLSLMRMLEPSCGAGENSNNNIKMPLGIVQYPIIPATGHLR

SEQ ID NO: 172125 - protein, 854 aa, Zea Mays
MAVGDALRRLCEEVGWSYAVFWKAIGAADPVHLVWEDGSCGHASCYTGSDAPEAGCEPGTSVCTLVGKVMASQIHVIGEGTIGRAAFTGNHQWIVHDPATASDHNLRPEVVAEMNHQFAAGIQTIAIIPVLPRGVLQLGATSVVVENTNLVLQYKKLCSQLNNRSSMASSSSVKNDLNPKVQSHPLNGPTSIYPADTRSKFFSGSPMSYQQCYGPDGTTVSSSILTNMGSNASMLMVAQRNAQVGKEHILYAPDMRFRLQNPYCDRRVESNTQSSVVSSGFISSISASMERHPWMTNSQQLEQGNTGEPSDLRNVLLKSLAYRHPLFNDNTNMVLVHGKGQVPGFVNGHGGFDFLPEGTMVFKGNLYGSTANQILDQRCSSTSEMSGHRPTISYKMPQSTQCVRKTESPKRETCETSAALSSGSDIQVSGGLKTVISQENNMSSSDLISPKKPNEVHAPTGAIVKAVKNMDSRRLPDISNERSPPLRMDAAAESDLFDMFDSEVHHLCRNVDNDLTCKAAKPENSNRDVPESSVRLGSSSSFNSVDDKFPYSGIFSLTDTDQLLDAVVSNVNPGGKQISGDSTSCKTSAADIPTTSYCRLKEPKQSESSSPLLIKNELAVSNFVKQSSFQEKAEDGCLSQNNAIQKSQIRLWIENGQNMKCESASASNSKGVDMSSKASRKRSRPGENPKPRPKDRQLIQDRIKELRELVPNGAKILGGENGPLKDYFEGGATWALDVGSRSMTCPIIVEDLERPRQMLVEMLCEDRGIFLEIADFIKGLGLTILRGVMEARKNKIWARFTVEANRNVTRMEIFLSLMRMLEPSCGAGENSNNNIKMPLGIVQYPIIPATGHLR

SEQ ID NO: 172126 - protein, 54 aa, Zea Mays
MIISKRRMHTSFPKELDIFFSVVFFLIFPPCARMRTMTADEKKKRIWTGDGVIG

SEQ ID NO: 172127 - protein, 147 aa, Zea Mays
MAGVEEVRGAGEVVRGHCGNARTVFGGLPPRMAALRSRGGDGDGGWTPKRSPTTAVPPTRESGTQWRRHRWHRCRVVPSCTPPTPARSFPRPTSAATSFLSSRMILSACAGTYFRTLDAATWMVSHRCRRPRARSSGRSPGRQRSCF

SEQ ID NO: 172128 - protein, 678 aa, Zea Mays
MSSFVSAMDSALQEVGRRVEAGLSCGCFTSSIATKQEVQNSGIRQGAYGAAVDSVYTRDAFHSKTFLDYISALGKKPLAGADLLVLATVKAQLRALNRSRGSRDLPEFEMFEGTDEITEMTHTDGDDTLSRGKKSKRMKSSSKKKTDISKHLDGLKTGSVADSRTLAKKAVGDALSERKSGRTLRSTSKKEDALEGLKRLAKDGIQELTGKSKDAPILKEKNQGHGAGSAHKKGRITEDGYHRLGDSNAKDPIFPGKRRLGHNENSISKRVPISEHGRKKKKLSELMAETGKPNSASSGKSKTRGKRSLHDSAEKTEDPEHHSKDTLMTRKRKKLNTLGDLSSLSEPLSRKKSTKVGELMSKVAGSSMLQAAPAVKANSAVSQTKPRRAKYRQVNAADKSPCPVKVNQGNSEAVSKESLSCGEMLWQLSVAACGLQQREKIVPTSVNFFTGFRKNKFSSSDVNEGMPEKAANTESTLSEQPIADHMQDDYWADILINVEEPLSNLKKKIDESKKRVNKKAPQVKKPPVNSLSTVENVDEPRSEGNQDTGNEEQLRNETKLFSANGSQLNAGTKFGQEMENCFLSGLVLHFSRPCAVPSQCDLIKIFSQYGPVNEVKADVANSASSAQVIFKRRMDAEAAFAGAGKISALGPALVSFRLTDFPASASGNKASHVASKSE

SEQ ID NO: 172129 - protein, 966 aa, Zea Mays
MASSSSLNPSSYSCFLFVTAAAVFFTASDAQVPGFVSIDCGGSTNYTDELGLQWTGDAGWFPFGQTATISVPSEKRAQYSTLRYFPSPSASSSSSSKHCYTLHVRTRTRYLVRATFLYGNFDSSNVFPEFDLYLGASHWSTIVIYDDSKVVTREAVVLAADPALSVCLSSTGTGTPFISTLELRQLNGSLYYTDYEADAFLALSARINFGAPTADPVRYPDDPYDRIWESDMVRRANYLVDVAAGTVNVSTDRPVFVAGSERPPQKVMQTAVVGSLGELTYRLDLPGFPGNGWAFSYLAEIEEFLVPETRKFKLYIPGLADVSKPTVDIGENAPGKYRLYEPGFPNISLPFVLSLALRKTNDSSKGPILNALEIYKYMHMELGSPDGPVMATLSLALASSSSSLADVAMEGGDPCLPSPWSWVKCNSEAQPRVVSINLSGKNLTGSIPPQVADLPCLAEIGFANNMLTGPIPDLSGSSNLSIIHLENNQLTGTVPSYFGSLPKLSELYLENNRLSGPIPKALLSRSIIFNYSGNVYLGTAGKQKKKHVIIIISALLGASLLLAAALCCYMLTRKAMNSSSSPQAQEQNKLQKYPSTQQLQSIATETAHPYSLCELEEATNKFASRIGSGGFGIVYYGKLSDGKEIAVKVPSNDSYQGKKQFSNEVVLLSRIHHRNLVAFLGYCHEDGRNILVYEFMHNGTLKEQLHRRDKHISWIKRLEIAEDAAKGIEYLHTGCTPSIIHRDIKTSNILLDKHMRAKVSDFGLSKLLAAEGKDSHASTNVRGTMGYLDPQYYVSQQLTEKSDMYSFGIILLELISGCPPISTIAFGDNFRNIGPWAKFYYESGDIEAIIDPSISTAAEYQDVQSVWKIAEAAVRCIDAEPRKRPCMPEVVKEIQDALALERAAAETTTSDRALACPFSPAAASVRSGGTMRSHDMVMDNLLLLDDDDDSTFSGSTVTKLKYPELR

SEQ ID NO: 172130 - protein, 563 aa, Zea Mays
MLQWKAVIPAYLHPGPGSSAIQKRNQENLSGKNLTGSIPPQVADLPCLAEIGFANNMLTGPIPDLSGSSNLSIIHLENNQLTGTVPSYFGSLPKLSELYLENNRLSGPIPKALLSRSIIFNYSGNVYLGTAGKQKKKHVIIIISALLGASLLLAAALCCYMLTRKAMNSSSSPQAQEKALPAEQNKLQKYPSTQQLQSIATETAHPYSLCELEEATNKFASRIGSGGFGIVYYGKLSDGKEIAVKVPSNDSYQGKKQFSNEVVLLSRIHHRNLVAFLGYCHEDGRNILVYEFMHNGTLKEQLHRRDKHISWIKRLEIAEDAAKGIEYLHTGCTPSIIHRDIKTSNILLDKHMRAKVSDFGLSKLLAAEGKDSHASTNVRGTMGYLDPQYYVSQQLTEKSDMYSFGIILLELISGCPPISTIAFGDNFRNIGPWAKFYYESGDIEAIIDPSISTAAEYQDVQSVWKIAEAAVRCIDAEPRKRPCMPEVVKEIQDALALERAAAETTTSDRALACPFSPAAASVRSGGTMRSHDMVMDNLLLLDDDDDSTFSGSTVTKLKYPELR

SEQ ID NO: 172131 - protein, 984 aa, Zea Mays
MVSRGLFGWSPPHVQPLTPVSETSEPPESPSPYAADLGLGGDGAPPPDDDAQPPLDDADDDPDPPPAAVPFKRLFACADRLDWALMVAGSLAAAAHGVALVVYLHLFGKAINSLHAHGRHTHDLFHDINQHALYFLYIAIGVFFAAWIEVSCWILTGERQTAVIRSKYVQVLLNQDMSFFDTYGNNGDIVSQVLSDVLLIQSALSEKVGNYIHNMATFFGGLVIGLVNCWQIALLTLATGPFIVAAGGISNIFLHRLAENIQDAYGDAASIAEQAILYIRTLYSFTNETLAKYSYATSLQATLRYGILISLVQGLGLGFTYGLAICSCALQLWVGRFLISHGRANGGEVVVALFAIILSGLGLNQAATNFYSFEQGRIAAYRLYEMISRSTSTVNQDGSTLSSVQGNIEFRNVYFSYLSRPEIPILSGFYLTVPARKTVALVGRNGSGKSSIIPLMERFYDPTLGEVLLDGENIKNLKLEWLRSQIGLVTQEPALLSLSIMENIAYGRCATTDQIEEAAKTAHVHAFISSLEKGYETQVGRAGLSLTEEQKIKLSIARAVLSNPSILLLDEVTGALDFEAEKAVQEALDILMLGRSTIIIARRLSLIRNADYIAVMEEGQLVEMGTHEELLNLDGLYAELLRCEEAAKLPKRTPMRNYKEPSSFQIERDSSAGHNFQESSSPKMSKSPSLQKTHGFLTFRTSDANHNSHESPNIQSPPSEQMAEARLPMVASERAPSIKRQDSFEMKLPDLPKIDVPLHRQSSNTSDPESPISPLLTSDPKNERSHSKTFSRPLVIFDSFHAEDSKQQHTKAPSFWRLAELSFAEYFYALLGSAGAACFGSFNPLLAYTISLIVVAYYKIGVRDVHAEVNKYCSFIVGMGIITVLANFLQHFYFGIMGEKMTERVRRMMFSAILRNEVGWFDDEENSADILSMRLANDATFVRAAFSNRLSIFIQDTSAILVALLLALIHFNIQHNFTIFLRRA

SEQ ID NO: 172132 - protein, 974 aa, Zea Mays
MVSRGLFGWSPPHVQPLTPVSETSEPPESPSPYAADLGLGGDGAPPPDDDAQPPLDDADDDPDPPPAAVPFKRLFACADRLDWALMVAGSLAAAAHGVALVVYLHLFGKAINSLHAHGRHTHDLFHDINQAIAYALFIPLLTHPVGNYIHNMATFFGGLVIGLVNCWQIALLTLATGPFIVAAGGISNIFLHRLAENIQDAYGDAASIAEQAILYIRTLYSFTNETLAKYSYATSLQATLRYGILISLVQGLGLGFTYGLAICSCALQLWVGRFLISHGRANGGEVVVALFAIILSGLGLNQAATNFYSFEQGRIAAYRLYEMISRSTSTVNQDGSTLSSVQGNIEFRNVYFSYLSRPEIPILSGFYLTVPARKTVALVGRNGSGKSSIIPLMERFYDPTLGEVLLDGENIKNLKLEWLRSQIGLVTQEPALLSLSIMENIAYGRCATTDQIEEAAKTAHVHAFISSLEKGYETQVGRAGLSLTEEQKIKLSIARAVLSNPSILLLDEVTGALDFEAEKAVQEALDILMLGRSTIIIARRLSLIRNADYIAVMEEGQLVEMGTHEELLNLDGLYAELLRCEEAAKLPKRTPMRNYKEPSSFQIERDSSAGHNFQESSSPKMSKSPSLQKTHGFLTFRTSDANHNSHESPNIQSPPSEQMAEARLPMVASERAPSIKRQDSFEMKLPDLPKIDVPLHRQSSNTSDPESPISPLLTSDPKNERSHSKTFSRPLVIFDSFHAEDSKQQHTKAPSFWRLAELSFAEYFYALLGSAGAACFGSFNPLLAYTISLIVVAYYKIGVRDVHAEVNKYCSFIVGMGIITVLANFLQHFYFGIMGEKMTERVRRMMFSAILRNEVGWFDDEENSADILSMRLANDATFVRAAFSNRLSIFIQDTSAILVALLLGMLLQWRVALVALATLPILIISAVAQKMRYSCMEKAPFPGSTIVVGEVYEGAKFVALLTFSQEWCSFFLSV

SEQ ID NO: 172133 - protein, 299 aa, Zea Mays
MRIMLLLLLPLVTIFRDVSFFISLVLFFLCFFYIVLDYFQVISLVGAQKATLHPDDILLLANFILSSGSFRTSESFVPICLPRYNPMAYLHAYVHFFDEHTYVTLLTTRSDAFYDLKDSRAHIQNALLKSNVLIEVQRSLHENALRVEDLPTNPSSQSASHPPESSQDISSQSLSSEMAIGGPGGLWHFIYKSIYLDQFVSSEFPSPISNKKQKKGLYKAYQKLYASMHDKATGPHKTQFRRDEDYVLFCWITQDFELYAAFNPLADKTQAIKMCNRVCQWVRDLENEIFVYGESTLSW

SEQ ID NO: 172134 - protein, 245 aa, Zea Mays
MRIMLLLLLPLVTIFRDVSFFISLVLFFLCFFYIVLDYFQVISLVGAQKATLHPDDILLLANFILSSGSFRTSESFVPICLPRYNPMAYLHAYVHFFDEHTYVTLLTTRSDAFYDLKDSRAHIQNALLKSNVLIEVQRSLHENALRVEDLPTNPSSQSASHPPESSQDISSQSLSSEMAIGGPVLFCWITQDFELYAAFNPLADKTQAIKMCNRVCQWVRDLENEIFVYGESTLSWQYHRCWGGV

SEQ ID NO: 172135 - protein, 133 aa, Zea Mays
MAYLHAYVHFFDEHTYVTLLTTRSDAFYDLKDSRAHIQNALLKSNVLIEVQRSLHENALRVEDLPTNPSSQSASHPPESSQDISSQSLSSEMAIGGPDCTKLTKNCMHPCMIKQLVHTKLNSEEMRIMFYFAG

SEQ ID NO: 172136 - protein, 131 aa, Zea Mays
MAIGGPGGLWHFIYKSIYLDQFVSSEFPSPISNKKQKKGLYKAYQKLYASMHDKATGPHKTQFRRDEDYVLFCWITQDFELYAAFNPLADKTQAIKMCNRVCQWVRDLENEIFVYGESTLSWQYHRCWGGV

SEQ ID NO: 172137 - protein, 118 aa, Zea Mays
MHLYRIFEKKEEFHSDFSSTFYAEKTFLGRRYMRGFYNDVARLQDVRKIFPHCSSDMEPGQCFFPQEVAKSITTPMFILNPAYDVWQVEHVLSPEGSDRENLWQNCRMDISRFQESAA

SEQ ID NO: 172138 - protein, 194 aa, Zea Mays
MACISTAYSRKKKNFTVIFLLPSMQRRHFWEEGICGAFITMLLGCRMCVKYSLIAAQIWNRGSASSHKKLQKASPPRCLYSIQHMMFGRMDISRCSSKQLEVLQGFRKALLDAINEFKKRRDWGMFIDSCFIHCQSMKALAWHSPSAARVNNKTAAEAVGDWFFERREVKEIDCEYPCNPTCYNVVLDQPYKED

SEQ ID NO: 172139 - protein, 230 aa, Zea Mays
MSTLATASMAARRVARPAPKSAAVTTTAYGEAPISRIHIPSEKTFLGRRYMRGFYNDVARLQDVRKIFPHCSSDMEPGQCFFPQEVAKSITTPMFILNPAYDVWQVEHVLSPEGSDRENLWQNCRMDISRCSSKQLEVLQGFRKALLDAINEFKKRRDWGMFIDSCFIHCQSMKALAWHSPSAARVNNKTAAEAVGDWFFERREVKEIDCEYPCNPTCYNVVLDQPYKED

SEQ ID NO: 172140 - protein, 1220 aa, Zea Mays
MPLREGAKRVSSARHYAPAAPTPAPAGAPVPPHRPPRSVSAAGSISTASARKPPEPLRRAVADCLSPPAPHTHGPAAAAASATAEASRTLRDYIANPSTMDMAYNVLIDHALAESDRSPAVVPRCVSLLKRYLIRYIPRVQTLRQIDLFCANTIAKCEPMANNRAASFAKNNVSAAAAINSSSLAPPISNFASASLVKSLNYVRSLVARHTPKLSFQSIVAAKQSLPSLSSFLNRSLLSQLTPEVISNREHLESKECHSSPDFISSASEKVDVGEPVDDSKYISFDILSWRWHVYGERQSSLSAKESSDFVGLQDFHIHGFLEVGAAALLVGDMDAKINDQQWKYSVIQEFPDIDLLQPSSSAASTFASSQSHLKAITASKRMRSAPNQVWMNIPINTFQPRARPLFQYRYYSEQQPLRLNPAEISEVIAEVCSEATSNANQLIVPSRLSTQSRQPSADVAFSVLIKLVIDMYMMDSETAAPLTLYMLEGMLSSQKSSARTKALDLILNLGVHAHLLQPMVIGDAPLIDKSESVNRSYLSNEYGSSINEPREAEPEVEQKISPAIDQFESWLLKMLFEVLLLLVQIEERQEIVWASALSCLFYFVCDGGKIIRSRLGGLDIRVVKTLLEISVEHSWAKVVHSKLICMLSNMMYQVSDLTQNGVSDTHFVPERIDLLGGIDYICLEYSRANSREEKRDLFFVIFDYVVHQINEACLAGGISTYTYDDAQPLASLLAFADAPEAFYISVKHGVEGVGDMLRKAISAALSQSAQYDQLNVLLDKVMRKLDGTASTFSRIDNEFSYMIQVTKSCKCFGSIKDGCDDADVALRARLCWATLHSLLHSHISSYRHHGYIWLVELLLSEISEETDGSVWSKIQKLQEEIEVAGSQDLSCSEVSLPVCMLCGLLKSKHNFIRWGFLYVLDKFLMRCKLLLDDNDMQDHTTADHNKNCLDKAFAVIDIMNSALLLVVQNNETDHINILKMCDMLFSQLCLRIPSTNAMQVRGLQSLGQLFGYTSKNIDSHLETLASHQSIGNKNICRSETLQDIGIDQSGQSTSFCEASMAALLLRGLAIAPMQLVARVPTSLFFWPLIQLEGAASDDIALGIAVGSTGRGNLPGATSDIRAALLLLLIGKCTADQEALKEVEGNEFFRGLLDDTDSRVAYYSAAFLLKRMMTEEPEIYQRMLQSLISKAQQCNNEKLLENPYLQMRGILQLSNDLGVQ

SEQ ID NO: 172141 - protein, 1114 aa, Zea Mays
MSSLTMHLQKVIVAVVPRCVSLLKRYLIRYIPRVQTLRQIDLFCANTIAKCEPMANNRAASFAKNNVSAAAAINSSSLAPPISNFASASLVKSLNYVRSLVARHTPKLSFQSIVAAKQSLPSLSSFLNRSLLSQLTPEVISNREHLESKECHSSPDFISSASEKVDVGEPVDDSKYISFDILSWRWHVYGERQSSLSAKESSDFVGLQDFHIHGFLEVGAAALLVGDMDAKINDQQWKYSVIQEFPDIDLLQPSSSAASTFASSQSHLKAITASKRMRSAPNQVWMNIPINTFQPRARPLFQYRYYSEQQPLRLNPAEISEVIAEVCSEATSNANQLIVPSRLSTQSRQPSADVAFSVLIKLVIDMYMMDSETAAPLTLYMLEGMLSSQKSSARTKALDLILNLGVHAHLLQPMVIGDAPLIDKSESVNRSYLSNEYGSSINEPREAEPEVEQKISPAIDQFESWLLKMLFEVLLLLVQIEERQEIVWASALSCLFYFVCDGGKIIRSRLGGLDIRVVKTLLEISVEHSWAKVVHSKLICMLSNMMYQVSDLTQNGVSDTHFVPERIDLLGGIDYICLEYSRANSREEKRDLFFVIFDYVVHQINEACLAGGISTYTYDDAQPLASLLAFADAPEAFYISVKHGVEGVGDMLRKAISAALSQSAQYDQLNVLLDKVMRKLDGTASTFSRIDNEFSYMIQVTKSCKCFGSIKDGCDDADVALRARLCWATLHSLLHSHISSYRHHGYIWLVELLLSEISEETDGSVWSKIQKLQEEIEVAGSQDLSCSEVSLPVCMLCGLLKSKHNFIRWGFLYVLDKFLMRCKLLLDDNDMQDHTTADHNKNCLDKAFAVIDIMNSALLLVVQNNETDHINILKMCDMLFSQLCLRIPSTNAMQVRGLQSLGQLFGYTSKNIDSHLETLASHQSIGNKNICRSETLQDIGIDQSGQSTSFCEASMAALLLRGLAIAPMQLVARVPTSLFFWPLIQLEGAASDDIALGIAVGSTGRGNLPGATSDIRAALLLLLIGKCTADQEALKEVEGNEFFRGLLDDTDSRVAYYSAAFLLKRMMTEEPEIYQRMLQSLISKAQQCNNEKLLENPYLQMRGILQLSNDLGVQ

SEQ ID NO: 172142 - protein, 911 aa, Zea Mays
MCMANGSRPYLPKKVGAAALLVGDMDAKINDQQWKYSVIQEFPDIDLLQPSSSAASTFASSQSHLKAITASKRMRSAPNQVWMNIPINTFQPRARPLFQYRYYSEQQPLRLNPAEISEVIAEVCSEATSNANQLIVPSRLSTQSRQPSADVAFSVLIKLVIDMYMMDSETAAPLTLYMLEGMLSSQKSSARTKALDLILNLGVHAHLLQPMVIGDAPLIDKSESVNRSYLSNEYGSSINEPREAEPEVEQKISPAIDQFESWLLKMLFEVLLLLVQIEERQEIVWASALSCLFYFVCDGGKIIRSRLGGLDIRVVKTLLEISVEHSWAKVVHSKLICMLSNMMYQVSDLTQNGVSDTHFVPERIDLLGGIDYICLEYSRANSREEKRDLFFVIFDYVVHQINEACLAGGISTYTYDDAQPLASLLAFADAPEAFYISVKHGVEGVGDMLRKAISAALSQSAQYDQLNVLLDKVMRKLDGTASTFSRIDNEFSYMIQVTKSCKCFGSIKDGCDDADVALRARLCWATLHSLLHSHISSYRHHGYIWLVELLLSEISEETDGSVWSKIQKLQEEIEVAGSQDLSCSEVSLPVCMLCGLLKSKHNFIRWGFLYVLDKFLMRCKLLLDDNDMQDHTTADHNKNCLDKAFAVIDIMNSALLLVVQNNETDHINILKMCDMLFSQLCLRIPSTNAMQVRGLQSLGQLFGYTSKNIDSHLETLASHQSIGNKNICRSETLQDIGIDQSGQSTSFCEASMAALLLRGLAIAPMQLVARVPTSLFFWPLIQLEGAASDDIALGIAVGSTGRGNLPGATSDIRAALLLLLIGKCTADQEALKEVEGNEFFRGLLDDTDSRVAYYSAAFLLKRMMTEEPEIYQRMLQSLISKAQQCNNEKLLENPYLQMRGILQLSNDLGVQ

SEQ ID NO: 172143 - protein, 829 aa, Zea Mays
MNIPINTFQPRARPLFQYRYYSEQQPLRLNPAEISEVIAEVCSEATSNANQLIVPSRLSTQSRQPSADVAFSVLIKLVIDMYMMDSETAAPLTLYMLEGMLSSQKSSARTKALDLILNLGVHAHLLQPMVIGDAPLIDKSESVNRSYLSNEYGSSINEPREAEPEVEQKISPAIDQFESWLLKMLFEVLLLLVQIEERQEIVWASALSCLFYFVCDGGKIIRSRLGGLDIRVVKTLLEISVEHSWAKVVHSKLICMLSNMMYQVSDLTQNGVSDTHFVPERIDLLGGIDYICLEYSRANSREEKRDLFFVIFDYVVHQINEACLAGGISTYTYDDAQPLASLLAFADAPEAFYISVKHGVEGVGDMLRKAISAALSQSAQYDQLNVLLDKVMRKLDGTASTFSRIDNEFSYMIQVTKSCKCFGSIKDGCDDADVALRARLCWATLHSLLHSHISSYRHHGYIWLVELLLSEISEETDGSVWSKIQKLQEEIEVAGSQDLSCSEVSLPVCMLCGLLKSKHNFIRWGFLYVLDKFLMRCKLLLDDNDMQDHTTADHNKNCLDKAFAVIDIMNSALLLVVQNNETDHINILKMCDMLFSQLCLRIPSTNAMQVRGLQSLGQLFGYTSKNIDSHLETLASHQSIGNKNICRSETLQDIGIDQSGQSTSFCEASMAALLLRGLAIAPMQLVARVPTSLFFWPLIQLEGAASDDIALGIAVGSTGRGNLPGATSDIRAALLLLLIGKCTADQEALKEVEGNEFFRGLLDDTDSRVAYYSAAFLLKRMMTEEPEIYQRMLQSLISKAQQCNNEKLLENPYLQMRGILQLSNDLGVQ

SEQ ID NO: 172144 - protein, 1219 aa, Zea Mays
MPLREGAKRVSSARHYAPAAPTPAPAGAPVPPHRPPRSVSAAGSISTASARKPPEPLRRAVADCLSPPAPHTHGPAAAAASATAEASRTLRDYIANPSTMDMAYNVLIDHALAESDRSPAVVPRCVSLLKRYLIRYIPRVQTLRQIDLFCANTIAKCEPMANNRAASFAKNNVSAAAAINSSSLAPPISNFASASLVKSLNYVRSLVARHTPKLSFQSIVAAKQSLPSLSSFLNRSLLSQLTPEVISNREHLESKECHSSPDFISSASEKVDVGEPVDDSKYISFDILSWRWHVYGERQSSLSAKESDFVGLQDFHIHGFLEVGAAALLVGDMDAKINDQQWKYSVIQEFPDIDLLQPSSSAASTFASSQSHLKAITASKRMRSAPNQVWMNIPINTFQPRARPLFQYRYYSEQQPLRLNPAEISEVIAEVCSEATSNANQLIVPSRLSTQSRQPSADVAFSVLIKLVIDMYMMDSETAAPLTLYMLEGMLSSQKSSARTKALDLILNLGVHAHLLQPMVIGDAPLIDKSESVNRSYLSNEYGSSINEPREAEPEVEQKISPAIDQFESWLLKMLFEVLLLLVQIEERQEIVWASALSCLFYFVCDGGKIIRSRLGGLDIRVVKTLLEISVEHSWAKVVHSKLICMLSNMMYQVSDLTQNGVSDTHFVPERIDLLGGIDYICLEYSRANSREEKRDLFFVIFDYVVHQINEACLAGGISTYTYDDAQPLASLLAFADAPEAFYISVKHGVEGVGDMLRKAISAALSQSAQYDQLNVLLDKVMRKLDGTASTFSRIDNEFSYMIQVTKSCKCFGSIKDGCDDADVALRARLCWATLHSLLHSHISSYRHHGYIWLVELLLSEISEETDGSVWSKIQKLQEEIEVAGSQDLSCSEVSLPVCMLCGLLKSKHNFIRWGFLYVLDKFLMRCKLLLDDNDMQDHTTADHNKNCLDKAFAVIDIMNSALLLVVQNNETDHINILKMCDMLFSQLCLRIPSTNAMQVRGLQSLGQLFGYTSKNIDSHLETLASHQSIGNKNICRSETLQDIGIDQSGQSTSFCEASMAALLLRGLAIAPMQLVARVPTSLFFWPLIQLEGAASDDIALGIAVGSTGRGNLPGATSDIRAALLLLLIGKCTADQEALKEVEGNEFFRGLLDDTDSRVAYYSAAFLLKRMMTEEPEIYQRMLQSLISKAQQCNNEKLLENPYLQMRGILQLSNDLGVQ

SEQ ID NO: 172145 - protein, 749 aa, Zea Mays
MYMMDSETAAPLTLYMLEGMLSSQKSSARTKALDLILNLGVHAHLLQPMVIGDAPLIDKSESVNRSYLSNEYGSSINEPREAEPEVEQKISPAIDQFESWLLKMLFEVLLLLVQIEERQEIVWASALSCLFYFVCDGGKIIRSRLGGLDIRVVKTLLEISVEHSWAKVVHSKLICMLSNMMYQVSDLTQNGVSDTHFVPERIDLLGGIDYICLEYSRANSREEKRDLFFVIFDYVVHQINEACLAGGISTYTYDDAQPLASLLAFADAPEAFYISVKHGVEGVGDMLRKAISAALSQSAQYDQLNVLLDKVMRKLDGTASTFSRIDNEFSYMIQVTKSCKCFGSIKDGCDDADVALRARLCWATLHSLLHSHISSYRHHGYIWLVELLLSEISEETDGSVWSKIQKLQEEIEVAGSQDLSCSEVSLPVCMLCGLLKSKHNFIRWGFLYVLDKFLMRCKLLLDDNDMQDHTTADHNKNCLDKAFAVIDIMNSALLLVVQNNETDHINILKMCDMLFSQLCLRIPSTNAMQVRGLQSLGQLFGYTSKNIDSHLETLASHQSIGNKNICRSETLQDIGIDQSGQSTSFCEASMAALLLRGLAIAPMQLVARVPTSLFFWPLIQLEGAASDDIALGIAVGSTGRGNLPGATSDIRAALLLLLIGKCTADQEALKEVEGNEFFRGLLDDTDSRVAYYSAAFLLKRMMTEEPEIYQRMLQSLISKAQQCNNEKLLENPYLQMRGILQLSNDLGVQ

SEQ ID NO: 172146 - protein, 1113 aa, Zea Mays
MSSLTMHLQKVIVVVPRCVSLLKRYLIRYIPRVQTLRQIDLFCANTIAKCEPMANNRAASFAKNNVSAAAAINSSSLAPPISNFASASLVKSLNYVRSLVARHTPKLSFQSIVAAKQSLPSLSSFLNRSLLSQLTPEVISNREHLESKECHSSPDFISSASEKVDVGEPVDDSKYISFDILSWRWHVYGERQSSLSAKESSDFVGLQDFHIHGFLEVGAAALLVGDMDAKINDQQWKYSVIQEFPDIDLLQPSSSAASTFASSQSHLKAITASKRMRSAPNQVWMNIPINTFQPRARPLFQYRYYSEQQPLRLNPAEISEVIAEVCSEATSNANQLIVPSRLSTQSRQPSADVAFSVLIKLVIDMYMMDSETAAPLTLYMLEGMLSSQKSSARTKALDLILNLGVHAHLLQPMVIGDAPLIDKSESVNRSYLSNEYGSSINEPREAEPEVEQKISPAIDQFESWLLKMLFEVLLLLVQIEERQEIVWASALSCLFYFVCDGGKIIRSRLGGLDIRVVKTLLEISVEHSWAKVVHSKLICMLSNMMYQVSDLTQNGVSDTHFVPERIDLLGGIDYICLEYSRANSREEKRDLFFVIFDYVVHQINEACLAGGISTYTYDDAQPLASLLAFADAPEAFYISVKHGVEGVGDMLRKAISAALSQSAQYDQLNVLLDKVMRKLDGTASTFSRIDNEFSYMIQVTKSCKCFGSIKDGCDDADVALRARLCWATLHSLLHSHISSYRHHGYIWLVELLLSEISEETDGSVWSKIQKLQEEIEVAGSQDLSCSEVSLPVCMLCGLLKSKHNFIRWGFLYVLDKFLMRCKLLLDDNDMQDHTTADHNKNCLDKAFAVIDIMNSALLLVVQNNETDHINILKMCDMLFSQLCLRIPSTNAMQVRGLQSLGQLFGYTSKNIDSHLETLASHQSIGNKNICRSETLQDIGIDQSGQSTSFCEASMAALLLRGLAIAPMQLVARVPTSLFFWPLIQLEGAASDDIALGIAVGSTGRGNLPGATSDIRAALLLLLIGKCTADQEALKEVEGNEFFRGLLDDTDSRVAYYSAAFLLKRMMTEEPEIYQRMLQSLISKAQQCNNEKLLENPYLQMRGILQLSNDLGVQ

SEQ ID NO: 172147 - protein, 235 aa, Zea Mays
MCDMLFSQLCLRIPSTNAMQVRGLQSLGQLFGYTSKNIDSHLETLASHQSIGNKNICRSETLQDIGIDQSGQSTSFCEASMAALLLRGLAIAPMQLVARVPTSLFFWPLIQLEGAASDDIALGIAVGSTGRGNLPGATSDIRAALLLLLIGKCTADQEALKEVEGNEFFRGLLDDTDSRVAYYSAAFLLKRMMTEEPEIYQRMLQSLISKAQQCNNEKLLENPYLQMRGILQLTR

SEQ ID NO: 172148 - protein, 176 aa, Zea Mays
MTESISNTTATNEHLRHLAMDRRSTRDECMNAISNQLKDIESLEAESDAHGDKSLETALMWYDKFLGFQVVGGEGVKFVFNKIDVQNPDKKYSFCIKLAGERYILVWCVPSVDDAEELVKDLNCSNDLYKFVRAMREMFQAATISGNLLPSSFCPDVSSITSSSFSALSLDSRSEK

SEQ ID NO: 172149 - protein, 275 aa, Zea Mays
MEEEEGSSTSSVAVPVPPPPNKYDSWTTDPEELMMMMVDEAAVLMSKMENKYTLKIKTCGNGSSLAEDGYKWRKYGQKSIKNSPNPRSYYRCTNPRCNAKKQVERSTDEPDTLVVTYEGLHLHYTYSHFLHHQQPPPQPKKPKLGAGPPQQPIVVMDDDLLHGPAQQDIITTGPLGAAVMAPAPAPPPAAASFCYDLDDDVPAFFDDHDHHHHQQQHITNGGLLEDMVPLLVRRPCTTTTTTSAGSTSPDLSASSSVSWNPTSPYIDMAILSNIF

SEQ ID NO: 172150 - protein, 459 aa, Zea Mays
MWHAMPVSTPSHHLHHGPKQLMGRSFPPFILRALPQLSHCRRRCYAYATVTVIPMASTATTRRRPRRGSKGPNADLSRTLTDCTRRGDAAAAMAAFDAAVDADADAVPRLSAHQYNQLLHLLAATDRSSFPSPPAAAARRVFAHMLQAAAPPSEATITSLARVIAADPASAADEAFELVATMKDKYGLSPRLRSYGPVLAAFRRAGEAAKAYAVEAHMTASGVSPEEPELAALLDVSSRAGDADKVYEYMHKLRQAVHCVSEETAGVVEAWFRSDEAATAGKPQWDAAQVKDAIVANGGGCPPPWVAWNPALDRAAGKSGDADQCGGCRFHLACIDIDMERHRGLLIPLLGLALERETKTNFSRFQEWLEANKDYQAIVDGANIALYQQNFAEGGFSLTQLDGVITELRDRYHGKWPLVILHNKRISKLMENSSNRHLIETWRTNGALYTSPSGSNDDW

SEQ ID NO: 172151 - protein, 504 aa, Zea Mays
MWHAMPVSTPSHHLHHGPKQLMGRSFPPFILRALPQLSHCRRRCYAYATVTVIPMASTATTRRRPRRGSKGPNADLSRTLTDCTRRGDAAAAMAAFDAAVDADADAVPRLSAHQYNQLLHLLAATDRSSFPSPPAAAARRVFAHMLQAAAPPSEATITSLARVIAADPASAADEAFELVATMKDKYGLSPRLRSYGPVLAAFRRAGEAAKAYAVEAHMTASGVSPEEPELAALLDVSSRAGDADKVYEYMHKLRQAVHCVSEETAGVVEAWFRSDEAATAGKPQWDAAQVKDAIVANGGGCPPPWVAWNPALDRAAGKSGDADQCGGCRFHLACIDIDMERHRGLLIPLLGLALERETKTNFSRFQEWLEANKDYQAIVDGANIALYQQNFAEGGFSLTQLDGVITELRDRYHGKWPLVILHNKRISKLMENSSNRHLIETWRTNGALYTSPSGSNDDWYWLYAAIKLNCLLVTNDEMRDHIFELLGPSFFPKWKQRHRLQLRR

SEQ ID NO: 172152 - protein, 453 aa, Zea Mays
MGRLTEEQAAREAGSAGTNAMSLKLTHRALSDVSCLSSFKNLEHLDLGFNCLVTLEGLSSCANLKWLSVKENKLVSLKGVEGLSKLQVLNAGKNELTKMDEVTSLTSLGALILNVLSKNPVFTIGNALVKAKSMKKLSLSHCQIENIGSSLVKCVELKELRLSHNKISTIPSDLAKNVKILSLDLGNNFIERSSDLKVLSELRYLRNLNLQGNPVSKKDSLVKKVKKSVPTLRILNAKPLEATSKSDKRSTKENPPSKDEDLIGIDAKKKDKRKGSKQEVKGLEELEVQSVSTGITTSNPGKLEVPDSKEKKKVKEAKTKKSEEPYHANNSSLKNKEVQSFVYDTSTKDKKEAKRKKFVDEEDVDAEGIDNTEISFADLMFSNVGNPETKLKNISTLEAAPDGKSVGGLVIDHTKKRKKPKGVVTITDSSALKMFSSMPEVGAGGLGLSGWDE

SEQ ID NO: 172153 - protein, 463 aa, Zea Mays
MGRLTEEQAAREAGSAGTNAMSLKLTHRALSDVSCLSSFKNLEHLDLGFNCLVTLEWLSVKENKLVSLKGVEGLSKLQVLNAGKNELTKMDEVTSLTSLGALILNDNNISSICKLDQLQQLNTLVLSKNPVFTIGNALVKAKSMKKLSLSHCQIENIGSSLVKCVELKELRLSHNKISTIPSDLAKNVKILSLDLGNNFIERSSDLKVLSELRYLRNLNLQGNPVSKKDSLVKKVKKSVPTLRILNAKPLEATSKSDKRSTKENPPSKDEDLIGIDAKKKDKRKGSKQEVKGLEELEVQSVSTGITTSNPGKLEVPDSKEKKKVKEAKTKKSEEPYHANNSSLKNKEVQSFVYDTSTKDKKEAKRKKFVDEEDVDAEGIDNTEISFADLMFSNVGNPETKLKNISTLEAAPDGKSVGGLVIDHTKKRKKPKGVVTITDSSALKMFSSMPEVGAGGLGLSGWDE

SEQ ID NO: 172154 - protein, 74 aa, Zea Mays
MVPILQEVSEKLGDKIQVVKIDTEKYTSIASRYRIEALPTFIIFKDGKPCYRFEGALPVDQMIEQIENALAVTK

SEQ ID NO: 172155 - protein, 186 aa, Zea Mays
MIISKKNRREICKYIFHEGVLYAKKDYNLAKHPKLDVPNLEVIKLMQSFKSKEYVRETFSWQYYYWYLTNDGIEHLRSFLNLPSEVVPNTLKKSSKPPSRPFGSGPPGDRPRGPPRFGEDRPRFGDRDGYRGGPRGAMGDFGGEKGSAPADFQPSFRQTWLRPWWRQRFWCQWIFHGVIYQLKREN

SEQ ID NO: 172156 - protein, 559 aa, Zea Mays
MEDGLEEPPPAGSAAANASSTSGGGSGGSKGSPCEECGEQPWKYRCPGCGRLTCSLPCVQAHKRRTACTGKRPRTDPVPLARFDDNQLISDYNLLEEVKQAHDSAHRLIGGFGRNYGGRGSGGAQLPRWLFYLSKAAHRRGVKLCFLPRGMARREQNRSQHNYRKDCIFWTLEWKFNSTDVVLTDHGIDEHTTLLSLLEKHLIPGPWKDQLTQYRNTKLHDLKLFIQKCAKQSESPYRLLNIEEPLRPQLRGILVVEYPTINVFLPSDNCDFEMEKMVNRLPKDGKGPGSMTDEPPVEGSKFHEEEIEEGELSPETEIIDLKDHGTSNACKISPADVTSESKIVNNVDSSVLSYPGCQAQALHGQPKGLNQYSKISPNGTSGPAETKSRMEVCPLDMEKTRESGLSSEGRVVDLKGYGISYPVSTAEAGGAALSKIDTKATYPLVPSSTSIVVSDGATGPQLEHSQQNKRTPSSTPEALKRKSCMKVYPLDIDEGLFPEGRTSRCNVWVTEGRLGGRGDSNIVKEERDASQDVALERKSLCRAFLGHVMRRNGRTLTCT

SEQ ID NO: 172157 - protein, 429 aa, Zea Mays
MAVLPQQGGAPPWCQALLSPQGHGQERAESIATQLQDCIFWTLEWKFNSTDVVLTDHGIDEHTTLLSLLEKHLIPGPWKDQLTQYRNTKLHDLKLFIQKCAKQSESPYRLLNIEEPLRPQLRGILVVEYPTINVFLPSDNCDFEMEKMVNRLPKDGKGPGSMTDEPPVEGSKFHEEEIEEGELSPETEIIDLKDHGTSNACKISPADVTSESKIVNNVDSSVLSYPGCQAQALHGQPKGLNQYSKISPNGTSGPAETKSRMEVCPLDMEKTRESGLSSEGRVVDLKGYGISYPVSTAEAGGAALSKIDTKATYPLVPSSTSIVVSDGATGPQLEHSQQNKRTPSSTPEALKRKSCMKVYPLDIDEGLFPEVPDLAFEQEMLDTYPELFENMDVDDFLSCDFAMVNRDEPVDATSGLPRDDLEEGEIPTL

SEQ ID NO: 172158 - protein, 352 aa, Zea Mays
MNTVASLPLAPRLLIKPSLACFSRKDVGRYGGIKVYAVLREDGAEFARNNNLEALFQVDDPGPRAPVKKFLDVNEALEVVRFDIQYCDWRARQDLLTIMLLHSKVVEVLNPLAREFKSIGTLRKELAELQQELEKAHNQVHLSEARVSSALDKLAHMETLVSAPSTAEPPTSSSLSATASSTARVRAKNKQPRRRLDVSGPVKPYNPSLKNFWYPVAFSSDLKAPDTMVPIDCFEEQWVIFRGKDGRPGCVQNTCAHRACPLHLGSVNEGRIQCPYHGWEYSTDGKCEKMPSTKMLDVRIQSLPCFEQEGMVWIWPGDDPPKATIPSLLPPSGFTVHAECSLYLADSDGATS

SEQ ID NO: 172159 - protein, 286 aa, Zea Mays
MTKKIEGLFFSGQINGTTGYEEAAAQGIISGINAARHSDGKSLIILERESSYIGTLIDDLVTKDLREPYRMLTSRSEHRLLLRSDNADSRLTPLGREIGLIDDRRWELYQSKQARIKQEKERLRSTKVPVSNQPVKDSSTLEAILKKPHVQYKLLDEHGCGNENLSRIEKECVEIDIKYEGFIARQQSQLHQIVNQEHRKLPEDLDYHSMTNLSLEAREKLSKVRPQTIGQASRIGGVSPADMTVLLIWMESNRRMATHRRQREQLGSVAVESDGSSEEAVQASTA

SEQ ID NO: 172160 - protein, 608 aa, Zea Mays
MPDARPPLLRLASARAPCFLRSTLTGLRGRCYLQKRVLNSSKGPAVRALRAQTDKREYAIEMKNSVESTENLFIREAMATEVLIGKNDSIEGVRTFFGMDFYAPSVVLTTGTFMSGKIWVGRTSMPAGRAGESASHGLTENLQFLGFETDRLKTGTPPRIDRRTVDFSGLEPQHGDEEVGWFSFDPEFHVEREQMCCYLTRTTKETHQIVIDNLDETPTYGGWVEAKGPRYCPSIEDKIVRFKDKESHQIFLEPEGRNVPELYLQGFSTGLPERLQLSLVRTIPGLENCLMLRPAYAVEYDYLPAYQCSRSLMTKKIEGLFFSGQINGTTGYEEAAAQGIISGINAARHSDGKSLIILERESSYIGTLIDDLVTKDLREPYRMLTSRSEHRLLLRSDNADSRLTPLGREIGLIDDRRWELYQSKQARIKQEKERLRSTKVPGGEFAAEVTAVSNQPVKDSSTLEAILKKPHVQYKLLDEHGCGNENLSRIEKECVEIDIKYEGFIARQQSQLHQIVNQEHRKLPEDLDYHSMTNLSLEAREKLSKVRPQTIGQASRIGGVSPADMTVLLIWMESNRRMATHRRQREQLGSVAVESDGSSEEAVQASTA

SEQ ID NO: 172161 - protein, 703 aa, Zea Mays
MLLRLRPPRHPSTAAATTLSSFLPSTSFRRLIPLPRWRPPPRRRLSAAAKDSIGRLDPRQERYDVIVVGGGHAGCEAALASARLGARTLLLTLNIDRIAWQPCNPAVGGPAKSQLVHEVDALGGEIGKITDRCYLQKRVLNSSKGPAVRALRAQTDKREYAIEMKNSVESTENLFIREAMATEVLIGKNDSIEGVRTFFGMDFYAPSVVLTTGTFMSGKIWVGRTSMPAGRAGESASHGLTENLQFLGFETDRLKTGTPPRIDRRTVDFSGLEPQHGDEEVGWFSFDPEFHVEREQMCCYLTRTTKETHQIVIDNLDETPTYGGWVEAKGPRYCPSIEDKIVRFKDKESHQIFLEPEGRNVPELYLQGFSTGLPERLQLSLVRTIPGLENCLMLRPAYAVEYDYLPAYQCSRSLMTKKIEGLFFSGQINGTTGYEEAAAQGIISGINAARHSDGKSLIILERESSYIGTLIDDLVTKDLREPYRMLTSRSEHRLLLRSDNADSRLTPLGREIGLIDDRRWELYQSKQARIKQEKERLRSTKVPVTAVSNQPVKDSSTLEAILKKPHVQYKLLDEHGCGNENLSRIEKECVEIDIKYEGFIARQQSQLHQIVNQEHRKLPEDLDYHSMTNLSLEAREKLSKVRPQTIGQASRIGGVSPADMTVLLIWMESNRRMATHRRQREQLGSVAVESDGSSEEAVQASTA

SEQ ID NO: 172162 - protein, 62 aa, Zea Mays
MRKLKLHFISCWLQIKPSCLYCCNYNIQRFFFCKSSRIWYRLNPHEHVDELRASREKKSYGS

SEQ ID NO: 172163 - protein, 791 aa, Zea Mays
MSSAAAVDEMELDGIERHRDKERRERHRREEKDHNGSGRRDREKEKDDRRRDKDDGKHRDRDRDRERDRDKDSKYRDRDKEPERERNRDRDRGKDREREPDRQRDKDRSKDRDKEAERDKERERRDRDKERSRNRDKDKDRTQREDRDHEKSRVKGRGEDEADLSKGDKGVQKQRVDASGDAEQPAADELRERIARAKEERLKEKKEGGILDGNDGASEILSWVGKSRKLDEKRQAEKEKALRLARALEEQDNILAENGDDDDDDKEEDTQVGDHLSGVKVLHGLDKVLEGGAVVMTLKDQSILANGDINEDADMLENIEIGEQKQRDEAYKASKKKGTYDDKFNNDSSSKKSILSHYDDQMEDEGVTLDEGGRFTGEAEKKLEELRKRIEGGYVQKKTEDLTSTTKISTDYFTPDEMLKFKKPKKKKSLRKKEKLDLDALEAEAIASGLGAADRGSRNDGKRQSAREEEQAADAEKRSSGYQTAIAKAEEASRALRGEKTAPAKPAEELVFGDDYEDLQKSLEQARKLALRKQEEASASGPRSIVELATATKSQEETEATEGDSEQNKVVITEMEEFVWGLQLNQGTRKPEDDVFMDEDDDAMPSDNVAKDDTNGLAEMEEDALTEIPAKVEEDEVKPDEVIHEVAVGKGLAGALKILKERGSLNEGTDWGGRTTDKKKSKLIGVEDGPKDIRIERIDEFGRVMTPKEAFRHLSHKFHGKGPGKMKQEKRQKKYHDELKTKHMKSSDTPLLAAEKMREAQSRNQTPYLILSGNAKTGRRSTGVLDAGGRR

SEQ ID NO: 172164 - protein, 414 aa, Zea Mays
MLKFKKPKKKKSLRKKEKLDLDALEAEAIASGLGAADRGSRNDGKRQSAREEEQAADAEKRSSGYQTAIAKAEEASRALRGEKTAPAKPAEELVFGDDYEDLQKSLEQARKLALRKQEEASASGPRSIVELATATKSQEETEATEGDSEQNKVVITEMEEFVWGLQLNQGTRKPEDDVFMDEDDDAMPSDNVAKDDTNGLAEMEEDALTEIPAKVEEDEVKPDEVIHEVAVGKGLAGALKILKERGSLNEGTDWGGRTTDKKKSKLIGVEDGPKDIRIERIDEFGRVMTPKEAFRHLSHKFHGKGPGKMKQEKRQKKYHDELKTKHMKSSDTPLLAAEKMREAQSRNQTPYLILSGNAKTGQTSDSGGYATLETEQPGSLTPMLGDKKVEHFLGIKRSAKPGSLPPPVPKKPKN

SEQ ID NO: 172165 - protein, 236 aa, Zea Mays
MISMDHQMFDDPFGSSGISSLEADIFSAAAGSQLPSPPWPDFDDDYDIPDLSALPANAATSSGGGYGSGGSGGHRKLSHNAYERDRRKQLNDLYSSLRSLLPDADHTKKLSIPTTVSRVLKYIPELQKQVDNLERRKRELTNANCKPGVLNTSEIVTTPIVSATCLNDTEIMVQVSLHSNVAATALPLSKCIKVLEDAGLHLISSSTYSTFGNKTFYSLHLQRSQRTMNEECPAFC

SEQ ID NO: 172166 - protein, 72 aa, Zea Mays
MGRFSSQLEKRVTQVVSLVEIGHRSFGGPDRWAHSPVVLFMSLHSHRRRLSSISRQNRSLFPFSITLPSVAA

SEQ ID NO: 172167 - protein, 61 aa, Zea Mays
MESGVGGDARWDPVAAGSASRAVATGRLGGEATRRKRTRNYLDRERCVGSASAGIWGSDRV

SEQ ID NO: 172168 - protein, 677 aa, Zea Mays
MMRQQQQQLPPPPQHPPPQASSAAGGGGGGEFYRGPPMRQLSAASSTNLPPDYAAHPAPPSQQQHQPPYDAYGDSFGAKRMRKPVQRRTVDYTSSVVRYVQARMWQRDARDRFTLQPTPAAVLDWTPTGRRLITGSQSGEFTLWNGQSFNFEMILQAHDLPVRSMVWSHNENWMVTGDDGGAIKYWQSNMNNVKVNKTAHRESVRGLSFSRTDLKFCSCSDDRTVKVWDFARCQEEKSLTGHGWDVKTVDWHPTKSLLVSGGKDYLVKLWDAKSGRELSSFHGHKNIVHCVKWNQNGNWVLTASKDQIIKLYDIRSMKELQSFRGHTKDVTALAWHPFHEEYFVSGSFDGAIFHWLVGHEAPQIEISNAHDSSVWDLSWHPVGYLLCSGGNDHATKFWCRNRPGDLTRDRYNSGQMQGFGDQHAAFGARGMGGFQMPEPPITPGPFAPGLSRNEGTIPGIGVAMTLAGQSFDGSDGEQRPSIPGLPPGQPPLPPGPHPSLLGQQQQYQQIPQQQHPQFSQPPPPNMPQLQAPAHMLSHSQGSRPTLPQLPPMGGPSVPSQVNPPLPPMPHPTSQMMPQMPQHMMGLNQMHAGSVPPGTVPPMGGFPSGMGNIQGASGSSGVQNFPMGGMYNRPQGQMAPQGQMTSIPGLSSYQGMGNVGLTPPPPQHPPPRGGSATQ

SEQ ID NO: 172169 - protein, 525 aa, Zea Mays
MILQAHDLPVRSMVWSHNENWMVTGDDGGAIKYWQSNMNNVKVNKTAHRESVRGLSFSRTDLKFCSCSDDRTVKVWDFARCQEEKSLTGHGWDVKTVDWHPTKSLLVSGGKDYLVKLWDAKSGRELSSFHGHKNIVHCVKWNQNGNWVLTASKDQIIKLYDIRSMKELQSFRGHTKDVTALAWHPFHEEYFVSGSFDGAIFHWLVGHEAPQIEISNAHDSSVWDLSWHPVGYLLCSGGNDHATKFWCRNRPGDLTRDRYNSGQMQGFGDQHAAFGARGMGGFQMPEPPITPGPFAPGLSRNEGTIPGIGVAMTLAGQSFDGSDGEQRPSIPGLPPGQPPLPPGPHPSLLGQQQQYQQIPQQQHPQFSQPPPPNMPQLQAPAHMLSHSQGSRPTLPQLPPMGGPSVPSQVNPPLPPMPHPTSQMMPQMPQHMMGLNQMHAGSVPPGTVPPMGGFPSGMGNIQGASGSSGVQNFPMGGMYNRPQGQMAPQGQMTSIPGLSSYQGMGNVGLTPPPPQHPPPRGGSATQ

SEQ ID NO: 172170 - protein, 679 aa, Zea Mays
MMRQQQQQLPPPPQHPPPDYAAHPAPPSQQQHQPPYDAYGDSFGAKRMRKPVQRRTVDYTSSVVRYVQARMWQRDARDRFTLQPTPAAVLDMLPSVAYPDNPSTSFAAKFVHSSINKNRCSINRVLWTPTGRRLITGSQSGEFTLWNGQSFNFEMILQAHDLPVRSMVWSHNENWMVTGDDGGAIKYWQSNMNNVKVNKTAHRESVRGLSFSRTDLKFCSCSDDRTVKVWDFARCQEEKSLTGHGWDVKTVDWHPTKSLLVSGGKDYLVKLWDAKSGRELSSFHGHKNIVHCVKWNQNGNWVLTASKDQIIKLYDIRSMKELQSFRGHTKDVTALAWHPFHEEYFVSGSFDGAIFHWLVGHEAPQIEISNAHDSSVWDLSWHPVGYLLCSGGNDHATKFWCRNRPGDLTRDRYNSGQMQGFGDQHAAFGARGMGGFQMPEPPITPGPFAPGLSRNEGTIPGIGVAMTLAGQSFDGSDGEQRPSIPGLPPGQPPLPPGPHPSLLGQQQQYQQIPQQQHPQFSQPPPPNMPQLQAPAHMLSHSQGSRPTLPQLPPMGGPSVPSQVNPPLPPMPHPTSQMMPQMPQHMMGLNQMHAGSVPPGTVPPMGGFPSGMGNIQGASGSSGVQNFPMGGMYNRPQGQMAPQGQMTSIPGLSSYQGMGNVGLTPPPPQHPPPRGGSATQ

SEQ ID NO: 172171 - protein, 89 aa, Zea Mays
MSFWTDDEERREAMAKEAKENLALLEAQLRGQRFFGGEAIGFVDIAACALAHWVGVIEEAAGVVLVGGEEFPALREWADAYINDATVKA

SEQ ID NO: 172172 - protein, 246 aa, Zea Mays
MGKELPLPCLYKYAARRRTETAAVTDSSRTPSQWQPPHAPRHGQDQDARAVPVPPPLLQAAAAAAAAAGACRGRRRRQRVPGAGDGGGGDGARVPQVRRERRRADLAVGAGGAVREPGPRRVGRRGGAHDGRGGRGRRRLHQPARVRGPQRHGGRRRGRRRGGPAPRLPRLRRRRQRRHLRRRARARPPQPRRARLRRAVPPHDRGRRPERRRPHLLRRVQGHDGQGRSMLRKDRLGIFLRRWGGA

SEQ ID NO: 172173 - protein, 482 aa, Zea Mays
MNKVLMATAISKMFLSEHMKSSLGEDGAIEPLVDMFKHGNLEAKHSALGALCNLSSSLQNAELLINSGITGPLLQLLFSVTSALMALREPASAILAAIAQSERILLHKDVAPQMLSLLNLSSPVIQLHLLRALNSISGHANAKRARSKIRQNGGVQLLLPFLTEKNVGIKIAALHLMFHLSKDSSQELAEQFRETHLDIFVKIISSPTSRDEKAAAVGILSNLPATDKKATEILMRANLLPILITLFEANMAAAVTPQRMWLLEGIAGVFIRFTVTWDRKLQSSAVGHGVVPCLVKLLSEGSVDAKSKAATSLAQLSQSTMALRKSKTPRWLCVPPSAESYCTVHSCQCTVKSTFCLVKAGAVHPLVQTLEGEERGADGAALEALGTLMEDEVWENGSRVIERASGIHALLRIAEAGEPSSQDKAIWMLERMFRLEAHRERYGEIAQALLIDLAQKGDPALKPMIGKILAHLELLQTQSSYF

SEQ ID NO: 172174 - protein, 199 aa, Zea Mays
MAAPPVQPVPTAAAAAAAVNGDAFRLGFVGAGNLAESIARGVAASGVLPASAIRTAPHRRPERGEAFASFGACLLQTNAHVVDDSDVIVISVKPQIVKQVLLQLRPRLSEKKLLVSIAAGIKMQDLQDWSGQRRIIRVMPNTPSAVGQAASVMCLGEMATQDDENRVRKLFSAIGKVWTAEEKYFDAVTGLRFLVLQLW

SEQ ID NO: 172175 - protein, 53 aa, Zea Mays
MPLPVTKGLDRALQQLVQLLLLLVVPAHRIYIHLRYICNQTAASNESSYLHKL

SEQ ID NO: 172176 - protein, 980 aa, Zea Mays
MGIEDYHVIDLVGEGSFGKVYKGRRKYTRQTVAMKFILKHGKTDKDIHNLRQEIEILRKLKHENIIEMIDAFETPQEFCVVTEFAQGELFEVLEDDKCLPEEQVQAIAKQLVKALYYLHSNRIIHRDMKPQNILIGKGSIVKLCDFGFARAMSANTVVLRSIKGTPLYMAPELVREQPYNHTADLWSLGVILYELFVGQPPFYTNSVYALIRHIVKDPVKYPDNMSTNFKSFLKGLLNKVPQSRLTWPALLEHPFVKDDSMGSAAESRPAPFEARGSEDTQKAEETQSRNQPSPAGPQSRITATNRENASDKPKGNRKLDDPMQATQDRHGSPTGAVAESCSPSECTALDKLEKASQTVEGASSIVQDIEALSTILTPIKIWLTNTPSSTRELNIDGANQSLRIIKNLIDAGSCQSYAAIDISLLLEFTNLIIKTKLSNAYGLVVKCLAIARKLLDTSDEVILNSYDRHWLSLYELYSQILVSTVDSSGRISRESTACLALMLSRVISGLKASMSSEDPKPVEESLLKIIDHARTSQLLELLCECLMASGSDTLSGSTNMVPAACEACKAIWYLAHAVDIMSIGAHHFSFPLANSWRQIHSMQEQSSKADSNSTNLINIFVKSFLASRPIQVAVYHCLHNGLESAIHACLQESRQNSNQKCKLSNPHALVVHCCLALATIAACLKSEGGSSASLVLTSSQKKQRSRLSVLAHLSSVDDTVKSCLQPHCASAMLALSSLVSLENGGQTRSSLCETALALFPRMATLHTLLKLWLSDGSEALCRYNAGLLNLFGLRDGSIGLLETRLKWGGPLAIEQACSVGIPQLLIRLLTDGFIKEVSDGKDGSTSRSGLSPLGVVWTLSALSQCLPGGVFREILYRREQLKLLTDLLSDTHLKALAAWTGLGGGKRGVRELINSVVDILAFPFVAVQSSPNMPSASASINSGFLLNVASPGGRIGTENKEMLKTIEQNMPQYIQVLLEV

SEQ ID NO: 172177 - protein, 712 aa, Zea Mays
MQATQDRHGSPTGAVAESCSPSECTALDKLEKASQTVEGASSIVQDIEALSTILTPIKIWLTNTPSSTRELNIDGANQSLRIIKNLIDAGSCQSYAAIDISLLLEFTNLIIKTKLSNAYGLVVKCLAIARKLLDTSDEVILNSYDRHWLSLYELYSQILVSTVDSSGRISRESTACLALMLSRVISGLKASMSSEDPKPVEESLLKIIDHARTSQLLELLCECLMASGSDTLSGSTNMVPAACEACKAIWYLAHAVDIMSIGAHHFSFPLANSWRQIHSMQEQSSKADSNSTNLINIFVKSFLASRPIQVAVYHCLHNGLESAIHACLQLISRACLQNVTFCAIMCRPWNSPSDVDVVEYGGDGTIVSDMFSLLSLCGSYLNKESRQNSNQKCKLSNPHALVVHCCLALATIAACLKSEGGSSASLVLTSSQKKQRSRLSVLAHLSSVDDTVKSCLQPHCASAMLALSSLVSLENGGQTRSSLCETALALFPRMATLHTLLKLWLSDGSEALCRYNAGLLNLFGLRDGSIGLLETRLKWGGPLAIEQACSVGIPQLLIRLLTDGFIKEVSDGKDGSTSRSGLSPLGVVWTLSALSQCLPGGVFREILYRREQLKLLTDLLSDTHLKALAAWTGLGGGKRGVRELINSVVDILAFPFVAVQSSPNMPSASASINSGFLLNVASPGGRIGTENKEMLKTIEQNMPQYIQVLLEV

SEQ ID NO: 172178 - protein, 393 aa, Zea Mays
MWACTTSVDFSLAQFVQVIVLLATGGANGGGYLASKYVVLAIYCAILVLHGLINSLPIHWLAFFGQLGAFWNLGGVFVLTVLIPVVAKERASMEFMFTHCYTDDAVGIHSKVYVLAIGLLTSQYSLLGYDTSAHMSEETKNAEWSGPMGIVVSVALSSVFGWIYLVALTSAVTADDVPSLLDPTNDAGGNAIAQALYATFRRRFGSGAGGVLCLAAMAVAIFLCGVASVTSNSRMGYAFSRDGAMPLSQVWYRVNKQEVPFNVVWLSVSVAFVMALTSLGSQVAFQAMVSITTLGMYIAYALPIFFRVTAARNSFVPGPFHLGRRCSLVVGWVAVLWVALVTVLFCLPVAYPVAGVNFNYTPVAVGGVLVLSLGAWVLHARFWFRGPVTTIDA

SEQ ID NO: 172179 - protein, 331 aa, Zea Mays
MGIHSKAYILAVGLLMSQYSSIGYDTSAHMTEETKKADWSGPMGIVYSVALSSVFGWVYLLALTSVVTDIPYLLDTGNDAGGYAIAQALYDTFRRRYGTGAGGIACLVIIAVAVFLCGTACVTSNSRMGYAFSRDGAMPFSHLWYRVNKQEVPFNVVWLSVSVAFVMALTVCMHAMRKLFHLLSFSTARTTHICAHAVAGEPGGVPGHGVHRDAGSLHRLRAAHLLPRDDGEEVVRPRAISPREMRHRCRLGGRAMGGPRHRALLPAGGVPRRQGHLQLHAGGRRRRAGAQPRRVGAPRPVLVSWAYHKRLTLFAGFGSYFRCILCSVNLF

SEQ ID NO: 172180 - protein, 63 aa, Zea Mays
MHPASHLGPRGDDRASDVVPTTSCSWWTYGRMVDLTSGCSPSEYLPQQTLSKCQTKGKPRFYA

SEQ ID NO: 172181 - protein, 124 aa, Zea Mays
MMHAHSSRLLRPNYFSGAFYSILINISSSLYGLYKYSHLATHLFPKASRPRSILIVLTIYPTLVSSKFHFRKVGNHDLLTSLYWYSLRYQLWRNRPNYSSLSAQVAPLRAATHLNRNNPSVPRI

SEQ ID NO: 172182 - protein, 65 aa, Zea Mays
MLSAFIINTINKTTTFCIFTQHNYDITSIHIYLTCYGFSLVLLFITQKHHRPHKSNQDNVSLNTT

SEQ ID NO: 172183 - protein, 103 aa, Zea Mays
MSTTILRPTAKTFQPHLYNLLIKSIESDMAHHKQTQSAFARTTVIPICASLRHRRASSGLPSPRKTRGSLLLKNKTKQHTYIINHRKIMSMRNRTRSVAVSPG

SEQ ID NO: 172184 - protein, 187 aa, Zea Mays
MGYNCLFTDVGVTVFRRSDNSIAFKGVLEGQLYLVDFDRAELDTCLIAKTNMGWLWHRRLAHVGMKNLHKLLKGEHILGLTNVHFEKDRICSACQAGKQVGTHHPHKNIMTSDRPLELLHMDLFGPIAYISIGGSKYCLVIVDDYSCFTWVFFLQKKSHTQETLKGFLRRAQNEFGLRIKKIRSDNG

SEQ ID NO: 172185 - protein, 189 aa, Zea Mays
MSIGDVCPKESEKPPHAQDQPSSSTQASPPTQNEDEAQVDEVEDQANEPPQDDDIDQGGDANNQEKEDEQEPRPPHPRVHQAIQRDHPVDTILGDIRKGVTTRSRIAHFCEHYSFVSSIEPHRVEEALQDSDWVVAMQEELNNFTRNEVWHLVPRPNQNVVGTKWVFRNKQDEHGVVTRNKARLVAKGY

SEQ ID NO: 172186 - protein, 253 aa, Zea Mays
MKDAKPIKTPMGTNGHLDLDTGGKSVDQKVYRSMIGSLLYLCASRPDIMLSVCMCARFQSDPKESHLTAVKRILRYLAYTPKFGLWYPRGSTFDLIGYSDADWAGCKINRESTSGTCQFLGRYLVSWASNKQNLVALSTAEAEYIAAGHCCAQLLWMRQTLRDYGYKLTKVPLLCDNESAIKMADNPVEHSRTKHIAIRYHFLRDHQQKGDIEIAYINTKDQLADIFTKPLDEQTFTKLRHELNILDSRNFFC

SEQ ID NO: 172187 - protein, 918 aa, Zea Mays
MASSTKSDLVSGSPDGHGYFNAQRGSYAAASLERSGSFREGGDGYAMFSASNSSRSAAVNSINLVQSLALDLRPATVDHKTSRLDLKKSISSIFGTSAEDSTSLPSLGRNLPNAIEEIRRMRSNLNDNSNKARERSRAFGGAMAKIDKLCPNIVRKRSRGDSSSNERSSVLSSGGVTPKNVPQSHLNADDMEAGLQREERTKNAGQNRRIRTSMVEMDARTAGPSRGPGPTDRISDPGKATNGSSAVPEEKIRGLATTIDGWEKPKMKKKRSTIKADMSLAGVLRTVDVDRESKQGMQHKFTNDGRARMTSSSFRSGTVASGTTKADLLSTQNGLVMRPLNRSDQDNGFHPTNKRERQAALDKETPNPRTINKPNEDDSGCNIASLPKANGSARGPRSNSGSILKSYPNIHRSQASSDDWEHPSGTNKLISAGGSGIHKRTKSTHSLSPPIQWGGQRPQKISRSARKSNLVPIITTDSALVPGSLDSPVNEDCAGLPRRASVNSLQQTKRGDHGLSTGPEGNEPVVAEKKLRDKGKRAGELDDGHGSGFQKIAMLGHPSKRNKLPADEDIGDALRRQARVVPGFTLTRPGTPVSIDKLENAPITKQRSVRTVSERTESKSGRPLMKKISERKSNARPRHTSSSVQSDSPVQSEDDHEELLASANAALRSACASTFWRQVEPFFAFLTAEDITYLSQQIHLPDDSSSSRSMEGGECQKYKGGLEYISHPSTPAASNKDDHAALPNGFGLNQLDNDIGVGWEASCIEPILDQLVHGIGVPGWSSVGQRLIQALIDEDRIDSITNNTYISEGYAFDTHEIHFDGGGWKPHSNNYKLEPLANFEASRRGPNGLTMDSDWKYNDVSNRSGNVMDKTKVWPEFQYSEMCFNDRIIIELSEVGVSIEPVLSFRLLALFGIDYFQL

SEQ ID NO: 172188 - protein, 1334 aa, Zea Mays
MASSTKSDLVSGSPDGHGYFNAQRGSYAAASLERSGSFREGGDGYAMFSASNSSRSAAVNSINLVQSLALDLRPATVDHKTSRLDLKKSISSIFGTSAEDSTSLPSLGRNLPNAIEEIRRMRSNLNDNSNKARERSRAFGGAMAKIDKLCPNIVRKRSRGDSSSNERSSVLSSGGVTPKNVPQSHLNADDMEAGLQREERTKNAGQNRRIRTSMVEMDARTAGPSRGPGPTDRISDPGKATNGSSAVPEEKIRGLATTIDGWEKPKMKKKRSTIKADMSLAGVLRTVDVDRESKQGMQHKFTNDGRARMTSSSFRSGTVASGTTKADLLSTQNGLVMRPLNRSDQDNGFHPTNKRERQAALDKETPNPRTINKPNEDDSGCNIASLPKANGSARGPRSNSGSILKSYPNIHRSQASSDDWEHPSGTNKLISAGGSGIHKRTKSTHSLSPPIQWGGQRPQKISRSARKSNLVPIITTDSALVPGSLDSPVNEDCAGLPRRASVNSLQQTKRGDHGLSTGPEGNEPVVAEKKLRDKGKRAGELDDGHGSGFQKIAMLGHPSKRNKLPADEDIGDALRRQARVVPGFTLTRPGTPVSIDKLENAPITKQRSVRTVSERTESKSGRPLMKKISERKSNARPRHTSSSVQSDSPVQSEDDHEELLASANAALRSACASTFWRQVEPFFAFLTAEDITYLSQQIHLPDDSSSSRSMEGGECQKYKGGLEYISHPSTPAASNKDDHAALPNGFGLNQLDNDIGVGWEASCIEPILDQLVHGIGVPGWSSVGQRLIQALIDEDRIDSITNNTYISEGYAFDTHEIHFDGGGWKPHSNNYKLEPLANFEASRRGPNGLTMDSDWKYNDVSNRSGNVMDKTKVWPEFQYSEMCFNDRIIIELSEVGVSIEPVGTVVVVGLRAHSSEGLREVKGSGEVSDGGASRGQREAGIVAAAWGRAVHQGSGLFLALNAVTAEVVLLQHEIRIEFPVCIKPDLAQSEDEDINAEICKLEGQLRKEVVEKKNLLLKLDGIVATAKESQHREFSRLAMDRLLLRAYEKYMAFCGPNVSSSKNVNRTGKHAALSFVKRVLVRCQNYEEAGTSCFDEPIFKDMFLSATSHRRSLDTASQDNNTTARPVHRAGAPDASRGSSHPTDLSFAKEDPWTNNVKQRELLLDEVVGSITGGALRTSSSVLGISLVSNTKGKRSEREGKGHNRDSLRSGRPSPSNAKGERKNKTKLRQKAANISAPSGGLQLPAKTTPPSSGNGKEESAAAAAAAAARHGGDPAANASNDAEMPDLANLELPGLDADFGGWLNLDDDDALQDLDLMGLEIPMDDINEINLMI

SEQ ID NO: 172189 - protein, 1284 aa, Zea Mays
MASSTKSDLVSGSPDGHGYFNAQRGSYAAASLERSGSFREGGDGYAMFSASNSSRSAAVNSINLVQSLALDLRPATVDHKTSRLDLKKSISSIFGTSAEDSTSLPSLGRNLPNAIEEIRRMRSNLNDNSNKARERSRAFGGAMAKIDKLCPNIVRKRSRGDSSSNERSSVLSSGGVTPKNVPQSHLNADDMEAGLQREERTKNAGQNRRIRTSMVEGKLGAVVRAVSPSLQVAGLIWQCGLVAVFSMMDARTAGPSRGPGPTDRISDPGKATNGSSAVPEEKIRGLATTIDGWEKPKMKKKRSTIKADMSLAGVLRTVDVDRESKQGMQHKFTNDGRARMTSSSFRSGTVASGTTKADLLSTQNGLVMRPLNRSDQDNGFHPTNKRERQAALDKETPNPRTINKPNEDDSGCNIASLPKANGSARGPRSNSGSILKSYPNIHRSQASSDDWEHPSGTNKLISAGGSGIHKRTKSTHSLSPPIQWGGQRPQKISRSARKSNLVPIITTDSALVPGSLDSPVNEDCAGLPRRASVNSLQQTKRGDHGLSTGPEGNEPVVAEKKLRDKGKRAGELDDGHGSGFQKIAMLGHPSKRNKLPADEDIGDALRRQARVVPGFTLTRPGTPVSIDKLENAPITKQRSVRTVSERTESKSGRPLMKKISERKSNARPRHTSSSVQSDSPVQSEDDHEELLASANAALRSACASTFWRQVEPFFAFLTAEDITYLSQQIHLPDDSSSSRSMEGGECQKYKGGLEYISHPSTPAASNKDDHAALPNGFGLNQLDNDIGVGWEASCIEPILDQLVHGIGVPGWSSVGQRLIQALIDEDRIDSITNNTYISEGYAFDTHEIHFDGGGWKPHSNNYKLEPLANFEASRRGPNGLTMDSDWKYNDVSNRSGNVMDKTKVWPEFQYSEMCFNDRIIIELSEVGVSIEPVPDLAQSEDEDINAEICKLEGQLRKEVVEKKNLLLKLDGIVATAKESQHREFSRLAMDRLLLRAYEKYMAFCGPNVSSSKNVNRTGKHAALSFVKRVLVRCQNYEEAGTSCFDEPIFKDMFLSATSHRRSLDTASQDNNTTARPVHRAGAPDASRGSSHPTDLSFAKEDPWTNNVKQRELLLDEVVGSITGGALRTSSSVLGISLVSNTKGKRSEREGKGHNRDSLRSGRPSPSNAKGERKNKTKLRQKAANISAPSGGLQLPAKTTPPSSGNGKEESAAAAAAAAARHGGDPAANASNDAEMPDLANLELPGLDADFGGWLNLDDDDALQDLDLMGLEIPMDDINEINLMI

SEQ ID NO: 172190 - protein, 1333 aa, Zea Mays
MASSTKSDLVSGSPDGHGYFNAQRGSYAAASLERSGSFREGGDGYAMFSASNSSRSAAVNSINLVQSLALDLRPATVDHKTSRLDLKKSISSIFGTSAEDSTSLPSLGRNLPNAIEEIRRMRSNLNDNSNKARERSRAFGGAMAKIDKLCPNIVRKRSRGDSSSNERSSVLSSGGVTPKNVPQSHLNADDMEAGLQREERTKNAGQNRRIRTSMVEGKLGAVVRAVSPSLQVAGLIWQCGLVAVFSMMDARTAGPSRGPGPTDRISDPGKATNGSSAVPEEKIRGLATTIDGWEKPKMKKKRSTIKADMSLAGVLRTVDVDRESKQGMQHKFTNDGRARMTSSSFRSGTVASGTTKADLLSTQNGLVMRPLNRSDQDNGFHPTNKRERQAALDKETPNPRTINKPNEDDSGCNIASLPKANGSARGPRSNSGSILKSYPNIHRSQASSDDWEHPSGTNKLISAGGSGIHKRTKSTHSLSPPIQWGGQRPQKISRSARKSNLVPIITTDSALVPGSLDSPVNEDCAGLPRRASVNSLQQTKRGDHGLSTGPEGNEPVVAEKKLRDKGKRAGELDDGHGSGFQKIAMLGHPSKRNKLPADEDIGDALRRQARVVPGFTLTRPGTPVSIDKLENAPITKQRSVRTVSERTESKSGRPLMKKISERKSNARPRHTSSSVQSDSPVQSEDDHEELLASANAALRSACASTFWRQVEPFFAFLTAEDITYLSQQIHLPDDSSSSRSMEGGECQKYKGGLEYISHPSTPAASNKDDHAALPNGFGLNQLDNDIGVGWEASCIEPILDQLVHGIGVPGWSSVGQRLIQALIDEDRIDSITNNTYISEGYAFDTHEIHFDGGGWKPHSNNYKLEPLANFEASRRGPNGLTMDSDWKYNDVSNRSGNVMDKTKVWPEFQYSEMCFNDRIIIELSEVGVSIEPVSEDEDINAEICKLEGQLRKEVVEKKNLLLKLDGIVATAKESQHREFSRLAMDRLLLRAYEKYMEGCSISVSMWSRVVGDRTSSCVVSVSSRTCKWERESSLIKSIYRRKSTDGMWSVAFCGPNVSSSKNVNRTGKHAALSFVKRVLVRCQNYEEAGTSCFDEPIFKDMFLSATSHRRSLDTASQDNNTTARPVHRAGAPDASRGSSHPTDLSFAKEDPWTNNVKQRELLLDEVVGSITGGALRTSSSVLGISLVSNTKGKRSEREGKGHNRDSLRSGRPSPSNAKGERKNKTKLRQKAANISAPSGGLQLPAKTTPPSSGNGKEESAAAAAAAAARHGGDPAANASNDAEMPDLANLELPGLDADFGGWLNLDDDDALQDLDLMGLEIPMDDINEINLMI

SEQ ID NO: 172191 - protein, 998 aa, Zea Mays
MRPLNRSDQDNGFHPTNKRERQAALDKETPNPRTINKPNEDDSGCNIASLPKANGSARGPRSNSGSILKSYPNIHRSQASSDDWEHPSGTNKLISAGGSGIHKRTKSTHSLSPPIQWGGQRPQKISRSARKSNLVPIITTDSALVPGSLDSPVNEDCAGLPRRASVNSLQQTKRGDHGLSTGPEGNEPVVAEKKLRDKGKRAGELDDGHGSGFQKIAMLGHPSKRNKLPADEDIGDALRRQARVVPGFTLTRPGTPVSIDKLENAPITKQRSVRTVSERTESKSGRPLMKKISERKSNARPRHTSSSVQSDSPVQSEDDHEELLASANAALRSACASTFWRQVEPFFAFLTAEDITYLSQQIHLPDDSSSSRSMEGGECQKYKGGLEYISHPSTPAASNKDDHAALPNGFGLNQLDNDIGVGWEASCIEPILDQLVHGIGVPGWSSVGQRLIQALIDEDRIDSITNNTYISEGYAFDTHEIHFDGGGWKPHSNNYKLEPLANFEASRRGPNGLTMDSDWKYNDVSNRSGNVMDKTKVWPEFQYSEMCFNDRIIIELSEVGVSIEPVGTVVVVGLRAHSSEGLREVKGSGEVSDGGASRGQREAGIVAAAWGRAVHQGSGLFLALNAVTAEVVLLQHEIRIEFPVCIKPDLAQSEDEDINAEICKLEGQLRKEVVEKKNLLLKLDGIVATAKESQHREFSRLAMDRLLLRAYEKYMAFCGPNVSSSKNVNRTGKHAALSFVKRVLVRCQNYEEAGTSCFDEPIFKDMFLSATSHRRSLDTASQDNNTTARPVHRAGAPDASRGSSHPTDLSFAKEDPWTNNVKQRELLLDEVVGSITGGALRTSSSVLGISLVSNTKGKRSEREGKGHNRDSLRSGRPSPSNAKGERKNKTKLRQKAANISAPSGGLQLPAKTTPPSSGNGKEESAAAAAAAAARHGGDPAANASNDAEMPDLANLELPGLDADFGGWLNLDDDDALQDLDLMGLEIPMDDINEINLMI

SEQ ID NO: 172192 - protein, 256 aa, Zea Mays
MVEIYGKEASGKTTLALHVIKEAQKNGGYCAYIDAENAFNPSFAESIGVDSERLLIAQPDSAENSLSIVAALIPKCEIEGEIYTNCGDIQSHLMTRALRKIQYTLCRSETLIIFVNQVRTKRTSSNPGIYKEVPCGGNALGFYAAVRMRTSRRELRYSEDEATGVGISVQIIKNKLAPANLKKEAGIDITFGKGICHESEILETASSVGVILKDGCGYWINNEFLAGKVEAEKFLRENAAVADEICNTVRNEFLQR

SEQ ID NO: 172193 - protein, 358 aa, Zea Mays
MLLRNLYKFPVDMQLDYESDPPLDDTKAIEKESSLNVAVSQLAIDFDRDSNLCLERFSRARKASVVSTGSLKLDLALGVGGLPKGRMVEIYGKEASGKTTLALHVIKEAQKNGGYCAYIDAENAFNPSFAESIGVDSERLLIAQPDSAENSLSIVNTLVGGSVAVVVVDSVAALIPKCEIEGEIYTNCGDIQSHLMTRALRKIQYTLCRSETLIIFVNQVRTKRTSSNPGIYKEVPCGGNALGFYAAVRMRTSRRELRYSEDEATGVGISVQIIKNKLAPANLKKEAGIDITFGKGICHESEILETASSVGVILKDGCGYWINNEFLAGKVEAEKFLRENAAVADEICNTVRNEFLQR

SEQ ID NO: 172194 - protein, 299 aa, Zea Mays
MSFARMGKETHFVRFGSKVVRYQPQGRMVEIYGKEASGKTTLALHVIKEAQKNGGYCAYIDAENAFNPSFAESIGVDSERLLIAQPDSAENSLSIVNTLVGGSVAVVVVDSVAALIPKCEIEGEIYTNCGDIQSHLMTRALRKIQYTLCRSETLIIFVNQVRTKRTSSNPGIYKEVPCGGNALGFYAAVRMRTSRRELRYSEDEATGVGISVQIIKNKLAPANLKKEAGIDITFGKGICHESEILETASSVGVILKDGCGYWINNEFLAGKVEAEKFLRENAAVADEICNTVRNEFLQR

SEQ ID NO: 172195 - protein, 283 aa, Zea Mays
MSFARMGKETHFVRFGSKVVRYQPQGRMVEIYGKEASGKTTLALHVIKEAQKNGGYCAYIDAENAFNPSFAESIGVDSERLLIAQPDSAENSLSIVAALIPKCEIEGEIYTNCGDIQSHLMTRALRKIQYTLCRSETLIIFVNQVRTKRTSSNPGIYKEVPCGGNALGFYAAVRMRTSRRELRYSEDEATGVGISVQIIKNKLAPANLKKEAGIDITFGKGICHESEILETASSVGVILKDGCGYWINNEFLAGKVEAEKFLRENAAVADEICNTVRNEFLQR

SEQ ID NO: 172196 - protein, 272 aa, Zea Mays
MVEIYGKEASGKTTLALHVIKEAQKNGGYCAYIDAENAFNPSFAESIGVDSERLLIAQPDSAENSLSIVNTLVGGSVAVVVVDSVAALIPKCEIEGEIYTNCGDIQSHLMTRALRKIQYTLCRSETLIIFVNQVRTKRTSSNPGIYKEVPCGGNALGFYAAVRMRTSRRELRYSEDEATGVGISVQIIKNKLAPANLKKEAGIDITFGKGICHESEILETASSVGVILKDGCGYWINNEFLAGKVEAEKFLRENAAVADEICNTVRNEFLQR

SEQ ID NO: 172197 - protein, 416 aa, Zea Mays
MRGILSSSSALLRRAGAQLSRTDCSSPSASATSPLRRSPLQNGKRDTFCSLWFKGRSVSTTGITIYPIVDMQLDYESDPPLDDTKAIEKESSLNVAVSQLAIDFDRDSNLCLERFSRARKASVVSTGSLKLDLALGVGGLPKGRMVEIYGKEASGKTTLALHVIKEAQKNGGYCAYIDAENAFNPSFAESIGVDSERLLIAQPDSAENSLSIVNTLVGGSVAVVVVDSVAALIPKCEIEGEIYTNCGDIQSHLMTRALRKIQYTLCRSETLIIFVNQVRTKRTSSNPGIYKEVPCGGNALGFYAAVRMRTSRRELRYSEDEATGVGISVQIIKNKLAPANLKKEAGIDITFGKGICHESEILETASSVGVILKDGCGYWINNEFLAGKVEAEKFLRENAAVADEICNTVRNEFLQR

SEQ ID NO: 172198 - protein, 163 aa, Zea Mays
MTRALRKIQYTLCRSETLIIFVNQVRTKRTSSNPGIYKEVPCGGNALGFYAAVRMRTSRRELRYSEDEATGVGISVQIIKNKLAPANLKKEAGIDITFGKGICHESEILETASSVGVILKDGCGYWINNEFLAGKVEAEKFLRENAAVADEICNTVRNEFLQR

SEQ ID NO: 172199 - protein, 354 aa, Zea Mays
MHKWWRSPGPALLAAALAIVVAALRPATEHAAAKGRPPLRFGPGGAFKVALFADLHYGEDAWTDWGPAQDAASDRVMAAVLDAENPDLVVYLGDLVTANNLPVPNASLYWDRAVSAARGRGVPWATVFGNHDDMAFEWPPEWFSPDGVPPLRWPPGPGSGCGFRGTPRTDLMAAETGANRLLSYSSSGPRELWPGVSNYVLQVLSRGRRARGDGHDHDPALLMYFLDSGGGSYTEVVSSAQVRWFHTQSQFLNPDGRIPELIFWHIPSTAYAKVAPKAKSEIRKPCVGSINEEEVAPQAQRRYTNLLNPSACLILLYNVQYRGYFFIYINNVYKYNNTKNKSTGGHSIWPPVVS

SEQ ID NO: 172200 - protein, 405 aa, Zea Mays
MGRVGLGVAAGCAAATCAIAAALVARRAAARSRWRRAVALLREFEDGCATPPPRLRQVVDAMVVEMHAGLASDGGSKLKMLLTFVDALPAGNEEGTYYSIDLGGTNFRVLKVEVGDGSVVTRRKVELPIPEELIKGTIEELFNFVAVTLKEFVEAEDGKDEQRALGFTFSFPVRQTSVSSGSLIRWTKGFLIEDVVGKDVAQCLNEALARSGLNVRVTALVNDTVGTLALGHYHDEDTVAAVIIGAGTNACYIERTDAIIKCQGLLTNSGGMVVNMEWGNFWSSHLPRTPYDISLDDETQNRNDQGFEKMISGIYLGEIARLVLHRMALESDVFGDAADNLSTPFTLRYLKFSMFCLFHFFLCSGKGEVDFFKGNVASIGLYLLPMQYSMLCSASLDSCFPMSST

SEQ ID NO: 172201 - protein, 454 aa, Zea Mays
MFAMEYYTLIRKCMKPHCLFFESFPDIASICFCLGPSKAIAVSVQFPRNEEGTYYSIDLGGTNFRVLKVEVGDGSVVTRRKVELPIPEELIKGTIEELFNFVAVTLKEFVEAEDGKDEQRALGFTFSFPVRQTSVSSGSLIRWTKGFLIEDVVGKDVAQCLNEALARSGLNVRVTALVNDTVGTLALGHYHDEDTVAAVIIGAGTNACYIERTDAIIKCQGLLTNSGGMVVNMEWGNFWSSHLPRTPYDISLDDETQNRNDQGFEKMISGIYLGEIARLVLHRMALESDVFGDAADNLSTPFTLSTPLLAAIRKDDSPDLSEVRRILQDHLKIPDTPLKTRRLVVKVCDIVTRRAARLAAAGIVGILKKLGRDGSGIASSGRTRGQLRRTVVAIEGGLYEGYPEFREYLDEALVEILGEEVARTVTLEVTVDGSGAGAALLAAVHSSNRQQGSI

SEQ ID NO: 172202 - protein, 72 aa, Zea Mays
MYIILQYLRILQYSSKTMKKLHSQTPPYFLTNRSYFLNQLNLKQTREEILIDLDPPFLTNQSYFLNQRNLWF

SEQ ID NO: 172203 - protein, 63 aa, Zea Mays
MGVTPLGIFSVLVLGWLGDHICVSSVQMSPTLLQSSSHVQCCRDLRETVLKKGIPLGSCQRLP

SEQ ID NO: 172204 - protein, 62 aa, Zea Mays
MEISLTYEFYRTIFVVKGCLLSLSAIKGVRKVVMITEGHKRALLKPNTDVLSQSSAFRIVHI

SEQ ID NO: 172205 - protein, 114 aa, Zea Mays
MVTRFQIKLAKPLCRGQFIHQLIKDWNRIRALHCYSVEIAVINTEAPRLIFLLDQQYWRCKQTVALLDDSLRQHVTYLCLYFILESRWITIGLDIERVSTRDQWNSMVTLSAGR

SEQ ID NO: 172206 - protein, 495 aa, Zea Mays
MGKDAGEAQQQPDGAGGGAGGGAGGNRGGRFCFCGGGGAARVVRLQCVAALVLGVAVLLSALFWLPPFAGWGGGKEGPDPGDEFGAAIAASFRLHKTVPELSGNKSQLELDIYEEVGIPNSTVVVNMIHPLDGSNWTNIIFNIVPFPENVTISSTWLSILRSKFMSLVVRQSSIHLTEPLFGNASAFEVIKFPGGITIIPPQTAFLLQKPHATFNFTLNYPIYKLQDRTNELKDQMKAGLLLNPYENLYIKLTNSQGSTILPPTIVETSIVLEVGNHQPSVPRMKQLARTITNSSSSSGNLGLNHTVFGRVKQISLSSYLRHSLHSGRGSDAPSPAPMHHHGHHSHHHRHHHHSHDDNRHPAAPAPAPVHFPAPQPRYGAPPPSGGCPYSKNKPKKSGRAAPAAEPAANDHRSASIALPPHPSSPSPASWSQHAPSTPAVPPPPALPEPPLPTISFAHPRPPSERGTGTSPAPSEEATRAGPSGMSQVAPAPHSC

SEQ ID NO: 172207 - protein, 310 aa, Zea Mays
MQLKDKFLVQTTVVPYGTSDEELVPAVFSKETGRYIEESKLRVVLVSSYQSLEEQPTNGIHDTEPAVEVPLLKEMPNLGSEVPDVAKEIPAPLVQGPAIVTGIPSPVKEVPGLREIPVPLNEAPTLLAEFPSPQKDPSAITVEHASNVTIEHAPAISIESPPLKQSVPVFKESPLKQSVAVFKESPPLKQSISVFKESPPLEETTPKEAVMLSDRGLFNVQNHQLSHVTEDVQNMKSKLNNLESKLEEAEKMIIRLREESRNTTQERDELQQEMVFLRKKGTARSQMGFPLLFVVYVALLGTCIGYLLRI

SEQ ID NO: 172208 - protein, 596 aa, Zea Mays
MGCGGSKEAVATGNSGSSRCNRFKRKSSVVDATQPSSRVLQPSLDNASAAAAAKASNGEVTKDKAATLKQKAVEEKKEEAVAVKNSKEAVSVKEGNAASSKASAIREEKPQVETKTDEAAAVTDAASEAAAAAVEKAGKEALAGKAAREKEGDEVVVVVKDKAVIAGQGLRIKHSSRTKQSSSTGGDVNAITVTAGKEEHIIRKDDVVKISTTEAAVDKGNNGGDEPDGTPYMAAIEENDDEAASSTEDVGDAVEEEDKKEVDDGSVTFPVSMVAEEDGSVTFKVRVNDAEAKDDDGSVKFATAAAGAAPTTSSNVVAVVAEEDGSVTFAVPVSPVIKDDDESVTSAAAPAAKVQDVVGAVVAEDDGSVTLAKPLAPVSVTKGGHSVSFVPARPATTKDDDDSVASAASPMTMDDEFVSLPVALEEEEEEEENEHWKDNDEAENEPAVSDDEEGTAEADGATEAEEDEEEAGQSEPSEDNDEVDDDADLPDPTAVEQLLTKAVEEIKAEEERSAADTVGENVSSKEPDEGKPIAPSRPRDEDGGEPDGKEPMDLEEEEARTTEEKTPDDHPGIPAEKKSGSDDKDSALPVSASSSS

SEQ ID NO: 172209 - protein, 272 aa, Zea Mays
MIEIIVDVENCLQQAYFGFASDINAVVVVFRGTQENSIQNWIEDLLWKQLDLDYPGMPEAMVHRGFYSAYHNTTLRDGVVSGIQRTRKAYGDIPIMITGHSMGGAMASFCALDLVVNYGLDGVNLMTFGQPRIGNAAFASYFKTYLPQAIRVTHAHDIVPHLPPYFSFFPQKTYHHFPREVWTHNIGLGTLVYPVEKICDDSGEDPTCCRSVSGSSVRDHIYYLGVSMHAEDWSSCRIVMDYSKLQYQMDLNGNLVLSKQPGLSNARGFSAQ

SEQ ID NO: 172210 - protein, 208 aa, Zea Mays
MYFDLQLTVYICVQCVKCTLLPPTVLIIQFLSIQNWIEDLLWKQLDLDYPGMPEAMVHRGFYSAYHNTTLRDGVVSGIQRTRKAYGDIPIMITGHSMGGAMASFCALDLVVNYGLDGVNLMTFGQPRIGNAAFASYFKTYLPQAIRVTHAHDIVPHLPPYFSFFPQKTYHHFPREVWTHNIGLGTLVYPVEKICDDSGEDPTCCSKWK

SEQ ID NO: 172211 - protein, 634 aa, Zea Mays
MRVVLLLIVLCGASMVIGDGVLTPAISVLSSMSGLQVRATGLKHSSVVLLSCIVLVGLFALQHRGTQKVAFVFAPIVIIWLLSIGGIGLYNILHWNPNIYQALSPYYMVKFFRKTGKDGWIALGGILLSMTGSEAMFADLGHFTSASVRVAFITVIYPCLILQYMGHAAFLSKNTFHMPTGFYDTIPEPVFWPVFVVATLAAVVGSQAVISATFSIVKQCHALGCFPRVKVVHTSRWIYGQIYIPEINWILMVLCVAVTIAFRDTTLIGNAYGIACMTVMFVTTFLMALIIIFVWQRNIIFALVFLVFFGSIEAVYLSSSLMKVTQGGWVPLVLAFIFMSVMYIWHYGLRRKYQFDLQNKVSMRSILSLGPSLGIVRVPGIGLIYTELVTGVPSIFSHFVTNLPAFHEVLVFLCVKSVPVPYVSPDERYLVGRIGPKEYRMYRCIVRYGYKDVQRDDDNFENMLVMNIAKFIMMEAEDASSSASYDVSNEGRMAVITTTDASGSPLAMRDFDGLADSMTMRSSKSETLRSLQSSYEQESPSVSRRRRVRFEVPEEDGMGRQVKEELMALVEAKHAGVAYIMGHSYIKARRSSSFLKKFAIDVGYSFLRKNCRGPSVTLHIPHISLIEVGMIYYV

SEQ ID NO: 172212 - protein, 764 aa, Zea Mays
MNLLLLAYQSFGVVYGDLSTSPLYVYKSTFSGKLNQYQDEETVFGVLSLIFWTFTLIPLLKYVTIVLSADDNGEGGPFALYSLLCRHTKLSLLPNQQAADEELSSYYRNGFAPSNGSSPWLRRFLEKHKKMRVVLLLIVLCGASMVIGDGVLTPAISVLSSMSGLQVRATGLKHSSVVLLSCIVLVGLFALQHRGTQKVAFVFAPIVIIWLLSIGGIGLYNILHWNPNIYQALSPYYMVKFFRKTGKDGWIALGGILLSMTGSEAMFADLGHFTSASVRVAFITVIYPCLILQYMGHAAFLSKNTFHMPTGFYDTIPEPVFWPVFVVATLAAVVGSQAVISATFSIVKQCHALGCFPRVKVVHTSRWIYGQIYIPEINWILMVLCVAVTIAFRDTTLIGNAYGIACMTVMFVTTFLMALIIIFVWQRNIIFALVFLVFFGSIEAVYLSSSLMKVTQGGWVPLVLAFIFMSVMYIWHYGLRRKYQFDLQNKVSMRSILSLGPSLGIVRVPGIGLIYTELVTGVPSIFSHFVTNLPAFHEVLVFLCVKSVPVPYVSPDERYLVGRIGPKEYRMYRCIVRYGYKDVQRDDDNFENMLVMNIAKFIMMEAEDASSSASYDVSNEGRMAVITTTDASGSPLAMRDFDGLADSMTMRSSKSETLRSLQSSYEQESPSVSRRRRVRFEVPEEDGMGRQVKEELMALVEAKHAGVAYIMGHSYIKARRSSSFLKKFAIDVGYSFLRKNCRGPSVTLHIPHISLIEVGMIYYV

SEQ ID NO: 172213 - protein, 336 aa, Zea Mays
MPCGYTSAFYKKCLYGVHMLLLDMHHYYHTRRDSFVTHRAFCDALAQENNKLSQPMNMATVASALQGQAPHHHHHHHLALPSSSQAADDHDNAAGDDDNDGDDFAIDTKSPQLRMLPAMSDSAAADNNNNNNPLFLPPPSMAGCMLSSLQQGGAARPAPPPPASYFSGGGKAAGLYDPSASSPASMSATALLQKAAEMGATAGGYGAGAGFSTVGFGPMMAGPSVMGLFGPVKTPAALSLEVYDGMPLGPTQLVGLDVGRLLPGQHHLYGSSHGHGVGIGSMTRAIGSLMHGGGQQAEQHRRPDDDTRVVDYLGVDDQRTCFSGVSPFGPHIGPWA

SEQ ID NO: 172214 - protein, 432 aa, Zea Mays
MATNRFVCEICHKGFQRDQNLQLHRRGHNLPWKLRQRGGPGGGADGGGPPRKRVYVCPEASCVHHNPARALGDLTGIKKHYCRKHGEKKWKCERCAKRYAVHSDWKAHAKVCGTREYKCDCGTVFSRRDSFVTHRAFCDALAQENNKLSQPMNMATVASALQGQAPHHHHHHHLALPSSSQAADDHDNAAGDDDNDGDDFAIDTKSPQLRMLPAMSDSAAADNNNNNNPLFLPPPSMAGCMLSSLQQGGAARPAPPPPASYFSGGGKAAGLYDPSASSPASMSATALLQKAAEMGATAGGYGAGAGFSTVGFGPMMAGPSVMGLFGPVKTPAALSLEVYDGMPLGPTQLVGLDVGRLLPGQHHLYGSSHGHGVGIGSMTRAIGSLMHGGGQQAEQHRRPDDDTRVVDYLGVDDQRTCFSGVSPFGPHIGPWA

SEQ ID NO: 172215 - protein, 80 aa, Zea Mays
MNMTHVEGEEVGLLVGAGGEVDGDDLEVEALLVEHGGHAHHVGGQRHPVQLQRRHPCCCCLVKSLARVQAAVDRSRVGAS

SEQ ID NO: 172216 - protein, 221 aa, Zea Mays
MPGATRSWRRSRRSSTPTCWSPSCASPASRRSCGRSSRCSSRSSRHQYHQLRAKGRRSPRTTSLRSRADPANLPRSAAPPPTRPRPPRRSRATRYLRRRSPSRAPAEERPRIRRPRTAKKTPAPTTSAAATIRPRHRHRRSKDPARRRGKRNRSSRSPAYEPYYYSAPQPAPYSYQYQYQPASSSEDYYYSAPPQRSAFSPPREGYGDMFNDENANSCTVM

SEQ ID NO: 172217 - protein, 94 aa, Zea Mays
MHVGGGQTLLLSFASLAEVFVQRRSRETLVIFFTQAGKVATCVVGGRGDFSSSAVAVTGSVQRKVFVIMASSLLEYLPPAAKRVKIARKDWQAE

SEQ ID NO: 172218 - protein, 412 aa, Zea Mays
MSGLLAEALGAAAGGCALLLIVIIIIVLCLQHRKRTSDSSESGFSDQALPESQEARCLSLEELNFATRNFSNGNLIGQGTFGEVYKGLLQDGTIVAVKRRHSPPSQEFIQEVNYLASLCHWNLVKLLGYCQEDGMQMLVYEYISNGSVSTHLHGNSHALGSRLEFKKRLSIAHGTAKGLSHLHSLTPPAVHMNFKTSNVLVDEDFAPKVADTGIPGMLDRLGVTGLSSRTFNDPFVEPRMKEAMNLNFSIQSDVYSFGVFLLELISGRKAVSDQCIIQWAQSFQESSDISVIADSRMAGGFTSQSMKELLSLTARCVNPTSEQRPSMSSVEAEIQRIREQEISLTAVMAEGTPTVTLGSQLFRTSRGINDIFLLLNNNKNGWVVANQRLLIVQRISLACVFFSLPFKVLEKT

SEQ ID NO: 172219 - protein, 232 aa, Zea Mays
MQMLVYEYISNGSVSTHLHGNSHALGSRLEFKKRLSIAHGTAKGLSHLHSLTPPAVHMNFKTSNVLVDEDFAPKVADTGIPGMLDRLGVTGLSSRTFNDPFVEPRMKEAMNLNFSIQSDVYSFGVFLLELISGRKAVSDQCIIQWAQSFQESSDISVIADSRMAGGFTSQSMKELLSLTARCVNPTSEQRPSMSSVEAEIQRIREQEISLTAVMAEGTPTVTLGSQLFRTSR

SEQ ID NO: 172220 - protein, 312 aa, Zea Mays
MVPTTRNLLLHHDVDGKSSRGRPCYHPAGHQYYVGIAAQLEASAASAAWQQDHQSKPSRSPRLLGMADDDEQPDAAAGPSTSSASPGGAGAGNGRGGDWLQLGLAAAAASASSSGDNSTMDPDPPAPTELELSAYDKRNACRMRRPPLFPLPLRSYHPPYGYGRYRPAAAAASRSMPFMPPSRCSSSDAIIRVISPPRRRTEAPRLWLTLQAAPNQSREPVLPQIAKSYLRIKDSNMTVEVVMKYLAEKLGVARSRSRSRSHQPAGLQEPRARGQGRRPERLRERERTVNPSCPVRQCPPATAKATSASRQP

SEQ ID NO: 172221 - protein, 169 aa, Zea Mays
MAIPVRSAAAPRRLVPSIPPASSGHVRGLACFGTRTGPRGARGLSMVVADSTSRRAKQADGGDGVLGAPVLGGLGMEGLGDQLSVVMKFGGSSVSSAARMAEVAGLILTFPEERPVVVLSAMGKTTNNLLLAGEKAVGCGVIHVSEIEEWNMVKSLHIKRWMNLDFQDL

SEQ ID NO: 172222 - protein, 387 aa, Zea Mays
MAIPVRSAAAPRRLVPSIPPASSGHVRGLACFGTRTGPRGARGLSMVVADSTSRRAKQADGGDGVLGAPVLGGLGMEGLGDQLSVVMKFGGSSVSSAARMAEVAGLILTFPEERPVVVLSAMGKTTNNLLLAGEKAVGCGVIHVSEIEEWNMVKSLHIKTVDELGLPRSVIQDMLDELEQLLKGIAMMKELTPRTSDYLVSFGECMSTRIFSAYLNKIRVKARQYDAFDIGFITTDEFGNADILEATYPAVAKRLHGDWIQDPAIPVVTGFLGKGWKSGAVTTLGRGGSDLTATTIGKALGLREIQVWKDVDGVLTCDPNIYPHAKTVPYLTFEEATELAYFGAQVLHPQSMRPAREGDIPVRVKNSYNPKAPGTLITRQRDMDKVW

SEQ ID NO: 172223 - protein, 347 aa, Zea Mays
MAIPVRSAAAPRRLVPSIPPASSGHVRGLACFGTRTGPRGARGLSMVVADSTSRRAKQADGGDGVLGAPVLGGLGMEGLGDQLSVVMKFGGSSVSSAARMAEVAGLILTFPEERPVVVLSAMGKTTNNLLLAGEKAVGCGVIHVSEIEEWNMVKSLHIKTVDELGLPRSVIQDMLDELEQLLKGIAMMKELTPRTSDYLVSFGECMSTRIFSAYLNKIRVKYDAFDIGFITTDEFGNADILEATYPAVAKRLHGDWIQDPAIPVVTGFLGKGWKSGAVTTLGRGGSDLTATTIGKALGLREIQVWKDVDGVLTCDPNIYPHAKTVPYLTFEEATELAYFGAQDLNPV

SEQ ID NO: 172224 - protein, 413 aa, Zea Mays
MAIPVRSAAAPRRLVPSIPPASSGHVRGLACFGTRTGPRGARGLSMVVADSTSRRAKQADGGDGVLGAPVLGGLGMEGLGDQLSVVMKFGGSSVSSAARMAEVAGLILTFPEERPVVVLSAMGKTTNNLLLAGEKAVGCGVIHVSEIEEWNMVKSLHIKTVDELGLPRSVIQDMLDELEQLLKGIAMMKELTPRTSDYLVSFGECMSTRIFSAYLNKIRVKARQYDAFDIGFITTDEFGNADILEATYPAVAKRLHGDWIQDPAIPVVTGFLGKGWKSGAVTTLGRGGSDLTATTIGKALGLREIQVWKDVDGVLTCDPNIYPHAKTVPYLTFEEATELAYFGAQVLHPQSMRPAREGDIPVRVKNSYNPKAPGTLITRQRDMDKVVLTSIVLKSNVTMLDIVSTRMLGICYI

SEQ ID NO: 172225 - protein, 361 aa, Zea Mays
MKRDGATGDEIVEALIANSSTFGNKTVFSQEKYKLKKQKKYAPKVLLRRPSARSICETYFKKTPARIGFMRVDTLSLLLSMANIGAYSDVLVVDMVGGLVVGAVAERLGGTGYVCSTYLGSAPSSIDIIRMYNLSSDMVSRIVQAPISALCSMQSSGNTPSVVNSSAEGEMIEPAVDEDAQSSLAQQVDTAVPDEKAQLSTDQPSDMEVSEPSLDEHLVQDENSSLGGKDSDGTLNASKPPKPGKAPSPEKMKYWKEHGFSSLIVAAPGHEVERLVADMLPLLSYSAPFAIYHQHLEPLAKCMHSLQLSKMAIGLQLSEPWLREYQVLPSRTHPHMQMNAFGGYILNGIRIHNPDRVVANK

SEQ ID NO: 172226 - protein, 443 aa, Zea Mays
MDPQPPPICREAWEGCSVLLDINDGDRLAFFRLTPGATVKIGNKTCSLKPLVGRPFGSLFRLGAGGLVPCAAADATSRDHNTPDDANGQTQDETRDNRSLVDNNTAQNLSSDDIEAMKRDGATGDEIVEALIANSSTFGNKTVFSQEKYKLKKQKKYAPKVLLRRPSARSICETYFKKTPARIGFMRVDTLSLLLSMANIGAYSDVLVVDMVGGLVVGAVAERLGGTGYVCSTYLGSAPSSIDIIRMYNLSSDMVSRIVQAPISALCSMQSSGNTPSVVNSSAEGEMIEPAVDEDAQSSLAQQVDTAVPDEKAQLSTDQPSDMEVSEPSLDEHLVQDENSSLGGKDSDGTLNASKPPKPGKAPSPEKMKYWKEHGFSSLIVAAPGHEVERLVADMLPLLSYSAPFAIYHQHLEPLAKCMHSLQLSKMAIGLQLSEPWLREYQI

SEQ ID NO: 172227 - protein, 452 aa, Zea Mays
MDPQPPPICREAWEGCSVLLDINDGDRLAFFRLTPGATVKIGNKTCSLKPLVGRPFGSLFRLGAGGLVPCAAADATSRDHNTPDDANGQTQDETRDNRSLVDNNTAQNLSSDDIEAMKRDGATGDEIVEALIANSSTFGNKTVFSQEKYKLKKQKKYAPKVLLRRPSARSICETYFKKTPARIGFMRVDTLSLLLSMANIGTGYVCSTYLGSAPSSIDIIRMYNLSSDMVSRIVQAPISALCSMQSSGNTPSVVNSSAEGEMIEPAVDEDAQSSLAQQVDTAVPDEKAQLSTDQPSDMEVSEPSLDEHLVQDENSSLGGKDSDGTLNASKPPKPGKAPSPEKMKYWKEHGFSSLIVAAPGHEVERLVADMLPLLSYSAPFAIYHQHLEPLAKCMHSLQLSKMAIGLQLSEPWLREYQVLPSRTHPHMQMNAFGGYILNGIRIHNPDRVVANK

SEQ ID NO: 172228 - protein, 283 aa, Zea Mays
MDPQPPPICREAWEGCSVLLDINDGDRLAFFRLTPGATVKIGNKTCSLKPLVGRPFGSLFRLGAGGLVPCAAADATSRDHNTPDDANGQTQDETRDNRSLVDNNTAQNLSSDDIEAMKRDGATGDEIVEALIANSSTFGNKTVFSQEKYKLKKQKKYAPKVLLRRPSARSICETYFKKTPARIGFMRVDTLSLLLSMANIGAYSDVLVVDMVGGLVVGAVAERLGGTGYVCSTYLGSAPSSIDIIRMYNLSSDMVSRRQLVPYVQCKVLGIPLLLSIVALKGR

SEQ ID NO: 172229 - protein, 231 aa, Zea Mays
MYNLSSDMVSRIVQAPISALCSMQSSGNTPSVVNSSAEGEMIEPAVDEDAQSSLAQQVDTAVPDEKAQLSTDQPSDMEVSEPSLDEHLVQDENSSLGGKDSDGTLNASKPPKPGKAPSPEKMKYWKEHGFSSLIVAAPGHEVERLVADMLPLLSYSAPFAIYHQHLEPLAKCMHSLQLSKMAIGLQLSEPWLREYQVLPSRTHPHMQMNAFGGYILNGIRIHNPDRVVANK

SEQ ID NO: 172230 - protein, 267 aa, Zea Mays
MVGGLVVGAVAERLGGTGYVCSTYLGSAPSSIDIIRMYNLSSDMVSRIVQAPISALCSMQSSGNTPSVVNSSAEGEMIEPAVDEDAQSSLAQQVDTAVPDEKAQLSTDQPSDMEVSEPSLDEHLVQDENSSLGGKDSDGTLNASKPPKPGKAPSPEKMKYWKEHGFSSLIVAAPGHEVERLVADMLPLLSYSAPFAIYHQHLEPLAKCMHSLQLSKMAIGLQLSEPWLREYQVLPSRTHPHMQMNAFGGYILNGIRIHNPDRVVANK

SEQ ID NO: 172231 - protein, 472 aa, Zea Mays
MDPQPPPICREAWEGCSVLLDINDGDRLAFFRLTPGATVKIGNKTCSLKPLVGRPFGSLFRLGAGGLVPCAAADATSRDDANGQTQDETRDNRSLVDNNTAQNLSSDDIEAMKRDGATGDEIVEALIANSSTFGNKTVFSQEKYKLKKQKKYAPKVLLRRPSARSICETYFKKTPARIGFMRVDTLSLLLSMANIGAYSDVLVVDMVGGLVVGAVAERLGGTGYVCSTYLGSAPSSIDIIRMYNLSSDMVSRIVQAPISALCSMQSSGNTPSVVNSSAEGEMIEPAVDEDAQSSLAQQVDTAVPDEKAQLSTDQPSDMEVSEPSLDEHLVQDENSSLGGKDSDGTLNASKPPKPGKAPSPEKMKYWKEHGFSSLIVAAPGHEVERLVADMLPLLSYSAPFAIYHQHLEPLAKCMHSLQLSKMAIGLQLSEPWLREYQVLPSRTHPHMQMNAFGGYILNGIRIHNPDRVVANK

SEQ ID NO: 172232 - protein, 51 aa, Zea Mays
MNQARSYIIFLTSSPAKICNRGAKPCAANSGSYALRSQGSPIPSTRTRHAM

SEQ ID NO: 172233 - protein, 413 aa, Zea Mays
MGAHATAAAAAVLLVATCVAAAAAAPLQQHEPGRISGDAVGVLDDDPVGKLKVFVYEMPRKYNRMLLDKDSRCLHHMFAAEIFMHQFLLSSAVRTLDPEEADWFYTPAYTTCDLTPQGFPLPFRAPRIMRSAIRYVATTWPFWNRTDGADHFFLTPHDFGACFHYQEERAMERGILPLLRRATLVQTFGQRTSSAPARRAPSSSTSGASSTTWATTPRAATTPGALARRCGRTSRTTRCSTSRRSTRRRTTRTCSAPSSACARWGGRPGAPGWWRRWCSGASPSSSPTTSCCRSRTPSPGRTSACSWRSGTCRASTPSSPPSRCPTSCGGSACWRGTPSSRRCCSTSPPGPGTPSTRCSTGWRGSCRTARACSCSPGRRRSTGTPDSRATSSPGSGLDSLYISSCSFVLFHLT

SEQ ID NO: 172234 - protein, 733 aa, Zea Mays
MEPRTEGDASRNLRQGRLLEPPPVPAVRTSPEGVQRHTGQDVIASRSQSAAASETGSSLPCEDGNATAETIGSSTHPVHIGVQNQDIEQEQVHETGKRYKRLTSDVWNYFTKKKEIIEENGKKREQIWGYCNFPNCKRRYRAEGRQGTTAFKNHLRSAHSIVRGQQQLKFEKDLGNNITHIQPFMYDQEVSVKKLIMAIIMHDYPFNIVEHGYFVDFIKSLHPSFPIKSCNAVGKEVMDTYLEEKEKLYAHLKTVHCRFSVTMDMWTSCSNKSYMCVTVHWINDDWCIQKRIIGFFNVKGRHTGKKLSETFTEAMVRWNLDKKLFSLTLDNASANELAVKDIISDLKDGQASLVCDGLFFHVRCACHILNLVARDGLKVISKTIDKIKALVLAVKGSPLQWKELMKCASESELDTKRGISLDVSARWNSTYLMLRDALYYKDAFARLKSSNRHMYVKNYPSPDEWDMALKIFQCLKKVYSLAEILSGTSYPTANLFYRGFCDIKVLLDDWCSSDDATISEMAIAMSQKIEKYWEHSNLALAVACFLDPRYKKKVIEYYMKKFHGDGYHVELEKIVNVVRGLYCFYSSSTPAPAKSTSPEPANSASDILMASVSDELDSFLYGTNEPTLVRSNELEKYMADPLLRLGGPFDGPFDILAWWKSKREVYPILSQIVRDVMAIQVSTVASESVFNAAGRFVDPYRNRLEPEMVEALICTKDWIAAERKEILRLLVQL

SEQ ID NO: 172235 - protein, 600 aa, Zea Mays
MYDQEVSVKKLIMAIIMHDYPFNIVEHGYFVDFIKSLHPSFPIKSCNAVGKEVMDTYLEEKEKLYAHLKTVHCRFSVTMDMWTSCSNKSYMCVTVHWINDDWCIQKRIIGFFNVKGRHTGKKLSETFTEAMVRWNLDKKLFSLTLDNASANELAVKDIISDLKDGQASLVCDGLFFHVRCACHILNLVARDGLKVISKTIDKIKALVLAVKGSPLQWKELMKCASESELDTKRGISLDVSARWNSTYLMLRDALYYKDAFARLKSSNRHMYVKNYPSPDEWDMALKIFQCLKKVYSLAEILSGTSYPTANLFYRGFCDIKVLLDDWCSSDDATISEMAIAMSQKIEKYWEHSNLALAVACFLDPRYKKKVIEYYMKKFHGDGYHVELEKIVNVVRGLYCFYSSSTPAPAKSTSPEPANSASDILMASVSDELDSFLYGTNEPTLVRSNELEKYMADPLLRLGGPFDGPFDILAWWKSKREVYPILSQIVRDVMAIQVSTVASESVFNAAGRFVDPYRNRLEPEMVEALICTKDWIAAERKDSKIVGSIVSDLEIETLSTVMANKIRAVDDKDIEWKDQEHDGENEYIDSDLDVMDDHNEL

SEQ ID NO: 172236 - protein, 102 aa, Zea Mays
MASRKQDATTELGELNHQRTRRDGGFARAESGRPIRAGAEQKNSGVHGRQRKIRAGSWPGTIGAAESRRAMANCTAASSAEELGGRVRAAEKPGASSKATAR

SEQ ID NO: 172237 - protein, 732 aa, Zea Mays
MRIMIKGGVWKNTEDEILKAAVMKYGKNQWARISSLLVRKSAKQCKARWYEWLDPSIKKTEWTREEDEKLLHLAKLMPTQWRTIAPIVGRTPSQCLERYEKLLDAACAKDENYEANDDPRKLRPGEIDPNPESKPARPDPVDMDEDEKEMLSEARARLANTRGKKAKRKAREKQLEEARRLASLQKRRELKAAGIDTRHRKRKRKGIDYNAEIPFEKRPPSGFYDTVGEDRPPEHVQFPTTIEELEGKRRADIEAQLRKQDIARNKILQRQDAPAAIMQANKLNDPEAVTKRSKLMLPPPQISDHELEEIAKMGSAGDPALADELGEGSTATRTLLASYSQTPRLGMTPLRTPQRTPAGKGDAIMMEAENLARLRESQTPLLGGDNPELHPSDFSGVTPRKKEIQTPNPMATPLASPGPGITPRISMTPSREGHSFGLTPKATPLRDELNINEVEMQDNTKLELRRQAELRKSLRSGFASIPQPKNEYQIVMPPITEDEKEEAEEKIEEDMSDRLARERAEEQARHEALLRKRSKVLQRSLPRPPAVSVEIIRQSLIRSGESRSRSTFMPPTSLEQADELINEELLRLLEHDNAKYPLDEKTQKEKKKGSKRQQNGGPLVPEIDDFDEDELKEASSMVEEEIQYLRVAMGHENESFEDFVKAHDACQDDLMFFPTSNSYGLASVAGNADKISALQNEFETVKKRMDDEAKKASRLEQKIKLLTQGYQSMLST

SEQ ID NO: 172238 - protein, 276 aa, Zea Mays
MHILQNLKGLMTMQRLGLTRLHLPPRCSHCSICNNCVERFDHHCPWVGQCIGLRNYRFFYMFVFSTTLLCLYVFGFCWVFVVKIRNAEQITIWKAMTKTPASVALIIYTFIAVWFVGGLSVFHLYLMSTNQTTYENFRYRYDQRANPYNRGIMVNIKQILFTTIPPSKNNFCGRVQQEHGLRPRPTNGFMSPNMGRAVGDIEMGRKPVAWDEPRMAAEIGDLGAGLSNLLEDKDGRFRSASPDLSRDALAVGGGLEEEGSSAMNAGRSSWGVEAGR

SEQ ID NO: 172239 - protein, 289 aa, Zea Mays
MNEASASAGVGTGSGGEVPLVYKAWKGNNVFLLKGRFIFGPDARSLFVTMFLIVAPVSIFCPLVAKELMDKFSYGLGLPVMIAAVLFTAYDLSLLLLTSGRDPGIIPRNAHPPEPEGFDDNAEVGANQTPPVRLPRVKDVVVNGITVKIKYCDTCMLYRPPRCSHCSICNNCVERFDHHCPWVGQCIGLRNYRFFYMFVFSTTLLCLYVFGFCWVFVVKIRNAEQITIWKAMTKTPASVALIIYTFIAVWFVGGLSVFHLYLMSTNQTTYENFRYRYDQRANPYNRGIM

SEQ ID NO: 172240 - protein, 363 aa, Zea Mays
MFLIVAPVSIFCPLVAKELMDKFSYGLGLPVMIAAVLFTAYDLSLLLLTSGRDPGIIPRNAHPPEPEGFDDNAEVGANQTPPVRLPRVKDVVVNGITVKIKYCDTCMLYRPPRCSHCSICNNCVERFDHHCPWVGQCIGLRNYRFFYMFVFSTTLLCLYVFGFCWVFVVKIRNAEQITIWKAMTKTPASVALIIYTFIAVWFVGGLSVFHLYLMSTNQTTYENFRYRYDQRANPYNRGIMVNIKQILFTTIPPSKNNFCGRVQQEHGLRPRPTNGFMSPNMGRAVGDIEMGRKPVAWDEPRMAAEIGDLGAGLSNLLEDKDGRFRSASPDLSRDALAVGGGLEEEGSSAMNAGRSSWGVEAGR

SEQ ID NO: 172241 - protein, 320 aa, Zea Mays
MSAGFNKQILAQKLSKLNSSQQSIETLSHWCVFHHRYCQQVVETWDCEFHAAPGERRVSLLYLANDIMQNSRKEGNGYITEFMRVIPAALNEVLTIRDDFGRNVPKRLIDIWEDRKIFDTQAQSLKDDFFRRLKDIRNKLKNTGSELLEKVVSSYKHVLNAPMDEDTLMRKCQAALINFDELNKTYGNNSVLGSSNQSEFMQGVQEQHNILRNSIEQLKLSESLRATLISHLKEALNEQELKVEQVRSLLQLSLDSRELLSSAWGLEATWKCMSHQIKGIRGLASLIHLVLLLQELRSLFKRDSQVQCCIHRREMVLSTS

SEQ ID NO: 172242 - protein, 212 aa, Zea Mays
MSAGFNKQILAQKLSKLNSSQQSIETLSHWCVFHHRYCQQVVETWDCEFHAAPGERRVSLLYLANDIMQNSRKEGNGYITEFMRVIPAALNEVLTIRDDFGRNVPKRLIDIWEDRKIFDTQAQSLKDDFFRRLKDIRNKLKNTGSELLEKVVSSYKHVLNAPMDEDTLMRKCQAALINFDELNKTYSASEFRIGIGQLDYRCLDAQEFGTGI

SEQ ID NO: 172243 - protein, 269 aa, Zea Mays
MAYCYYPARACYLLFLIYQPVVYYLLLMAPHTIALSFSYDFSNPGDLDRANLTYLGNSIAGDGIINLTNMNDTWSTGGVAYPQPVRLWDHRTGRRASFTTNFSFAISGERTYNRADGMAFFIGSFRSAVPLDSGGGFLGLISNITPPPLSTVGVEFDTNRNIWDPQDAIDHFGIDVNNITSIVVYKSLGQDFPNPLSGTMSAGVNYDGSSKVLSVSLRLANGDVHDLETSVDLKAAGVPQYATIGFSAATGNHVESHQLLSWSFNSRGK

SEQ ID NO: 172244 - protein, 271 aa, Zea Mays
MAYCYYPARACYLLFLIYQPVVYYLLLMAPHTIALSFSYDFSNPGDLDRANLTYLGNSIAGDGIINLTNMNDTWSTGGVAYPQPVRLWDHRTGRRASFTTNFSFAISGERTYNRADGMAFFIGSFRSAVPLDSGGGFLGLISNITPPPLSTVGVEFDTNRNIWDPQDAIDHFGIDVNNITSIVVYKSLGQDFPNPLSGTMSAGVNYDGSSKVLSVSLRLANGDVHDLETSVDLKAAGVPQYATIGFSAATGNHVESHQLLSWSFNSRGLLS

SEQ ID NO: 172245 - protein, 109 aa, Zea Mays
MVGQRILAEDCEEQPTPLGVGVRDLVEDDGDEGLHVDDGGGLSPDGLVGGFELVEARLLDAGSLGGEATFLGGLGRSGCGSGGGVICHDVRRESDPWTRPAEGSANRAI

SEQ ID NO: 172246 - protein, 497 aa, Zea Mays
MASADAAKPASPPAADPPVDDPMDADPAPPAGEEEQATPQKQQPEKKRGGRRKKGEAAEKTPPSSKKSAGPTVERPSRERKTVERYAELAPRATPAKKSPAILQGSGTKLKDIPNVSFKLSKRKVDENLQSLHTVLYGRKSNRNISQFSGFVWTDNQEKQRNRIKEKLEKFNKEKLLDFCEILDVIVKVTMKKEEVSAKLLEFLESPCVTRDVVLTDKKKGKKRGRKSKVGRETTAEGASTEKKRKRAHKQAAEDGKENDGEDDDPTGSEDASTGEEADGDSEANDHALSDDEHDEPASKKKSSDVKQKKETGSDAKEKDAPGKKGSTKRASKPSQNSKNEPEVEIKKVGKREKSSKETDVSPDSNKSNKKISKSKKGDGKETQNNKAARSSNKSKGKVKGGSVAGTAPTTEQLHAVVSGILKEVDFNTATLADILRQLGTHFEMDLMDRKAEVKRIIEDVINSMSDDEGEEGSEDEAEDDGKADNLKSEPDGGEEK

SEQ ID NO: 172247 - protein, 507 aa, Zea Mays
MEEDSIKGMISAISWVPRGAAKSVPVVADPPTQEEIAEAMKTFDLGRDSGSDADEDDDAATMELDGAAETVEEVDEAARAKAVAKALCKGSSKADDVADELRELNMDAYDDEDEEVDIFGSGLGDLYYPSNAMDPYLKKNNEDDEEDDDDDEEIEDKMIMPTDFVIVCAHSEDDIFSLQVNILEETNDGEQNIFVHHDVPLADFPLCTAWMDFNLKGGEKGNFVAVGTMDPAIEIWDLDMVDEVQPHMVLGGLSKKKKKTKGKKGKKYKKGSHRSSVLGLAWNKEVRNVLASASADTTVKIWDIAVGKCAVTLEHHDDKVQAVAWSPQSPEVLLSGSFDKTVAMNDMKDGGQNCHKWSVEADVESLAWNPHNEHSFVVSLENGMVQAFDKRTASSSSSGQSMYTLHAHDKAVSSISFNPSAPNFLATGSVDKMVKLWDLSNDKPSCIASQNPKLPLLVSMWRFKRQTEGLGHAYGACSSQQVQQIELPLFAIISYFPAHTCLGRLKL

SEQ ID NO: 172248 - protein, 635 aa, Zea Mays
MAITTSIGTLVIALLIGYIVHATAKRIARVEDDFQEMSLLKKRAEDADIAKSQFLATVSHEIRTPMNGVLGMLQMLMDTDLDTTQQDYVRTAQASGKTLVSLINEVLDQAKIESGKLELEVVPFDLRTVCDDILSLFCGKAQEKGLELAVFVSDQVPQTLIGDPGRIRQIITNLVGNSIKFTEKGHIYLTVHVVEEIMHCLEVETGTQYTNTLSGYPVANRKRSWENFRLFSRELNSSEMPFAPIASDSISLMISVEDTGAGIPFDAQSRVFTPFMQVGPSIARIHGGTGIGLSISKCLVGLMKGEIGFSSKPQVGSTFTFTAVLTRVHSSRNENKSSEFKEINALVVDHRPVRAKVTKYHLQRLGVQTELTTDLDQYISKNNCGSQIAKLVLIDKETWLKESHSMPLLVTKLRNKDQPDSTKLFLLENPKSSVKSNSHIFREYNLNVIMKPLRASMLQVSLQRALGGIDKLHCRNGVVGNSTLGSLLHKKRIIVVDDNIVNLKVAAGALKKYGAEVTCADSGKEAITLLKPPHNFDACFMDIQMPEMDGFEATKRIRVMERDLNEQIERGEAPPECVGVRQWRTPILAMTADVIQATHEQCLKSEMDGYVSKPFEGEQLYREVARFFLNQDQVQ

SEQ ID NO: 172249 - protein, 771 aa, Zea Mays
MDDRDNVLRARESGKGVLTAPFKLLNNRLGVIFTYAVYKYELPANARPQERIQAAIGYLGGIFDIEALVDKLLHQLAGKQSIMVNVYDTTNERPISMYGSNDTGSGMCQVSTLNFGDPSRKHVMHCRFIQSPPWPWMAITTSIGTLVIALLIGYIVHATAKRIARVEDDFQEMSLLKKRAEDADIAKSQFLATVSHEIRTPMNGVLGMLQMLMDTDLDTTQQDYVRTAQASGKTLVSLINEVLDQAKIESGKLELEVVPFDLRTVCDDILSLFCGKAQEKGLELAVFVSDQVPQTLIGDPGRIRQIITNLVGNSIKFTEKGHIYLTVHVVEEIMHCLEVETGTQYTNTLSGYPVANRKRSWENFRLFSRELNSSEMPFAPIASDSISLMISVEDTGAGIPFDAQSRVFTPFMQVGPSIARIHGGTGIGLSISKCLVGLMKGEIGFSSKPQVGSTFTFTAVLTRVHSSRNENKSSEFKEINALVVDHRPVRAKVTKYHLQRLGVQTELTTDLDQYISKNNCGSQIAKLVLIDKETWLKESHSMPLLVTKLRNKDQPDSTKLFLLENPKSSVKSNSHIFREYNLNVIMKPLRASMLQVSLQRALGGIDKLHCRNGVVGNSTLGSLLHKKRIIVVDDNIVNLKVAAGALKKYGAEVTCADSGKEAITLLKPPHNFDACFMDIQMPEMDGFEATKRIRVMERDLNEQIERGEAPPECVGVRQWRTPILAMTADVIQATHEQCLKSEMDGYVSKPFEGEQLYREVARFFLNQDQVQ

SEQ ID NO: 172250 - protein, 152 aa, Zea Mays
MALGAGLGAFGASSSSGMVPELSRRTSASALLHAASTPGISGSELAAYLDSDTVQKFDDEFNLLDWWHDHKLTYPVLSILAKDIISVPVSTVSSESAFSLAGRLIEERRRRLGSGMVEMLSLLKDWEAADARMQHTTEDKILEESFRDLFID

SEQ ID NO: 172251 - protein, 119 aa, Zea Mays
MSYVSLYLLGLSKTDERKKHKQGIHVSILKLIAFLHFQYVTYNLLVRAILVDWWLAYGGRTIELYKFARRIVSLCASSSGCERNWSTFKFVNELVKLFNFYSPLLFYPQFFFGYFYLYL

SEQ ID NO: 172252 - protein, 457 aa, Zea Mays
MAEDHLSSAPSAPSAAAAAAAAAVGSSVIPIVNKLQDIFAQLGSSSTIDLPQVAVVGSQSSGKSSVLEALVGRDFLPRGSDICTRRPLVLQLVHQPRRPADAEADEWGEFLHLSGRRFYDFREIRREIQAETDREAGGNKGVSDRQIRLKIFSPNVLNITLVDLPGITKVPVGDQPTDIEARIRTMIMSYIRHKTCIILAVSPANADLANSDALQMARVADPDGSRTIGVITKLDIMDRGTDARNFLLGNVIPLKLGYVGVVNRSQQDINSDLSIKDALAREEKFFRTQPAYHGIAQYCGIPQLAKKLNQILVQHIKTVLPGLKSRISSQLTAVAKELAVYGDPVDSKAGQGAKLLNILAKYCEAFSSMVEGKNEDISTIELSGGARIHYIFQSIFVKSLEEVDPCEDVTDEDIRMAIQNATGPRSALFVPESLYVGRSADCLIQVFSVHNSYMMNL

SEQ ID NO: 172253 - protein, 814 aa, Zea Mays
MAEDHLSSAPSAPSAAAAAAAAAVGSSVIPIVNKLQDIFAQLGSSSTIDLPQVAVVGSQSSGKSSVLEALVGRDFLPRGSDICTRRPLVLQLVHQPRRPADAEADEWGEFLHLSGRRFYDFREIRREIQAETDREAGGNKGVSDRQIRLKIFSPNVLNITLVDLPGITKVPVGDQPTDIEARIRTMIMSYIRHKTCIILAVSPANADLANSDALQMARVADPDGSRTIGVITKLDIMDRGTDARNFLLGNVIPLKLGYVGVVNRSQQDINSDLSIKDALAREEKFFRTQPAYHGIAQYCGIPQLAKKLNQILVQHIKTVLPGLKSRISSQLTAVAKELAVYGDPVDSKAGQGAKLLNILAKYCEAFSSMVEGKNEDISTIELSGGARIHYIFQSIFVKSLEEVDPCEDVTDEDIRMAIQNATGPRSALFVPEVPFEVLVRRQISRLLDPSLQCAQFIYDELVKMSHRCLAMELQQFPILRRSMDEVIGKFLRDGLKPAENMIAHIIEMEEDYINTSHPNFIGGSKAVEQAQQQVRSAKMSAAVDGVDAQASEKTQKSRAILGRSGVNGVVTDHIQGVRPAAEAERPGSSGSGSTSFWNQIFTSNEDRTHPPARDNTTNKSYAVPAPNLEHSFSTIQLREPPVVLKPSEHQSEQEALEIAITKLLLKSYYNIVRKNVEDLIPKAVMHFLVNHTKRALHNYLITKLYRDDLLEDLLKEPDEITIKRKQIRENLKVLQQAYKTLDEIPLDAEAVERGGYSLDSDAIGLPRAHGLSSSLHGFNDGSSPYSTPKQSRSRRSNHSGEQLPFNPNMSGNGF

SEQ ID NO: 172254 - protein, 354 aa, Zea Mays
MSHRCLAMELQQFPILRRSMDEVIGKFLRDGLKPAENMIAHIIEMEEDYINTSHPNFIGGSKAVEQAQQQVRSAKMSAAVVRKDGVDAQASEKTQKSRAILGRSGVNGVVTDHIQGVRPAAEAERPGSSGSGSTSFWNQIFTSNEDRTHPPARDNTTNKSYAVPAPNLEHSFSTIQLREPPVVLKPSEHQSEQEALEIAITKLLLKSYYNIVRKNVEDLIPKAVMHFLVNHTKRALHNYLITKLYRDDLLEDLLKEPDEITIKRKQIRENLKVLQQAYKTLDEIPLDAEAVERGGYSLDSDAIGLPRAHGLSSSLHGFNDGSSPYSTPKQSRSRRSNHSGEQLPFNPNMSGNGF

SEQ ID NO: 172255 - protein, 644 aa, Zea Mays
MAEDHLSSAPSAPSAAAAAAAAAVGSSVIPIVNKLQDIFAQLGSSSTIDLPQVAVVGSQSSGKSSVLEALVGRDFLPRGSDICTRRPLVLQLVHQPRRPADAEADEWGEFLHLSGRRFYDFREIRREIQAETDREAGGNKGVSDRQIRLKIFSPNVLNITLVDLPGITKVPVGDQPTDIEARIRTMIMSYIRHKTCIILAVSPANADLANSDALQMARVADPDGSRTIGVITKLDIMDRGTDARNFLLGNVIPLKLGYVGVVNRSQQDINSDLSIKDALAREEKFFRTQPAYHGIAQYCGIPQLAKKLNQILVQHIKTVLPGLKSRISSQLTAVAKELAVYGDPVDSKAGQGAKLLNILAKYCEAFSSMVEGKNEDISTIELSGGARIHYIFQSIFVKSLEEVDPCEDVTDEDIRMAIQNATGPRSALFVPEVPFEVLVRRQISRLLDPSLQCAQFIYDELVKMSHRCLAMELQQFPILRRSMDEVIGKFLRDGLKPAENMIAHIIEMEEDYINTSHPNFIGGSKAVEQAQQQVRSAKMSAAVVRKDGVDAQASEKTQKSRAILGRSGVNGVVTDHIQGVRPAAEAERPGSSGSGSTSFWNQIFTSNEDRTHPPARDNTTNKSYAVPAPNLEHSFSTIQLRESS

SEQ ID NO: 172256 - protein, 394 aa, Zea Mays
MLLLFSLQQASSGGEDACLLSRVENKKPFAPPREVHVQVTHSMPPHKIEIFKSLDDWARDNILTHLKPVEKCWQPQDFLPDPASEGFHDEVKELRERAKEIPDDYFVCLVGDMITEEALPTYQTMLNTLDGVRDETGASPTAWAVWTRAWTAEENRHGDLLNKYMYLTGRVDMRQIEKTIQYLIGSGMDPRTENNPYLGFIYTSFQERATFISHGNTARHAKDFGDLKLAQICGIIASDEKRHETAYTKIVEKLFEIDPDGTVVALADMMRKKISMPAHLMFDGQDDKLFEHFSMVAQRLGVYTARDYADILEFLVDRWKVVNLTGLSGEGNKAQDYLCTLASRIRRLEERAQSRAKKAGTLPFSWVYGRDRPCRSLSVAGGVFRYVISVVQIC

SEQ ID NO: 172257 - protein, 214 aa, Zea Mays
MPPHKIEIFKSLDDWARDNILTHLKPVEKCWQPQDFLPDPASEGFHDEVKELRERAKEIPDDYFVCLVGDMITEEALPTYQTMLNTLDGVRDETGASPTAWAVWTRAWTAEENRHGDLLNKYMYLTGRVDMRQIEKTIQYLIGSGMDPRTENNPYLGFIYTSFQERATFISHGNTARHAKDFGDLKLAQICGIIASDEKRHDEEEDLNACPPDV

SEQ ID NO: 172258 - protein, 134 aa, Zea Mays
MQVNAYPVYGDKGKAKDPFFGLTMGSGSQSSYDIFRWFCVEAGSSSSPKVLLIHGLPSQAYSYRNVMPVLADKYHAIAFDWLGFGFSDKPQPKYGFDYTLDEYTSSLEFLVNAVAPDKLSIVVQSNMLVNTKTN

SEQ ID NO: 172259 - protein, 186 aa, Zea Mays
MPLLLIGSGYFAPVAVKYASEHQDKLNHLVLVNPPITDKHLNLPSTLASFSNFLLGEIFSQDPLRASDKVLTSCGPYMMKEEDAMVYRRPYLVSGSSGFALNAISKAMKKDLKAYIESMRSILRSSSWKTKTTVCWGMRDRWLSYDGVEEFFGGLNQKIVELPMAGHHVQEDRGEELGNIIKSILR

SEQ ID NO: 172260 - protein, 424 aa, Zea Mays
MAGNEWINGYLEAILDSRTSSGGGGGGGGGDPRNPRWLKDTPADAGADEEEFLEDSMDAQDLSLRLSIDGEKSSLNTNDPLSSDPQDQVQKIMNKINQSSALPPSMSSVADGAKNATEATGSTLNKYPLLRRRRRLFVIAVDCYQDDGRASKKMLQVIQEVFRAVRSDSQMSKISGFALSTAMPLSETLQLLQLGKIPATDFDTLICGSGSEVYYPGTVNCVDAEGKLRPDQDYLMHISHRWSHDGAKQTIAKLMATQDGSGDTVELDPASSNAHCFTFLIKDPKKVKTVDEMRERLRMRGLRCHIMYCRNSTRLQVVPLLASRSQALRYLFVRWGLYVGNMYLITGEHGDTDHEEMLSGLHKTVIVRGVTEKGSEGLLRSPGSYKKDDVVPSETPLAAYTTGEMKADEIMRALKQVSKTSSGM

SEQ ID NO: 172261 - protein, 366 aa, Zea Mays
MDDAGRPPPHAPVAVTASASASATAAPAPPQPSATAAVDRSSPDPDALYEEGMWQQMAMDSGATMQPGSYPERPGEPDCTYYLRTGLCRFGMSCRFNHPPDRNLAIASARMKGEYPERAGQPECQYYLKTGTCKFGPTCKFHHPREKAGIAGRVQLNTSGYPLRPNEKECAYYLKTGHCKYANTCKFHHPELFNVVPSSRGSPIYTSVHSSASAGPQSYTGTMPSWAFPRASFIPSPRWQSPSNYAPMIVPQGLVQMQSWNSYTGQLQSPGAQQTYGSSQQGEASTGNQGMLSPYRPSSFPVPQYALQRENVFPERPDEPECQYYMKTGDCKFGAVCKFHHPRVRSLPPPDCVLSPMGLPLRPVSH

SEQ ID NO: 172262 - protein, 397 aa, Zea Mays
MDDAGRPPPHAPVAVTASASASATAAPAPPQPSATAAVDRSSPDPDALYEEGMWQQMAMDSGATMQPGSYPERPGEPDCTYYLRTGLCRFGMSCRFNHPPDRNLAIASARMKGEYPERAGQPECQYYLKTGTCKFGPTCKFHHPREKAGIAGRVQLNTSGYPLRPNEKECAYYLKTGHCKYANTCKFHHPELFNVVPSSRGSPIYTSVHSSASAGPQSYTGTMPSWAFPRASFIPSPRWQSPSNYAPMIVPQGLVQMQSWNSYTGQLQSPGAQQTYGSSQQGEASTGNQGMLSPYRPSSFPVPQYALQRENVFPERPDEPECQYYMKTGDCKFGAVCKFHHPRVRSLPPPDCVLSPMGLPLRPGEELCKFYSRYGICKFGANCKFDHPTVVAPMVYA

SEQ ID NO: 172263 - protein, 371 aa, Zea Mays
MDDAGRPPPHAPVAVTASASASATAAPAPPQPSATAAVDRSSPDPDALYEEGMWQQMAMDSGATMQPGSYPERPGEPDCTYYLRTGLCRFGMSCRFNHPPDRNLAIASARMKGEYPERAGQPECQYYLKTGTCKFGPTCKFHHPREKAGIAGRVQLNTSGYPLRPNEKECAYYLKTGHCKYANTCKFHHPELFNVVPSSRGSPIYTSVHSSASAGPQSYTGTMPSWAFPRASFIPSPRWQSPSNYAPMIVPQGLVQMQSWNSYTGQLQSPGAQQTYGSSQQGEASTGNQGMLSPYRPSSFPVPQYALQRENVFPERPDEPECQYYMKTGDCKFGAVCKFHHPRVRSLPPPDCVLSPMGLPLRPASLLIPGH

SEQ ID NO: 172264 - protein, 208 aa, Zea Mays
MPSWAFPRASFIPSPRWQSPSNYAPMIVPQGLVQMQSWNSYTGQLQSPGAQQTYGSSQQGEASTGNQGMLSPYRPSSFPVPQYALQRENVFPERPDEPECQYYMKTGDCKFGAVCKFHHPRVRSLPPPDCVLSPMGLPLRPGEELCKFYSRYGICKFGANCKFDHPTVVAPMVYAYGFSASASPASASTNVPMARRLLGSPPGSGYTS

SEQ ID NO: 172265 - protein, 187 aa, Zea Mays
MSVLIQTFFPCLFDCVQIVYQGQLQSPGAQQTYGSSQQGEASTGNQGMLSPYRPSSFPVPQYALQRENVFPERPDEPECQYYMKTGDCKFGAVCKFHHPRVRSLPPPDCVLSPMGLPLRPGEELCKFYSRYGICKFGANCKFDHPTVVAPMVYAYGFSASASPASASTNVPMARRLLGSPPGSGYTS

SEQ ID NO: 172266 - protein, 115 aa, Zea Mays
MHSPVPLLLLLLLCTAAAASDGSQPQAPGAARRGMVPVAPAEAELGTMVALALNGTRRRLGGSFQLCAPCTCCGGASGACILAPCCYSINCNIPNRPFGYCSFTPKSCQCVGCNL

SEQ ID NO: 172267 - protein, 939 aa, Zea Mays
MEQLRTIGRELAMGSQGGWGQSKEFLDLVKSIGEARSKAEEDRIIARELEHLKRRLADPDVPRRKMKELLLRLVYAEMLGHDASFGHIHAVKMTHDESLPLKRTGYLAVALFLDERHDLVILVVNTIQKDLRSDNYLVVCAALTAACRLIGEEAIPAVLPQVVELLAHPKEAVRKKAVMALHRFYQRSPSSVSHLVSNFRKRLCDNDPGVMGATLCPLYDLILEEPNSYKDLVIKLLKILAVLGSGDKQASGHMYTVLGDIFRKGDTASNIGNAILYECICCISFIFPNPKMLEAAAETTSKFLKSDSHNLKYMGIDALGRLIKINPDIAEEHQLAVIDCLEDPDDTLKRKTFELLYKMTKSTNVEVIVDRMIEYMINITDHHYKTEIASRCVELAEQFAPSNQWFIQTMNKVFEHAGDLVNIRVAHNLMRLIAEGFGEEDEGADSQLRSSAVDSYLRIVGEPKLPSSFLQIICWVLGEYGTADGKYSASYIIGKLCDVAEAHLTDDTVKAYAISAILKTFAFEITLGRKIDLLPECQTLVDELSASHSTDLQQRAYELQALLGLDKTAVESVMPADASCEDIEVDRSLSFLNSYVQQALENGASPYIPESERSGVISVGSYRSQEQQETSAHTLRFEAYEMPKPSLPLATSQTSMSTPPTDLVPVPEAGYYKEDNQTSMSQPPSDAISGEFGVKLRLDGVQKKWGRPTYSSSTPSSSISSQPTPNGASHSDGGGSSSQPRESSYGSKRQQGTEVSAEKQRLAASLFGSAAAKADRKAQASRKTAKDSPSTEKVATTNVTAQPVKEQVIPAAPPPDLLDLGDEPVSSSPPSADPFSQLEGLLGPASAAPVLSGTPATSTSKAPGLLSIFSDDVPTGVTSVSTDPTLGDVNSMGSRKGAAAVASMKGPSLQDALQKDAAARQVGVTPTVNNPNLFKDLLG

SEQ ID NO: 172268 - protein, 57 aa, Zea Mays
MCVGEKRKLKIPAKMGYGERGSPPKIPGGATLIFDTELIAVNGKTSGGAKAESDSEL

SEQ ID NO: 172269 - protein, 83 aa, Zea Mays
MDNSQSSMHPLDPAFCRPMSSQQHPFLNGVSDAASKVGTFWQDDLQSVVHMDMGQQSQQEMAPTSSNSYNDGSLQTVHMKMEL

SEQ ID NO: 172270 - protein, 134 aa, Zea Mays
MEAQDDCKWRQIPAFGDWNVWDGDMPVTQYFQAGAFFFAAPAEKGDADLFKVPQLPAKPYGYKKCVVRVKGEKETAVPPAARKGRRRRCVSEQHKWKPKGAVDEDLYKISPQLLCKKKLLRNLLGGCLGLGCIA

SEQ ID NO: 172271 - protein, 279 aa, Zea Mays
MAPAFSAQVPALRRGALRVRWVTAALFSSGILAGNKPILVRDFVRSALYDPNHGYFSKRAGPVGVLDASIRFNQLEGRSAYIQHLDKLYKKHDIAWFTPVELFKPWYAYTIAASILRTANLSVPLKIYEIGGGSGTCAKCILDYMMLNAPPKVYNDMKYISVEISSSLAEKQLETVGEVQSHLSKFTVEHRDAINRPGWGRTDPHPCWVLMLEVLDNLPHDLVYSPDQVSPWMEVWIEKVKGRFVTFVFSEPLLCTTTVEDHLCLLSCSLFMWGFQLRH

SEQ ID NO: 172272 - protein, 146 aa, Zea Mays
MDTLHQALPSMSLIASDFSYLPDVSIPGDRAPLVSSKKDGKTSDHRNYFDAQGDADIFFPTDFRLLEQIDHNCAGFSKEQKNPGAFKPVKKRRTIILDTAAFMEEFGMPLKTRTKDGYNPLLDDFKNTKFYLSVPTHNVPTHSRRN

SEQ ID NO: 172273 - protein, 73 aa, Zea Mays
MNGKSNYRLHSTRITKENVQWIQKGIFFAINLFVANTAAAPYSRELHYLLTKKRMVTSNGSNIQLLTMLSAKP

SEQ ID NO: 172274 - protein, 622 aa, Zea Mays
MEASAGSSPPHSQENPPEHGGDMGGAPAEEIGGEAADDFMFAEDTFPSLPDFPCLSSPSSSTFSSNSSSNSSSAYTNTAGRAGGEPSEPASAGEGFDALDDIDQLLDFASLSMPWDSEPFPGVSMMLENAMSAPPQPVGDGMSEEKAVPEGTTGGEEACMDASEGEELPRFFMEWLTSNRENISAEDLRGIRLRRSTIEAAAARLGGGRQGTMQLLKLILTWVQNHHLQRKRPRDVMEEEAGLHVQLPSPVANPPGYEFPAGGQDMAAGGGTSWMPHQQAFTPPAAYGGDAVYPSAAGQQYSFHQGPSTSSVVVNSQPFSPPPVGDMHGANMAWPQQYVPFPPPGASTGSYPMPQPFSPGFGGQYAGAGAGHLSVAPQRMAGVEASATKEARKKRMARQRRLSCLQQQRSQQLSLGQIQASVHLQEPSPRSTHSGPVTPSAGGWGFWSPSSQQQVQNPLSKSNSSRAPPPSLEAAAVAPQTKPAPAGARQDDIHHRLAAASDKRQGAKADKNLRFLLQKVLKQSDVGSLGRIVLPKEAEVHLPELKTRDGISIPMEDIGTSRVWNMRYRFWPNNKSRMYLLENTGEFVRSNELQEGDFIVIYSDVKSGKYVCSSIADYFLAT
